United States Patent Application Publication US 2011/0277190 A1 - sequence listing, part 8

SEQ ID NO: 31945 - protein, 55 aa, Passiflora nitida
WEYQVGPSVGIDAGDHIWCSRYILERITEQAGAVLSLDPKPIEGDWNGAGCHTNY

SEQ ID NO: 31946 - protein, 404 aa, Glycine max
PRVRSYASNEIKLHLEVEINGVDQSRLSECSGESNALVKGIQIDTKQNCCQYDVEVEDSINKKDCGNVGEDIQQHQDIGLDAYTESVYGILDLNSVQKMFLKGMSSFGSTDSDIAEIYQCSGASMQARWELFQKQAELTKKNHGEANIRYAWLASSKGELSTMMNYGLSHYGLSGSKCTYGIGVHLAAVTCPDASVRYCDVDENGVRHLALCRVIMGNMEILQPGTGQFHPSSCEYDNGVDSIECPRYYVVWNMNMNTHIYPEFVVSFKVSSDAEGHFCGSEGKNVSGVNSACQGPHGLLHSESSTVDNGKAPSMVASTPKVPKSPWMPFPLLLDAIRNQVPPKGMDVIKIYYEQFRSKHISRDDFVKMLRLIVGDGLLRTTITNLQFKIPSGGELKGSIKKEV

SEQ ID NO: 31947 - protein, 202 aa, Oryza sativa
  misc_feature (84)..(84): Xaa can be any naturally occurring amino acid
  misc_feature (97)..(97): Xaa can be any naturally occurring amino acid
  misc_feature (110)..(110): Xaa can be any naturally occurring amino acid
  misc_feature (116)..(116): Xaa can be any naturally occurring amino acid
  misc_feature (130)..(130): Xaa can be any naturally occurring amino acid
  misc_feature (134)..(134): Xaa can be any naturally occurring amino acid
  misc_feature (139)..(139): Xaa can be any naturally occurring amino acid
  misc_feature (141)..(142): Xaa can be any naturally occurring amino acid
  misc_feature (156)..(156): Xaa can be any naturally occurring amino acid
  misc_feature (160)..(160): Xaa can be any naturally occurring amino acid
  misc_feature (165)..(165): Xaa can be any naturally occurring amino acid
  misc_feature (168)..(168): Xaa can be any naturally occurring amino acid
  misc_feature (181)..(181): Xaa can be any naturally occurring amino acid
  misc_feature (194)..(194): Xaa can be any naturally occurring amino acid
  unsure (1)..(202): unsure at all Xaa locations
MTDKFVHNKTLTMENLNPRVIDVEYAVRGPIVLRAAEMEKEIQSGKHSFPFERVIRANIGDCHASGNQLPITYIRQFVAGCTYXAIMDSSDFPADIXQRVERLLASAAGXSLGSYXESQGLITIREDIAXYIEXRDGYXAXXSDIYLCNGALDGIXTVIXLLMNXDPXKPSGIMIPVPQYXLYSATLSEYGAYXIEYYLDED

SEQ ID NO: 31948 - protein, 330 aa, Deinococcus radiodurans R1
MTMKQPVRVAVTGAAGQIGYSLLFRIAAGDMLGQDQPVILQLLEITPALKALNGVVMELRDGAFPLLADVITSDDPMVAFKDADYALLVGAMPRKAGMERGDLLGANGGIFKPQGEALGAVASRNVKVLVVGNPANTNALIAQQNAPDLDPKCFTAMVRLDHNRALSQLAEKTGAAVSDIKNVTIWGNHSSTQYPDLSQATVNGKPALEQVDRTWYENDYIPTVAKRGAAIIEARGASSAASAASAAIDHMHDWALGTKDGEWVSMGIPSDGSYGIPEGLIYGFPVRVKDGKYEIVQGLDVSDFSRGKMDATAQELEEERDEVRKLGLVK

SEQ ID NO: 31949 - protein, 640 aa, Vibrio parahaemolyticus RIMD 2210633
MRIELEKATKLDRIRADYNVHYWSQGFYGIDDQGEVYVSPRSDRAHQIPFSAIVNELEAQQLNLPVLVRFPQIVHQRVHGICHAFNQAIEEYQYPNKYLLVYPIKVNQQREVVDEILASQAQLETKQLGLEAGSKPELLAVLALAQQGSSVIVCNGYKDREYVRLALIGEKLGHKVFIVLEKLSELDLVLEEAKSLGVKPRLGLRIRLASQGAGKWQASGGEKSKFGLSASQVLSVIERLKREGSLDAMQLVHFHLGSQMANIRDVRNGVNESARFYCELRALGANIEYFDVGGGLAVDYDGTRSQSSNSMNYGLAEYARNIVNTVGDVCQQYEQPMPVIISESGRSLTAHHAVLISNVIGTETYQPEEVHELGVDAPLLLQNMWRNWENLQDGTDARALIEIYNDTQSDLAEVHSQFATGVLNLEQRAWAEQLSLRIYFELSRKMSTKNRFHRPILDELSERLADKFFVNFSLFQSLPDAWGIDQVFPVLPLSGLGDAEERRAVMLDITCDSDGAIDHYVDGQGIESTLPVPAWSKDKPYLMGFFLVGAYQEILGDMHNLFGDTHSAVVNVDEHGQFEISYINEGDSVEDMMRYVHIDVDAIRDNYKQLVSQRVEANEQAQILAELEQGLAGYTYLEDF

SEQ ID NO: 31950 - protein, 429 aa, Phragmites australis
MAQAVVPAMQCQVGVKAAVRARPAAAGAGGRVWGVRRSGRGTSGFKVMAMGMSTSGVVPRLEQLLNMDTKPYTDNIIAEYIWVGGSGIDVRSKSRTISKPVEDPSELPKWNYDGSSTGQAPGEDSEVILYPQAIFKDPFRGGNNILVICDTYTPAGEPIPTNKRHRAAQIFSDPKVVSQVPWFGIEQEYTLLQTDVNWPLGWPVGGYPGPQGPYYCAVGADKSFGRDISDAHYKPCLYAGINISGTNGEVMPGQWEYQVGPSVGIEAGDHIWISRYILERITEQAGVVLTLDPKPIQGDWNGAGCHTNYSTKSMREDGGFEVIKKAILNLSLRHDLHISAYGEGNERRLTGLHETASIDNFSWGVANRGCSIRVGRDTEAKGKGYLEDRRPASNMDPYVVTSLLAETTILWEPTLEVEALAAKKLALKV

SEQ ID NO: 31951 - protein, 333 aa, Pichia pastoris
MAITVGINGFGRIGRLVLRVALSRADIKVVAINDPFIAPEYAAYMFKYDSTHKAYKGEVSASGNKINIDGKEITVFQERDPVNIPWGKAGVDYVIESTGVFTTLEGAQKHIDAGAKKVVITAPSKDAPMFVVGVNEEKYTSDLNIVSNASCTTNCLAPLAKVVNDTFGIESGLMTTVHSMTATQKTVDGPSHKDWRGGRTASGNIIPSSTGAAKAVGKVIPELNGKLTGLAFRVPTVDVSVVDLTVNLKKETTYEEIKSVIKAASEGKLKGVLGYTEDAVVSSDFLGDERSSIFDASAGIQLTPSFVKLISWYDNEYGYSTRVVDLLQHVAKA

SEQ ID NO: 31952 - protein, 364 aa, Nitrosomonas europaea ATCC 19718
MKATQLLHNLGQSLWLDNITRDLLTNGTLKRYVDELSVTGLTSNPTIFNQAIRNSSAYEAGIRSGLEQSKSSEAIFLDLALEDLTRVADLLKPVYDRTHGVDGWVSLEVSPLLAYDTASTIVAAKEICNRAARPNLLIKIPGTREGLPAIEEAIFAGIPINVTLLFSREQYVDAAEAFLRGIERRIDAGLNPDVMSVASLFVSRWDVAVAGKVPETLRNRLGIAIAGRTYKAARDLFDSPRWLRAYNAGARPQRLLWASTGTKDPAASPVLYVMSLVAPFTVNTMPEATLKALADYDDQSLDYMPDDGGDCEQVLEQFARAGVDIDALAIRLQQEGAKGFVTSWQELMAVIDSKCTALKRGKTD

SEQ ID NO: 31953 - protein, 309 aa, Arabidopsis thaliana
MEITLNSGFKMPIIGLGVWRMEKEELRDLIIDAIKIGYRHLDCAANYKNEAEVGEALTEAFTTGLVKREDLFITTKLWSSDHGHVIEACKDSLKKLQLDYLDLFLVHIPIATKHTGIGTTDSALGDDGVLDIDTTISLETTWHDMEKLVSMGLVRSIGISNYDVFLTRDCLAYSKIKPAVNQIETHPYFQRDSLVKFCQKHGICVTAHTPLGGATANAEWFGTVSCLDDPVLKDVAEKYKQTVAQIVLRWGIQRNTVVIPKTSKPERLEENFQVFDFQLSKEDMEVIKSMERNYRTHQTAKFWGIELYA

SEQ ID NO: 31954 - protein, 623 aa, Xylella fastidiosa Temecula1
MRSPIMSNERTAQQSDIKQLISKGLEQGYLTYAEVNDHLPEDLVDPDQIEDIIGMINGMGIEVHEVAPDAETLLLNEGNTGNREVDDTAAEEAAAALSALDTEAGRTTDPVRMYMREMGTVELLTREGEIAIAKRIEEGLSEVQAALGAFPLSTELLLSEYELHKEGKRRLTEVVVGFNDLIEEDNSVTSSVDVTDESIVEVDEEDDDSVGNDEDAPMIGPDPAEVASRIESLSTEYAKFKKLYAKHGPEHKAVIKVREDVAAIFVTFKLSLPLTDLLVQQLQNMVNSVKDHERKVLHLATNVAKMPRKDFIRSWENNQTNLEWVEDAIKRKQKWSSALRDIKDQITAEQQASIDLEKVNSLTLADIKEINRMMVYGEAKASKAKKEMVEANLRLVISIAKKYTNRGLQFLDLIQEGNIGLMKAVCKFEHRRGFKFSTYATWWIRQAITRSIADQARTIRIPVHMIETINKLNRISRQMLQQFGREATPEELAKEMDMPEDKIRKVMKIAKEPISMETPIGDDEDSHLGDFIEDPNVESPVDTTTNVNLSETVREVLAGLTPREAKVLRMRFGIDMNTDHTLEEVGKQFDVTRERIRQIEAKALRKLRHPSRSEQLRSFLDID

SEQ ID NO: 31955 - protein, 586 aa, Medicago sativa
MCGILAVLGCSDDSQAKRVRILELSRRLKHRGPDWSGLHQHGDNYLAHQRLAIVDPASGDQPLFNEDKSIIVTVNGEIYNHEDLRKQLPNHKFRTQCDCDVIAHLYEEYGENFVDMLDGIFSFVLLDTRDNSFIVARDAIGVTSLYIGWGLDGSVWIASELKGLNDECEHFEVFPPGHLYSSKDREFRRWYNPPWFNEAVIPTTPYDPLVLRNAFEKAVIKRLMTDVPFGVLLSGGLDSSLVAAVTARYLAGTKAAKQWGAKLHSFCVGLKGAPDLKAGREVADFLGTVHHEFQFTIQDGIDAIEDVIYHTETYDVTTIRAATPMFLMSRKIKSSGVKWVISGEGSDEIFGGYLYFHKAPNKEEFHQETCRKIKALHRYDCLRANKSTYAWGLEARVPFLDKEFIKVAMDIDPEYKMIKHEEGRIEKWILRKAFDDEENPYLPKHILYRQKEQFSDGVGYGWIDGIKDHAAKHVTDRMMLNASHIFPFNTPLTKEAYYYRMIFERFFPQNSARLTVPGGASVACSTEKAIEWDASWSSNLDPSGRAAFGVHNSAYENQVNSVAKTVEPEKIIPKMEISNLGVAIQS

SEQ ID NO: 31956 - protein, 282 aa, Glycine max
SARAGGELFERICSAGRFSEDEARYFFQQLISGVSYCHSMQICHRDLKLENTLLDGSPAPRLKICDFGYSKSSLLHSRPKSTVGTPAYIAPEVLSRREYDGKLADVWSCGVTLYVMLVGAYPFEDQDDPKNFRKTINRIMAVQYKIPDYVHISQDCRHLLSRIFVANPARRITIKEIKSHPWFLKNLPRELTEVAQAAYYRKENPTFSLQSIEGIMNIVEEAKTPPPASRSIGGFGWGGEEEEDETKEEEDETKEEAVTEAEEDEYEKRVKEAQASGEFHVS

SEQ ID NO: 31957 - protein, 345 aa, Arabidopsis thaliana
MNIFTRYHLPRVVSGVILPLFLFHLLPYVTCQQESVPTNSIRQTNLSADSIIAIVVLAIFISLGMVSCCLHCIFYREEIGAAGQDVLHSRARRGLEKEVIESFPTFLYSEVKGLKIGKGGVECAICLSEFEDQETLRWMPPCSHTFHANCIDVWLSSWSTCPVCRANLSLKPGESYPYLNMDVETGGVQKLPNERSLTGNSVTTRSRSTGLLSSWRMAEIFVPRSHSTGHSLVQQLGENLDRFTLQLPEEVQRQLVSLNLIRRSHIVLPQAVSSRQGYRSGSVGSERGGFSQGRQTHRRALSMSFSFSFQTASVRSIHDMNDQAQAKDKYFGERSFERLMPEEKV

SEQ ID NO: 31958 - protein, 401 aa, Xylella fastidiosa Temecula1
MTRPDLNERILSLRKLRLAQCRTRTRRTIERRNGVRLEINGSWLVEFCSNDYLGLAQHFEIIAALQDAAARNGIGATASHLICGHHAIHKALEYELAEWLGYPRALLFGSGFTANLAVQQALLTKENDICVQDRLNHASLIDATRLAGCRLRRYPHLDVDGAAHQLKNAPEGAAMLATDGIFSMDGDIAPLRALSLVARTQQALMYVDDAHGIGVTGPQGRGCIAAAWLSVEEVPLQLVTLSKALGGYGAAVLGSATLIQHLAETARPYIYTTALPPAQAAAALTAIRIARRDEWRRQRLQELVERFRENSRRHGLEIMDSETPIQPLQCGDETTTMAMSAALEREGFLVNAIRPPTVPEGKSRLRVTLSALHTTEQIDTLVQALARSRDALATEAAPVKV

SEQ ID NO: 31959 - protein, 297 aa, Candidatus Carsonella ruddii
MNLLNYLYINKKISIDSADLNLIKKYKFNSITSNPTLILKSFLNKTYNLLLNLFFYKNNKKILLDSDIQISLYDKILILIVGNLIPFINDKISIEIPARISFNYNLIIIYSKKIIFLCNKYGINIKKILIKIPGTDSGIKAAKKLKEIGIETNITLIFDINQVKKCLDYGVYIISPFVGRISDSIFCKYDSGVNFVKNIFIYKNNNNYKTKIMAASFRNINQILNLTFCDCLTISPIYFSKLLKFNLKLLFTNNIKKSIKINFLNKHSSKLIINGINIFDKDHKKFINIISTIINNL

SEQ ID NO: 31960 - protein, 577 aa, Treponema denticola ATCC 35405
MMLNRRVIELTKGIKCSILFKALLGVAVSGTYVAQAVLLGKIVGQLYSKEELSVVIQSILYISAIIASRLILIYYNSVYGKKIIGKVKNILRRRIYDKLLKLGPAFLDDERTGKLGSTMVSGVDYLEGYLTLYIPQILVCVIACGAMLIYVFSLHYVLGIISTAALIAVLISPVAFGKILSESSNAHWTAYRNLTAEILDGIQGITTAKTYNAQERLGKLLKEKMRTLFSETMRNLKVNLAEIGISNFASGIGTSFTLAVAALLTSVHIIPASSLLILLFMTNEVFRPANELAAYFHQGFMGITSMGGIFALLDEEEKIKDEGTKTIDIKSADGFEIKYKNIEFAYNRKKNTVFKNLNFTVAKNEKLAVAGESGSGKTTIVNLLLRFYEPTSGSIYINGTDIKDLTLKSLRSLITVVSQETYLFNGTIKENLLHANEDADEEKLIDACKAANIHSFIQSLPDGYNTKVGERGLNFSGGQRQRIAIARAVLKNSPIVVLDEATSSVDTENENEIKQSLNHLLRNRTSITIAHRLNTIENSDRILVLLRGEIVEEGSHKELILKDGYYKKLVEAQQGEN

SEQ ID NO: 31961 - protein, 136 aa, Triticum aestivum
  misc_feature (78)..(78): Xaa can be any naturally occurring amino acid
  misc_feature (98)..(98): Xaa can be any naturally occurring amino acid
  misc_feature (106)..(106): Xaa can be any naturally occurring amino acid
  misc_feature (122)..(122): Xaa can be any naturally occurring amino acid
  misc_feature (128)..(128): Xaa can be any naturally occurring amino acid
  unsure (1)..(136): unsure at all Xaa locations
EYRSIVFKEPRFVEYFRLATPETEYGRMNIGSRPSKRKPSGGIDSLRAIPWIFAWTQTRFHLPVWLGFGAAFKNVLQXKDIRNLHMLQEMYNEWPFFXRVTIDLVXEMVFPKGIPGIAALLXTILLSXGLHPLGEN

SEQ ID NO: 31962 - protein, 508 aa, Zea mays
MNLWTDDNASMMEAFMASADLPTFPWGAPAGGGNSSAAAASPPPPQMPAATAPGFNQDTLQQRLQAMIEGSRETWTYAIFWQSSLDSATGASLLGWGDGYYKGCDEDKRKQKPLTPSAQAEQEHRKRVLRELNSLISGAAAAPDEAVEEEVTDTEWFFLVSMTQSFLNGSGLPGQALFAGQPTWIASGLSSAPCERARQAYNFGLRTMVCFPVGTGVLELGSTDVVFKTAESMAKIRSLFGGGAGGGSWPPVQPQAPSSQQPAAGADHAETDPSMLWLADAPVMDIKDSLSHPSAEISVSKPPPHPPQIHFENGSTSTLTENPSPSVHAPPPPPAPAAPQQRQHQHQNQAHQGPFRRELNFSDFASTPSLAATPPFFKPESGEILSFGADSNARRNPSPVPPAATASLTTAPGSLFSQHTATMTAAAANDAKNNNKRSMEATSRASNTNHHPAATANEGMLSFSSAPTTRPSTGTGAPAKSESDHSDLDASVREVESSRVVAPPPEAE

SEQ ID NO: 31963 - protein, 72 aa, Passiflora oerstedii var. choconiana
GEVMPGQWEYQVGPSVGIDAGDHIWCSRYILERITEQAGVVLTLDPKPIEGDWNGAGCHTNYSTKSMREDGG

SEQ ID NO: 31964 - protein, 358 aa, Brassica napus
  misc_feature (205)..(205): Xaa can be any naturally occurring amino acid
  misc_feature (214)..(214): Xaa can be any naturally occurring amino acid
  unsure (1)..(358): unsure at all Xaa locations
STHASGDKSGTEEMATAPKATTPGPCDFPSTIVRATIVQASTVYNDTPKTIEKAGEFIAQAAADGAQLVVFPEAYIGGYPRGYRFGIGVGVHNEAGRDCFRKYHASAIVVPGPEVDKLAEMARKNKVYLVMGAMEKDGYTLYCTALFFSSEGRFLGKHRKVMPTSLERCIWGYGDGSTIPVYDTPLGKLGAAICWENRMPLYRTXLYGQGIELXFCAPTADGSKEWQSSMMHIAIEGGCFVMSACQFCVRKDFPDHADYLFTDWYPEQHEEAIVSQGGSVIISPLGKILAGPNFESEGLITADLDLGDIARAKLYFDVVGHYSRPDIFNLRVNDNQNKPVTFVSKSVKAEDDSEPQNK

SEQ ID NO: 31965 - protein, 411 aa, Lupinus luteus
MNALAATNRNFKLASRLLRLDSKLEKSLLIPFREIKVECSIPKDDGTLATYVGFRIQHDNARGPMKGGIRYHPEVNTDEVNALAQLMTWKTAVANIPYGGAKGGIGCDPAELSNSELERLTRVFTQKIHDLIGVQIDVPAPDMGTGPQTMAWILDEYSKFHGHSPAVVTGKPIELGGSLGRDAATGRGVLFATETLLNEHGKSISGQRFVIQGFGNVGSWAAQLISEKGGIVVAVSDITGAIKNSKGLDIPSLIKHSKEHKGVKGFHGGDPIDPKSIFSEDCDVLVPAALGGVINRENANDIKAKFIVEAANHPTDPEADEILKKKGVVILPDIFANSGGVTVSYFEWVQNIQGFMWDEEKVNNELKRYMTKGFKDVKEMCKTHDCDLRMGAFTLAVNRVARATVLRGWEA

SEQ ID NO: 31966 - protein, 471 aa, Acinetobacter sp. ADP1
MPRKKEVVSGNFVRYDAVILGSGPAGEGAAMKLAKSGKRVAIVDIREQLGGNCAHVGTIPSKALRQTVSSIIRYQRDPMFQKVGEWKKFTMKQVLSHAHRVIQQQVATHTRFYDRNNIDVFYGRAYIQDQNTVLVFTPEGIKESIIFEQLVIATGSRPYQPQGLDFKHKRVFDSDKILDLDYPIHKIIIYGAGVIGCEYASIFIGLNHKVDLINTQHKLLSYLDDEIADALSYHLREQGVLIRHNEQIDHLETHDDYVVLHLQSGKKIKADAILWCNGRSGNTDGLGLENVGLKPNGRGQLAVNEKYQTEVENIYAAGDVVGWPSLASAAYDQGRCAGANMSGEENVKPVTDIPTGIYTIPEISCFGKTEQQLTEEKIPYEVGQSSFRHLARAQITGDTVGELKILFHRDTLEILGIHCFGNNASEIIHIGQAVMQSPNNSLKYFMETTFNYPTMAEAYRVAALNGLNRLF

SEQ ID NO: 31967 - protein, 381 aa, Yarrowia lipolytica CLIB122
MQIFVKTLTGKTITLEVESSDTIDNVKSKIQDKEGIPPDQQRLIFAGKQLEDGRTLSDYNIQKESTLHLVLRLRGGMQIFVKTLTGKTITLEVESSDTIDNVKSKIQDKEGIPPDQQRLIFAGKQLEDGRTLSDYNIQKESTLHLVLRLRGGMQIFVKTLTGKTITLEVESSDTIDNVKSKIQDKEGIPPDQQRLIFAGKQLEDGRTLSDYNIQKESTLHLVLRLRGGMQIFVKTLTGKTITLEVESSDTIDNVKSKIQDKEGIPPDQQRLIFAGKQLEDGRTLSDYNIQKESTLHLVLRLRGGMQIFVKTLTGKTITLEVESSDTIDNVKSKIQDKEGIPPDQQRLIFAGKQLEDGRTLSDYNIQKESTLHLVLRLRGGQ

SEQ ID NO: 31968 - protein, 336 aa, Thermotoga maritima MSB8
MAVIYYDKDADLNLIKDKKIAIIGYGSQGHAHALNLKDSGLNVVVGLREGSKSWKKAEEQGLTVKTIEEAAKEADIIMILIPDEHQPEIYKKYIEKHLTEGKMLMFAHGFNIHYHQIIPPKNVDVTMIAPKSPGHIVRREYVEGRGVPALVAVYQDYTGKAKDIALAYAKGIGVTRAGVIETTFKEETETDLFGEQAVLCGGVTALIKAGFETLVDAGYQPEIAYFECLNELKLIVDLIYEGGLSFMRYSVSNTAEYGDYISQEKIVTKEVRENMKQMLKDIQTGKFAKDWILENQAGRPYFYTMRKKESEHLIEKVGKELRKMMPWLKERNVDEE

SEQ ID NO: 31969 - protein, 56 aa, Passiflora penduliflora
  misc_feature (40)..(40): Xaa can be any naturally occurring amino acid
  misc_feature (52)..(52): Xaa can be any naturally occurring amino acid
  unsure (1)..(56): unsure at all Xaa locations
WEYQVGPSVGIDAGDHIWCSRYILERITEQVGVVLTLDPXPIEGDWNGAGCXTIYG

SEQ ID NO: 31970 - protein, 238 aa, Petunia x hybrida
MGRGKIVIQRIDNTTSRQVTFSKRRSGLLKKAKELSILCDAQVGLIIFSSTGKLYEFASNSMRSVIERYYKMKEEHHLMSPMSEVKYWQREVASLRQQLHYLQENHRQLLGEKLSGLGIKDLTHLENKLEMSLKGVRKQKEQILTDEIKEITRKGNLIHQENIELYKKVNLIRQENTDLQKKVYEKGCGSEPNEGVQATFAISNGYDLHAPIYLQLRPPQTQKNQTSTSVMQFGLQLH

SEQ ID NO: 31971 - protein, 572 aa, Yarrowia lipolytica CLIB122
MANTPHGGVLKDLLSRDQPIRGELLKESETLASILLSERQLCDLELILSGGFSPLEGFMNEKDYNGVVNDLRLADGALFSMPITLDVSQEDIDELKLKAGGRYTLRDFRDDSPLAIITVDDIYRPDKAVEAKKVFRGDPEHPAVKYLYNTAKEFYVGGKIQAINKLNHYDYVGLRYTPAELRQEFGKLGWNKVVAFQTRNPMHRAHRELTVRAARSRQANVLIHPVVGLTKPGDIDHFTRVRVYQALLPRYPNGMALLGLLPLAMRMGGDREAMWHAIIRKNYGATHFIVGRDHAGPGKNSKGEEFYGPYDAQKLVEKYKDELGIEVVPFQMMTYLPDSDEYMPKDEVPEGTKTLDISGTELRKRLKFGLPIPEWFSYPEVVKVLRESHPPRAKQGFTIFLTGHYNSGKDAIARALQVSLNQQAGRTTTLLLGETVRSELSAELGFSREDRHKNVQRIAFVAAELTRAGSAVIAAPIAPHEAGRKEARETVEQGGNFFLVHVNTPLEYCEATDRKGRFAAAKRGEIKGFTGVDDEYEVPSNADLVVDASQTQVRTIVHQIILLLESQGFFGN

SEQ ID NO: 31972 - protein, 314 aa, Triticum aestivum
HASPTRRPNMQIFVKTLTGKTITLDVEPSDSIETVKGKIQDKEGIPPDQQRLIFAGKQLEDGRSLSDYNIQKESTLHLVLRLRGGMQIFVKTLTGKTITLDVEPSDSIETVKGKIQDKEGIPPDQQRLIFAGKQLEDGRSLSDYNIQKESTLHLVLRLRGGMQIFVKTLTGKTITLDVEPSDSIETVKGKIQDKEGIPPDQQRLIFAGKQLEDGRSLSDYNIQKESTLHLVLRLRGGMQIFVKTLTGKTITLDVEPSDSIETVKGKIQDKEGIPPDQQRLIFAGKQLEDGRSLSDYNIQKESTLHLVLRLRGGN

SEQ ID NO: 31973 - protein, 307 aa, Oryza sativa (japonica cultivar-group)
MLVVTKPGQLPVEFLEPSAAQKLVIGFDCEGVDLCRHGALCIMQIAFPDAVYLVDAIEGGKELIEACKPALESEYVTKVIHDCKRDSEALYFQFGIKLHNVMDTQIAYSLLEEQEGKKRGYDEYISFVSLLADPRYCGMAYPEKEEVRTLLRQDPNFWTHRPLSEMMIRAATDDVRFLLSIHEKMMEKLSKVSLWRLSVRSELYCRCFCINDNKYADWPPLPTVPDEIEPDVYVPEVDILSVLDVPPGKMGRVIGRKGSSIMEVKASCNVEIHIGGAKGPPDRVFIIGPVQEVRKAEAILRGRMLEF

SEQ ID NO: 31974 - protein, 332 aa, Streptomyces coelicolor A3(2)
MAELFYDADADLSIIQGRKVAVIGYGSQGHAHALSLRDSGVDVRVGLHEGSKSKAKAEEQGLRVVPVAEAAAEADVIMILVPDPIQAEVYEKDIKDNLKDGDALFFGHGLNIRYGFVKPPAGVDVCMVAPKGPGHLVRRQYEEGRGVPCLVAVEQDATGNAFALALSYAKGIGGTRAGVIRTTFTEETETDLFGEQAVLAGGVTALVKAGFETLTEAGYQPEIAYFECLHELKLIVDLMYEGGLEKMRWSISETAEWGDYVTGPRIITDVTKAEMRKVLAEIQDGTFAKNWMDEYHGGLKKYNEYKKQDSEHLLETTGKELRKLMSWVDEEA

SEQ ID NO: 31975 - protein, 57 aa, Passiflora pittieri
WEYQVGPSVGIEAGDHIWCSRYILERITEQAGVVLTLDPKPIEGDWNGAGCHTNYST

SEQ ID NO: 31976 - protein, 337 aa, Ajellomyces capsulatus
MVVKVGINGFGRIGRIVFRNAIEHGEVDVVAVNDPFIETHYAAYMLKYDSTHGQFKGTIEVNSNGLTVNGKAVTFYQERDPANIPWGKHGVEYVVESTGVFTTTEKASAHLKGGAKKVIISAPSADAPMFVMGVNEKTYDPSVNVLSNASCTTNCLAPLAKVINDNFGLTEGLMTTIHSYTATQKTVDGPSSKDWRGGRTAAQNIIPSSTGAAKAVGKVIPSLNGKLTGMSMRVPTANVSVVDLTCKTEKPVTYDQIKQTIKKASEGELKGILGYSEDALVSSDLNGDSRSSIFDASAGIALNDHFIKLISWYDNEWGYSRRVVDLIAYIAKVDAGK

SEQ ID NO: 31977 - protein, 324 aa, Oryza sativa
MELPADGSALARQGSIYSLTFDEFQSALGSAEKDFGSMNMDELLRNIWTAEESQAIAPAAAAASAAAVVGDAQQQQQPIQRQGSLTLPRTLSQKTVDEVWRDIMGLGGGDDEDPAAAAAAAAPAQRQPTLGEMTLEEFLVRAGVVREDMGQTIVLPPQAQALFPGSNVVAPAMQLANGMLPGVVGVAPGAAAAMTVAAPATPVVLNGLGKVEGGDLSSLSPVPYPFDTALRVRKGPTVEKVVERRQRRMIKNRESAARSRARKQAYIMELEAEVAKLKEQKAELQKKQVEMIQKQNDEVMERITQQLGPKAKRFCLRRTLTGPC

SEQ ID NO: 31978 - protein, 202 aa, Bacillus halodurans C-125
MGTSNQPHIVWHEASVSKEERQKRNRLKSCVVWFTGLSGSGKSTLANALDRKLFEEGIHSYVLDGDNIRHGLNAGLGFSEEDRKENIRRIGEVAKLFVDAGVVTSTAFISPFREDRDNVRGILDDGEFIEVYVRCPLETCEKRDPKGLYKKARSGDIPEFTGISSPYEEPVNPELIIDTDQLAVEEAVEKIYAYLHAQESGK

SEQ ID NO: 31979 - protein, 337 aa, Ajellomyces capsulatus
MVVKVGINGFGRIGRIVFRNAIEHGEVNVVAVNDPFIETHYAAYMLKYDSTHGQFKGTIDVNSNGLTVNGKAVTFYQERDPASIPWGKHGVEYVVESTGVFTTTEKASAHLKGGAKKVIISAPSADAPMFVMGVNEKTYDPSVNVLSNASCTTNCLAPLAKVINDNFGLTEGLMTTIHSYTATQKTVDGPSSKDWRGGRTAAQNIIPSSTGAAKAVGKVIPSLNGKLTGMSMRVPTANVSVVDLTCKTEKPVTYDQIKQTIKKASEGELKGILGYSEDALVSSDLNGDSRSSIFDASAGIALNDHFIKLISWYDNEWGYSRRVVDLIAYIAKVDAGK

SEQ ID NO: 31980 - protein, 431 aa, Gluconobacter oxydans 621H
MSENRSATFGLDGLSRQFPVLEGTIGPDVVDMRALSQKTGVFSFDPGLGSTATCTSAISYIDGDKGVLLHRGYPIEDLALNASFTETAYLLLYGELPTAAQYQAFRTDMNTHRLLNEQIRNFFNGFRRDAHPMAILCGTVGALSAFYHDGLDISEPKARDLSARRLIAKVPTIAAWAYKYSIGEPFIYPDEEMSFSENFLHMLFARPGNHYRVNPVLARAMDRILLLHADHEQNASTTTVRLVGSTGANPYACIAAGIAALWGPAHGGANEAALGMLETIGTRDGIPAFLNEVKNRNSGVRLMGFGHRVYKNFDPRAKILQATCHEVIEELGLKRDPLLDLAMELERVATEDDYFVSRRLYPNVDFYSGLILKALGIPKSMFTVLFAVARTVGWVSQWKEMIEEPSVRISRPRQLYIGAAERNFVPMSERR

SEQ ID NO: 31981 - protein, 392 aa, Deinococcus radiodurans R1
MTATEDRVSALRPQLEAWRRHLHMHPELSFQEFETARYIVGELNKLPGLEVSQLTPTSVLAVLRGGQPGRTVLLRADIDALPIQEENSFEFVSQNPGVMHACGHDGHTAILLGTAQLLAEDAANVPGEIRMIFQHAEENGPGGAEELVMNTPLMDGVDVVTGLHLDSQLPAGQVVVKAGAFMAAPDMIELTIRGKGGHGAHPDETVDPIAIGAQVVTNLQHVVSRNVSAQDALVVSITYFQSGSTHNVIPDTARLMGTVRTFDPDLRRKAPQLIERVIKGVCEAHGATYDLKYELGYRPVINTEWVAEELRQIALNTVGAEHFAEAKATMGGEDFSAYLEKAPGAYFNVGSGSDEHDSRWPHHHPRFTIDELSLETGVKMMHAAALKLAQPQ

SEQ ID NO: 31982 - protein, 338 aa, Kluyveromyces lactis NRRL Y-1140
MAKFLINSQLIGAGFFVTLLIEVIDKGHGFASGAMAIIAISLSTGLVDDLFGVQQIPVGQEGHREPRGAVINLLQGFRAKHKTFLGALVNAFQRDYLPNLTSGLLVIVLGGTVCYLQNIRTELSIRSTKARGMSNVYPIRLLYTGGLSLLFSYSILFYIHILGFVIIQLIGGNQEGSIINKVLGGYESTEFFYLARFPLSLLTPPTSFFAVFKQPLTVVTFSAFLIVTGVWFATNWQEISGSSSRDVSKQFKEQDVALAGHRDASKELIRIIPVASATGAATLAVLVAVGELLGLKGKGAGIVVAVCSAFAILEVVTVDFQQTGGQSSIAQMLGGRAA

SEQ ID NO: 31983 - protein, 603 aa, Arabidopsis thaliana
MDTKIGAIDTCKPTTGDIGSPPSNAVATIQDSAPITTTSESTLGRHLSRRLVQAGVTDVFSVPGDFNLTLLDHLIAEPELNNIGCCNELNAGYAADGYARSRGVGACVVTFTVGGLSVLNAIAGAYSENLPVICIVGGPNSNDFGTNRILHHTIGLPDFSQELRCFQTVTCYQAVVNNLEDAHEQIDKAIATALKESKPVYISISCNLAATPHPTFARDPVPFDLTPRMSNTMGLEAAVEATLEFLNKAVKPVMVGGPKLRVAKASEAFLELADASGYPLAVMPSTKGLVPENHPHFIGTYWGAVSTPFCSEIVESADAYIFAGPIFNDYSSVGYSLLLKKEKAIIVHPDRVVVANGPTFGCVLMSDFFRELAKRVKRNETAYENYERIFVPEGKPLKCKPGEPLRVNAMFQHIQKMLSSETAVIAETGDSWFNCQKLKLPKGCGYEFQMQYGSIGWSVGATLGYAQATPEKRVLSFIGDGSFQVTAQDISTMIRNGQKAIIFLINNGGYTIEVEIHDGPYNVIKNWNYTGLVDAIHNGEGKCWTTKVRYEEELVEAIKTATTEKKDSLCFIEVIVHKDDTSKELLEWGSRVSAANGRPPNPQ

SEQ ID NO: 31984 - protein, 536 aa, Triticum aestivum
  misc_feature (29)..(29): Xaa can be any naturally occurring amino acid
  unsure (1)..(536): unsure at all Xaa locations
DAPADVVAENPVPGAAGRRGRKPRRVEVXAPAVEDASTPQRGDSKHLVNGGDAAMAELGPAGWEEVLRVVPSMDAVVKVFCVHTDPNFSLPWQRKRQYSSSISGFIIGGRRVLTNAHSVEHFTHVKLKKRGSDTKYLATVLAIRTECDIALLTVSDDEFWEGVTPVEFGSLPALQDAVTVVGYPIGGDTISVTSGVVSRIEILSYVHGSTELLGLQIDAAINSGNSGGPAFNDRGICVGIAFQSLKHEDVENIGYVIPTPVIKHFIQDYEKSGAYTGFPIIGIEWQKMENPDLRKAMGMKPDQKGVRVRRVEPTAPESGCLQPSDIILSFDGVDIANDGTVPFRHGERIGFSYLVSQKYTGDKALIKVLRNSKVHEFKIKLATHKRLIAAHVKGRPPSYYIVAGFVFAAVSVPYLRSEYGKDYEYDAPVKLLVKHLHSMAESPDEQLVVVSQVLVADINIGYEDIVNTQVLAVNGHPVKNLKDLVTTVENCKDEFLKFDLEYDQIVVLETKTAKAATEDILTTHCIPSAMSDDLKA

SEQ ID NO: 31985 - protein, 297 aa, Candidatus Carsonella ruddii
MNIINYLYNNKKISIDSADLNLIKNFKFNSITSNPTLILKSFLNKTYNKILNLFFIKNNKKKIIDSDKEISLYDKILIFIVGNLIPYINDKISIEIPSRISFNYNLIIIYSKKIIYLCEKYGINKSFILIKIPGTDSGIKAAKKLKEIGIEVNITLIFDINQVKKCFDYGIYLISPFVGRISDNIFCKYDSGVNFVKNIFIYKNNNNYKTKIMAASFRNINQIINLRFCDCLTISPIYFNKLSKYNLKILLNNNFNNLVKFNFYNKHSSKLIIEGLKSFDKDHKRLINLLSTIINNL

SEQ ID NO: 31986 - protein, 76 aa, Brassica napus
CGIFLFFNPLENFQNLLQRIRLNNFVCSSLIGLKNIFARQLPNMPKEYIVCFLMDMKHKSVMVVRPPAAGGSGITH

SEQ ID NO: 31987 - protein, 297 aa, Candidatus Carsonella ruddii
MNLLNYLYKNKKISIDSADLNLIKNYKFNSITSNPTLILKSFLNKTYNLLLNFFFYKNNKKILLDSDIQISLYDKILIFIVGNLIPFINDKISIEIPARISFNYNLIIIYSKKIIFLCNKYGININKVLIKIPGTDSGIKAAKKLKEIGIETNITLIFDINQVKKCLDFGVYIISPFIGRISDSIYCKYDSGVNFVKNIYTYKNNNNYKIKIMAASFRNINQIINLTFCDCLTISPIYFLELLKFNLKLLFKNKIKKTLKINFFNKYSSKLIIEGIKSFDKDHKKLINIISTIINNL

SEQ ID NO: 31988 - protein, 151 aa, Glycine max
MFKFYDPKTPIYTSPRFLRGTKIDKCRIVDAIISHGCFLRECTVQHSIVGERSRLDYGVELQDTVMMGADYYQTESEIASLLAEGKVPIGIGRNTKIRNCIIDKNAKIGKDVIIMNKDGVQEADRPEDGFYIRSGITVILEKATIEDGTVI

SEQ ID NO: 31989 - protein, 368 aa, Arabidopsis thaliana
MDRLKLYFSVFVLSFFIVSVSSSDVNDGDDLVIRQVVGGAEPQVLTSEDHFSLFKRKFGKVYASNEEHDYRFSVFKANLRRARRHQKLDPSATHGVTQFSDLTRSEFRKKHLGVRSGFKLPKDANKAPILPTENLPEDFDWRDHGAVTPVKNQGSCGSCWSFSATGALEGANFLATGKLVSLSEQQLVDCDHECDPEEADSCDSGCNGGLMNSAFEHTLKTGGLMKEEDYPYTGKDGKTCKLDKSKIVASVSNFSVISIDEEQIAANLVKNGPLAVAINAGYMQTYIGGVSCPYICTRRLNHGVLLVGYGAAGYAPARFKEKPYWIIKNSWGETWGENGFYKICKGRNICGVDSMVSTVAATVSTTAH

SEQ ID NO: 31990 - protein, 101 aa, Lawsonia intracellularis
MNLKPLNDRVLVKRLESEEKTAGGLYIPDTAKEKPSRGEVVAVGPGKHTDDGKLIPMAVKAGDTVLFNKYAGTEVKLDGVEHLVMREDDILAVITGETGRK

SEQ ID NO: 31991 - protein, 344 aa, Xanthomonas oryzae pv. oryzae KACC10331
MAQTMKALVKRETNKGIWLEQVPVPTPGPNEVLIKLEKTAICGTDLHIYLWDEWSQRTIKPGLTIGHEFVGRVAELGSAVTGYQVGQRVSAEGHIVCGHCRNCRGGRPHLCPNTMGIGVNVNGAFAEYMVMPASNLWPIPDQIPSELAAFFDPYGNAAHCALEFDVIGEDVLITGAGPIGIIAAGICKHIGARNVVVTDVNDFRLKLAADMGATRVVNVSKTSLKDVMADLHMEGFDVGLEMSGNPRAFNDMLDCMYHGGKIAMLGIMPRGAGCDWDKIIFKGLTVQGIYGRKMYETWYKMTQLVLSGFPLHKVLTHQLPIDDFQKGFDLMEAGKAGKVVLSWN

SEQ ID NO: 31992 - protein, 548 aa, Lawsonia intracellularis
MASKEILFDAKAREKLSRGVDKLANAVKVTLGPKGRNVVIEKSFGSPVITKDGVSVAKEIELEDKFENMGAQMVKEVAPKTSDIAGDGTTTATVLAQAIYREGVKLVAAGRNPMAIKRGIDKAVVAVTKELSDITKPTRDQKEIAQVGTISANSDTTIGNIIAEAMAKVGKGGVITVEEAKGLETTLDVVEGMKFDRGYLSPYFVTNPEKMVCELDNPYILCNEKKITSMKDMLPILEQVAKVNRPLLIIAEDVEGEALATLVVNKLRGALQVVAVKAPGFGERRKAMLEDIAILTGGEAIFEDRGIKLENVSLSSLGTAKRVVIDKENTTIVDGAGKSEDIKARVKQIRAQIEETSSDYDREKLQERLAKLVGGVAVIHVGAATETEMKEKKDRVEDALNATRAAVEEGIVPGGGTAFVRSIKVLDDIKPADDDELAGLNIIRRSLEEPLRQIAANAGYEGSIVVEKVREPKDGFGFNAASGEYEDLIKAGVIDPKKVTRIALQNAASVASLLLTTECAIAEKPEPKKDMPMPGGGMGGMGGMDGMY

SEQ ID NO: 31993 - protein, 161 aa, Nostoc punctiforme PCC 73102
MSNTISDIAVKTINGEDKQLKDYTGKVLLIVNVASYCGYTSQYEGLEKLNQKYREQGLRILGFPCNDFGAQEPGSNEEIVQFCTSKYSVTFELFDKIHAKGPQQHPLYERLTKAVEPTGTIAWNFEKFLVNKKGEVTARFNSSVQPNSPELIAIIEKELAK

SEQ ID NO: 31994 - protein, 486 aa, Nostoc punctiforme PCC 73102
MNKHIRPWQRLLALAIGSMVFAVFAPTIVQATDPPTVQSLSETTTKLQISIDTIWVLITGFLVFFMQTGFAMLEAGLNRQRGVVNALLENFINAAVTILVWWGIGFGIAFGTSAGGLVGIDTFFLSQLPGADGSYILAAPGSTAAINTYTLFFFQFAFAATATTIATGSMAGRTDFIGDLIYSAIMGAIAYPIVVHWVWNSDGWLSKLSYHDFAGSSVVHTVGGWTALVGAYLLGSRPGRPAWGTLPPAHNLGLATLGTMILWFGWYGFNPGSTLSTGNTGLIGLVTVNTTLSAGAGALSAIIFQYTRKGKWDLVYSLNGSLAGLVAITAPCAYVAPWASVLIGLTSGILVTVGMDLIESVHIDDPVGAFAVHGINGMMGTLSVGFLGQAELTLNQKAGLFLGGGFELLGIQLLGVVAIAVFTVAFSFLMFGGLKAVGHLRVNSEADRIGIDAYEHGASVWSDVYAIEKKEINCAETTEIEALDSE

SEQ ID NO: 31995 - protein, 219 aa, Prunus persica
FIGSWLVMRLLERGYTVRATVRDPTNQKKVKHLLELPKAETHLTLWKADLADEGSFDEAIQGCTGVFHVATPMDFESKDPENEVIKPTINGVLDILKACLKAKTVRRLVFTSSAGTVNVEEHQKSYYDETDWSDVEFCRSVKMTGWMYFASKTLAEQAAWKFAKENNIDFITIIPTLVIGPFLMPSMPPSLITGLSPLTGNTSHYSIIKRGQYVHLDDL

SEQ ID NO: 31996 - protein, 773 aa, Alkaliphilus metalliredigenes QYMF
MDDMKKEEVNTNYKNVLEDLMDIILIVDKNGKIVYGNKRAVETYGYTYEELVNLSVFDLRNQDIEEPVQEQLKQALLRGIEFKTYHYKKNGTKFPVEVRSRYSGEQSKGNVVSIIRDISHIDKIAKDAEMFSVSLDILDDAIVTFTKDLKVSLWSKAAEEKLGYTKEEIVGQNIKILVPNEKIKEFENEIFEVRKGNVVERLETIRLHKNGNAIDVSISVSPFYDPDGVLIGVLGVYKDISQRKELAKQLKRNEERWRYALEGGRFGIWDWDIENNKIFSADLWKEILGYNEGELNDTYEDWMSKVHPEDFPYVKDKLNKHSRGEKYIDEFRMKCKDNTYKYLRAKGQIIEWREDGNPLRMMGTLEDITDRKIIEEELKEKYKQLELLKEEAENANKAKSQFLANMSHEIRTPMNGIFGVVQLLESTDVGAEQNKYINMLKESTHTLAGIINDILDISKIESGTFKLNNEPFNLTEMISSIYHGLLVDGNAKGLEVGYYLDPNINPQVIGDELKLKQILTNLISNAVKYTEQGFVSFRVNRISFDEHTEKIQFNVKDSGIGIKDGFKEKIFEDFSQEDSSTRKKYQGTGLGLAISKNLALLMQGDISFESKLGEGSIFTFTCELQKSRTEDVNTKNHDIVKEKVEYSNQNSNKVILCVEDNIMNQEVMESIVTKKGYQYLAAYNAKEALDILENKKVHLILMDIQLPDLNGFEITKSIRMAKGPMKDVPIIAVTAYVDHKIENKCIQAGINDYMPKPLDLEKLYEMLESYLEG

SEQ ID NO: 31997 - protein, 460 aa, Rhodobacter capsulatus
MFDSLSSIRFADLVVQVKPAVVMITTSTTVSEPAGRMPGFPPGSPFEEFFKEFGMPNMPQGGPQRQHHADALGSGFVISADGYIVTNNHVIKGEDGNTVADEISIEFANGKKLDAKIVGTDPKTDIALLKVESKEPLPFVSFGDSDTMREGDWVMAMGNPLGQGFSTSVGIVSARNRELSGTYDDCIQTDAAINRGNSGGPLFSMDGKVIGVNTAILSPNGGSIGIGFSMASNVVSKVAGQLQEFGATRRGWLGVKIQDLTPDMAEAMSLATPEGAMVSEVPEGPAKVAGMKSGDVIISFAGAPVKDTKSLTRRVADAPVGQAVDVVVMRAGKPVTLQVTLGQRELAESSEAAAGGTAPALAGGAVLGMVLSPITDAMRAERNLPEDLTGLMVTDIDATGAAFDKGLRAGDVIVEAGQQPVTSLDDLKARVAEAKEGGRKSVLLLIRREGEPRFVAVPLQ

SEQ ID NO: 31998 - protein, 105 aa, Zea mays
  misc_feature (62)..(62): Xaa can be any naturally occurring amino acid
  misc_feature (74)..(74): Xaa can be any naturally occurring amino acid
  unsure (1)..(105): unsure at all Xaa locations
RETADYHTRTQTALEGPNEETKGLLAKNIEKLPRGHKKTEDAVAAGGEPIVHAPTMTEAHAXSTVSKPEGKKGXLGKIMDKIPGYHKSSGEEEPKDAAGEHKTSF

SEQ ID NO: 31999 - protein, 55 aa, Passiflora pittieri
WEYQVGPSVGIEAGDHIWCSRYILERITEQAGVVLTLDPKPIEGDWNGAGCHTNY

SEQ ID NO: 32000 - protein, 226 aa, Xanthomonas campestris pv. campestris str. ATCC 33913
MESLLEGFRHFRKEVYPRQSARFHELAAGQKPHTLFITCADSRVMPELIFSAQPGELFVYRNIGNVVPPYSQHVSGVVAAIEYAIAVLGVRHIVVCGHTDCGAMKAVLKPESLEDVPSVAAWLKHTDAARHVTAHHGHDPASQEALSCMTEENVVSQLDHLRTQPVVAARLAAGTLRIHGWIYDIAHGEIRAFDAEKGGFRPLLGETTPEATPRPRLQQAVRAELV

SEQ ID NO: 32001 - protein, 416 aa, Xanthomonas oryzae pv. oryzae KACC10331
MIVNIALLSATATAMTTAPAALTAHYAAELDAIQAQGLFKSERIITGPQSAQITLADGRRVLNFCANNYLGLADHPDIIQAAKDALDSHGFGMASVRFICGTQDLHKQLERTIAEFFGTEDTILYAACFDANGGLFEPLLGEHDAIISDALNHASIIDGVRLCKAKRFRYANCDMVDLEAQLQAADAAGCKTKLITSDGVFSMDGFIAPLDEITALARKYNALVHIDECHATGFLGATGRGSAEVKGVLDQIDIFTGTLGKAMGGALGGFTTAKREVIELLRQRSRPYLFSNSLPPHVVAAGIKAFEMLDAAGELRTQLVDNTTYFRARMTAAGFDVKPGVHPISPVMLYEAPLAQKFAERLLEEGIYAIGFFFPVVPNGQARIRTQISAAHTREHLDQAIAAFIKIGRELKVIDA

SEQ ID NO: 32002 - protein, 455 aa, Zea mays
  misc_feature (114)..(114): Xaa can be any naturally occurring amino acid
  unsure (1)..(455): unsure at all Xaa locations
MREIISIHIGQAGIQVGNACWELYCLEHGIEPDGTMPSDTSVGVAHDAFNTFFSETGSGKHVPRAIFVDLEPTVIDEVRTGSYRQLFHPEQLISGKEDAANNFARGHYTGNSPXFGKEIVDLCLDRVRKLADNCTGLQGFLVFNAVGGGTGSGLGSLLLERLSVDYGKKSKLGFTIYPSPQVSTAVVEPYNSVLSTHSLLEHTDVAVLLDNEAIYDICRRSLDIERPTYTNLNRLISQIISSLTTSLRFDGAINVDVTEFQTNLVPYPRIHFMLSSYAPVISAEKAYHEQLSVPEITNAVFEPSSMMAKCDPRHGKYMACCLMYRGDVVPKDVNAAVATIKTKRTVQFVDWCPTGFKCGINYQPPSVVPGGDLAKVQRAVCMISNNTAVAEVFSRIDHKFDLMYAKRAFVHWYVGEGMEEGEFSEAREDLAALEKDYEEVGAEGADDEGDEGDDY

SEQ ID NO: 32003 - protein, 286 aa, Oryza sativa
  misc_feature (155)..(155): Xaa can be any naturally occurring amino acid
  unsure (1)..(286): unsure at all Xaa locations
MMSMMTDLSCGPSSMTELTAAAAPAGSGSSAAVAAGSSEKMGRGKIEIKRIENTTNRQVTFCKRRNGLLKKAYELSVLCDAEVALIVFSSRGRLYEYANNSVKSTVERYKKANSDTSNSGTVAEVNAQHYQQESSKLRQQISSLQNANSLTRLAXNISSRTIVGDSINTMSLRDLKQVENRLEKGIAKIRARKNELLYAEVEYMQKREVELQNDNMYLRSKVVENERGQQPLNMMGAASTSEYDHMVNNPYDSRNFLQVNIMQQPQHYAHQLQPTTLQLGQQPAFN

SEQ ID NO: 32004 - protein, 116 aa, Triticum aestivum
  misc_feature (76)..(76): Xaa can be any naturally occurring amino acid
  unsure (1)..(116): unsure at all Xaa locations
SVKKDEVETKIAAWQIAEVAKVNNRFKREEVVINGWEGDQVEKASAWLNKYERKLEEKRAKAMEKAQNEVARARRXKAEDRRASAEAKRGTKVARVLELANFMRAVGRAPTKRSFF

SEQ ID NO: 32005 - protein, 403 aa, Arabidopsis thaliana
MNSILSSVLPAPEDPVLSVIFACRDDPSPVKLNLSAGTYRTEEGKPLVLDVVRRAEQQLANDLDKEYLPLNGLPEFNKLSTKLILGDDSPALKENRVVTTQCLSGTGSLRVGAEFLATHNKESVIFVPNPTWGNHPRIFTLAGLSVQYFRYYDPKSRGLDFKGMLEDLGAAPPGAIVVLQACAHNPTGVDPTFEQWEKFRRLVRSKSLLPFFDSAYQGFASGSLDADAQAVRMFVADGGECLIAQSYAKNMGLYGERIGSLTIVCTSEDVAKKVENQVLLVVRPMYLTPPIHGASIVATILKNSDMYNDWTIELKGMADRIISMRQQLYAALEARGTPGDWSHIIKHIGMFTFTGLSEEQVRLMAKEYHIYMTYDGRISMASLSSKTVPQLADAIHAVVTRIA

SEQ ID NO: 32006 - protein, 221 aa, Bradyrhizobium japonicum USDA 110
MTPEPPMPTITAFESSPDRGRGQARDMRVRWALEEVGQPYDVRLVSFAAMKQPAHLALHPFGQIPTFEDGDLALFESGAIVLHLAERYAGLLPLEVNARGRAIAWMFAALNTLEPPIVELGMALLFERDKSWYEARLPMLQDRVRTRLGELSARLGDADWLDGAFSAGDLMMVTVLRRLDTSGLLDEYPDIAAYVARGEARPAFRRAFEAQLAVFTAASRS

SEQ ID NO: 32007 - protein, 380 aa, Frankia sp. EAN1pec
MDLVPVSVVIPAYNEALRLPASLPRLLAVVGKIPRAEVIVVDDGSTDGTAGVAEDLLEGFPNHRVVRLPWNCGKGTAVRAGVSAAHGRSIVFMDADGASDVNDLPLLLAALEHAEVALGSRRIGDGATRTSGRRAGSWAFNQITRSLAALDVADTQCGFKAFRHAEAKILFSLARSTGFGFDVEVLSIARSVGYRIAEVPVRWEETPGGTFRITRHTPAMLVDVVRARRYLSRVGLPPVSRRQRLGELGVVDASELLGRPATPRGAGEPQGAPPGQLPVPAAPTRPGTPARPTARTRPGTPARPVPAARPTTAAAPARPAAVPALPMTPALPAAPARPPAVPRPTPRPAPAVPAVSVAHGTGRFTPSPSRGEIPGPAPAP

SEQ ID NO: 32008 - protein, 75 aa, Passiflora quadrangularis
GTNGEVMPGQWEYQVGPSVGIDAGDHIWCSRYILERITEQAGVVLSLDPKPIEGDWNGAGCHTNYSTKSMRDDGG

SEQ ID NO: 32009 - protein, 557 aa, Schizosaccharomyces pombe
MDFNNIPLATIKSSDDKGKDFIVEMTTRPSETKKKVPFSEDMREIPSLPNEEEANATDPQANEVADENGEGFEAEKISSWIWVLSAVAGISGLLFGYDTGVISGALAVLGSDLGHVLSSGQKELITSATSFAALISATTSGWLADWVGRKRLLLCADAIFVIGSVIMAASRNVAMMVVGRFIVGYGIGLTSLIVPMYITELAPARLRGRLVIIYVVFITGGQLIAYSLNAAFEHVHQGWRIMFGIGAAPALGQLISLFWTPESPRYLLRHNHVEKVYKILSRIHPEAKPAEIAYKVSLIQEGVKVDFPEGNKFQHFFHSLKVLFTVPSNRRSLFIGCFLQWFQQFSGTNAIQYFSAIIFQSVGFKNSISVSIVVGATNFVFTIVAFMFIDRIGRRRILLCTSAVMIAGLALCAIAYHFLPADTTQNTNSGWQYVVLASIIIFLASYASGIGNIPWQQAELFPMEVRALGAGFSTAINWVGNLIISASFLTMMESITPTGTFALFAGFCFVGLVTSYFTYPELAGMSIENIHKLLEKGFWQAVKESTKRVRKGRIDEA

SEQ ID NO: 32010 - protein, 1544 aa, Rhodospirillum rubrum
MGAVLAGIGLSGFAVWWVTQRNAELAETAASLELTRLSDAIAERITLYQYGLRGARGVIVTFGERGITREVFRGYSKTRDIGAEFPGARGFGFIRRVPADREERFLAEARADGWPDFAIAQFTPHEGERFVIQYIEPAQRNLKAVGLDIASEKNRREAALAAIDTGQVRLTGPITLVQASGDKSQSFLILLPIYRTLSTPETLAERRAQAFGWSYAPLNMPEVLSGLVPNQDRLALTLRDVTNPAEAETVFTSNTDCAAAECVTKTLTRSIFGRVWEISVTVSPAYGHAVQRIAPWVVVSLGIGASILAAGFAAVIGLNQARRREIAQAQARLSTIVENSGDAIIGEALDGTIVGWNRAAEALFGYKAPEVIGKALAPLLIPADRMAENQSIVLSALSGEAVMAFDTQRIHADGHLFDVSMTACPVHDRLGHVVGVANLIRDIRKRKAAEQSLLEFNAQLEKQVASRTAELEKARRALQTVLDSVPSMIGYWDRDLHCHIANRAYCSWFNVDPSGLIGKSMRSLLGEALFTANRPFIEAVLRGQPQTFERMIPRPNGQGVRHSLAHYIPDVVDGEVLGFYALVHDVSELVEGRQKLDAALRENEALLRTIDEQLLCSITDRNGNIISINDNFCKLMGYTKDELLGLDHRIMNSGLHDKTFWADVWATISAGGSWRGEVCNKAKDGALYWLDSVLTPFFGEDGSIDRYVALRIDITDRKKAEAERNRSNTLLRSVLASAREFSIIATDPDGVITIFNSGAEKLLGYSAEEMVGKQTPALIHLADQVAERGRSLSDEFGVPIEGFRVFVHRSERDGVEAQEWTYVRKDGGHLEVLLVVTAIREDDGRIAGYLGVAQDVSRRKEFERALVLAKQAAEEASVVKGQFLANMSHEIRTPMNAILGMLTLVQRTALTPHQADYVCKAHSAAGSLLGLLNDILDFSKIEAGKLHLEPHPFRLETVLRDLAVVLSGSYGDKGVEVLFDIAPHLPDSFIGDDLRLRQVLLNLAGNALKFTDQGQVIVSVGVLAREDDRLTMRMAVSDTGIGIAADQLASIFGAFEQAETSTTRRFGGSGLGLTITRHLVERMGGVLRVESQPGRGSRFWFDITLPVSGEGSESAESGRPLRVLVVEDNPVAGGILAQTVQGLGYDCDLVQESAETKARIVAADAAGRPYDAVLLDWRMPEVDGLTTARILREMGVTLCPQSIIMVTAYGRDVLSLAEQTGDAPFDAVLTKPVTPGQLRDALLRRDRATSEGEATALAPRGLPTPLAGRRLLVVEDNAINRQVAAELLAGAGAEIDLAEGGERGVMMVLRGEIAYDAVLMDIQMPDIDGFEATRRIRADARFKALPIVAMTANASRADREACLAAGMTEHVGKPIDITATIDVLVSLMTEGMTEGEPIAPPSPMGGTGREVPSDEPLLEDLDSIAERLGGQVDLLRRLLPTFAERTGELLDEIEDLIGRGDWSALSMAFHTIKGSAASMGAVALASHAALWEERLREDGPGTLDALRRDQALCDQMRALLAASLEALSSHLDAMAGPYAKEPAG

SEQ ID NO: 32011 - protein, 160 aa, Rhodospirillum rubrum
MATATFAAGCFWGVEETFRKIPGVTGTTVGYTGGHFKEPTYRQVCAGDTGHAEAVRVDYDPDKVTYEQLLDVFWAAHDPTQVDRQGPDIGDQYRSAIFYHDAGQEAAAGASRARLEQSGALSRAIATRIEPAGPFWPAEEYHQRYIDKQRARTGVAPACH

SEQ ID NO: 32012 - protein, 302 aa, Leptosphaeria biglobosa 'brassicae' group
WAKGHYTEGAELVDQVLDVVRREAEGCDCLQGFQITHSLGGGTGAGMGTLLISKIREEFPDRMMATFSVVPSPKVSDTVVEPYNATLSVHQLVENSDETFCIDNEALYDICMRTLKLNNPSYGDLNHLVSAVMSGVTTCLRFPGQLNSDLRKLAVNMVPFPRLHFFMVGFAPLTSRGAHSFRAVTVPELTQQMFDPKNMMAASDFRNGRYLTCSAYFRGKVSMKEVEDQMRNVQNKNSAYFVEWIPNNVQTALCSVPPRGLKMSSTFVGNSTSIQELFKRVGDQFTAMFRRKAFLHWYTGEG

SEQ ID NO: 32013 - protein, 83 aa, Picea abies
MADKGVGSRLSALFLLVLLVISIGMMQLEPAEGRTCKTPSGKFKGVCASRNNCKNVCQTEGFPSGSCDFHVANRKCYCSKPCP

SEQ ID NO: 32014 - protein, 145 aa, Corynebacterium ammoniagenes
ITRGMADQSRTIRLPVHLVEQVNKLSRIKREMYQSLGREATNEELAEESGIEENKIEMLLRQSRDPVSLDMPVGADEEAPLGDFIEDAEATDAETAVVASMRHSDIRDVIGTLEQREQDVIRLRYGLDDGVPRTLDQIGRKFGLS

SEQ ID NO: 32015 - protein, 488 aa, Arabidopsis thaliana
MSFRDDNTEEGRNDLRRPFLHTGSWYRMGSRQSSMLESSQVIRDSSISVLACVLIVALGPIQFGFTCGYSSPTQAAITKDLGLTVSEYSVFGSLSNVGAMVGAIASGQIAEYVGRKGSLMIAAIPNIIGWLSISFAKDTSFLYMGRLLEGFGVGIISYTVPVYIAEIAPQTMRGALGSVNQLSVTIGIMLAYLLGLFVPWRILAVLGVLPCTLLIPGLFFIPESPRWLAKMGLTDDFETSLQVLRGFETDITVEVNEIKRSVASSSKRSAVRFVDLKRRRYYFPLMVGIGLLALQQLGGINGVLFYSSTIFESAGVTSSNVATFGVGVVQVVATGIATWLVDKAGRRLLLMISSIGMTISLVIVAVAFYLKEFVSPDSNMYNILSMVSVVGVVAMVISCSLGMGPIPWLIMSEILPVNIKGLAGSIATLLNWFVSWLVTMTANMLLAWSSGGTFTLYALVCGFTVVFVSLWVPETKGKTLEEIQALFR

SEQ ID NO: 32016 - protein, 468 aa, Agrobacterium tumefaciens str. C58
MRGVLKYLSTGFLAALVLLPVGARAQDNKTVPASHTEMQLSFAPLVKRTAGAVVNVYAERVVQRRVSPFAGDPFFEQFFGQQMPNRTEKQSSLGSGVIVTAGGLVVTNNHVIDGADDIKVALADGREFSSKVLMKDDRVDLAVLQIDAKEQFPVLSLGDSDKIEVGDLVLAIGNPFGVGQTVTSGIVSGLARNQVTQGDFGFFIQTDASINPGNSGGALMNMAGELVGINTAIFSKGGGSNGIGFAIPANLVRVFVAAAERGDANFQRPYIGATFDPVTSDVAEALGLHRARGALVVGVTKGGPAEKAGIEPGQVVTAVNGLEVEHPDALGYRLTTAGIGKSAELTVVEKGKEKKLTIALNTAPETAPRDERLLEGRNPFAGATVANLSPKLADELRMPSQVTGVVITDVKRGSPAYRVGFQPKDVILSLNGADIGSTAAVEKALDDNPGFWRVEILRDGQRIRQFLR

SEQ ID NO: 32017 - protein, 268 aa, Xylella fastidiosa Temecula1
MHRIDETFRRLRAQSRKALIPFITAGDPSLEAAVPVMHALVRAGADVIELGVPFSDPMADGPVIQHSSERALQRGVGLAYVLQTVDVFRQSDAVTPVVLMGYLNPLEIYGIARFTQQALASGVDGVLLVDLPPEEADEIRAIFSAAGLALIVLASPTTSASRLATLSGVAQGYLYYVSFAGVTGADRLDAQSAGDRLRGLRAQTQVPVVVGFGIRDAASAVVMAVDADGVVVGSALVTALSDAPDVDTACRRADAFLAPLRQALDAVK

SEQ ID NO: 32018 - protein, 600 aa, Nitrosomonas europaea ATCC 19718
MAISENKTMTQFIKVTLPDIGDFQEVPVVEILVSPGDEVEQETPLLVLETDKASMEVPAPQAGIVREIHVKAGDRISQGSLIVTLETRETDTQVASPTPPRDTMAVPDSQPTITSAAEATAGKVALASVADRGDIHAEVVVLGAGPGGYTAAFRAADLGKQVVLIERYPALGGVCLNVGCIPSKALLHAAKTLTEAKEASLYGIRFGQPEIDVGKLRSWKESVVGKLTKGLSMLARQRKVTVIHGTGKFVNPHLIEVETSDGIKTISFDHCVIAAGSSAARIPGLPADERIIDSTGALALAEIPERMLILGGGIIGLEMATVYHALGTRISIVERMAQLIPGADTDLIKPLYKKLKTECEAIYLNTSVSRVEADKEGLQVFFEGEQAPEPQRYDRVLVAVGRRPNGKLIDAGAAGINVDERGFIPVDKQMRTSVPHIFAIGDIAGDPMLAHKASHEGKIAAEVIAGHKVTFDARTIPSVAYTDPEVAWMGLTETEAEKQGIAYEKAVFPWAASGRAITMTRDEGMTKLLFDKVSKRILGAGMVGPHAGELIAETVLALEMGADMQDIGLTIHPHPTLSETILFAAELAEGTITDLYVPKK

SEQ ID NO: 32019 - protein, 308 aa, Staphylococcus aureus subsp. aureus MSSA476
MKNNKDEKIRISIINGFLGSGKTTLLTHYISELLKNDEKIKIIMNEFGTFDIDSNSISNEIEVHSLINGCVCCDLKQELVYELKAIALKGDVNHVIIETTGIAHPLELLVACQDPQIVNFFEKPIIYGVLDATRFLERHQYTENTVSLMEDQLKLSDMIIINKIDLITDDRLERIDKQLGMICASIPTYKTTYGKVSLEELDLTVKDREISSHHHHHHGIKSMTYTFTGPIDRQLFYQFIMKLPESVLRLKGYVSFRDQPNAIYEFQYAYGLPDYGIIGMQLPLTIVIIGETLDTNHIRNQLDMLQFT

SEQ ID NO: 32020 - protein, 422 aa, Nitrosomonas europaea ATCC 19718 [sequence omitted]

SEQ ID NO: 32021 - protein, 357 aa, Arabidopsis thaliana
MTIFTRDFSHRILACVLLPLFLFQCLPYVTCQQGSESAGRNGKSKESSIIGIVLLSLFLLLLVVYCLNYGCCIEENETGGHEVLHSRVRRGIDKDVIESFPAFLYSEVKAFKIGNGGVECAICLCEFEDEEPLRWMPPCSHTFHANCIDEWLSSRSTCPVCRANLSLKSGDSFPHPSMDVETGNAQRGVQESPDERSLTGSSVTCNNNANYTTPRSRSTGLLSSWHVPELFLPRSHSTGHSLVQPCQNIDRFTLQLPEEVQRQLVSLNLIKRSHIALPRARSSRQGYRSGSVGNERTGFSQGRQTLRRAISTSLSFSFQPAPVRSTLDRDNLMRETSQANDKDFGERSFQRLMPEKN

SEQ ID NO: 32022 - protein, 457 aa, Staphylococcus aureus subsp. aureus MSSA476
MAIAVLLNRMFRMEHNPLFEYIYQQKEDIDACYFIIPEEDMSSASDLKAQFYRGTLQRFYQSLHAEKLTPYVMSYDDIISFCKENNISEVVTAGDIMSYHLEEYDILHQRSLFNEARIAVTLIRGNHYFKASKTMNQQGEPYKVFTSFYKKWRPYLRHRDVYHYDLKSFEDFVIASPDDLVFDDIAFGSSQIIEQNKWQHFLDQDIQNYESGRDYLPEVLTSQLSVALAYGLLDIIEIFNDLLARYDEDEANYEAFIRELIFREFYYVLMTQYPETSYQAFKPKYRQIKWSQNEADFNAWCEGQTGFPIIDAAIMELTQTGFMHNRMRMVVSQFLTKDLFIDWTWGEKFFRKHLIDYDAASNIHGWQWSASTGTDAVPYFRMFNPIRQSERFDAKALYIKTYLPIFNQIDAKYLHDTQRNESNLFEQGIELGSHYPRQMVDHQEKRTQVLATFKALD

SEQ ID NO: 32023 - protein, 370 aa, Glycine max
  misc_feature (4)..(4): Xaa can be any naturally occurring amino acid
  misc_feature (71)..(71): Xaa can be any naturally occurring amino acid
  unsure (1)..(370): unsure at all Xaa locations
GGGXWEGLFEAITGYGLGGSSMALFGRVGGGIYTKAADVGADLVGKVERNIPEDDPRNPAVIADNVGDNVXYPLLISSMGIIVCLITTLFATDFFEIKAVKEIEPALKKQLIISTVLMTVGIAIISWIALPTSFTIFNFGAQKEVKSWQLFLCVGVGLWAGARAVNSLDHHCLIVFSPVQDVADSCRTGAATNVIFGLALGYKSVIIPIFAIAISIFVSFTFAAMYGIAVAALGMLSTIATGLAIDAYGPISDNAGGIAEMAGMSHRIRERTDALDAAGNTTAAIGKGFAIESARLVSLALFGAFVSRAGILTVDVLTPKVFIGLIVGAMLPYWFSAMTMKSVGSAALKMVEEVRRQFNTIPGLMEVSQA

SEQ ID NO: 32024 - protein, 439 aa, Oryza sativa
MESRGKILMERYELGRLLGKGTFGKVHYARNLESNQSVAIKMMDKQQVLKVGLSEQIRREITTMRLVAHKNIVQLHEVMATRNKIYFVMEYVKGGELFEKVAKRGKLTEVVAHKYFQQLISAVDYCHSRGVYHRDLKPENLLLDENENLKVSDFGLSALSESKRQDGLLHTTCGTPAYVAPEVISKIGYDGAKSDIWSCGVILFVLVGGYLPFQGPNLMEMYRKIQHGEFRCPGWFSRKLQNLLYKIMDPNPSTRISIQKIKESTWFRKGPEENRILKERTLNENTTKNVALVLGVRRKKNAHEDVKPMSVTNLNAFEIISFSKGFDLSGMFIVKEWRNEARFTSDKSASTIISKLEDVAKALNLRVRKKDNGVVKMQGRKEGRNGVLQFDIEIFEVTTSYHIIEMKQTSGDSLEYRQLLEEGIRPALKDIVLAWHGDE

SEQ ID NO: 32025 - protein, 297 aa, Candidatus Carsonella ruddii
MKFFDFIKNKTKISIDSADINFIKNKLFNAATTNPSLILKSILSKVYNKLLYAFLLKNFKKKIIDSDYNISLYDKLLVNIIANIIPYIEEKISIEIPARISFNYNKIIFYSYKIIYLCEKIGINLKKILIKIPATNSGIKAAKQLKNNNINSNLTLIFNLTQAKKCFDSGIYIISPFVGRVSDSIYCKYDSGVNFVKNLVNLKNNNNYSTKIMAASFRNINQIINLTCCDFITISPIYYNKLKNINYKNSVLNYKSNIDFCNNENYNSIKLLNNGIKQFDIDHNRLIKLISNLINNL

SEQ ID NO: 32026 - protein, 398 aa, Pseudomonas fluorescens Pf-5
MRCVMREVVIVDSVRTGLAKSFRGKFNQTRPDDMAAHCVNALLARNGIDPASVEDCIVGAGSNEGAQGFNIGRNVAVLSALGTGTAGMTLNRFCSSGLQAIAIAANQIASGCSDIIVAGGVESISLTMKSVNTENLVNPLLKEQVPGIYFPMGQTAEVVARRYGVSREAQDRYSLQSQQRTAQAQAAGLFSDEIVPMTVKYKVEDKNTGEVQILDGVVDRDDCNRPDTTLENLAALKPVFADDGSVTAGNSSQLSDGASMTLVMSLERALALGLKPKAFFRGFTVAGCEPDEMGIGPVFSVPKLLKAKGLSVADIDLWELNEAFASQCLYARDRLEIDNARYNVNGGSISIGHPFGMTGSRQVGHLVRELQRRNLRYGIVTMCVGGGMGATGLFEAVR

SEQ ID NO: 32027 - protein, 359 aa, Arabidopsis thaliana
MDHSSNRFGNNGVESILPNYKLGKTLGIGSFGKVKIAEHVVTGHKVAIKILNRRKIKNMEMEEKVRREIKILRLFMHPHIIRQYEVIETTSDIYVVMEYVKSGELFDYIVEKGRLQEDEARNFFQQIISGVEYCHRNMVVHRDLKPENLLLDSRCNIKIADFGLSNVMRDGHFLKTSCGSPNYAAPEVISGKLYAGPEVDVWSCGVILYALLCGTLPFDDENIPNLFKKIKGGIYTLPSHLSSEARDLIPRMLIVDPVKRITIPEIRQHRWFQTHLPRYLAVSPPDTVEQAKKINEEIVQEVVNMGFDRNQVLESLRNRTQNDATVTYYLLLDNRFRVPSGYLESEFQETTWFQSYAHT

SEQ ID NO: 32028 - protein, 590 aa, Pseudomonas fluorescens Pf-5
MCGLAGELRFDHQPADLAAVERITHHLAPRGPDAWGFHSQGPIALGHRRLKIMDLSDGSAQPMVDNQLGLSLAFNGAIYNFPELRAELEAKGYAFYSGGDTEVLLKGYHAWGADLLPKLNGMFAFAIWERDAQRLFIARDRLGVKPLYLSRTGQRLRFASALPALLKGGDINPLLDPVALNHYLNFHAVVPAPRTLLAGIEKLPPATWMRIEADGRTEQQTWWTLPYGPRADETNLTLEDWRDRVLDSTREAVAIRQRAAVDVGVLLSGGVDSSLLVGLLREVGVDNLSTFSIGFEDAGGERGDEFQYSDLIARHYGTRHHQLRIDEREIIEQLPAAFRAMSEPMVSHDCIAFYLLSREVAKHCKVVQSGQGADELFAGYHWYPQVDGASDPYAAYRAAFFDRSYDDYAATVQPQWLTANDAAGDFVREHFAQPGADAAVDKALRLDSTVMLVDDPVKRVDNMTMAWGLEARTPFLDYRLVELSARVPARFKLPDGGKQVLKEAARLVIPSEVIDRKKGYFPVPGLKHLQGATLDWVRELLLDPSQDRGLFKPAMLDRLLTDPQGQLTPLRGSKLWQLAALNLWLSEQGI

SEQ ID NO: 32029 - protein, 340 aa, Thiobacillus denitrificans ATCC 25259
MNLDELQAVARAIVAPQKGVLAADESGPTIKKRFDTIAVESTEKSRRRYREIMFTAESIERYIGGVILYDETLRQSTRDGTPFPQLLAGRGIIPGIKVDQGAKPLALCPGEKVTEGLDGLRERLVEYHGLGAQFAKWRAVIDIDAHDLPSPFGIHANAHALARYAALCQEVGLVPIVEPEVLMDGAHDVERCEAVTARALEAVFAELDAHGVGLEGVLLKPNMVVAGKKSTRQAGVQEVAEATLRCLRRHVPAAVPGIVFLSGGQSAEEATAHLSAMNAMGPHPWQVSFSYGRALQAPVLAAWRGHEANAAAAQAALLERARLNGLARDGAYGPEMESAG

SEQ ID NO: 32030 - protein, 277 aa, Yersinia pseudotuberculosis IP 32953
MTMQPLIKLHDGRLMPQLGLGVWQASIQETELAVSKALEVGYRSIDTAAIYKNEEGVGKALKAAAVARDELFITTKLWNDDQHNPQQALETSLQKLQLDYIDLYLIHWPDPKQDHYVSAWRELVTLKEQGLIRSIGVCNFHIPHLQRLIDETGIAPTVNQIELHPLLQQRQLHAWNATHHIATESWSPLAQGGKGVFDQEIIRKLAQQYNKTPAQIVIRWHLDSGLIVIPKSVTPARIRENFEVFDFKLQKEELLAITKLDCGKRLGPDPEVFGSDR

SEQ ID NO: 32031 - protein, 75 aa, Triticum aestivum
MGSATVLEVILAIILPPVGVFLRYKLGVEFWICLLLTILGYIPGIIYAVYVLGSLSKQLCCRFQAWDERSLCTSN

SEQ ID NO: 32032 - protein, 430 aa, Desulfotalea psychrophila LSv54
MSEKFATLSLDGKQYSLPIIESTTGEKAIDIRSLLKDTGHITLDRGFMNTASCFSSITYLDGDKGILNYRGYSIEDLAANCSFVEVSYLILHGELPNYQELEHFRHDMNRFALLHEDMIHFFDHFPPNASPMSILSTTINSLHNFYPEMTAKTDPYGGISVTTARLLAKVRTIAAFSYKKSNGYPLVYPSHKLNYCENFLNMMFDRPNIPYEIKPEVTAALNKLLILHADHEQNCSTSTVRLVGSAQVNLYASISAGVSALWGPLHGGANQAVIEMLEEIHESGDDYNYYIEKAKDKNDPFRLAGFGHRVYKTFDPRARIIKEACHEMLASMNVHDPLLDIAFELEERVLRDDYFISRNLYPNVDFYSGIIYRAMGIPTDMFTVMFALGRLPGWIAQWTEMHADPNTKIGRPRQIYTGYKQRAFVPMYER

SEQ ID NO: 32033 - protein, 793 aa, Cryptococcus neoformans var. neoformans B-3501A
MAPKQRRATNSKAKATPTSVTSPPDQSSPVRSRGGSSSLSPIRSPQENSDLEDNNERHPGTNGSGLKAEDEGSTDLLDRDGDLEEVHACPDSITFRYPSSVPDFTILSPREKAFKVARFLHCTAPSCACTGLEPPAGRTIRITKHDSSNEDEDDEDEDDDVSMEDSENPLDFEDKKDEWRTKEGWWRICGKCGHGWESGGHVWADDVPPKERTRRGKVVGRIEEILEDENKLVEFPTPQPESISSLLKQLHEFVPPPAGKTTISALPPPVDLSTPDDDTQEDNSDGERPRKRRRQASESTHSDIEGEQHRGQGKKKQGKGPAKGAKPRVPRTVVRGAHGFIPMATDPDGNQHVEGHLPISAGGTGADETFEEEEEEEEELSTAKRPELDETERRRRTEIKVKEKEREEELVSRLAAGVNPEDAGGAVEIWEGIELQKLPLRPAAIEQANREIMLPVVSSRNPTPVATILLVGLKNVFQRQLPKMPREYITRLVLDKNHISMAIVKRGYRVVGGICYRPFEARGFAEIVFCAVDSSEQIKGYGSHLMNSLKDHVRKAHPTINVFLTYADNYAVGYFKKQGFTKEISYPRERWVGYIKDYEGGTIMQGRMLPKVKYMEVHQMLADQKAAIIAKIKTLTKSHIIHPGLQIFKERQPDEEIKLTKEQVPGLAESGWNPDLDDIVRQPKRNPYHVLLQHVLNDLQNEPSAWPFVKPVDSSVVADYYDVIKDPMDLSTMEYKLENNHYESIEGFVADVKLMCANCRQYNGEKSTYTKQANLLEKALDRILKKRKSVLAD

SEQ ID NO: 32034 - protein, 614 aa, Mycobacterium bovis AF2122/97
MTTLLRLATAGSVDDGKSTLIGRLLYDSKAVMEDQWASVEQTSKDRGHDYTDLALVTDGLRAEREQGITIDVAYRYFATPKRKFIIADTPGHIQYTRNMVTGASTAQLVIVLVDARHGLLEQSRRHAFLASLLGIRHLVLAVNKMDLLGWDQEKFDAIRDEFHAFAARLDVQDVTSIPISALHGDNVVTKSDQTPWYEGPSLLSHLEDVYIAGDRNMVDVRFPVQYVIRPHTLEHQDHRSYAGTLASGVMRSGDEVVVLPIGKTTRITAIDGPNGPVAEAFPPMAVSVRLADDIDISRGDMIARTHNQPRITQEFDATVCWMADNAVLEPGRDYVVKHTTRTVRARIAGLDYRLDVNTLHRDKTATALKLNELGRVSLRTQVPLLLDEYTRNASTGSFILIDPDTNGTVAAGMVLRDVSARTPSPNTVRHRSLVTAQDRPPRGKTVWFTGLSGSGKSSVAMLVERKLLEKGISAYVLDGDNLRHGLNADLGFSMADRAENLRRLSHVATLLADCGHLVLVPAISPLAEHRALARKVHADAGIDFFEVFCDTPLQDCERRDPKGLYAKARAGEITHFTGIDSPYQRPKNPDLRLTPDRSIDEQAQEVIDLLESSS

SEQ ID NO: 32035 - protein, 471 aa, Treponema denticola ATCC 35405
MKKTKIVCTIGPASDSERVLAEMFKAGLNVCRLNFSHGSHEEHKVKIDRIKKIREELKMPIALLLDTKGPEIRLGLFEKPVEIVQGQEFIITTRDVIGTNQICSISYKNIAAEIKPKSRILINDGLLELQVIDILNDTDIECVAVNSGTLSSRKGVNIPGLRVNLPYMSEKDISDIEFGIENDVDFIAASFTQRADDIIQIRKLLEKHKSTIAVIAKIENQEGLDNIDEILAEADGIMVARGDMGVEIEPEKIPHLQKQLIKKANLAGKPVITATQMLESMTHNLRPTRAEVTDVANAILDGTSAVMLSGETAAGEYPVETVAMMTSIANSIEETLDYEKLFAENASLHETTITNAIARATCSTALALDANAIITASASGITPRALSKFKPRVPIIAITESPQVMRKMALDWDVYPVLADPIKSTDNMFDVCSQIAKDTGHVKKGDIAILTAGIPIGKAGSTNLLKVEIIE

SEQ ID NO: 32036 - protein, 65 aa, Passiflora platyloba
GTNGEVMPGQWEYQVGPSVGIDAGDHIWCSRYILERITEQAGVVLSLDPKPIEGDWNGAGCHTNY

SEQ ID NO: 32037 - protein, 67 aa, Passiflora racemosa
GTNGEVMPGQWEYQVGPSVGIDAGDDIWCSRYILERITEQAGVILSLDPKPIEGDWNGAGCHTNYST

SEQ ID NO: 32038 - protein, 302 aa, Leptosphaeria biglobosa 'australiensis' group
WAKGHYTEGAELVDQVLDVVRREAEGCDCLQGFQITHSLGGGTGAGMGTLLISKIREEFPDRMMATFSVVPSPKVSDTVVEPYNATLSVHQLVENSDETFCIDNEALYDICMRTLKLNNPSYGDLNHLVSAVMSGVTTCLRFPGQLNSDLRKLAVNMVPFPRLHFFMVGFAPLTSRGAHSFRAVTVPELTQQMFDPKNMMAASDFRNGRYLTCPAYFRGKVSMKEVEDQMRNVQNKNSSYFVEWIPNNVQTALCSVPPRGLKMSSTFVGNSTSIQELFKRVGDQFTAMFRRKAFLHWYTGEG

SEQ ID NO: 32039 - protein, 240 aa, Anabaena variabilis ATCC 29413
MKKTVEVLPDQTALIARSLDLILTKLDTAIKQQGRFTIALSGGSTPKPLYEAIAAQKLPWDKIHVFWGDERYVSPDHPDSNELMARTAWLDRVDIPAENIHAVPTLDNNPAVSAAKYEQQLQAFFNSAPGEFPALDVVLLGMGDDAHTASLFPHTEALQVRDRLITVGNKDGNPRITFTYPFINAAHSVIFVVAGANKRPALAQVFAPSADDLAYPSRLIRPQGELLWLLDAAAGAELSV

SEQ ID NO: 32040 - protein, 58 aa, Passiflora reflexiflora
WEYQVGPSVGIDAGDHIWCSRYILERITEQAGVVLTLDPKPVEGDWNGAGCHTNYSTK

SEQ ID NO: 32041 - protein, 416 aa, Bacillus halodurans C-125 [sequence omitted]

SEQ ID NO: 32042 - protein, 459 aa, Thermotoga maritima MSB8
MKKFFLTIAVALILTSVFPYVNPDYESPIVNVVEACAPAVVKIDVVKTVKTSFFDPYFEQFFKKWFGELPPGFERQVASLGSGFIFDPEGYILTNYHVVGGADNITVTMLDGSKYDAEYIGGDEELDIAVIKIKASDKKFPYLEFGDSDKVKIGEWAIAIGNPLGFQHTVTVGVVSATNRRIPKPDGSGYYVGLIQTDAAINPGNSGGPLLNIHGEVIGINTAIVNPQEAVNLGFAIPINTVKKFLDTILTQKKVEKAYLGVTVMTLTEETAKALGLESTSGALITSVQKGSPAEKAGLKEGDVILKVDDQDVRSHEELVSIIHTYKPGDTAVLTIERKGKIMKVQVTFGSSSEEEKTTTGEEKIDALGITVSNITPADRETYSIPEEINGVIVKESTGKFGLQKGDVITTVYVNGKRYDINSVGDLKKVTSIVKNGDYIALYIYRNGAKVFVSFIYQR

SEQ ID NO: 32043 - protein, 240 aa, Zea mays
TRVEFCKNEGLVLLADEVYQENIYVEDKPFHSFKKIARSLGYTDDDLPLVSFQSVSRGYYGECGKRGGYMEITGFSPEVREQIYKVASVNLCSNVSGQILASLVMNPPKAGDESFESFMSEKDGILSSLARRAKALEEAFNSLEGITCNKAEGAMYLFPRLHLPQKAIGAAQAVGTAPDAYYAKRLLEATGIVVVPGSGFGQVPGTWHFRCTILPQEDKIPAIVSKLKEFHEKFMDEFRD

SEQ ID NO: 32044 - protein, 374 aa, Bacillus halodurans C-125
MKRQRIVIKIGSSSLTTKQGALDLEKLEGYVRAIVNLRKAGHEVILISSGAVAAGFSRLGYPVRPTTMAGKQAAAAVGQALLMQHYMERFHQHGIIAAQLLLTRKDFQNQTQYTNAYSALMELLKRGALPIINENDSTSIAELTFGDNDMLSALVSGLIHAHTLCILTDVNGLYDANPKTHPNAKRYQYLPTIPDEMLQMGGEAGSNVGTGGMKSKVAAAQTALSLGVDVFIGKASGEHALLDILSGKGDGTYVGNTGDLMEGKTKQWIRLHSPVSGVVRIDQGAERAIMNEGKSLLPAGVTSVHGTFQAGDVVHIWNEQNKVIAKGQVTLSSEQLRKVQGRKSDEAKQLIPLVRDEVVHRDQLVIQEKELNES

SEQ ID NO: 32045 - protein, 636 aa, Magnaporthe grisea 70-15
MQLPTRPLSRRQDNGEDDSRPLPRDLSHYYSQTTKNRKPSQVKEFYKFFQIPGIVNFAGGLPNLRFFPFDTLEAQTAKPERWTPSESTATNTDSRSNGDSRDRSESTHITVPLVAKETDPLRKIDLATALQYGMADGYPPLLSFVRQFTREHLHPDVPYRSGPEVVLTVGSTDGFAKTLELFVDPWSEGKGDDVRDRPGLLCERFAYGNVLTQARPKGVQVVTVEADSGGMLADGPGGLEDVLANWDDSKGRRPHLLYTVTMGHNPTGIVLDVERRKALYAICSKYDVLIVEDDPYWYMQFPSAAREEAKSRNLPPPQVTSTYSRSTGYPFLDSLVPSFLSFDVDGRVVRLDTFSKTVAPGCRLGWLTAQPAIIERFVRITETSTQQPSGFVQSMIGELVMSSQPTETKTTFLGLRTHKDRTAFTGWQMDGWVRWLEGLRGVYEDRMNRVCRILDDGKYQLKQGTPVVPGSHPLDADWGVITKKKLFEFDWPRGGMFVWLRVFFESHPLWKAPRPGKDGEPAGVMDGGVLSGALLAMLTKKPWLVLVAPGFMFSANEEIQRKDGWAYFRLCFAAEAEEAVDPCTQRFVDGIQRFWKIKTVREIEDLLKGFPISSGEASSMNVADQDVGNMGMYMGC

SEQ ID NO: 32046 - protein, 74 aa, Passiflora riparia
TNGEVMPGQWEYQVGPSVGIDAGDHIWCSRYILERITEQAGVVLSLDPKPIEGDWNGAGCHTNYSTKSMREDGG

SEQ ID NO: 32047 - protein, 428 aa, Rhizobium leguminosarum bv. viciae
MTASAYRDHLGRPIVAVTGMGIITSLGQGLSDNWAALSSGTSGIHEINRFPTEGLSTRIAGTVDFIGIPVPNAVERSYAFARETTIEALADAGLSGDFNGPLFLAAPPIEPEWSARFELADRSPASDHPGDAYERFLTALRQRPDPAFHEAALFGAISERLADRFGTRGLPVTLSTACASGVTAIQLGIEAIRQGRTTRALTVATDGSLSAEALIRFSLLSALSTQNDPPTRASKPFSKDRDGFVIAEGAATLVLESLESAVARGAKVLGIMKGAGDKADSFHRTRSSPDGGPAIATIRAALADAGMSEGDIGYINAHGTSTPENDKMEYGSMSAVFGEKLVGIPVSSNKSMIGHTLTAAGAVEAVFSLQTMLTGTLPPTINYNNPDPSIILDVVPNKKREAQVSAVLSNSFGFGGQNASLVMALEPA

SEQ ID NO: 32048 - protein, 346 aa, Rhizobium leguminosarum bv. viciae
MRALQLIDDRKLEITDLPEPDAPAAGEVTLRVKAVALNHIDVWGWRGMAFAKRKMPLVIGAEASGVVEAIGPGVANVLPGQLVAIYGARTCGLCRPCREGRDNLCEHVSGVHGFHLDGFAQEKVNLPARLLVPAPPGVDAIGAALAPVTFGTVEHMLFDNAKLEPGETILVHAGGSGIGTAAIQLAKKIGCTVITTVGSDDKIEKAKALGADHVINYRTDRFEGVVRKLTKKKGVDVVFEHVGKDTWAGSMLCMKRGGRLVTCGSTSGVSTEMNLMMLFQQQLKLFGSFGCRMENMADAMQKMGPRARPSRHRYRGQAFSDIDRALEPDGIAPDLRQDHPEDGLTA

SEQ ID NO: 32049 - protein, 594 aa, Frankia sp. EAN1pec
MDPVVAYRAGEPGQPGGRSGPAAPPAGTEETDYSAWWHDAVMYEVYVRSFADADGDGVGDIEGIRRRLPDLADLGVDGIWVSPFYRSPMADHGYDVADHTDVDPLFGTLSDIDALLRDAHEAGLKVVVDLVPNHSSSAHPAFQAALAAGPDAPERDLYLFRDGRGPDGALPPNNWISVFGGPAWTRVPDGQWYLHLFAPEQPDWNWQHPRVRAAHAEIIRFWLDRGVDGFRIDVSHGLVKDGELRDHPTGALPTPETGFREEIEPHAWDQDGVHEIYREWRAIVDAHDRRDGRQRVLVGETWVADPGRLARYVRPDELHLTFTFSLLYAPFSAPAWRAAIDAARAATAAVCAPPTWVLANHDVVRPVSRYGGGETGLRRARAALLTLLALPGTVYLYQGDELGLPQVDIPPEARQDPVWERSGHTSPGRDGARVPLPWSGDAPPYGFSAGAAEPWLPQPPDWATLTASAQSVDPMSTRVLVRGALALRRALPFLGGPAGPGSAAEPAEPGHSGEPGRPAGTRPGFRWRDDLPADCLAFDRTSAAGALTCVMATRSEIRLEIAGRLVLASGPVGYDGATLVLPPDTTAWVIPRSG

SEQ ID NO: 32050 - protein, 615 aa, Bacillus halodurans C-125; identical to SEQ ID NO: 1373

SEQ ID NO: 32051 - protein, 315 aa, Haemophilus ducreyi 35000HP
MNQLDALREMTVVVADTGDIEAIRQYQPQDATTNPSLILSASALSQYAPLIDDAIRYAKSKSGNKAQQLVDAEDKLAVNIGLEILKIVPGRISTEVDARFSYDTEKTIAKARKLIGLYNEAGVANNRILIKIAATWQGIRAAEILEKEGINCNLTLLFSQAQARACAEAGVYLISPFVGRILDWYKANEKKEYAAAEDPGVISVTAIYNYYKQYNYKTIVMGASFRNVGEITEIAGCDRLTIAPPLLKALAESNETLVRKLDYQGEILDRPAPLSEAEFYWQHNQDPMAVDKLAEGIRKFAIDQEKLEEMLSAKL

SEQ ID NO: 32052 - protein, 125 aa, Pinus pinaster
MAPKAEKKPAPKAEKKLPKEGGEKKGKKKHKKSVETYKIYIFKVLKQVHPDVGISSKAMGIMNSFINDIFEKLASEASKLARYNKKPTITSREIQTAVRLALPGELAKHAVSSRAQGCDQILPVL

SEQ ID NO: 32053 - protein, 585 aa, Thermoactinomyces vulgaris
MLLEAIFHEAKGSYAYPISETQLRVRLRAKKGDVVRCEVLYADRYASPEEELAHALAGKAGSDERFDYFEALLECSTKRVKYVFLLTGPQGEAVYFGETGFSAERSKAGVFQYAYIHRSEVFTTPEWAKEAVIYQIFPERFANGDPSNDPPGTEQWAKDARPRHDSFYGGDLKGVIDRLPYLEELGVTALYFTPIFASPSHHKYDTADYLAIDPQFGDLPTFRRLVDEAHRRGIKIILDAVFNHAGDQFFAFRDVLQKGEQSRYKDWFFIEDFPVSKTSRTNYETFAVQVPAMPKLRTENPEVKEYLFDVARFWMEQGIDGWRLNVANEVDHAFWREFRRLVKSLNPDALIVGEIWHDASGWLMGDQFDSVMNYLFRESVIRFFATGEIHAERFDAELTRARMLYPEQAAQGLWNLLDSHNTERFLTSCGGNEAKFRLAVLFQMTYLGTPLIYYGDEIGMAGATDPDCRRPMIWEEKEQNRGLFEFYKELIRLRHRLASLTRGNVRSWHADKQANLYAFVRTVQDQHVGVVLNNRGEKQTVLLQVPESGGKTWLDCLTGEEVHGKQGQLKLTLRPYQGMILWNGR

SEQ ID NO: 32054 - protein, 1065 aa, Candida glabrata CBS138
MTIIVASLFLPFQPQFEVNADQEQTAELVDSKLVKISGEQEAHANKNLPDVRVQETDAYATAATQPFLNSRTPLALSSAASQLNVKQGPLSSEQFLENLTANATTAGTPVNPNLGVHGHASAEDFFTTNNSTAINNNASSPPFSVSSIAPEINANVDGTDTMDVTADLLDNVNKSLLLHSVLNSGQGVSSPNAVEGHTATHLTNPNTTVITPKSRAVPESNPGVVNFDNYKERRDSQSNSAFPSMKRVASGSHGPSHLKYSQNAIDAALESDVIDDADDRQNSEAESDYETDRKVHYNVPGFGGYSSTSKRLKNSLEIFSRVPWKIVPSRKGNGALKNAINTSILEKDIKDGVKWVGTLGIPTDEIPVETTKKIVKDLNENYQSSAVIADDVTFKGAYKNFCKQILWPTLHYQIPDNPNSKAFEDHSWNYFQRLNQYFAEKIVSIYEDGDIVWVHDYHLMLVPGMVRQKLPNAKIGFFLHVSFPSSEVFRCFAQRENMLEGILGANFVGFQTAEYARHFLTTANLLLTADVSGDHLRYKGKVVSVKSTPIGIDAFDLANQLLTDPVTKWRQLIRQRWAGKKLIVCRDQFDKIRGLHKKLLAYERFLRENPDYIEKVVLIQICIGKSSDPELERKVMVVVDRINSLSISISVSQPVVFLHQDLDFAQYLALSSEADLFLINTFREGMNLTCHEFIVCSREKNSPLLISEFTGSAELLKDGAILINPWDTRHLAKCIKMGLEMPLDERKRRWKIMMKSLINNDSTNWIMSNLQAIEHCWEFSKESSTLFSLSSEELASEYQSASNKLFILKISEPPSPRMLAILRELSSRCTVYIMNTFSKTTLENLYGRVGNLGLIAEGGAYVRLNGTWYSIVDHVDWLEEVTKILDTKIERLPGSYYKLADSMVRFHTENAEDQDRVASVIGEAMTHINTLFADRGIHAYVHKNILFVQQKELSLETTKFILKFHNSGKVYNTGHSTPSKHNNEMSAMFSGQSDTIDFICVAGSTSPTIEPIFKLVKDATLAGNLRYGHTIVYGDAPSTYAREHTSGWNELFNIFQDLAKSNERQ

SEQ ID NO: 32055 - protein, 499 aa, Arabidopsis thaliana
MATRLLRTNFIRRSYRLPAFSPVGPPTVTASTAVVPEILSFGQQAPEPPLHHPKPTEQSHDGLDLSDQARLFSSIPTSDLLRSTAVLHAAAIGPMVDLGTWVMSSKLMDASVTRGMVLGLVKSTFYDHFCAGEDADAAAERVRSVYEATGLKGMLVYGVEHADDAVSCDDNMQQFIRTIEAAKSLPTSHFSSVVVKITAICPISLLKRVSDLLRWEYKSPNFKLSWKLKSFPVFSESSPLYHTNSEPEPLTAEEERELEAAHGRIQEICRKCQESNVPLLIDAEDTILQPAIDYMAYSSAIMFNADKDRPIVYNTIQAYLRDAGERLHLAVQNAEKENVPMGFKLVRGAYMSSEASLADSLGCKSPVHDTIQDTHSCYNDCMTFLMEKASNGSGFGVVLATHNADSGRLASRKASDLGIDKQNGKIEFAQLYGMSDALSFGLKRAGFNVSKYMPFGPVATAIPYLLRRAYENRGMMATGAHDRQLMRMELKRRLIAGIA

SEQ ID NO: 32056 - protein, 144 aa, Burkholderia vietnamiensis G4
MSNMTRYDPFSIEPVSDLFHGLFRPLRGMTLADQPDLASMKIDVTENDGAYMVKAELPGVAKDDIDVQVTGNTVSINAKVERNNEQKDGERVIRRERYSGAISRSFSLAADIDDANATATYQDGVLSLTLPKKAPVGQKKLAIS

SEQ ID NO: 32057 - protein, 140 aa, Triticum aestivum
  misc_feature (123)..(123): Xaa can be any naturally occurring amino acid
  unsure (1)..(140): unsure at all Xaa locations
MAPTVMASSATSVAPFQGLKSTAGLPVSRRSNGASLGSVSNGGRIRCMQVWPIEGIKKFETLSYLPPLSTEALLKQVDYLIRSKWVPCLEFSKVGFIFREHNASPGYYDGRYWTMWKLLCSGXTDATQVINEVEEVRRST

SEQ ID NO: 32058 - protein, 705 aa, Arabidopsis thaliana
MEESVASEGLEFKWGKKKGVGGKKKDVQFYESFTYDGDEYRLYDCVLVGNASEPDSTEPFIGMIIKIWEHANKHIPKKVKLLWFFKPSEIAPYLEGVPNVLANEVFLASGEGLGLANTNQLEAIGGKCSVLCISKDKRNPQPSDEKFNSADFVFCRAFDVGSCKVVDTIDDKIAGVDVKFIFNRACSEKEATAVQNIEADVNGKSDSLKPNGPLARGASGSVRKIEDSAFESSDCKENSNGCKEEKEKGHYQLAIKKSTLAEERSNKDSGSRGNHYNGKDQESEVKKQLTKQKSMPGEERYSNSFEASGSRTIHSISKKAQENDVKKQLTKQKSMPAGERYSQESSGLDDRPLKKQKLDGSVTVRDGWDTTILQNITSDGKKDTGSFKRPRDKVTIEEVPPEKRSFVKNRDLVVSVSEGKTTKTVTEKGISKKPSFGRAEDKMSADDNERNYQVTEVCRRPDARVVKSLDARMWFCKNTILKGAVLFYSPSHCMLYSCSDVLSFFSSYYVTTMLGNIEGKSKWFRSLPWEESMREAEKKGTVVLLQNLDPTYTSDEVEDIVYSALNQQCEARMIERTSVTIPHIGEALVIFKTREVAERVIRRLDEGCLLLSSGRPLVASFAKITPPGKPSLFSGHIKLHKTQTRREMRDAVATSHSSQPNNLEFDMAMEWCLHQARHEQASESVSKRQLEEMKSLRINFKLKLP

SEQ ID NO: 32059 - protein, 411 aa, Anemia phyllitidis
  misc_feature (133)..(133): Xaa can be any naturally occurring amino acid
  misc_feature (359)..(359): Xaa can be any naturally occurring amino acid
  misc_feature (403)..(403): Xaa can be any naturally occurring amino acid
  unsure (1)..(411): unsure at all Xaa locations
TGTYRGDSETQLERVNVYYNEASCGRYVPRAVLMDLEPGTMDSVRSGPYGQIFRPDNFVFGQSGAGNNWAKGHYTEGAELIDSVLDVVRKEAENCDCLQGFQVCHSLGGGTGSGMGTLLISKIREEYPDRMMXTFSVFPSPKVSDTVVEPYNATLSVHQLVENADECMVLDNEALYDICFRTLKLVTPTFGDLNHLISATMSGVTCCLRFPGQLNSDLRKLAVNLIPFPRLHFFMVGFAPLTSRGSQQYRALTVPELTQQMRDAKNMMCAADPRHGRYLTASAMFRGKMSTKEVDEQMINVQNKNSSYFVEWIPNNVKSSVCDIPPVGLKMACTFIGNSTSIQEMFRRVRDQFTAMFRXKAFLHWYTGEGMDEMEFTEAESNMNDLVSEYQQYQDATAEPEGXYEEDYDEA

SEQ ID NO: 32060 - protein, 372 aa, Wolinella succinogenes
MLLFTPGPTPVPESIRVAMGEPTIHHRTPEFEAIFAKTRALLQEMLGMSEVLMLASSGTGAMEACVSSLSAKKALTINSGKFGERFGKIAKALKIPSVEIKNDWDTPVSPAQVMEVLKSDSEIDAFFIQVCESAGGLRHPVEEIAQAIKAYNPNIMVVADAITAMGVEKIETTHIDALIGGSQKAFMLPPGMSIIGLSAKAVEKIEERDVGYYFNLKTEIKNQRKNTTAWTAPTTLIIGLGRYLEMAKERGFERIYEETRARALATQAAMKALGLVIFPKAPAVAMTTVIDEESAEGMRKLLKKEYGVNLAGGQDHLKGKIFRINHMGLIEVYESAWVVNALELALDRLGKRKFDGSANRLFLETYYKELGV

SEQ ID NO: 32061 - protein, 410 aa, Rickettsia rickettsii
DSEFAELKIRGKIFKLPILKASIGEDVIDISRVSAEADCFTYDPGFMSTASCQSTITYIDGDKGILRHRGYDIKDLAEKSDFLEVAYLLIYGELPSGEQYNNFTKQVAHHSLVNERLHYLFQTFCSSSHPMAIMLAAVGSLAAFYPDLLNFKEADYELTAIRMIAKIPTIAAMSYKYSIGQPFIYPDNSLDFTENFLHMMFATPCTKYTVNPIIKNALNKIFILHADHEQNASTSTVRIAGSSGANPFACISTGIASLWGPAHGGANEAVINMLKEIGSSEYIPKYIAKAKDKNDPFRLMGFGHRVYKNYDPRAVVLKETCKEVLKELGQLDNNLLQIAIELEAIALKDEYFIERKLYPNVDFYSGIIYKAMGIPSQMFTVLFAIARTVGWMAQWKEMHEDPEQKISRPR

SEQ ID NO: 32062 - protein, 279 aa, Staphylococcus aureus subsp. aureus MSSA476
MLNEIQILNNGYPMPSVGLGVYKISDEDMTKVVNAAIDAGYRAFDTAYFYDNEASLGRALKDNGVDREDLFITTKLWNDYQGYEKTFEYFNKSIENLQTDYLDLFLIHWPCEADGLFLETYKAMEELYEQGKVKAIGVCNFNVHHLEKLMAQSSIKPMVNQIEVHPYFNQQELQEFCDRHDIKVTAWMPLMRNRGLLDNPVIVKIAEKYHKTPAQVVLRWHLAHNRIIIPKSQTPKRIQENIDILDFNLELTEVAEIDALNRNARQGKNPDDVKIGDLK

SEQ ID NO: 32063 - protein, 411 aa, Rickettsia sp.
DSEFAELKIRGKIFKLPILKASIGEDVIDISRVSAEADCFTYDPGFMSTASCRSTITYIDGDKGILRYRGYDIKDLAEKSDFLEVAYLLIYGELPSSEQYNNFTKKVAVHSLVNERLHYLFQTFCSSSHPMAIMLAAVGSLSAFYPDLLNFKEADYELTAIRMIAKIPTIAAMSYKYSIGQPFIYPDNALDFTENFLHMMFATPCEKYKVNPIIKNALNKIFILHADHEQNASTSTVRIAGSSGANPFACVSTGIASLWGPAHGGANEAVINMLKEIGSSENIPKYIAKAKDKNDPFRLMGFGHRVYKNYDLRAAVLKETCKEVLKELGQLDGNPLLQIAIELEAIALKDEYFIERKLYPNVDFYSGIIYKAMGIPSQMFTVLFAIARTVGWMAQWKEMHEDPEQKISRPR

SEQ ID NO: 32064 - protein, 411 aa, Rickettsia sp.
DSEFAELKIRGKIFKLPILKASIGEDVIDISRVSAEADCFTYDPGFMSTASCQSTITYIDGDKGILRHRGYDIKDLAEKSDFLEVAYLLIYGELPNGEQYNNFTKQVAHHSLVNERLHYLFQTFCSSSHPMAIMLAAVGSLSAFYPDLLNFKEADYELTAIRMIAKIPTIAAMSYKYSIGQPFIYPDNSLDFTENFLHMMFATPCTKYKVNPIIKNALNKIFILHADHEQNASTSTVRIAGSSGANPFACISTGIASLWGPAHGGANEVVINMLKEIGSSEYIPKYIAKAKDKNDPFRLMGFGHRVYKNYDPRAAVLKETCKEVLKELGQLDNNPLLQIAIELEAIALKDEYFIERKLYPNVDFYSGIIYKAMGIPSQMFTVLFAIARTVGWMAQWKEMHEDPEQKISRPR

SEQ ID NO: 32065 - protein, 128 aa, Zea mays
  misc_feature (72)..(72): Xaa can be any naturally occurring amino acid
  misc_feature (104)..(104): Xaa can be any naturally occurring amino acid
  unsure (1)..(128): unsure at all Xaa locations
MVLSHGVGGSDESVHSTFASRYVRTSLPRYRMPEQSIHVDAASGGFIAPFLYPELEWDFRLPLVKSINVSGXKYGLVYAGIGWCIWRTKEDLPGELIFHINYLXADQPTFTLNFSKGASLGSLFFLGL

SEQ ID NO: 32066 - protein, 458 aa, Xanthomonas axonopodis pv. citri str. 306
MSDPSAPDHLQRSLSNRHLQLIAIGGAIGTGLFMGSGKTISLAGPSILFVYLIIGAMLFFVMRAMGELLLSNLEYKSFIDFSTDLLGPWAGFFCGWTYWFCWIITAIADVIAIAAYAQFWFPGLAPWIPAILCVLLLLGLNLVTVKLFGEMEFWFALIKIIAIAALIVTGAGLVVWGFRSPSGNVASLSNLWNDGGMFPMGIGGFFAGFQIAVFAFVGIELVGTTAAETADPRRNLPKAINSIPVRILIFYVLALIAIMAVTPWRQVVADKSPFVELFVLAGVPAAASLINFVVLTSATSSANSGIFSTSRMLYGLAEEQHAPKGFAKLSRAAIPARGLLFSCLCLLLGAMLVYLIPNLVTAFTLVTTLSAVLFMFVWSLILCAYIAYRRKRPEQHAASAFKMPGGVLMCYVCLAFFAFVIVLLTLQDDTRQALLASPVWFLLLAIGYAVKRRGNRQR

SEQ ID NO: 32067 - protein, 449 aa, Yarrowia lipolytica CLIB122
MREVISINVGQAGCQIGNSCWELYCLEHGIQPDGYLDPDRKTGSREEGFSTFFSETGSGKYVPRTIYVDLEPNVVDEVRTGKYKNLFHPEQLITGKEDAANNYARGHYTVGKELIDQVMDRVRRVADNCNGLQGFLFTHSFGGGTGSGFGALLLERLSVDFPKKSKLEFAVYPAPQVSTSVVEPYNSVLTTHTTLEHSDCTFMVDNEAIYDMCRRNLDISRPSFENLNRMIAQVVSSVTASLRFDGSLNVDLNEFQTNLVPYPRIHFPLVTYAPVISKSRANHESNSVNEITNACFEPSHQMVKCDLREGKYMANCLLYRGDVVNKDVQAAVASIKAKKSIQLVDWCPTGFKIGICYQPPQYVPEGDMAKVDRAVCMLSNTTAIAEAWKRLDAKFDLMYSKRAFVHWYVSEGMEEGEFSEAREDLAALERDYEEVGADSAYDDDLEAEY

SEQ ID NO: 32068 - protein, 64 aa, Passiflora rufostipulata
GEVMPGQWEYQVGPSVGIDAGDHIWCSRYILERITEQAGVVLSLDPKPIEGDWNGAGCHTNYST

SEQ ID NO: 32069 - protein, 497 aa, Nicotiana tabacum
MKKATVGAAVVGAATVCAVAAFIVNHRMRKSSKWARAMAILREFEEKCGTPDAKLKQVADAMTVEMHAGLASEGGSKLKMLITYVDNLPTGDEAGVFYALDLGGTNFRVLRVQLGGKDGGIVHQEFAEASIPPNLMVGTSEALFDYIAAELAKFVAEEEEKFQQPPGKQRELGFTFSFPVMQTSINSGTIMRWTKGFSIDDAVGQDVVGELTKAMKRKGVDMRVSALVNDTVGTLAGGKYTHNDVAVAVILGTGTNAAYVERVQAIPKWHGPVPKSGEMVINMEWGNFRSSHLPLTQYDHALDTNSLNPGDQIFEKMTSGMYLGEILRRVLLRVAEDAGIFGDEVPPKLKSPFVLRTPDMSAMHHDISSDLRVVGDKLKDILEISNTSLKTRRLVVELCNIVATRGARLAAAGILGILKKMGRDTPRQGGPEKTVVAMDGGLYEHYTEYRTCLENTLKELLGDELATSIVFEHSNDGSGIGAALLAASNSMYLEDKS

SEQ ID NO: 32070 - protein, 55 aa, Passiflora sandrae
WEYQVGPSVGIDAGDHIWGSRYILERITEQAGVVLTLDPKPIEGDWNGAGCHTNY

SEQ ID NO: 32071 - protein, 499 aa, Nicotiana tabacum
MSVTVSSPAGRSFHISRSPYKKISKPRVIIAAVRSGVSLAVAPILTKLQKDCATPLPVLRHVADAMAVDMRAGLAVDGGSDLKMILSYIDTLPTGNEKGLFYALDLGGTNFRVLRVQLGGKEERVIATEFEQVSIPQELMFATSEELFDFIASELGKFSQSEGGKFEMQQGRTREIGFTFSFPVKQTSVKSGILIKWTKGFAVSGTAGKDVVACLNEAMERQGLGMQVSALVNDTVATLAGARYWDNDVMVAVILGTGTNACYVERVDAIPKLPQRMSNSPETIVNTEWGAFSNGLPLTEFDREMDAESINPGEQIFEKTISGMYLGEIVRRVLVKMAKVGGLFGGGYVPEKLVTPFVLRTPDICAMQQDTSRDLEAVESVLYDIAGVKSDLSARKTVVDICDTIANRGGRLAGAGIVGILQKMEEDSKGVIFGKRTVVAMDGGLYEHYPQYREYLQEAVTELLGSEISKNVVIEHSKDGSGIGAALLAAANSKYEHDY

SEQ ID NO: 32072 - protein, 482 aa, Pseudomonas syringae pv. syringae B728a
MQLIWLRSDLRAQDNTALTAAMERGPTLAVYLLSPAQWRSHDDADCKVDFWLRNLVELEKALGELNVPLLIREADTWDQAPEVLATLCTQFKVEGLHLNQEYGINETRRDQAVQKAMGKAGVHFNSYLDQLLFKPGSILTKTGNYFQVFTQFKKVCYTRLHEAMPHPVRTPQAQAAQSIKSDAVPKQVKGFATPSKALRDLWPAGEAEARRRMDAFAAEQISYYKTERDFPAKPGTSQLSAYLAAGVISPRQCLHAALASNQGEFETGDVGTVTWINELLWREFYKHTLVGYPRVSRHRAFRPETEALKWRDAPEELRAWQEARTGLPIIDAAMRQLLETGWMHNRLRMVVAMFLTKNLLIDWREGERFFMRHLIDGDLASNNGGWQWSSSTGTDSAPYFRIFNPLSQSERFDPEGVFIKRWLPELADMNKKQIHDPSLIGDLFGAADYPKPIVDLSKSRARALAAFKALPARQPAAGVEHG

SEQ ID NO: 32073 - protein, 497 aa, Nicotiana tabacum
MKKATVGAVVVGAAVTVAVGALIVRHRMRKSSKWARARAILKEFEEKCGTPDAKLKQVADAMTVEMHAGLASEGGSKLKMLISYVDNLPTGDEEGVFYALDLGGTNFRVLRVQLGGKDGGIVHQEFTEASIPPNLMVGTSEALFDYIAAELAKFVAEEEEKFHQPPGKQRELGFTFSFPIMQTSINSGTLIRWTKGFSIDDTVGQDVVAELTKAMQRKGVDMRVSALVNDTVGTLAGGRFSNKDVSIAVILGTGTNAAYVERAQAIPKWHGPLPKSGEMVINMEWGNFRSSHLPLTEYDHAMDTDSLNPGEQIFEKICSGMYLGEILRRVLLRMSEEAAIFGDEVPPKLKNQFILRTPEMSAMHHDTSSDLRVVGDKLKDILEISNTSLKTRRLVVELCNIVATRGARLAAAGVLGIVKKMGRDTPRESGQEKIVVAMDGGLYEHYTEYRKCLENTLVELLGEEMATSIVFEHANDGSGIGAALLAASNSLYVEDKS

SEQ ID NO: 32074 - protein, 380 aa, Vibrio parahaemolyticus RIMD 2210633
MKKISKLLVGFSFALPVLFLLLSKTGTADTMDKMKALENAEIATLAGGCFWCTESDLEQLPGVLDVVSGYSGGHVKNPTYRQVSSGKTGHIESIEVKYDPNVVNYEQVLDYFFRHIDPTDDKGSFVDRGPQYRPAIFYHNAEQKQIAEQFMMEIDNAKVYPKPLKTELIKFETFYPAEEYHQDYYKKSSLKYKYYRYASGRDKYLDEVFGDDRKEHPKTLRQLIDEKKLLSKVKAYNKPSQSKIKSTLTELQYYVTQEEGTERPFDNEYWDNKEAGIYVDIVTGEPLFSSTDKYKSGTGWPSFTKPINPGYIVEKTDYKLIYPRTEVRSKFGDSHLGHVFTDGPKPTGLRYCMNSAAMKFVPVSKMAQLGYGDYLFLFEQ

SEQ ID NO: 32075 - protein, 61 aa, Passiflora sanguinolenta
EVMPGQWEYQVGPSVGIDAGDHIWCSRYILERITEQAGVALSLDPKPIEGDRNGAGCHTNY

SEQ ID NO: 32076 - protein, 376 aa, Thiomicrospira crunogena XCL-2
MLTRSDIHQKSRRWVVKIGSALLTNDGRGLNKDAMAQWVSQMVTLRQQGIELVIVSSGSVAEGMQRLGWSQRPSELNELQAAAAVGQMGLVQAYESEFAKNGIHTAQILMTHDDLSNRARYLNASNTIQTLLEHGVVPVINENDTVVTDEIRFGDNDTLAALTANLVSADVLVILTDQNGLYNDNPRTNPNAELISEAQVSRKDIEAMASSEGGSLGKGGMYTKVMAAKRAARSGTATFIASGREDNVLPRLLAGEPLGTLLIPDLEPLTAKKRWLAGHLQAKGQLVLDEGAVKALQSSGKSLLPIGVKGMSGEFQRGEMVVCVNENNQEVARGLVNYPFFETQKIMGHPSSEINQLLGYSDGEFLIHCDNLVLAD

SEQ ID NO: 32077 - protein, 163 aa, Triticum aestivum
GDTIGTSLYKKAGWYRSRIPGISSTHASVWKTLKSGKVVPGYGHGVLRNTDPRYSCRREFALKYLPEDPLFQLFSKLYEVVPPILTELGKVKNPWPNVDAHSGVLLNHFGLTEARYYTVLFGVSRSIGIGSQLIWDRALGLPLERPKSVTMEWLENHCKKVAA

SEQ ID NO: 32078 - protein, 142 aa, Streptococcus thermophilus
MLNKIQHRNLNTYSVTPFDFFEEFSRNLFNDFKPNFIKTDIHETDNEYLVEAELPGIPKENIQVTYENGVLTISGQQQIDAVNEDKKGKLIRSERSLTSVQRQYLLENVKEDEIKASYSDGVLKVTLPKDSNKEIKKSISIE

SEQ ID NO: 32079 - protein, 498 aa, Nicotiana tabacum
MGKVVVGAAVVCTAAVCAAAVLLMRHKMKNSGKWAKAMDILKEFEEKCETPIGKLRQVADAMTVEMHAGLASEGGSKLKMLISYVDNLPTGDETGLFYALDLGGTNFRVMRVQLGGKEKRIVKQEVKEVSIPKNVMAGSSSDALFDFIATALVKFVATEDDDFRLPPGRQRELGFTFSFPVKQLSIASGTLIKWTKGFSIDDTVGQDVVRELTKAMERVGLDVRVAALVNDTVGTLAGGRYNNPDVIAAVILGTGTNAAYVERANTIPKWHGLLPKSGDMVINMEWGNFRSSHLPVTEYDQSLDTESLNPGEQIYEKMISGMYLGEILRRVLCRMAEEASFFDDYVPPKLKTPFILRTPDMSAMHHDKSADLKVVGDKLKDILEVPNSTWKMRKIIVELCDIITSRGARLSAAGIVGILKKLGRDTLKDGEKQRSVIAVDGALFEHYTKFRNCMEGTIKELLGDAAESIVIELSNDGSGIGAALLAASHSQYLGLEES

SEQ ID NO: 32080 - protein, 249 aa, Streptomyces avermitilis MA-4680
MSNGDIFVGEIIGTAILILFGAGVCAAVTLRYSKARASGWVVIAFGWGFGVLAGAYTAAPLSGGHLNPAVTIGIAIDTGTWGKVWIYLLGQLVGAVLGAVLAYLVYLAQFQANVRKEGTTEGTADEPVPTLGIFSTIPEIRNPVANLITEIIATIALVLPILAFGLTKGLGESGITVLIVSLLVVGIGLSLGGPTGYAINPARDLGPRIVHTFLPIPNKGTSDWGYAWIPVVGPLIGGALAGLIYHVAF

SEQ ID NO: 32081 - protein, 320 aa, Bacillus halodurans C-125
MIPVYLFSGFLGSGKTTVLLNVLNQLKEDGLRPAIVLNEAGEMNVEKELFANETVVELLNGCICCTIQDDLKAELQRFLTINDRSVDVLLIEGTGIANPREIIEVLTDPPFIEQLALQSVIGIIDASRYLEYRSLFSSSKEIRAVLKEQVAESTLLLLNKQDLVDGRTLHKVEEKLKKDKKPGATILFCSYGKVPTEELLKPRIKVDTGKDHAYSGEASSHASHSHHHHHHDIQAIKLDLEQPVTEKELQRWLIDQGDQLIRAKGYVRLQGNDLLVHFQYASKQLSVRKSKEEVPPCLILIGVDLNRETLAKSLHTVTNV

SEQ ID NO: 32082 - protein, 302 aa, Leptosphaeria biglobosa 'thlaspii' group
WAKGHYTEGAELVDQVLDVVRREAEGCDCLQGFQITHSLGGGTGAGMGTLLISKIREEFPDRMMATFSVVPSPKVSDTVVEPYNATLSVHQLVENSDETFCIDNEALYDICMRTLKLNNPSYGDLNHLVSAVMSGVTTCLRFPGQLNSDPRKLAVNMVPFPRLHFFMVGFAPLTSRGAHSFRAVTVPELTQQMFDPKNMMAASDFRNGRYLTCSAYFRGKVSMKEVEDQMRNVQNKNSSYFVEWIPNNVQTALCSVPPRGLKMSSTFVGNSTSIQELFKRVGDQFTAMFRRKAFLHWYTGEG

SEQ ID NO: 32083 - protein, 316 aa, Triticum aestivum
TGPEFRVDPASGDMLERRVASRLPDAAVDDLLIPSYSYLVETLYDVECVERIVRHFLEGRGGVEEVDEEGSEAETPGREASRRAMLAVSRLMDAYLGEIAADPRLRTDKFCDLAWALPDGARVYDDGLYRAVDIYIKAHPALREEEKEKVSGVVDGRKLTLEACTHAAQNERLPLRTVVQVLFFEQLQLRRAIARTIVANEGGAAGQGEEDGDSDGGRTWRVATRGNQMLRLDMDSMRNRVQELERECTTMRKAIQKIDRRGGAAGDRGAAAPAAEGRWGSMVTKRFGCKFPAQVCQSQPRSVVARPRRARIEQSP

SEQ ID NO: 32084 - protein, 146 aa, Magnetococcus sp. MC-1
MAALMEYDPFRNVRTLQNEINRLFDHNWEEPNGQMAKWPMRVDIREDENQIMIKADLPGMTQQDISVDVDNGTLTISGERKFDDEQNRDGYHRIERAYGRFSRSFQLPNTTDTGNIAAKYQNGVLEVTLPKLDEAKPRSIQVEVLN

SEQ ID NO: 32085 - protein, 256 aa, Glycine max
HGVIDPIEELGHLASSFGICFHVDLCLGGFVLPFARELGYHIPPFDFSVKGVSSISVDVHKYGLAPKGTSVVLYRNHEIRKHQFVAVTEWSGGLYVSPTIAGSRPGSLIAGAWAAMISLGKEGYLKNTKEIMEGSRRIQKGIEEIAELFIVGKPDMTIVAFGSAVLDIFEVNDVMSSKGWHLNALQRPNSIHICVTLQHVPIVEDFLNDLKESVKTVKANPGPISGGLAPIYGAAGKMPDRGMVQELLVDYMDGTC

SEQ ID NO: 32086 - protein, 411 aa, Rickettsia sp.
DSEFAELKIRGKIFKLPILKASIGEDVIDISRVSAEADCFTYDPGFMSTASCQSTITYIDGDKGILRHRGYDIKDLAEKSDFLEVAYLLIYGELPSGEQYNNFTKQVAHHSLVNERLHYLFQTFGSSSHPMAIMLAAVGSLSAFYPDLLNFKEADYELTAIRMIAKIPTIAAMSYKYSIGQPFIYPDNSLDFTENFLHMMFATPCTKYTVNPIIKNALNKIFILHADHEQNASTSTVRIAGSSGANPFACISTGIASLWGPAHGGANEAVINMLKEIGSSEYIPKYIAKAKDKNDPFRLMGFGHRVYKNYDPRAAVLKETCKEVLKELGQLDNNPLLQIAIELEAIALKDEYFIERKLYPNVDFYSGIIYKAMGIPSQMFTVLFAIARTVGWMAQWKEMHEDPEQKISRPR

SEQ ID NO: 32087 - protein, 222 aa, Sulfolobus tokodaii str. 7
MKNMLASKDSLVEALKVALNPENNPKRNFTQSVELIVTFKGIDMKKGELKLREIVPLPKEPSKPRKVLVIPAFQQIESAKKAEPNVLLTKEELQKLQGQKRAIKKLARQNDWFLVAQDSMALVGRILGPALGPRGKFPTPLPNAADITEYILRFKRSTLVKTKDQPHVQVFIGTEDMKPEDLAENALAVLNTIENKAKVEANLRAIYVKTTMGKIVKVELKK

SEQ ID NO: 32088 - protein, 476 aa, Arabidopsis thaliana
MANRFLRPNLIHRFSTVSPVGPPTTIIPEILSFDQPKPEVDLDLSDQARLFASVPISTLLRSTAILHATSIGPMVDLGSWLMSSKLMDTTVTRDLVLRIVKGTFYDHFCAGEDAAAAARRVSSVYESTGLKGMLVYGVEHAEDGGACDENIQKFIETVEAAKTLPSSHLSSVVVKITAICPMNVLKRVSDLLRWQYKNPNFKLPWKLNSFPVFSGLSPLYHTTSEPEPLTVEEERELEKAHERLKSVCLRCQESNVPLLIDAEDTILQPAIDYMAYWSAIMFNSDKDRPIVYNTIQAYLKDAGERLHLALRESEKMNVPIGFKLVRGAYMSSEAKLADSLGYKSPVHDTIQNTHDCYNDCMSFLMEKASNGSGIAVILATHNTDSGKLGARKASELGINKENGKIEFAQLYGMSDALSFGLKRAGFNVSKYMPYGPVDTAIPYLIRRAYENRGMMSTGALDRQLMRKELKRRVMAW

SEQ ID NO: 32089 - protein, 411 aa, Rickettsia sibirica
DSEFAELKIRGKIFKLPILKASIGEDVIDISRVSAEADCFTYDPGFMSTASCQSTITYIDGDKGILRHRGYDIKDLAEKSDFLEVAYLLIYGELPSGEQYNNFTKQVAHHSLVNERLHYLFQTFCSSSHPMAIMLAAVGSLSAFYPDLLNFKEADYELTAIRMIAKIPTIAAMSYKYSIGQPFIYPDNSLDFTENFLHMMFATPCTKYTVNPIIKNALNKIFILHADHEQNASTSTVRIAGSSGANPFACISTGIASLWGPAHGGANEAVINMLKEIGSSEYIPKYIAKAKDKNDPFRLMGFGHRVYKNYDPRAAVLKETCKEVLKELGQLDNNPLLQIAIELEAIALKDEYFIERKLYPNVDFYSGIIYKAMGIPSQMFTVLFAIARTVGWMAQWKEMHEDPEQKISRPR

SEQ ID NO: 32090 - protein, 103 aa, Rhizopus oryzae
KKCPFVGEVNIQGRILTGVVVSTKMKRTLVVRRDYLHYIPKYNRYEKRHKNISAHVSPAFDNQAIQVGDMVTIGQCRPLSKTVRFNVIKVSKAKGTAKAFNKF

SEQ ID NO: 32091 - protein, 411 aa, Rickettsia sp.
DSEFAELKIRGKIFKLPILKASIGEDVIDISRVSAEADCFTYDPGFMSTASCQSTITYIDGDKGILRHRGYDIKDLAEKSDFLEVAYLLIYGELPSGEQYNNFTKQVAHHSLVNERLHYLFQTFCSSSHPMAIMLAAVGSLSAFYPDLLNFKEADYELTAIRMIAKIPTIAAMSYKYSIGQPFIYPDNSLDFTENFLHMMFATPCTKYTVNPIIKNALNKIFILHADHEQNASTSTVRIAGSSGANPFACISTGIASLWGPAHGGANEAVINMLKEIGSSEYIPKYIAKAKDKNDPFRLMGFGHRVYKNYDPRAAVLKETCKEVLKELGQLDNNPLLQIAIELEAIALKDEYFIERKLYPNVDFYSGIIYKAMGIPSQMFTVLFVIARTVGWMAQWKEMHEDPEQKISRPR

SEQ ID NO: 32092 - protein, 557 aa, Xanthomonas axonopodis pv. citri str. 306
MSSAAPPCCTSLLGLSLSMFVAPGTLTAAPLDAPVVNAPAPTPPTPDLAYPELFQAVQRGELFDDQKHFVDFLPLRDPALINADYLAQHDHPGFDLRKFVDANFEESPPVQTDAIRQDTALREHIDLLWPKLVRSQNHVPPHSSLLALPHPYVVPGGRFREVYYWDSYFTMLGLVKSGETTLSRQMLDNFAYLIDTYGHIPNGNRTYYLSRSQPPFFSYMVELQAGVEGEAVYQRYLPQLQKEYAYWMQGSDDLQPGQAARHVVRLADGSVLNRYWDERDTPRPEAWLHDTRTAAEVTDRPAAEVYRDLRAGAESGWDYTSRWLADGQNLRTIRTTAILPIDLNSLLYHLERTLALACAQPGAECTRDYAALAQQRKQAIDAHLWNTAGYYADYDWQTRTLSNQVTAAALYPLFAGLASDDHAKRTASTVRKTLLRPGGLATTAVKTGQQWDEPNGWAPLQWVAVDGLRRYGEDALARTIGERFLAQVQALFAREHKLVEKYGLETDAAGGGGGEYALQDGFGWTNGVTLMLLNLYPGKDTKAAPAKRVRKPEAAAR

SEQ ID NO: 32093 - protein, 477 aa, Comamonas testosteroni
MSTVLYRCPELLIGGEWRPGRHEQRLVVRNPATGEPLDELRLASADDLQLALQTTQQAFEHWRQVPAHERCARLERGVARLRENTERIAHLLTLEQGKTLAEARMECAMAADLIKWYAEEARRVYGRVIPARLPNSRMEVFKFPVGPVAAFSPWNFPLVLSARKLGGAIAAGCSIVLKAAEETPASVAAMVDCLNQELPPGVVQLLYGVPAEVSQALIASPVVRKVTFTGSVPVGRHLAELSARHLKRITLELGGHAPVIVCGDADIARTVNLMVQHKFRNAGQACLAPTRFFVDRRIYGDFVDAFGAATQALRVGAGMAAETQMGPVASARRQAAVQDLIARSVAAGARPVASAVPEAGYFVAPTLLADVPLDAPVMSEEPFGPVACAVPFDSLDQAIAQANHNPYGLAGYLFTDSAKAILAVSERLEVGSLAVNGMGVSVPEAPFGGVKDSGYGSESGTEGMEAFLDTKFMHYVA

SEQ ID NO: 32094 - protein, 346 aa, Comamonas testosteroni
MLVKNTWYVAGMATDCSRKPLARTFLNEKVVLFRTHDGHAVALEDRCCHRLAPLSLGDVEDAGIRCRYHGMVFNASGACVEIPGQEQIPPGMCVRRFPLVERHGLLWIWMGDPARANPDDIVDELWNGAPEWRTDSGYIHYQANYQLIVDNLLDFTHLAWVHPTTLGTDSAASLKPVIERDTTGTGKLTITRWYLNDDMSNLHKGVAKFEGKADRWQIYQWSPPALLRMDTGSAPTGTGAPEGRRVPEAVQFRHTSIQTPETETTSHYWFCQARNFDLDDEALTEKIYQGVVVAFEEDRTMIEAQQKILSQVPDRPMVPIAADAGLNQGRWLLDRLLKAENGGTAP

SEQ ID NO: 32095 - protein, 411 aa, Rickettsia typhi
NLEFAELKIRGKMFKLPILKASIGKDVIDISRVSAEADCFTYDPGFMSTASCQSTITYIDGDKGILWHRGYDIKDLAEKSDFLEVAYLMIYGELPSSEQYHNFTTKIAHHALVNERLHYLFQTFCSSSHPMAIMLAAVGSLSAFYPDLLNFNETDYELTAIRMIAKIPTIAAMSYKYSIGQPFIYPDNSLDFTENFLHMMFATPCTKYKVNPIIKNALNKIFILHADHEQNASTSTVRIAGSSGANPFACISTGIASLWGPAHGGANEAVINMLKEIGSSENIPKYVAKAKDKNDPFRLMGFGHRVYKSYDPRAAVLKETCKEVLNELGQLENNPLLQIAIELEALALKDEYFIERKLYPNVDFYSGIIYKAMGIPSQMFTVLFAIARTVGWMAQWKEMHEDPEQKISRPR

SEQ ID NO: 32096 - protein, 411 aa, Rickettsia honei
GSEFAELKIRGKIFKLPILKASVGEDVIDISMVSAEADCFTYDPGFMSTASCQSTITYIDGDKGILRHRGYDIKDLAEKSDFLEVAYLLIYGELPSGEQYNNFTKQVAHHSLVNERLHYLFQTFCSSSHPMAIMLAAVGSLSAFYPDLLNFKEADYELTAIRMIAKIPTIAAMSYKYSIGQPFIYPDNALDFTENFLHMMFATPCTKYTVNPIIKNALNKIFILHADHEQNASTSTVRIAGSSGANPFACISTGIASLWGPAHGGANEAVINMLKEIGSSEYIPKYIAKAKDKNDPFRLMGFGHRVYKNYDPRAAVLKETCKEVLKELGQLDNNPLLQIAIELEAIALKDEYFIERKLYPNVDFYSGIIYKAMGIPSQMFTVLFAIARTVGWMAQWKEMHEDPEQKISRPR

SEQ ID NO: 32097 - protein, 343 aa, Triticum aestivum
  misc_feature (251)..(251): Xaa can be any naturally occurring amino acid
  misc_feature (275)..(275): Xaa can be any naturally occurring amino acid
  unsure (1)..(343): unsure at all Xaa locations
MHPTRWELSHMVDLQAAALVISSGRPGRWAGVLVGTGMGGLQVFSDGVQNLLEKGYRKITPFFIPYAITNMGSALLGMYIGFMGPNYSISTACATSNYCFYAAANHIRKGEADVMIAGGTEAAIIPIGVGGFVACRALSQRNDDPKTASRPWDKERDGFVMGEGAGVLVMESLEHAMKRGAPIVAEYLGGAVNCDAYHMTDPRADGLGVSSCIRQSLQDAGVAPEEVNYINAHATSTLAGDLAEMNAIKQXFKDPSGIKVNATKSMIGHCLGAAXGGLEAIATIKAINTGLVHPSMNQFDREPAVEFDTVPNVKVEHEINVGISNSFGFGGHNSVVVSAPFKP

SEQ ID NO: 32098 - protein, 96 aa, Thiomicrospira crunogena XCL-2
MNIKPLHDRVVVRQVEEQKESTGGILLPGSAQEKENLGEVVAVGPGKAADNGSIIPMTVKVGDKVMFGQYSGQEVKDDAGKPLKVMREDDIIAIVE

SEQ ID NO: 32099 - protein, 544 aa, Thiomicrospira crunogena XCL-2
MAKDVRLGLDAREKMVEGINVLADAVKVTLGPKGRNVVLEKSFGAPTVTKDGVSVAREIELEDKFMNMGAQMVKEVSSQTNDVAGDGTTTATVLAQSIVREGMKSVAAGMNPMDLNRGIHKAVEAVVKEIQKMSVPCTTTESIAQVGTISANSDSAVGKMIAEAMEKVSTEGVITVEEGSSLHDELVVVEGMEFDRGYLSPYFVTNQEKMVAELDNPYILLHDKKISNIRDLLPTLEAVSKAGRPLLIIAEDVDGEALATLVINNMRGIVKATAIKAPGFGERRKAMLQDMAVLTGGTVISEEVGLTLENVTLDMLGETKSAVVGKDSTKLIDGAGAKADIEARCAQIRSQAENTTSEYDSEKLQERLAKLAGGVAVIKLGAATEVEMKEKKDRVDDALHATRAAVQEGIVAGGGVALVRARSKVKVKGDNDEQQLGIEIALRAMEEPMRQIAANCGLEGSVIVNKVMESKDNMGFDAASETYVDMIKAGIIDPAKVTRSALQNAASVAGLVLTTGAAIADLPSKDGASADAAAGGMGGMGGMM

SEQ ID NO: 32100 - protein, 500 aa, Brassica oleracea
  misc_feature (262)..(262): Xaa can be any naturally occurring amino acid
  unsure (1)..(500): unsure at all Xaa locations
MGRKMLADGELDKAVAAEEATETHYDFDLFVIGAGSGGVRAARFSANNGAKVGICELPFHPISSEEIGGVGGTCVIRGCVPKKILVYGATYGGELEDARNYGWEINENVDFTWKKLLQKKTDEILRLNNIYKRLLANAAVKLYEGEGRIVGPNEVEVRQIDGTKISYTAKHILIATGSRAQKPNIPGHELAITSDEALSLEEFPKRAVVLGGGYIAVEFASIWRGMGGTVDLFVRKELPVRGFDDEMRALVARNLEGRGVNXHPQTSLTQLIKTDDGIKVISSHGEEFMADVVHLLLARNPNTKRLNLEAVGVELDQAGAVKVDEYSRTNIPSIWAVGDATNRINLTPVALMEATCFANTVFGGKPTKADYSNVACAVFCIPPLAVVGLSEEEAVEKATGDILVFTSGFNPMKNTISGRQEKSLMKLIVDEQTDKVIGASMCGPDAAEIMQGIAIALKCEATKAQFDSTVGIHPSSAEEFVTMRTVTRRIAYKAKPKTSL

SEQ ID NO: 32101 - protein, 498 aa, Nicotiana tabacum
MGKVVVGAAVVCTAAVCAAAVLLMRHKMENSGKWAKAMDILKEFEEKCETPIGKLRQVADAMTVEMHAGLASEGGSKLKMLISYVDNLPTGDETGLFYALDLGGTNFRVMRVQLGGKEKRIVKQEVKEVSIPKNVMAGSSSDALFDFIATTLVKFVATEGDDFHLPPGRQRELGFTFSFPVKQLSIASGTLIKWTKGFSIDDAVGQDVVRELTKAMERVGLDVRVAALINDTVGTLAGGRYNNPDVIAAVILGTGTNAAYVERANTIPKWHGLLPKSGDMVINMEWGNFRSSHLPVTEYDQSLDAESLNPGEQIYEKMISGMYLGEILRRVLCRMAEEASFFDDYVPPKLKTPFILRTQDMSAMHHDKSADLKVVGDKLKDILEVPNSTWKMRKIIVELCDIITSRGARLSAAGIVGILKKLGRDTLKDGEKQRSVIAVDGALFEHYTKFRNCMEGTIKELLGDAAENIVVKLSYDGSGVGAALLAASHSQYLGLKES

SEQ ID NO: 32102 - protein, 479 aa, Ustilago maydis 521
MSSATSPALDYALLLSSSARNRMPSAIRSLFPAELIPGMVSLLSGKPNSETFPFQRISLELKPSIHLEGQTETVSIEGSDLDIALQYSATSGLPKLVDWIIKFQSRVHARKQVDEGNKPGEVWRCSFGNGSQDLLTKTFEALVDAGDSVVLESPAYSGILPSLVAHKANLFEAETDAEGVEPTALDTLLTNWKTDSATRDSRFPKFLYTTPTGANPSGTSASDNRKRAILDIIRKHNLLLLEDDPYYFLSFQGLEPGADAVKRTRGKSYFQLEAQDDYGVGRVVRFDSFSKILSAGLRLGFVTGPKEILDAIDLDTSSRNLQTSGTSQAIAYALLSKWGIDGFLHHADNVARFYQNRLERFEASAQAILTGSPSIASWVRPSAGMFLWIKLKLPPSPDSAEGDSFDLISNKAKAAGVLALPGVAFKPPSSSSTGGKRKTSAYVRTSFSQVPLDQVDTAFTRLRQVVEEAWREAGLQIPA

SEQ ID NO: 32103 - protein, 425 aa, Pseudomonas syringae pv. syringae B728a
MTQQEFNDPLWRTILSGAQMLFVAFGALVLMPLITGLDPNVALFTAGLGTLLFQIVTGRQVPVFLASSFAFITPIILAKGQFGLAATMGGVMAAGFVYTFLGLAVKIKGTGFIDRLLPPVVIGPVIISIGLAMAPIAANMAMGKSGDGVQLIPYQTAMLISMPALLTTLIVAVFGKGIFRLVPIISGVLVGFALSFYFGVVDTKKIADAAWLALPHFTAPEFNWQAILFIVPVALAPAIEHIGGVIAVGSVTGRDYLKKPGLHRTLFGDGIATTAAGLFGGPPNTTYAEVTGAVMLTKNYNPQIMIWASFFAITLAFIGKFGALLQSIPVPVMGGILCLLFGSIAAVGMNTLIRHKIDLAEARNLVIVSVTLVFGIGGVLIGTGNGPNDFGLKGIALCAVTAIALNLILPGNDSWKNKQLDDQLP

SEQ ID NO: 32104 - protein, 391 aa, Thiomicrospira crunogena XCL-2
MEYIPGLAGVPATESEISYIDGNKGVLTYRGYDIMELAEYSSFEETTLLLLFGNLPTADELADFENKLRNARRVKYNLREIMKNLPATTHPMHMLQVAVASLASFYPSTEYMKGGTENQEYINEVTVNIISHMGTLVAMWEHMRNGFDPIEPRKDLTYAENFLYMVTGEEPDKDWARLLDACLILHAEHTINASTFTTMVTGSTLANPCSVISSAIASLSGPLHGGANQKVIEMLDEIGTPENARPYIEKRLAEKKVIWGMGHREYKTKDPRATILQKLSSELLQNKSDAGSLSKAFETAMEVERVCEELLGHKGVYPNVDFYSGILYKEMGFDAGLFTPIFAVARSAGWMAHWREQLQNNKIFRPTQIYTGAGNSCYLPMEKRSQKKSMP

SEQ ID NO: 32105 - protein, 216 aa, Arabidopsis thaliana
MSKLQSEAVREAITTIKGKSEEKKRNFVETVELQIGLKNYDPQKDKRFSGSVKLPHIPRPKMKICMLGDAQHVEEAEKMGLSNMDVEALKKLNKNKKLVKKLAKSYHAFLASESVIKQIPRLLGPGLNKAGKFPTLVSHQESLEAKVNETKATVKFQLKKVLCMGVAVGNLSMEEKQLFQNVQMSVNFLVSLLKKNWQNVRCLYLKSTMGPPQRIF

SEQ ID NO: 32106 - protein, 499 aa, Nicotiana tabacum
MGKLVVGVSVVCTAAVVCGVAVLLMKRRMKNSGEWGKVEALLKDFEEKCATPMGKLKQVADAMTVEMHAGLASEGGSKLKMLISYVDNLPTGDEEGLFYALDLGGTNFRVMRVQLGGNEKRIVKHEVKEVSIPQNVMAGSSSEVLFDFIATALAEFVATEGDDFHLPPGRQRELGFTFSFPVKQLSIASGTLIKWTKGFSIEDVVGQDVVGELAKAMERAGLDVRVTALVNDTVGTLAGGRYNDPDVIAAVILGTGTNAAYVERAHAIPKWHGLLPKSGEMVINMEWGNFLSSHLPVTEYDQNLDVESLNPGEQIYEKMISGMYLGEILRRVLCRMAKEASLFGDYVPSKLKIPFILRTPDMAAMHHDESADLKVVGNKLKDILEVPNSTLKMRKIVVELCDIITSRGARLSAAGIVGILKKLGKDTLKDGENQRSVIAVDGALFERYTKFRNCLEETMKELLGDTADSIVIELSNDGSGVGAALLAASPSQYTDLEES

SEQ ID NO: 32107 - protein, 302 aa, Leptosphaeria biglobosa 'thlaspii' group
WAKGHYTEGAELVDQVLDVVRREAEGCDCLQGFQITHSLGGGTGAGMGTLLISKIREEFPDRMMATFSVVPSPKVSDTVVEPYNATLSVHQLVENSDETFCIDNEALYDICMRTLKLNNPSYGDLNHLVSAVMSGVTTCLRFPGRLNSDLRKLAVNMVPFPRLHFFMVGFAPLTSRGAHSFRAVTVPELTQQMFDPKNMMAASDFRNGRYLTCSAYFRGKVSMKEVEDQMRNVQNKNSSYFVEWIPNNVQTALCSVPPRGLKMSSTFVGNTTSIQELFKRVGDQFTAMFRRKAFLHWYTGEG

SEQ ID NO: 32108 - protein, 510 aa, Nicotiana tabacum
MGRLAVGISAGFAVAACIVAAAMVGKRVKRRRKWKKMVKVLEELEESCGTPVGRLKQVVDAMAVEMHAGLASEGGSKLKMLLTYVDKLPNGREKGTYYALHLGGTNFRVLRVHLGGQRSAILGQDIERQPIPQHLMTSTSEDLLDFVASSLKDFIEKEGNGLEQPSPRRRELGFTFSFPVKQTSASSGILIKWTKGFSIEDMIGRDVSECLQQAIARKGQDVRVAALINDTVGTLALGHYNDEDTVAAVVIGTGTNACYLERADAIIKCQGLLTTSGGMVVNMEWGNFWSSHLPRTSYDIDLDVASPNPNDQGFEKMISGLYLGDIVRRVLLRMSQESDDFGPASSKLAVPFALRTPLMAAMHEDDSPDLSEVARILGEVLELPDVPVKVRKLVVKVCDVITRRAARLAAAGIVGILKKIGRDGSGGIAGGKFRSDRPSRMRRTVVAIEGGLYTSYTLFREYLNEAMKEILGEEISSNVILRVMEDGSGIGAALLAAANSASEVDRVQLH

SEQ ID NO: 32109 - protein, 302 aa, Leptosphaeria maculans 'brassicae' group
WAKGHYTEGAELVDQVLDVVRREAEGCDCLQGFQITHSLGGGTGAGMGTLLISKIREEFPDRMMATFSVVPSPKVSDTVVEPYNATLSVHQLVENSDETFCIDNEALYDICMRTLKLNNPSYGDLNHLVSAVMSGVTTCLRFPGQLNSDLRKLAVNMVPFPRLHFFVVGFAPLTSRGAHSFRAVTVPELTQQMFDPKNMMAASDFRNGRYLTCSAYFRGKVSMKEVEDQMRNVQNKNSSYFVEWIPNNVQTALCSVPPRGLKMSSTFVGNSTSIQELFKRVGDQFTAMFRRKAFLHWYTGEG

SEQ ID NO: 32110 - protein, 304 aa, Actinobacillus pleuropneumoniae serovar 1 str. 4074
MIELNGEPFGQMRQTYGGDTLNTATYLARVSTPEQIQVCYVSALGTDKLSQGMLAYWQADGIDTQWVLKDEQRSPGLYLIQLDKKGERTFLYWRNQSAARYLLQHSNFPQVLSELDSVDMIYLSGISLAILPENDRKLLITSLAKLKQAGVEIAFDSNFRPKLWESLEQAQACYRELLPLVDVALVTFDDEAMLWQDEDEQQTIARLSAYGIAKIIVKQGSRGAVVCEHLQQTFVPTIPVEHVVDTTSAGDSFNAGFLAGYLQGKPLAVCCRQGNQLAGIVIQHKGAIIDKSATAHLFAQFNAM

SEQ ID NO: 32111 - protein, 598 aa, Alkalilimnicola ehrlichei MLHE-1
MTQDQQSQIKQLIAKGKEQGFLTYAEVNDHLPDDIVDPEQIEDIIGMINDMGINVHEVAPDADELLLSDAAVSTDEDEAEEAAAALAAVDAEFGRTTDPVRMYMREMGTVELLTREGEIELAKRIEEGLDQVLAALSAYPGAAAKLLDLYRKVQDGEMRLNELMGGFRNPDEELSAYSADAGKEEDEDGEEAVVDNGPDPEMAAELFRRLAEADQRMQEVLRRQGSDSPECAELREQLAEIFLTFKFPPKIIDQLVDGLRRDVNVLRRNERHILKACTKAGMPRKTFVRSFISRETDPGWLDEMLASKEPWAQRLAEHEDDIRRAQQVLIDAERKVGMTIGEIKDINRRMSIGEAKARRAKKEMVEANLRLVISIAKKYTNRGLQFLDLIQEGNIGLMKAVDKFEYRRGYKFSTYATWWIRQAITRSIADQARTIRIPVHMIETINKLNRVSRQMLQEMGREPSPDELAERMEMPEDKVRKVLKIAKEPISMETPIGDDEDSHLGDFIEDINAMSPVDSATREGLRESVKGVLSGLTPREAKVLRMRFGIDMNTDHTLEEVGKQFDVTRERIRQIEAKALRKLRHPTRSEGLRSFLDE

SEQ ID NO: 32112 - protein, 488 aa, Listeria seeligeri
MTDRRNLTTNQGVPMGDNQNSMTAGLKGPTLLEDYVLIEKLAHFDRERVPERVVHARGAGAHGKFVTKKSMKKYTKAQFLQEEGTETEVFARFSTVIHGQHSPETLRDPRGFSVKFYTEEGNYDFVGNNLPVFFIRDAIKFPDVIHSLKPDPHTNIQDGNRYWDFFSLTPEATTMITYLFSDEGTPASYREIRGSSVHAFKWINEEGKTVYVKLRWVPKAGIVNLSTDQAAQIQAKEFNHASRDLYEAIENGDYPEWDLYVQVLDPKDLDNYDFNPLDATKDWFEDVFPYEHVGTMTLNRNPDNIFAETESVGFNPGVLVPGMLPSEDRLLQGRLFSYSDTQRHRVGPNYLQLPINSPKTPVANNQRDGQMPFKQQTSSINYEPNSYDTEPKENPAYIEPEQEIRGDISGRLAAEKPNNFGHAKEVWNRYSDAERAALVKNIVDDWQGVREDIKVRNLRNFYQVEPEFAERVAAGTGINLAEHVIDLK

SEQ ID NO: 32113 - protein, 320 aa, Idiomarina loihiensis L2TR
MGLLVDGQWHDKWYDTKKHGGRFVRSESQFRNTVAQGTEFEPESGRYHLYVSYACPWAHRALIFRKLKGLESHIDVSVVHPLMLENGWEFSDAPLNEPLYDADFLYQLYLKADPEYTGRVTVPVLWDKKNQTIVNNESAEIIRIFNSAFNELTGNTSDFFPAGKQKQIEEVNEWVYNDINNGVYRSGFATTQHAYEEAYESLFAALDKVENILSQSRYLAGDVLTEADWRLFTTLVRFDAVYFGHFKTNKKRIVDYPNMWNYLLELYQYPGVEETVVMDHIKTHYYASHKTINPTQIVPKGPEIDFHQAHNRGSKGSSQS

SEQ ID NO: 32114 - protein, 241 aa, Triticum aestivum
  misc_feature (228)..(228): Xaa can be any naturally occurring amino acid
  unsure (1)..(241): unsure at all Xaa locations
NKFVQKSRLVPVRNSRDIVDPRVREAFRVAVGNTLERRLFYVPSFKIYGGVAGLYDYGPPGCAVKANVLAFWRQHFVLEEGMLEVDCPCVTPEVVLKASGHVEKFTDLMVKDEKTGSCYRADHLLKDFCKEKLENDNTLSPEKVEELNHILAVLDDLSAEQLGAKIKEYGIVAPDTKNLLSDPYPFNLMFQTSIGPSGLSAGYMRPETAQGIFVNFKDLYYYNGKKLXPFAGTPIGQVFPA

SEQ ID NO: 32115 - protein, 367 aa, Shewanella sp. MR-7
MIVKAIPTNIITGFLGVGKTSLIKQLLKTKPEGETWAVLVNEFGEVGIDAGLMDASNSGVQIREVAGGCMCCAAGVPTQVAINQLIARAKPDRLLIEPTGLGHPNEIIKVLSAPHYQNVISLRSTLCLIDARKLRDERYRGHDNFIQQLHVADVIVTTKTDLYPEFEAAQGGQLAEELTQYLNELQLSDTSVMEHSALQGISTSLLESLKLPRRQATKASGSQSAVFKPVNSSSSLLRHTADTLGLQGIFAESASEQGFRFDARGLVRKHNQGEGCFSCGWVFEPMQEFDFDKLMQFISAQTQGHSALLRLKAVMITSDGIAGINWSDGDMALTELDDSLDSRLEMIATQEINWDEVEQGLIGCLVA

SEQ ID NO: 32116 - protein, 419 aa, Alkalilimnicola ehrlichei MLHE-1
MEQGLDESLLRAAVEQSYNAVVVTDPGLEGAGQRIRYVNAAFERMTGYTREELIGHTPKILQGAATDPAVLRTLRQRLAAGQGFEGSAINYRKDGRPYHVEWLISPVRDDSGRITAWLSIQRDVTHERELEQEARLLSTAVESSAASILITDTEGCIVYVNRGFEQITGYRRDEVLGETPAVLNSGEQSARFYRDLWTTLERGETFRGTFLNRNRSGALFYLEQSITPVRADQGQVVRYVATGKDITERVRMEEELKRAATTDALTGLANRLSFEQLLERDYERCRRYGGALSLLMFDLDHFKAVNDAHGHEAGDAVLQALAGLVLANVRTADTVARWGGEEFMVLLPETPLAAAGELAEKLRERVAAHRFPHGAPVTASFGVCALRDDDTCRTLVRRADEALYRAKHLGRDRVECLSR

SEQ ID NO: 32117 - protein, 831 aa, Streptomyces avermitilis MA-4680
MKAVVMAGGEGTRLRPMTSSMPKPLLPVVNRPIMEHVLRLLKRHGLNETVVTVQFLASLVKNYFGDGEELGMELTYANEEKPLGTAGSVKNAEEALKDDTFLVISGDALTDFDLTELINFHKEKGALVTVCLTRVPNPLEFGITIVDEEGKVERFLEKPTWGQVFSDTVNTGIYVMEPEVFNYVEADVSVDWSGDVFPQLMKDGKPVYGYVAEGYWEDVGTHESYVKAQADVLEGKVDVEIDGFEISPGVWVAEGAEVHPDAVLRGPLYIGDYAKVEADVEIREHTVVGSNVVVKSGAFLHRAVVHDNVYIGQHSNLRGCVIGKNTDIMRAARIEDGAVIGDECLVGEESIIQGNVRVYPFKTIEAGAFVNTSVIWESRGQAHLFGARGVTGILNVEITPELVVRLAGAYATTLKKGSTVTTARDHSRGARALKRAVISALQTSAIDVRDLENVPLPVARQQTARGSAGGIMIRTTPGVPDSVDIMFFDGQGADLSQGSQRKLDRVFARQEYRRAFPGEIGDLHFPASVFDSYTGSLLRNVDTTGISESGLKVVVDASNGSAGLVLPSLLGKLGVDALTINPGLDESRPTETADARRSGLVRLGEIVASARAAFGVRFDPVGERLSLVDEKGRIVEDDRALLVMLDLVAAERRSGRVALPVTTTRIAEQVAAYHGTQVEWTTTSPDDLTRVGGDESTIFGGDGRGGFIIPEFSSVFDGTAAFVRLIGLVARTQLTLSQIDARIPRAHVLKRDLATPWAVKGLVMRRVVEAAGDRFVDTTDGVRVVESDGRWVMVLPDPAEAVTHLWAEGPDDASAEALLDEWAAVVDSAGR

SEQ ID NO: 32118 - protein, 322 aa, Ustilago maydis 521
MSSALDSLKQYTAVVSDSGDFESIDAYKPQDATTNPSLILAAVKQEKYARLIDVAVKYAKEQTSDKSKQLDLATDRLLVAFGVEILKIIPGRVSTEVDARLSYNKEATIEKAKHLIALYESLGVKRERVLIKIASTWEGIQAARELESQHNIHCNLTLLFGFNQAVACAEANVTLISPFVGRILDYYKKAEGKEYASHEDPGVLSVQRIYTYYRQHGYKTIVMGASFRNIGEILELAGCDFLTISPKLLEELKNKEGPVEQKLSVEKAKSAEPIAKVSYINDQAAFLLDLAKDPMANTKLAEGIAGFAKDGATMEQMIADKL

SEQ ID NO: 32119 - protein, 217 aa, Zea mays
MASAPTPPPLLPVTNPAPGSSPAAAGGSDAPIATPAFRLFLSRLSDTARRSLSDRRPWGELLDRSAFSKPDSLSDATSRLRRNLAYFRVNYAAVVAFALGASLLAHPFSLLILLGLLAAWCFLYLFRASDQPVALFGRTFSDRETLLGLVGASFVLLFFTSVASLIISGLLVGGALVAAHGAFRVPEDLFLDEPNAAPGNSAAQGLLSFLGAPGSGV

SEQ ID NO: 32120 - protein, 539 aa, Geobacillus stearothermophilus
MAKEIKFSEEARRAMLRGVDKLADAVKVTLGPKGRNVVLEKKFGSPLITNDGVTIAKEIELEDPFENMGAKLVAEVASKTNDVAGDGTTTATVLAQAMIREGLKNVTAGANPMGIRKGIEKAVAVAVEELKAISKPIQGKESIAQVAAISAADEEVGQLIAEAMERVGNDGVITLEESKGFATELDVVEGMQFDRGYVSPYMITDTEKMEAVLENPYILITDKKVSSIQEILPILEQVVQQGRPLLIIAEDVEGEALATLVVNKLRGTFNAVAVKAPGFGDRRKAMLEDIAILTGGEVISEELGRELKSATIASLGRASKVVVTKENTTIVEGAGDSKRIKARINQIRAQLEETTSEFDREKLQERLAKLAGGVAVIKVGAATETELKERKLRIEDALNSTRAAVEEGIVAGGGTALMNVYSKVAAIEAEGDEATGVKIVLRAIEEPVRQIAQTAGLEGSIIVERLKTEKPGIGFNAATGEWVDMIEAGIVDPTKVTRSALQNAASVAAMFLTTEAVVADKPEENKGGNPGMPDMGGMM

SEQ ID NO: 32121 - protein, 420 aa, Shewanella sp. MR-7
MSNVRYISNLTRETYALILAGGRGSRLHELTDWRAKPALYFGGKFRIIDFPLSNCINSGIRRVGVVTQYKSHSLIRHVMRGWGHFKKELGESVEILPASQRYSENWYQGTADAVFQNIDIIRHELPKYVMVLSGDHVYRMDYAGLLAAHAESGADMTVSCLEVPVAEAAGAFGVMEVDDEMRILGFEEKPKHPKHSPGNPEKCLASMGNYVFNTEFLFDQLKKDAQNANSDRDFGKDIIPSIIEKHKVFAYPFKSAFPNEQAYWRDVGTLDSFWQANMELLSPTPALNLYDAKWPIWTYQEQLPPAKFVFDDDDRRGMAVDSIISGGCIISGATVRRSVLFNEVRVCSYSVVEDSVVLPDVVVLRHCKIKNAIIDRGCIIPEGTVIGYNHDHDRAKGFRVSEKGITLVTRDMLGLPVGYE

SEQ ID NO: 32122 - protein, 232 aa, Hyacinthus orientalis
ESFRSDYVLGEGGFGTVYKGYTDENARVGSKSLPVAVKVLNKDGLQGHREWLTEVNFLGQLRHPNLVKLVGYCCEDDHRLLVYEFMFRGSLENHLFRKTAAPLPWATRMMIALGAAKGLAFLHNAERPVIYRDFKTSNILLDSDYTAKLSDFGLAKAGPHGDETPCVNSSNGHIWICSSRSMQRLVIRRRGAMSTAFGVVLLQLLTGPGVGGQDPAPATEQSPPRLGPPPSL

SEQ ID NO: 32123 - protein, 321 aa, Gossypium hirsutum
MAHHHHATLTVPTTVPSVSEDCEQLRKAFSGWGTNEGLIIDILGHRNAEQRNLIRKTYAETYGEDLLKALDKELSNDFERLVLLWALDPAERDALLANEATKRWTSSNQVLMEIACTRSANQLLHARQAYHARYKKSLEEDVAHHTTGDFHKLLLPLVSSYRYEGEEVNMTLAKTEAKLLHEKISNKAYSDDDVIRVLATRSKAQINATLNHYKNEYGNDINKDLKADPKDEFLALLRSTVKCLVYPEKYFEKVLRLAINRRGTDEGALTRVVCTRAEVDLKVIADEYQRRNSVPLTRAIVKDTHGDYEKLLLVLAGHVEN

SEQ ID NO: 32124 - protein, 535 aa, Zea mays
  misc_feature (196)..(196): Xaa can be any naturally occurring amino acid
  misc_feature (211)..(211): Xaa can be any naturally occurring amino acid
  unsure (1)..(535): unsure at all Xaa locations
MAAPGRAALLAAALLFGTFFPSASSASSYPARIAGRLLSTTSSAVAKQLWSLKSAATKTATTAVTGRSMVRYEGGYAVDTVFDGSKLGIEPHAVEITPAGNLLVLDSINSNIYRVQLPLSPYSRPKLLAGSPKGLSGHVDGRLREARMNHPKGFTVDDRGNIYVADGMNMAIRKISDTGVTTIAGGKSIRGGAHRXGPSDDAKFSTDFEIXRNQAIREIPLNDDDCAYQYEAGFPLGFALLCAAGFFGYMLAMLQRRLLGMSSTTDIIVKDPQAPPRPSIASIPPSYQKPLNPYIRHPFIPREETAKQETGEGFFTTAGKLMGGAKSSVGEIFGFKKKRLSSPYHHQQQQQQQQRRANPWPVQESYAMTHDEPPPALDTRAPTPQKNYSLMRKEPEKTHYVRHGHPYFNSWDGHCHPQQQPDQQLYRQQQHLQQHRQYSAGPQTFYEQSCEPTKEIVFGAVQEVDSKRRMVEIKAVNYGDTFYERCAGDKASICSQSTVAVAATQAPIPWMPVAFGGNYARHSVPDLVMALNAFT

SEQ ID NO: 32125 - protein, 2201 aa, Mycobacterium leprae TN
MTASTPDRRAIITEALHKIDDLTARLEIAEKSSTEPIAVIGMGCRFPGGVNNPEQFWDLLCDGRSGIVRVPSDRWDADAYYTDDHTVPGTICSTEGGFLTGWQPDEFDAEFFSISPREASAMDPQQRLLIEVAWEALEDAGVAPHTIRGTQTSVFVGVTAYDYMLTLAGRLRPEDLDAYIPTGNSANFAAGRLAYILGVRGPAVVIDTACSSSLVAVHLACQSLRHRESDAALVGGTNLLLSPGPSIACSRWGMLSPAGQCKAFDVSADGYVRGEGAGVVVLKRLDDAVRDGNRILAIVRGSAVNQDGASSGVTVPNGPAQQELLRTALASSKLTAADIDYIEAHGTGTPLGDPIELDSLSKVFSDRQSRRGSVPLVIGSVKTNLGHLEAAAGIAGFIKAVLAVQRGFIPRHLNFHQLTTHASEAASRLNIASEGLEWPTVGRPRRAGVSSFGVSGTNAHVVLEQAPDPVAVPAPGPALRLVPAVSTLVVSGKTVQRVAATASVLADWMEGPGAAVPLTDVAHTLNHHRARHTKFGTVAAVDRGQAVAGLRALAAGQSTSGVVAPRDSVVGPGTVFVYSGRGSQWAGMGRQLMADEPAFAEAIAKLEHEFVVQAGFSLHEVIANGKELVGIEQIQLGLMGMQLALTELWRSYGVEPDAVIGHSMGEVAAAVVAGALTPTQGLRVTATRSRLMAPLSGQGTMALLELDAVATEALIADYPQVSLGIYASPRQTVIAGPTAMIDALIDKVRQQDGFATRVNIEVAPHNPAMDALQPQMRSELADLTPQQPTIPIISTTYEDFGSTPVFDVEHWATNMRNPVRFQQAITHASSGVGGDYHTFIEISAHPLLTHSISDILCSIAGTAEENAVGAGYLSIGTLQRDAHDTLEFHTNLNATHTSRPPRTPHPPEPHPVLPITPWQHTRHWISAMSAAYHRADTHPLLGVGVTDPTSGTRVWESQLGPDLLWLGDHVIDDLCVLPGAAYAEVALAAATDTFPNERVEGDQPWMIYELDLHQVLHVTEGTVLVTTLTGDQQRCRIEMRTRNGFSGWTTHATATVGPAESVQPSDREERTATPVDVVDELGPEDLYQRLCSAGQQHGPAFQGIVGLAVEESGAARAEVRLPSSARMGFRDFLLHPVMMDIALQTLGATRMATDLAGGPTARKTLVLPVRFAGVHVYGDVTRGVCAVGLLTATEGLDRLVGEVVLTDLDGQPLLVIDEVQMTVLGAGSDATELTDRLFTLEWEPTPLYKEVSRSSAQGGLLLIGDVAAGDPLLLALQSSLRARLSENGPPPVDCVSFSDEVKLQAAITRTDISWDGIVVVCPPRASDESLPDDAQLELAQTRTLQIAGVVQAVTQMGARKSPRLWIVTRGAQQLNAGESVTLAQTELRGIVRVLTFEHSELKATLLDIEADGTDSLDDLTEELLAGSNHDEVAYRDGQRYVNRLVPAPITPKGELAGETRRKVVELGGLGAVQLQIDQPGRLDALTVHQVKRGEPEGDQVEVRVVAAGLNFSDVLKAMGVYPGLDGGAPAIGGECVGYVTAIGDDVDSVEVGQRVIAFGPGTFGTYVGTIADLVVPIPDTLSDHEAATFGVAYLTAWHCLCEVGRLSPGERVLIHSATGGVGMAAVSIAKMLGARIYTTAGSDAKRQMLSELGVEYVGDSRSVDFADEILELTHGYGVDIILNSLADKAIQRGVQILAPGGRFIEIGKKDVYDDANLGLAALAKSASFSVVDLDLNLKLHPARYRQLLQHILAHVADGRLPVLPVTEFSLHNAADAFRLMASGKHTGKIVISIPYEGNIEAIASPPPVPLVSQDGGYLVVGGMGGLGFVFARWLAEQGAGLIVLNGRSSPSDDVTAAIADLTAAGHRIEVVTGDISEPGTADRLVHAVQSAGFRLAGVLHSAMVLADEIMLNMTDSAARRVFVPKVTGSWRLHQATAAFEVDWWLTFSSASSLLGTPGQGAYAAANAWVDGLVAYRRSLGLPAVGINWGPWAEVGRAQFFAGLGVSLLTAEQGLAAMQTVLAADRAQTGVFSLDARQWFQSFPAVAGSSLFANLRDTATLKSGERRGVGKIRAQLDVLDAAERPGHLASAIADEIRAVLRSSDPIDHDRPLEALGLDSLMGLELRNRLEASLGITLPVALVWAYPTTADLAAALCERMDYALPAEVQEATDTNAELSKAEMDLLSDLVEASELEAATRGES

SEQ ID NO: 32126 - protein, 402 aa, Rhodobacter sphaeroides 2.4.1
MKRVVITGAGTINALAHDVAGTLAAFREGRCGITELDIRDKDRLSIQIGGQVHNWDPEAHFNRQQIVLYDKFTQFTLLAAREAVAQSGLTFAGSLGLEAGVILGTAGGGVNTWDENYRVVYEEGKNRVHPFVVPKLMNNAAASHVSMEFQLRGPSFTVATACASSNHAMGQAFQMVRSGMARAMLTGGSEAMLCFGGIKAWEGLRVMSKDACRPFSLNRNGMVQGEGAAIFVFEEYEHARARGAEILAEVIGFAMTSDASDIVMPSKLGAARAIEGALRDARVTPDAVGYINAHGTGTAANDKTECAAVADVFRHHADRLMISSTKSMHGHLIGGTGAVELLACILALREGVIAPTIGYEEPDPECALDVVPNVARQARVDVVLSNAFAFGGLNAVLALRRV

SEQ ID NO: 32127 - protein, 58 aa, Hyacinthus orientalis
AGSSRRSDIKREHSTQLLGDVLAKPWLPLPLGLKPPSLESVMVELQKQGVANVPPTCS

SEQ ID NO: 32128 - protein, 574 aa, Aspergillus fumigatus
MSDPVDAADLVAVAQAHAPKQSLEVVPVKEHETRVVATARRLDDQGREIPTEEEEHTLRRVAGKVHWTAYTIAFVELCERFSYYGTTAVCTCQLHSAASPRWFEHWSRVCLTLAIVNTFWCYLMPILGAYIADEFWGRLKTIQVSIAFAMVGHIILIISALPSVIAHPHGALGCFAVGLVIFGIGVGGFKSNIAPLIAEQHKETRSFIKVIPKTGERVIVDPAQTITRIFLYFYFMINVGALVGSIAMVYAEKYVGFWLAFLLPTIMFAFCPAVIFACRNKYEVTPATGSVSAKAFKLWAFALQGRWSWNPVRLVQNKPEWMTFDDQWVDEVRRAVKACAVFLWYPVYWLAYGQMTNNLTSQAATMQLNGVPNDLINNLDPLALIIFIPIMDQFIYPGIRRMGFNFTPLKRIYVGYFLASMSMIAAAVTQYYIYKMSPCGDHPSDCDKPAPINVWVQTLPYVLIAFSEIFTSITGYEYAFTKAPKNMKSLVQSIYLFMNAISSAIQQGLTALSTDPLLIWNYGFVAVLAFVAGNLFYLTHYSLDKEEDRLNNLEASAYLGTNPGARDEKIDPEP

SEQ ID NO: 32129 - protein, 492 aa, Prunus persica
MGSSSATSNRLLLSKIATSEGHGENSPYFDGWKAYDRNPFHPTKNPEGVIQMGLAENQLSFDLIEDWIKKNPKASICTPEGVEEFKNVAIFQDYHGFPEFRKAVAMFMSKARGGRVTFDPNRVVMSGGATGANELVMFCLADPGDAFLVPSPYYPAFYRDLGWRTGVQIVPVDCDSSNNFQITKEALAAAYEKAQKNNINVKGLIITNPSNPLGTTLDRDTLESLVEFINQKNIHLVCDEIYAATVFSSPTFTCISEVIQNMNCNPNLIHIVYSLSKDMGLPGLRVGIVYSYNDDVVNIGRKMSSFGLVSSQTQHMLASMLLDEEFVARFLETSSKRLARRHGVFTKGLEEVGINCLKSNAGLFCWMDLRRLLKDRTFDGEMVLWRVIVNEVGLNVSPGSSFKCVEPGWFRVCFANMDDETVEVALKRIRTFVRQGKKAQDQAVQVKSPKRWKSNLRLSFSSSSTRRFDQDSVNVLSPHMMSPHSPLVRAKT

SEQ ID NO: 32130 - protein, 143 aa, Idiomarina loihiensis L2TR
MALERTLSIIKPDAVAKNLIGAIYNRFESAGLRIVGAKMMHLSKEQAEGFYAEHKERPFFGALVEFMTSGPIVVQVLEGEDAVRKNRDIMGATNPAEALAGTIRADYAETIDENAVHGSDATESAAREISYFFSDEEVCQRTR

SEQ ID NO: 32131 - protein, 449 aa, Clostridium symbiosum
SKYVDRVIAEVEKKYADEPEFVQTVEEVLSSLGPVVDAHPEYEEVALLERMVIPERVIEFRVPWEDDNGKVHVNTGYRVQFNGAIGPYLGGLRFAPSVNLSIMKFLGFEQAFKDSLTTLPMGGAKGGSDFDPNGKSDREVMRFCQAFMTELYRHIGPDIDVPAGDLGVGAREIGYMYGQYRKIVGGFYNGVLTGKARSFGGSLVRPEATGYGSVYYVEAVMKHENDTLVGKTVALAGFGNVAWGAAKKLAELGAKAVTLSGPDGYIYDPEGITTEEKINYMLEMRASGRNKVQDYADKFGVQFFPGEKPWGQKVDIIMPCATQNDVDLEQAKKIVANNVKYYIEVANMPTTNEALRFLMQQPNMVVAPSKAVNAGGVLVVGFEMSQNSERLSWTAEEVDSKLHQVMTDIHDGSAAAAERYGLGYNLVAGANIVGFQKIADAMMAQGIAW

SEQ ID NO: 32132 - protein, 488 aa, Rhodobacter sphaeroides 2.4.1
MTRMTTTAGAPIADNQNTLTAGPRGPVLLEDYQLIEKLAHQNRERIPERVVHAKGWGAFGTFTVTNDITRYSCAKVFSEVGKQTDLAVRFSTVAGELGAADHERDVRGFSVKMYTEEGNWDLAGNNTPVFFVRDPMKFPDFIHTQKRHPRTNLRSATAMWDFWSLSPESLHQVTILMSDRGLPVDPMHMNGYGSHTYSLWNAQGERFWVKFHWKTLQGHAHYTNAEAAEIVGRTREGYQEALFGAIEEGRFPKWRLMVQVMPEAEAETTPYNPFDLTKVWPHSDYPLIEVGVMELNRNADNYFAQIEQLAFSPSNKVPGIGYSPDKMLQARVFSYADAHRYRLGTHYEALPVNAPRCPVHHYHKDGQMNFFGHRTGAVDAYYEPNSVPGAAVEDPAVAEPPLRISGDAARYNHREGNDDYSQPRALHDKVMTDEQRARLYANIAEAMAGIPEEIANRAIAQFDRVSPAYGEGIRAARARLAGALQAAE

SEQ ID NO: 32133 - protein, 181 aa, Idiomarina loihiensis L2TR
MANNEYEQATLGGGCFWCVESAFLQVKGIQSVKSGYTGGHTIDPTYEQVCSGETGHAEVAQLQYDPEQISYRQILEIFFTLHDPTQVNRQGNDVGTQYRTSIFYHNDAQKREAESIIAELEADAAFAAPIVTEVTELGTFYPAENYHENYYARNPENPYCQAVISPKLAKFRKTFAGLLKD

SEQ ID NO: 32134 - protein, 630 aa, Mesorhizobium loti
MCGIFGIVLKNEGTPVCAAAVERCADALAHRGPDASGLYINQSVAFAHRRLSIVDAHSRANQPYRDANTGVVVTYNGEIFNYREIKAELRDMGFSFSTVSDTEVLILSYIAWGKSFLNRLDGIFAFALFDPRKSLVLIARDRLGVKPLYYTICDVGLLFASQPNALIRWPGVMHGPDMIGALSFLSYRAVVGARTLFAGISKLEPGHLLEIRNGRHTSERWWNLSARISRSKPDYSDIRRLFGSAVERQLVADVPVAALLSGGLDSSILAYEASARSQIRPVCYTGKVETPDYDETAYAMEVAAEFGLTHRVVPIGEPSDINAVAELVRLRGHPLGMHNETAMFTLAKAISKEHKVVLTGEGADEIFAGYSRLFRTPYDYNRSKIITALPPALAQIARRRLGLGVHCSQLQFFLERYSYFPADEIRSLAIDGQMRTEHEMELFDHFSTQFAEAGGDFFSKISYVLVSTHLPALLEMVDNTTMAAGLEARVPYTDHQLVTAAMAMPGSQRLRWRSPIASAQALWHPVASFSERLDVSKYPLRREYRSVLPKSVLSRKKMGFPLPLGQWAVGEGATEYRRLLFDKDSPLGDLFDPAALRRWFKAGRRNPSDSFGRKFWLLANLGIFFKEVFS

SEQ ID NO: 32135 - protein, 243 aa, Rhodobacter sphaeroides 2.4.1
MTKKLLAELLGTFILVFFGCGAAVLMGPQIGMLGISLAFGLSIVAAAYSLGAISGAHLNPAVSLGFLMAGRMPMAEFGGYVLAQIAGALLGSLVVFLIASGKAGYVLATDGLGQNGFGAGYLGEYSMGAALIFELIATFVFVSVILAATASHVSSASTALAGLAIGLTLTGIHLVGINVTGVSVNPARSLAPALFVGGKALSDLWVFIVAPLAGGAAAGLAHASGFFRPGGIEPAPATGAATL

SEQ ID NO: 32136 - protein, 153 aa, Arabidopsis thaliana
MGSSSSSPKPDNVQEAEKNEFASLSENEWKKRLTPEQYYITRQKGTERAFTGEYWNSKTPGVYNCVCCDTPLFDSSTKFDSGTGWPSYYQPIGNNVKTKLDLSIIFMPRQEVVCAVCNAHLGHVFDDGPRPTGKRYCLNSAALKLNALEKTRD

SEQ ID NO: 32137 - protein, 347 aa, Nostoc punctiforme PCC 73102
MFQTQLQHPTSKDEMQTTQTLKQIIAGAWITQGIYVVAQLGIADLLKDGSKSYDELATKTGVDARSLYRLLRALASVGIFAEGNSGYFELTPVAESLQSDRTDSLRGYAIKSGQAWEWQPWGHLLESIKTGKPVFKNIFGMERFDYLATDPSASKIYTQAISSISGEQDAAIAAGYDFSFIHNLVEVGGGNGTLIASILKSNLTMQGILFDLPHVVADAKPVIEDLELQDRCQLVGGNFFESVPTSGDAYLLRYIIHDWDDERAIAILKNCYQAMQPDGRLLLVEMVIPQGNEPFFGKLLDLQMLVNYGGRERTQAEYQVLLKTAGFSLTKIYPVAPPISIIEAIRL

SEQ ID NO: 32138 - protein, 279 aa, Triticum aestivum
NKFVQKSRLPPVRNSRDIVDPRVRLKAEADTDEVYAQVMLMPEPEQSDATTTEKSSPATGGTTPARLAVRSFCKTLTASGTSTHGGFSVLRRHADECLPPLDMTQSPPTQELVAKDLHGMEWRFRHIFRGQPRRHLLQSGWSVFVSSKRLVAGDAFIFLRGESGELRVGVRRAMRQLSNIASSVISSHSMHLGVLATAWHAINTKTMFTVYYKPRTSRSEFIIPYDKYMDSVKNIYSIGTRFKMRFEGEEAPEQRFTGTIVGSDNLDQLWPESSWRSLK

SEQ ID NO: 32139 - protein, 474 aa, Oryza sativa
QRKKNLPSKRTANRLLKMQIFVKTLTGKTITLEVESSDTIDNVKAKIQDKEGIPPDQQRLIFAGKQLEDGRTLADYNIQKESTLHLVLRLRGGMQIFVKTLTGKTITLEVESSDTIDNVKAKIQDKEGIPPDQQRLIFAGKQLEDGRTLADYNIQKESTLHLVLRLRGGMQIFVKTLTGKTITLEVESSDTIDNVKAKIQDKEGIPPDQQRLIFAGKQLEDGRTLADYNIQKESTLHLVLRLRGGMQIFVKTLTGKTITLEVESSDTIDNVKAKIQDKEGIPPDQQRLIFAGKQLEDGRTLADYNIQKESTLHLVLRLRGGMQIFVKTLTGKTITLEVESSDTIDNVKAKIQDKEGIPPDQQRLIFAGKQLEDGRTLADYNIQKESTLHLVLRLRGGMQIFVKTLTGKTITLEVESSDTIDNVKAKIQDKEGIPPDQQRLIFAGKQLEDGRTLADYNIQKESTLHLVLRLRGGQ

SEQ ID NO: 32140 - protein, 410 aa, Thiobacillus denitrificans ATCC 25259
MSKRRVVVTGLGIVSPVGNTIPEAWDNLVAGRPGISRITRFDPTPFASQMAGEVRNFDVAQYLNPKDARRMDVFIQFGMAAGIQAIRDSGIEVTEANSDRIGINIGSGIGGLPLIEETHGLLMESGPRKISPFFIPGSIINMISGNLSILYGINGPNLAVVTACTTGLHAVGLSARMIQAGDTDVMIAGGAECATSPLGVGGFAAARALSTRNDDPATASRPWDKDRDGFVLGEGAGVLVLEEYEHAKARGAKIYSEVAGFGMSGDAYHMTAPSTDGPRRSMVNAMRDAGLNPDQIQYINAHGTSTPLGDKNETEAIKLALGDAAYKAVVNSTKSMTGHLLGGAGGVESVFSVLAVHHQVSPPTINIFSQDPECDLDYCANTARDMKIDAALKNNFGFGGTNGSLVFKRV

SEQ ID NO: 32141 - protein, 451 aa, Candida glabrata CBS138
MFKVKTLERRNLKQLSLGGGCLGGSAHAGSEELRHECNGNKLIVEDMALAVGSDEHIEPHSGSGSASASSMSGLSIHDHAGDAAKPATLAVDGHSGCNYDLRDLVQLGKLGSGNSGTVMKVLHVPSSRVIAKKTIVIEQNNAIVKQQIYRELTIMRSVAEHRNIVEFYGAHNLSSDSINGSNDVVILMEYMNCGSLDTITRTYKSLQRRGILAANRSYPVQEWFSKPVIISRIAYSVLNGLSYLYENYKIIHRDIKPSNVLINSKGRIKLCDFGVSRKLNNSIADTFVGTSTYMSPERIQGNKYTTKGDVWSLGLMLIELLTGEFPLGGHNDTPDGILDLLQRIVNEPAPKLPSSVIKVLPPDMVNFIDLCCVKVEKDRGSLQELLKHPFIVRFRTKESTDAFKLWTKDIRRWMQEERNYKKETSEHSMLLKKQHNTNDTRHSRHMTSSLK

SEQ ID NO: 32142 - protein, 349 aa, Yarrowia lipolytica CLIB122
MTETLRTQCTWLGLYFFFNLALTLFNKAVLGSFPFPYTLTGIHTLCGTLGCALLHWRGVFKLTRLSDQENTTLILFSILYTINIAISNVSLQMVTVPFHQVVRATTPFFAMLINVVFLRHSYTVLTYLSLVLVCAGVGFATAGDYYFTAMGFILTILGAVLAAVKTVVTNRIQTGRFRLSPLELLYRMSPLAFVQTLVYAYLAGELDVLGLRLSSPEDVVGATASATSGPLSFLGGIDYTEIEFEYSQKLMLHLLLNGIIAFGLNIVSFTTNKKTGALTMTVAANVKQILTIVLAIFFFNLTVTPLNMMGILVTLLGGAWYAKLELDRKSDNSGAESALPVKEANRSQA

SEQ ID NO: 32143 - protein, 315 aa, Ustilago maydis 521
MYIEDPAEIAAIATEFISNLDNLPQEVSHMVKEIEHIGCTDPKSYSPSLPEADRIKAEKLTDKIRSDYGRADEWSSQKEALSLRLWRAIHAHQKHLKEEMNKISPAVLSNYASTASIGTPVVPSLSALPAALAGLKSPAVEMESPLAGLKRKGSLLSPGVGTLIPGTPMSAAARARAGGRTTPLDSGSPAPPERGLGGAIRGGGASRKARGGSLSASGPGRSGLSQSTELGGLGGLEGFEGEGGEGEEGEEKDDTPYCFCQRVSFGEMIGCDNAENDPDCKEWFHIGCVGVTKPLPQKWYCSECLAKLKNKRRRQ

SEQ ID NO: 32144 - protein, 341 aa, Candida albicans
QAVPVTLHNEQVTYAADITVGSNNQKLNVIVDTGSSDLWVPDVNIDCQVTYSDQTADFCKQKGTYDPSGSSASQDLNTPFSIGYGDGSSSQGTLYKDTVGFGGVSIKNQVLADVDSTSIDQGILGVGYKTNEAGGSYDNVPVTLKKQGVIAKNAYSLYLNSPDSATGQIIFGGVDNAKYSGSLIALPVTSDRELRISLGSVEVSGKTINTDNVDVLLDSGTTITYLQQDLADQIIKAFNGKLTQDSNGNSYEVDCNLSGDVVFNFSKNAKISVPASDFAASTQGDDGQPYDKCQLLFDVNKANILGDNFLRSAYIVYDLDDNEISIAQVKYTSASSTSALT

SEQ ID NO: 32145 - protein, 488 aa, Listeria seeligeri
MTDRRNLTTNQGVLIGDNQNSMTAGLKGPTLLEDYVLIEKLAHFDRERVPERVVHARGAGAHGKFVTKKSMKKYTKAQFLQEEGTETEVFARFSTVIHGQHSPETLRDPRGFSVKFYTEEGNYDFVGNNLPVFFIRDAIKFPDVIHSLKPDPRTNIQDGNRYWDFFSLTPEATTMITYLFSDEGTPASYREIRGSSVHAFKWINEEGTTVYVKLRWVPKAGIVNLSTDQAAQIQAKEFNHASRDLYEAIENGDYPEWDLYVQVLDPKDLDNFDFNPLDATKDWFEDVFPYEHVGTMTLNRNPDNIFAETESVGFNPGVLVPGMLPSEDRLLQGRLFSYSDTQRHRVGPNYLQLPINSPKTPVANNQRDGQMPFKQQTSSINYEPNSYDTEPKENPAYIEPEQEIRGDISGRLAAEKPNNFGHAKEVWNRYSDAERAALVKNIVDDWQGVREDIKVRNLRNFYQVEPEFAERVAAGTGINLAEHVTDLK

SEQ ID NO: 32146 - protein, 244 aa, Triticum monococcum
MGRGKVQLKRIENKINRQVTFSKRRSGLLKKAHEISVLCDAEVGLIIFSTKGKLYEFSTESCMDKILERYERYSYAEKVLVSSESEIQGNWCHEYRKLKAKVETIQKCQKHLMGEDLESLNLKELQQLEQQLESSLKHIRSRKNQLMHESISELQKKERSLQEENKVLQKELVEKQKAHAAQQDQTQPQTSSSSSSFMLRDAPPAANTSIHPAAAGERAEDAAVQPQAPPRTGLPPWMVSHING

SEQ ID NO: 32147 - protein, 484 aa, Leptospira interrogans serovar Copenhageni str. Fiocruz L1-130
MSKKVFLNILILLSIFQLSAQNGNTADLKVLLDGVVIIRSDTFSEKEDQDNYSEKSILRDAGTGMIISGNRILTNAHVVSNSSYLKVKHFNSSKFYKAEVQYLGFDCDLAILKVEEDEFFSGVEPLEISEVSPALGSNLLILGYPGGDENITLENGNVSRVERVRYSFSGLDYRKAIRVNANIIPGYSGGPAIQNGRVVGITFQVSQSQGNVAYLIPPEIINHFLKDVEDGTYHGFPFPGFSFQNGHSSSLKSYLKIPEGLNGILINTIYPDSSFSDLLQPEDFVYKIDNSYLDGDGGIMDEIGGFIGDLIEEKFIGDHIKLFFYRNGKNYKVEGTLKRVPTLDIYRQQNKSSSFLSGGFLFQPVNRALAGGDSKRLESSLRYHYSYYIQDELYRFTDRDILLSGIYPDPLNSKYASYRYKILESINDRTPSDLEDFKSLWKKFYGGTISLKFRGVNLPIILDQDTIDKINIRIKKRFDVEADE

SEQ ID NO: 32148 - protein, 364 aa, Malus xiaojinensis
MAATKSHLKLIPIIFFILIISILTPKAYSQSEEDECSTENTSSCNDKSGAVPLKIIALVSILVTSMIGVSFPLVTRSIPAFHPDRNLFVIVKCFAGGIILATGFMHVLPDSYAMLQSSCLKENPWHKFPFSGFVAMLSAILTLMVDSMATSIYSRRCRTGVIPDKGETPALEVDQEMAVVGAGHGHFHAHNHVVDKGENGDSQQLSRYRVVAMVLELGIIVHSVVIGLSLGASNNTCTIKGLVAALCFHQMFEGMGLGGCILQAEYKFMKKAIMVFFFSTTTPFGIAIGMAMTKSYKENSPKSLIAVGLLNASSAGLLIYMALVDLLAADFMGPKLQRSIKLQIKSYIAVLLGAGGMSVLAKWA

SEQ ID NO: 32149 - protein, 96 aa, Actinobacillus pleuropneumoniae serovar 1 str. 4074
MTLRPLHDKVILKREEVETRSAGGIVLTGSAATKSTRGKVIAVGTGRLFENGSVQALAVKVGDVVIFNEGYGVKSEKIDGEEVLILSENDILAIVE

SEQ ID NO: 32150 - protein, 488 aa, Listeria seeligeri
MTDRRNLTTNQGVPIGDNQNSMTAGLKGPTLLEDYVLIEKLAHFDRERVPERVVHARGAGAHGKFVTKKSMKKYTKAQFLQEEGTETEVFARFSTVIHGQHSPETLRDPRGFSVKFYTEEGNYDFVGNNLPVFFIRDAIKFPDVIHSLKPDPRTNIQDGNRYWDFFSLTPEATTMITYLFSDEGTPASYREIRGSSVHAFKWINAEDKTVYVKLRWVPKAGIVNLSTDQAAQIQAKEFNHASRDLYEAIENGDYPEWDLYVQVLDPKDLDNFDFNPLDATKDWFEDVFPYEHVGTMTLNRNPDNIFAETESVGFNPGVLVPGMLPSEDRLLQGRLFSYSDTQRHRVGPNYLQLPINSPKTPVANNQRDGQMPFKQQTSSINYEPNSYDTEPKENPAYIEPEQEIRGDISGRLVAEKPNNFGHAKEVWNRYSDAERAALVKNIVDDWEGVREDIKVRNLRNFYQVEPEFAERVAAGTGINLAEHVTDLK

SEQ ID NO: 32151 - protein, 547 aa, Actinobacillus pleuropneumoniae serovar 1 str. 4074
MAAKDVKFGNDARVKMLKGVNVLADAVKVTLGPKGRNVVLDKAYGAPTITKDGVSVAREIELEDKFENMGAQMVKEVASKANDAAGDGTTTATVLAQAIVNEGLKAVAAGMNPMDLKRGIDKAVVAVVEELKAISKPCETSKEIEQVGTISANSDETVGKLIAQAMEKVGKEGVITVEDGTGLDDALDVVEGMQFDRGYLSPYFINKPEAGTVELENPYIILVDKKISNIREILPVLEAVAKAGKPLLIVAEDIEGEALATLVVNTMRGIVKVAAVKAPGFGDRRKAMLQDIAILTAGTVISEEIGMELEKATLEELGQAKRVVITKDNTTIIDGIGDEAQIKARVAQIRQQIEDSTSDYDKEKLQERVAKLACGVAVIKVGAATEVAMKEKKDRVDDALHATRAAVEEGIVPGGGVALVRAASKVAATLTGDNEEQNVGIKLALRAMEAPLRQIVTNAGEEASVVARNVKDGNGNYGYNAGTEQYGDMLEMGILDPTKVTRSALQFAASIAGLMITTECMITDLPKEEKLDPAAAMGGMGGMGGMI

SEQ ID NO: 32152 - protein, 428 aa, Gluconobacter oxydans 621H
MSGTATNGRRVVVTGIGVVSPLAVGAELTWKRLIEGQSGIGRITHFDPSELPAQVAGQVPDGPTAEGGLTLSDWVPVKDQKKMDRFIHLGLAAAIQAVEDSGWKPEDEDGRCATGVMIGSGIGGLQTIYDGSLTVSSGKARRLSPFFIPSALINLISGHLSIRYGFKGPNHAVVTACATGVHAIGDASRLIQYGDADVMVAGGAEAAICSLGIAGFCSARALSTGSNDDPTKASRPWDKDRDGFIMGEGAGVVVLEELEHAKRRGAKIYGEIGGYGMSGDAYHITAPAEGHNGAFRAMKAALRNSGGLTTADIDYVNAHGTSTMADDLELDAVERFFGDDAKRLAMSSTKSAIGHLLGAAGAVEAIFCLQAIRDGIVPPTLNLDNPARESVIDRVAHVAQERKIDVALSNSFGFGGTNASIILKRFKD

SEQ ID NO: 32153 - protein, 170 aa, Ashbya gossypii ATCC 10895
MSFNSPFFDFFDAINNEVANYNRLLGRGHSSSAVTKHGKKDTTDWLTNARIIPPVDVLEQEKDYEVHVSVPGIVDQDKISIEFHSDRGELVISGEVPTKETEENKDGWRVRERATGSFRRVVGLPDKPGVDAEHITANYEHGVLTLRVPKLEPRENQAVRKIQVGRGSAK

SEQ ID NO: 32154 - protein, 309 aa, Anabaena variabilis ATCC 29413
MWEYTEKVLELFYNPKNQGAIADSNEAGVAVVFGEVGSIACGDALRLHLKIEVDTDKILDARFQTFGCTSAIASSSALTELVKGLTLDAALKVTNKEIAEYLGGLPEAKMHCSVMGQEALEAAIFKYRGIPVAAHDDDEGALVCRCFGISESKVRRVIRENNLTTAEQVTSYIKAGGGCGSCLADIDDLISAVIKESAPVGTSYKLSTQIAATTQKQSPRQLTTVQKIALIQKVLDEEVRPLLIADGGDIELYDVQGDNVQVVLQGACGSCPSSTATLKVAVEAKLQERVSQSLRVEAVDPLFSVSRAR

SEQ ID NO: 32155 - protein, 506 aa, Nicotiana tabacum
MGFERAFVESSPEQENKLFVGVSYMDSSNKNQDPSESNNQISFGGQHQHHQQQFFYNHHQQQQLQNNNQVSFGMMQQSSSAIPGSLISKDSAGAYDLGELDQALFQYLDGQEPSSIQEQRQNSGMRPPTLNIFPSQPMHVEPSTTNKMNTGLVSPAISGSKRSSQPSMELSNNLKNNDAPSASGPEPPKAAKREGNRKGPTSSSEQDAPKTPDPKTLRRLAQNREAARKSRLRKKAYVQQLESSRIRLTQLEQELQRARAQGYYFGGNSLLGGEQNLPVNLANMSSDAAVFDMEYARWLEEHHRLMCELRNAVQEHFPENELRIYVDNCVTHYDEIMNLKSMLTKSDVFHLVSGMWKTPAERCFMWMGGFRPSELLKIILSQIEPLTEQQLMGICGLQQSTQEAEDALSQGLEALNHSLSDTIASDALSCPQNMANYMGQMALAMNKLSTLEGFVRQADNLRHQTIHRLHQLLTTRQAARCFLAIAEYFHRLRALSSLWHARPRQE

SEQ ID NO: 32156 - protein, 569 aa, Saccharomyces cerevisiae
MMTKAFFNKLPFEVFRRYVRTGKSIPQRSPRTRKSLLVGGTIASAVVLYNFNDTFHDSVKHTALTTKRIAVVTQATTRCFYHYKRALNKSYENKKEREVALNKCHKMCALITLHALRSNGGIYIKLGQHIGAMTYLLPKEWTDTMIPLQDHCPESTYEEIDELFKEDLGTSIEDMFLEFNKTPIGVASLAQVHVAKLKNSDGKGSSVAVKCQHPSLKEFIPLDVMLTRTVFELLDVFFPDYPLTWLGDELQSSIYVELNFTKEAENAEKTRHYFSKFKKQTALKIPKVIESHKRILIMEYVGGKRLDDLEYIDSHGISRSEVSSCLSHIFNNMIFTPNVGIHCDPHGGNLAIRSVKPAKDNGYHNFEIVLFDHGLYRYPSTRTRRLYAKFWLSLLFDKDQTKMKKYAKGFANITDEQFPLLAAAITGRSIDAALNYDISTSRTQEEMDVMANGILEGTLLSDLMSILSRIPRVVLLILKTNDLTRHLDECLQNPLGPERTFLIMTQYCAKTVYDEKVERINSEYARWSIKWMWENLTNWIVYERRINQLYFYDFVLWWKKFIPKTWLSS

SEQ ID NO: 32157 - protein, 495 aa, Ustilago maydis 521
MTARRYTQGVRCSTGDAVDGRVRGRDKKGKAKQMSAEDAVGLQGQMRRPVSSMSGLAWRPTGVVRTASMWSKRRCLVDARWTGWLLSHGVHTFTGAMNAARTSSARSSSVSSTGPSTSPTAPVAPASSSPYSPATPASLAGLGTTQLSPDIMLRCTIFDSTGSATSTSGVFKKSRLCSDHGLEPRDLRKIDSRVPNLVPTILVRRGGILVNILHIRAMIKKDKVLLFDSYGSTDSQLHSAFVYNLQHNLRPPHQNAHQHTSTSSSPGALAYEFRALESILVSVLDALRIELGVVRGWTSEVLEQLDDDVDRDKLRTLLQVSRKLNAFLSRSKAVKNAVVEVLENDEDMQLMHLSSIPPSASTDKGCASSNDAHTSSANTSSSCDATASNDGSQAMDELELLLESFDKQVEEVVAETTQLHSDMTNTQEVVELILDNNRNKLLALDLKTSIATMGISAGTLWAGLFGMNLKSHMEELDWAFAGTRKVAQGGLGHEG

SEQ ID NO: 32158 - protein, 245 aa, Lycopersicon esculentum
MATNSSSHSPRTVEEIFKDFSARHAAVLRALTTDVEDFYSQCDPERDNLCLYGHPNESWEVAVPAEEVPPELPEPVLGINFARDGMERRDWLSLVAMHTDSWLLSVAFYFGARLNRNERSRVFTLINDLPTVFEAVTGRKPLKDKPSVDSGKKSKNNAKREKQMKANQRLQEESDDEDEGNEDEHEETLCGSCGTNGNEDEFWIGCDMCEKWYHGKCVKITPAKAQSIKEYRCPSCSNKRAKHMA

SEQ ID NO: 32159 - protein, 425 aa, Silicibacter pomeroyi DSS-3
MKNAEIARRRDAAIARGVGMQTQIYVERAAGSEVWDVEGNRYIDFAAGIAVVNTGHCHPRVMQAVRAQAEAFTHTCHQVLPYESYIRLAERLNDRVPGDFDKKTVFVTTGAEAVENAIKIARAATGRPAVIAFGGAFHGRTFMGMSLTGKVMPYKTGFGAMMPDVYHVPFPVELHGTTTDEALAGIAKLFKTDLDPGRVAAIIIEPVQGEGGFYPAPAALMRGLRALCDSHGILLIADEVQTGFARTGHLFAMEGYDIAPDLTTMAKGLAGGLPLAAVTGRAEVMDAAAPGGLGGTYGGNPLGIAAAHAVLDVIDEEDLCHRANELGSRLKQRLTQVRERVPEIVDVRGPGFMIAAEFNTADGGAPNPDFANAVRAQALSRGLVLLTCGVFGNVIRFLAPLTIPEDVFAEALEILETSILAVKGG

SEQ ID NO: 32160 - protein, 302 aa, Leptosphaeria maculans 'brassicae' group
WAKGHYTEGAELVDQVLDVVRREAEGCDCLQGFQITHSLGGGTGAGMGTLLISKIREEFPDRMMATFSVVPSPKVSDTVVEPYNATLSVHQLVENSDETFCIDNEALYDICMRTLKLNNPSYGDLNHLVSAVMSGVTTCLRFPGQLNSDLRKLAVNMVPFPRLHFFMVGFAPLTSRGAHSFRAVTVPELTQQMFDPKNMMAASDFRNGRYLTCSAYFRGKVSMKEVEDQMRNVQNKNSSYFVEWIPNNVQTALCSVPPRGLKMSSTFVGNSTSIQELFKRVGDQFTAMFRRKAFLHWYTGEG

SEQ ID NO: 32161 - protein, 486 aa, Silicibacter pomeroyi DSS-3
MTTLALNDPGLLETRAYVNGVWIEGGARFAVQDPATGDLIAEVADLGAADTAAAIDAAHAAGPGWAALTGKERGAILRRWHDLMIQNADDLATILTAEMGKPWAEARGEILYGASFLEWFAEEAKRVYGETIPGHQRDKRIVVLKQPVGVVGSITPWNFPNAMIARKVAPALAVGCTFVARPAELTPLSALAMAVLAERAGVPAGVFNVIPSQDAAGVGAELCANPKVAKITFTGSTRVGRLLMQQCAPTIKKMSLELGGNAPFIVFDDADLDAAVDGAMIAKFRNNGQTCVCANRIYVQARVYDAFADKLAAKAAQLRVGNGFDTGVTTGPLINSAAVSKVEAHIADALAGGAEVVLGGTRAPLGGTFFAPTVLRDVTRDMLVCREETFGPLAALVRFESEDEVIDMANDSEFGLAAYFYSRDLARVWRMAEALESGMVGVNTGLISTEVAPFGGIKQSGLGREGSRHGIEDYLELKYLCLGGIG

SEQ ID NO: 32162 - protein, 252 aa, Bacillus halodurans C-125
MDVEVKQNEKEQPFTDEEIKQLIAQSQAGDQEARDQIVSRNTRLVWSVVQRFLNRGYEADDLFQIGCIGLIKSVDKFDLSYDVKFSTYAVPMIIGEIQRFLRDDGTVKVSRSIKELGNKIRKLKDDMTKTLGRTPTVNEIAEQLEITPEEVVFAGDASRSLSSIHETVYENDGDPITLLDQLEDQSETRWFDKIALKEAIHNLEERERLIVYLRYYKDQTQSEVAQRLGISQVQVSRLEKKILETMKANIAE

SEQ ID NO: 32163 - protein, 302 aa, Leptosphaeria maculans 'brassicae' group
WAKGHYTEGAELVDQVLDVVRREAEGCDCLQGFQITHSLGGGTGAGMGTLLISKIREEFPDRMMATFSVVPSPKVSDTVVEPYNATLSVHQLVENSDETFCIDNEALYDICMRTLKLNNPSYGDLNHLVSAVMSGVTTCLRFPGQLNSDLRKLAVNMVPFPRLHFFMVGFAPLTSRGAHSFRAVTVPELTQQMFDPKNMMAASDFRNGRYLTCSTYFRGKVSMKEVEDQMRNVQNKNSSYFVEWIPNNVQTALCSVPPRGLKMSSTFVGNSTSIQELFKRVGDQFTAMFRRKAFLHWYTGEG

SEQ ID NO: 32164 - protein, 682 aa, Rhodospirillum rubrum
MTVTTAAPPPRADHGDPQIAERAATAIRMLAADAVEKAKSGHPGAPLGMADIAVALWGVNGGGVVHHNPANPSWPDRDRVVLSNGHASMLLYALLHLTGYDLSAADLAAFRQFGSRTPGHPEVDQTPGVETTTGPLGQGLANGVGFALAEKILAETFNRPDHAIVDHHTWVLLGDGCLMEGISHEVASLAGRLGLGKLICLYDDNGISIDGAVEGWFSDDTPARFRAYGWQVIEGVDGHEISAVSLALTEAKADALRPTLICCRTVIGQGAPTKAGGHDVHGAPLGAAEIAAMRESLNWPYAPFEVPEDIRAACDARPAGAALEAAWRARFAAYQSAYPELAAEFERRLASTFPADFAQTEEALFADLIAAGTVASRKASQLAIRRLAPALPELLGASADLTGSNLTDWPGAARINDGPAGRYLSAGVREFGMAAVLNGMALHGGFIPFGGTFLVFSDYSRNAIRLAALMRRRVIHILTHDSIGLGEDGPTHQPVEHAASLRLIPNLAVWRPGDAFETAVAWSAALRRADGPSALLLSRQNLPAQSFDGDRRAAASRGGYTLSARPQPRAIILASGSELGLATAAQALLDGEGIAVNVVSVPCLELFLSQPKDWIDAVLPPDLPRLAVEAAHPDPWWKVVGLEGAVIGMDRFGESAPAPELFAHFGFTPAAVAARLRDLLAK

SEQ ID NO: 32165 - protein, 375 aa, Synechococcus sp. PCC 7002
MTQATNPVLDQTRNEGDIDYSALAEAQIKEGTDYVELTLPTKKSRKAKTSRRKETATKKKPYTEDSIRIYLQEIGRIRLLRAEEEIELARKIADLLELERMREQLTEHESRVPTDKEWAEAAGMPLKDFRRRLFHGRRAKDKMVQSNLRLVVSIAKKYMNRGLSFQDLIQEGSLGLIRAAEKFDHEKGYKFSTYATWWIRQAITRAIADQSRTIRLPVHLYETISRIKKTTKILSQELGRKPTEEEIAERMEMTIEKLRFIAKSAQLPISLETPIGKEEDSRLGDFIEADGETPEDQVSKSLLREDLENVLDTLSARERDVLRLRYGLDDGRMKTLEEIGQIFNVTRERIRQIEAKALRKLRHPNRNSILKEYIR

SEQ ID NO: 32166 - protein, 160 aa, Gloeobacter violaceus PCC 7421
MATVSDITVQTVDGQARSLGRYKGQVLLIVNVASYCGYTPQYAGLEKLYRRYKDAGLRVLAFPCNDFGGQEPGSNAEIAEFCSRYDVSFELFDKVGARGYYKHPLYVRLSEAAEPAGEVSWNFEKFLIAKSGEIVGRYRSGIGPEDPQLVADIERELAKS

SEQ ID NO: 32167 - protein, 425 aa, Triticum aestivum
METDSPRSPEAEIGHRVEDLWEVAQPQLSPSEKLNSCFEDIPVAAFPRTHPSQVIEIPSDASLADTVETLSKNKILSAPIRNVDAPEDATWIDKYIGIVEFAGIAMWLLHQSDASGNGTAGSAVGSPVVNLASRLGSFTFRRTSSGRVETTTDSESDEAASVGGSFFETLTSSEFYKNTKVGDISGSFRWAPFLALQTSDTFLTMLLLLSKYRMKSLPVVDMGGNQIENIITQSSVVHMLAECVGLSWFESWGTKKLCELGLPLMKPYRLVKVNEDQPVLKAFQLMREKGVGGVPVMDTNGTKAIGNISIRDVQYLLSAPKIYKQYRTISAKDFLTAVRHHLQEQHEASPLLHDVITCKRDDVIKEIILKLDSTKIHRIYVVDDKGDTEGVITLRDIISKLVHEPRHYFGDFFDGVVPLPANSTV

SEQ ID NO: 32168 - protein, 467 aa, Mycobacterium leprae TN
MTHYDVVVLGAGPGGYVAAIRAAQLGLSTAVVEPKYWGGICLNVGCIPSKVLLHNAELAHIFTKEAKTFGISGDASFDYGIAYDRSRKVSEGRVAGVHFLMKKNKITEIHGYGRFTDANTLSVELSEGVPETPLKVTFNNVIIATGSKTRLVPGTLLSTNVITYEEQILTRELPDSIVIVGAGAIGIEFGYVLKNYGVDVTIVEFLPRAMPNEDAEVSKEIEKQFKKMGIKILTGTKVESISDNGSHVLVAVSKDGQFQELKADKVLQAIGFAPNVDGYGLDKVGVALTADKAVDIDDYMQTNVSHIYAIGDVTGKLQLAHVAEAQGVVAAEAIAGAETLALSDYRMMPRATFCQPNVASFGLTEQQARDGGYDVVVAKFPFTANAKAHGMGDPSGFVKLVADAKYGELLGGHMIGHNVSELLPELTLAQKWDLTATELVRNVHTHPTLSEALQECFHGLIGHMINF

SEQ ID NO: 32169 - protein, 275 aa, Hyacinthus orientalis
DIQARHTYTDTKRRDDVRMANINSARSVADTVRTSLGPKGMDKMISSPNGDVIITNDGATILNKMEVLQPAAKMLVDLSKSQDAAAGDGTTTVVVLAGALLRRSSNLLTAGIHPTAVADSLHKFSTRAVDILQTMAVPVELSDRDSLIKSAATSLNSKVVSQYSSLLAPLAVDAVLSVVDPDHPDLVDLRDVKIVKKLGGTVDDTELVKGLVFDKKASHSAGGPTRIENAKIAVIQFQISPPKTDIEQSITGFPDYTQMDRILREERNYILGMGE

SEQ ID NO: 32170 - protein, 587 aa, Aspergillus fumigatus
MTPPHSANGKKEVPDDNDVIEPDHYYGGGKIPVFKPTMDQFRDFQSFIGKVDHYGMRSGIIKVIPPKEWLDAQPPLDEAVKKIRVKNPIMQEFHGSHGTYTQANIERQRTYNLPQWKALCEESKPPADDVLEKTKPEGPPTPVSPESNPGDNIDSVDEEAFKNFDYRIHDQEEYTQERCEELETAYWKSLMFNNPLYGADMPGSLFDDSTTSWNVAKLPNLLDVIGQKVPGVNTAYLYLGMWKATFAWHLEDVDLYSINYIHFGAPKQWYSISQEDAPRFEQVMKSIWPSDAKSCDQFLRHKTYLVSPSILKSQYGITVNKLVHYEGEFVITYPYGYHSGFNLGYNCAESVNFATEKWLDYGRVAKKCNCEADSVWIDVDEIERKLRGEATPEYYDDFDSDMDKTSTRGRKRKHPGETTKAKRMRVNTEIPRKAPCVLCPNDLDYEDLLPTEDGKSHAHRRCALYTEETSILRDEAGKEVCTRSYHATCALLAGVQVEHGSIAVIADDGNQYSVPSVDLKCKYHRQKRPTWMTNDAADYDRKVNATAQRLVVGDLVQFQADKEINGAVVLQNRPEERTLLVKILPRG

SEQ ID NO: 32171 - protein, 295 aa, Arabidopsis thaliana
  misc_feature (24)..(24): Xaa can be any naturally occurring amino acid
  unsure (1)..(295): unsure at all Xaa locations
MAFTLGGRARRLVSATPGSTHASXQNGCLHKLQQIGSDRFQLGEAKAIRLLPRRTNMVQELGIREEFMDLNRETETSYDFLDEMRHRFLKFKRQKYLPEIEKFKALAIAQSPKVMVIGCADSRVCPSYVLGFQPGEAFTIRNVANLVTPVQNGPTETNSALEFAVTTLQVENIIVMGHSNCGGIAALMSHQNHQGQHSSLVERWVMNGKAAKLRTQLASSHLSFDEQCRNCEKESIKDSVMNLITYSWIRDRVKRGEVKIHGCYYNLSDCSLEKWRLSSDKTNYGFYISDREIWS

SEQ ID NO: 32172 - protein, 370 aa, Oryza sativa
MDTFSHVPPGFRFHPTDEELVDYYLRKKVASKKIDLDVIKDVDLYKIEPWDLQEKCKIGMEEQNDWYFFSHKDKKYPTGTRTNRATGAGFWKATGRDKPIYARSCLVGMRKTLVFYKGRAPNGQKSDWIMHEYRLETNENGTTPEEGWVVCRVFKKRVATVRRMADGSPCWFDDHGAVGAFMPDLSSPRQLLPHHHHHHPGSSAALYHGHHHQQLQQMYGHCKPELEYHHLLPQEAFLQHLPQLESPKPPPPPPAAAAYIGGHLGSSSSTALTTHDDEASGSAAQQQPPSLEAVYMAGAGVGIGVDASVTDWRLLDKFVASQLLSKESMSSYGSHPAQVFQAADGGKHEEALDYASTSAGSGGGEADLWK

SEQ ID NO: 32173 - protein, 961 aa, Echinochloa crus-galli
MASERHQSIDAQLRLLAPGKVSEDDKLVEYDALLVDRFLDILQDLHGPHLREFVQECYELSAEYENDRDEARLGELGSKLTSLPPGESIVVASSFSHMLNLANLAEEVQIAHRRRIKLKRGDFADEASAPTESDIEETLKRLVSQLGKSREEVFDALKNQTVDLVFTAHPTQSVRRSLLQKHGRIRNCLRQLYAKDITADDKQELDEALQREIQAAFRTDEIRRTPPTPQDEMRAGMSYFHETIWKGVPKFLRRIDTALKNIGINERLPYNAPLIQFSSWMGGDRDGNPRVTPEVTRDVCLLARMMAANLYFSQIEDLMFELSMWRCSDELRIRADDLHRSTKRAAEHYIEFWKQVPPNEPYRVILGDVRDKLYYTRERSRHLLTTGISEIPEDATFTNVEQFLEPLELCYRSLCACGDKPIADGSLLDFLRQVSTFGLALVKLDIRQESDRHTDVLDSITTHPGIGSYAEWSEEKRQDWLLSELRGKRPLFGSDLPLTEETADVLGTFHVLAELPTDCFGAYIISMATAPSDVLAVELLQRECHVKQPLRVVPLFEKLADLEAAPAAVARLFSIGWYMNRINGKQEVMIGYSDSGKDAGRLSATWQMYKAQEELIKVAKHYGVKLTMFHGRGGTVGRGGGPTHLAILSQPPDTIHGSLRVTVQGEVIEHSFGEELLCFRTLQRYTAATLEHGMHPPISPKPEWRALMDEMAIVATKEYRSIVFQEPRFVEYFGSATPETEYGRMNIDSRPSKRRPSGGIESLRAIPWIFAWTQTRFHPPVWLGFGAAFKHIMQKDIRNTHTLKEMYNEWPFSRVTLDLLEMVFAKGDPGIAAVYDKLLVADDLQSFGEQLRKNYEETKELLLQVAGHKDVLEGDPYLKQRLRLRESYITTLNVCQAYTLKRIRDPSFQVSPQPALSKEFVDESQPAELVRLNPESEYAPGLENTLILTMKGIAAGMQNTG

SEQ ID NO: 32174 - protein, 346 aa, Arabidopsis thaliana
MGTSSDPIQDGSDEQQKRSEIYTYEAPWHIYAMNWSVRRDKKYRLAITSLLEQYPNRVEIVQLDESNGEIRSDPNLSFEHPYPPTKTIFIPDKECQRPDLLATSSDFLRLWRIADDHSRVELKSCLNSNKNSEFCGPLTSFDWNEAEPRRIGTSSTDTTCTIWDIEREAVDTQLIAHDKEVFDIAWGGVGVFASVSADGSVRVFDLRDKEHSTIIYESSEPDTPLVRLGWNKQDPRYMATIIMDSAKVVVLDIRFPALPVVELQRHQASVNAIAWAPHSSCHICTAGDDSQALILDISSMGQHVEGGLDPILAYTAGAEIEQLQWSSSQPDWVAIAFSTKLQILRV

SEQ ID NO: 32175 - protein, 466 aa, Candida glabrata CBS138
MQTGNEENAVPSWYSVPGKEVHSDKAHEHRVALSDVTGLANSNFMHEKLHSNRCSGEPSSTARNSLEINLNHAVESDQENMVSIYASNTLDTPNSNDVSSLLEDQQLESIRRVTQHMSNTSNGDDSDSTTVANKDSHQGDNSNNTSDDALRNEYSEPPVNDDIRRTLMKAYQTYKLAYLDDSDEDNYDPVMVVELASGIFDYMKQLEIKYRPDPYYMDLQSELKPSYRSTLLDWIVQVDERFQLLPETLFLTINIIDRFLSKAAIKLNKFQLVGAVSMFIAAKYEEINCPTMKDFLYMLDNAYTKEEMIDAERFILNTLDFSIGWPGPMSFLRRISKADDYDYNIRTLAKYLLETTIMDARLIGTPPSWLASGAYFLSKTILSYGNEERDAEERSVYETGWTLKHVFYSGYTQEQVFPLSSLILENCRHAQERHSAIWTKYSDRRYHRSSVMVDKWIEVAESKMNS

SEQ ID NO: 32176 - protein, 287 aa, Oryza sativa
  misc_feature (109)..(109): Xaa can be any naturally occurring amino acid
  misc_feature (124)..(124): Xaa can be any naturally occurring amino acid
  unsure (1)..(287): unsure at all Xaa locations
MGKEVDVSTLEAGGARDYIDPPPAPLVDVDELGKWSLYRALIAEFVATLLFLYVTVATVIGYKHQTDAAVNGADAACGGVGVLGIAWAFGGMIFILVYCTAGVSGGHIXPAVTLGLFLARKVSXLVRALLYIAAQCLGAICGVALVQGFQSSLYDRYGGGANELAAGYSTGTGLAAEIIGTFVLVYTVFSATDPKRNARDSHVPVLAPLPIGFAVFMVRLATIPITGTGINPARSLGAAVIYNNNKAWGDQWIFWVGPFIGAAIAALYHQIILRASARGYGSFRSNA

SEQ ID NO: 32177 - protein, 643 aa, Mesorhizobium loti
MSGPDQPPAFRAMFSSSRRPSISGFLRPSGLLRSYKATRRFHIDLRGAAFRDVFAFTMRHWSKQPVRLAIIMIAVLVATLLDVLTPLYSGRLVNAVAQGAAADAVVWDAALAAFSMLIALALGAVVMRNIAFIAVNDFILKMMSDIASDAFHRVQRFSTDWHAKTFAGSTVRKITRGMWAFCLLNDTILLALFPSLIMLVGSSVLLGWYWPMMGLIIACGSVGYVALIIILSLGYVAPAANLANNWDTRLGGSLADAISCNAVVKGFGAEVREDHRLAKVISKWRHRTLRTWVRGTVSAAFQGIMLLAMRAALIGYALFLWSRGQTTPGDIALVLASFTVLYGYLRDVSIHVRNIQRSVNEMEELVQTYSQPPDVADDPGAKPIRITKGHIDFESVHFHYGNHWSPFYSDLSISIEAGARVGLVGPSGSGKTTFVKLIQRLYDLDAGRILIDGQDISRVTQGSLRSQIAIVQQEPLLFHRSLAENIAYGRPGASRSDVEQAARLASAHDFIARLPNGYGTLVGERGVKLSGGERQRVAIARAFLADAPILILDEATSSLDSESEVLIQKAMERLMVGRTTLVIAHRLSTVRALDRLLVFDRGCITEQGDHDALIRRDGIYRRLFERQALELTKGWDETNVQHG

SEQ ID NO: 32178 - protein, 1155 aa, Anabaena sp.
MKSPVNSKPKILVVDDEPDNLDLLYRTFYRDYKVLRAISGPAALDLLAQEGEIAVIISDQRMPIMSGTEFLSLTATQYPDIIRIILTGYTDVEDLVEAINAGKVFKYVTKPWEAEELKAVVRQALDTHNVLKARTRELTRTLRQESLLNTVTNTIRSALDYRQILQAIVDTVGHMLEVDVCLLRSFQDGQLVDEGFVYQKDSPAAVEKTIHDSAPLTILADTVWETREVQIIHDVAGDERIHGDSPELQHRNDAFAAADIRSSLVVPLICQQELMAVLALHQCSQARVWGEEEVQLVLMVADQAALALSQAYAYEQVRALAKRESLINTITTAIRSSLNPEDIFAAITQKLGQALQVDGCVLSLWTEEDEFVKCVGLYDSSRHSEDSLDNHRLITQELPESQAPILENPILQEILKTHEPVIITDMNHSDWETKRFDLHLKMPARSLMVVPLLADGKCIGSITLREGKRARQWLSADIELAKAVAAQAAIAVQQSHLYQKTREQAERLLQLDKQKTEFFQNISHEFRTPITLIQGPLESAVGTGEGLSYAQSAIALCNSRRLLRLVNQLLDLQRLDAGRMQPSFRPCDLVDFVSQIVESFRPYCEKKALHLTTELDECPTVYIDMEKFDKVVYNLLSNAMKFTPEGGTISVKLQSQGHHCILQVQDTGIGIVKEQIPHLFERFRQAEGSENRSYEGSGLGLALVKELVELHGGRVTVDSVYGKGTTFTLWLVIGNAHLPLQQVSDTPVELTTSRASVELADLELVEPTLENIDIETINPLPISETQHTANSTQQSTHSILVVDDNPDLRTYVSDILRRSGYQVYTARNGYEGFSKVQELTPNLIVTDLMMPLVTGLEMIRMVRNDEKVKGTPIILLTAKVDEETRIESTEHGADAYLAKPFNDRELLAEVRNLLALKENEKRVLELNTYLTESVLKRFLPPALVSKAAAGSLSLDLRPEPRLITVLFSDIVGFTQLANTLRSRRVAELLNEYLEFMTKAVFDNGGTVDKFMGDAILALYGAPEELTPNEQVRRAVNTARAMHSSLAQLNQRWRNQGIFDTHDYGGVQFRCGIHQGTAVVGMFGSAERADYTAIGPSVNIAARLQSAAVPGTILVSAAVADYLQDEEITKGSPLKLKGIDETVLTFAVKSELMVNR

SEQ ID NO: 32179 - protein, 313 aa, Silicibacter pomeroyi DSS-3
MILCCGEALIDMIAAPTIGGGHGFLPQPGGGALNTAIALGRLGQRVGLVTALSRDMFGQRLAEALTASHVDLSGAARVDRPTTLAFVQLRDGQPEYAFYDENSAGRMLSATELPPLPPEASALCLGGISLACEPGADAYADLLERHGAGRVVLIDPNIRPALVGDEARYRARLGAMIARADILRLSDEDLGWLCPDAPDLRAGARTLLALGPALVVVTRGAAGATGYLPEGAEVSVPAPRVNVADTVGAGDTFIAGMLSALAEQGLLTPAALAGLRAEALKPALTHGARVAALAVSRPGANPPWAHELAPPPG

SEQ ID NO: 32180 - protein, 711 aa, Ashbya gossypii ATCC 10895
MMNFFSKNQPSAHEQQDRPRSTANGFFPSFTHTATPTTALSENSYAIGTTGLNAGKQENVLTHMKEINRQDSYQNDHSQPPQQIFPQTSSHQSHTLKDHLTVTKPPPAVPPMAPENADKSASDSNMPRGKLKVTIVKAKDLLTSSDQTQPYVVCTYESSEFISDGPESIDHTQRTHNARWGNRMAANEKNVRPLYTRQSSSQLDKLAAHHNYNTTSSNPVWHHETTFDVIGARSELEISVYDAAHGDVFLGQVRLRPNTHTKHDVHNQWSKLNGRTVGESVSGEILVRWEYWHTEKRHYGPQDFEVLRLLGKGTFGQVYQVRKKDTKRIYAMKVLSKKVIVKKNEIAHTIGERNILVRTASKSCPFIVGLKFSFQTPTDLYLVTDFLSGGELFWHLQKEGRFTEERAKFYIAELVLALEYLHDNDIVYRDLKPENILLDANGNIALCDFGLSKADLKDRTNTFCGTTEYLAPELLLDETGYTKMVDFWSLGVLIFEMCCGWSPFFAEDNQKMYQKIAFGKVKFPRDVLSPEGRSFVKGLLNRNPKHRLGAVNDGAEVRAHPFLSDIDWEALRNKQIPPPFKPHLTSETDTSNFDPEFTQTSTSFMNKQPIAATPLSPAMQAKFAGFTFVDESAIEEHNANYNSRKFLQNSYFMEPGSFIPGDPTMPPAEDVIEDGDDDSMDLASKGNTDHLQPDYNDHHMDDDFVSGRFEI

SEQ ID NO: 32181 - protein, 302 aa, Leptosphaeria maculans 'lepidii' group
WAKGHYTEGAELVDQVLDVVRREAEGCDCLQGFQITHSLGGGTGAGMGTLLISKIREEFPDRMMATFSVVPSPKVSDTVVEPYNATLSVHQLVENSDETFCIDNEALYDICMRTLKLNNPSYGDLNHLVSAVMSGVTTCLRFPGQLNSDLRKLAVNMVPFPRLHFFMVGFAPLTSRGAHSFRAVTVPELTQQMFDPKNMMAASDFRNGRYLTCSAYFRGKVSMKEVEDQMRNVQNKNSSYFVEWIPNNVQTALCSVPPRGLEMSSTFVGNSTSIQELFKRVGDQFTAMFRRKAFLHWYTGEG

SEQ ID NO: 32182 - protein, 482 aa, Ashbya gossypii ATCC 10895
MAEEIQMMGGMEVGKKLPAAQKGCVPRGNGSRAAYNDFVRKLFAILESGEYTDIISWTKEGNSFVVVDTNEFTTNILPKHFKHSNFSSFVRQLNKYDFHKVKRTPEERQSSVYGEHSWEFQHPRFRRNDEAALDRIKRKTVTQKKVSLTDDMLAGHQRVGNGAVAFPAMDLGATTNLLLNNTINKTKFSQLKKRVDSIELHNQQLRAENNSLKIEFQKMSSRYNSMVENLVSLKNYNNSLVENFNLLVSTLAQQGLKVPHPLNLGNYASSQVAKNSSASDVQPHVSPLGTVAPTSIPLAQATPSKEEANPPTSLRPGFHVLLVEDDSVCIQLCSKFLRKYGCSVEVVTDGLSAIETVEKFQYDLVLMDIVMPNLDGATATSVIRSFDNQTPIIAMTGNIEDQDLVTYLQHGMNDILAKPFTKDDLHSMLVRYLKDRIPLTEQASVVGTAQSGAQPPLLKEEQGGIQDQVLLQGEPLLKKPRV

SEQ ID NO: 32183 - protein, 141 aa, Bordetella pertussis Tohama I
MSIERTLSIIKPDAVAKNVVGQIVARFEQAGLKVIAARMQQLSRTDAERFYAVHKERPFFKDLVDFMVSGPVFVQVLEGESAIQKNRDLMGATDPKKAAPGTIRADFADSIDANAVHGSDAPETAAVEVAFFFPEINIHSR

SEQ ID NO: 32184 - protein, 367 aa, Vibrio parahaemolyticus RIMD 2210633
MKNEYLLLTPGPLSTSETVREAMLKDWCTWDDEYNKDIVEVIRTKLVKLATKHSGYTSVLMQGCGTASVEATIGSAIGKEGKLLVVDNGAYGARIAQIADYLNIPCHVVSPGETSQPHLNEVETALASDPAITHVAIVHCETTTGMLNPIEAFASAAKAHGKVVILDAMSSFGGIPMDIADLGIDFMISSANKCIQGVPGFGFVIAKQTELEKCQDQARSLSLDLYDQWHCMEVNHGKWRFTSPTHTVRAFYQALLELEQEGGIEARHNRYQTNQKTLVAGMRSLGFEPLLSDDLHSPIITSFYSPTHSDYQFKAFYTRLKEQGFVIYPGKVSNADCFRIGNIGEVYPADIERLIGAIEKAMYWQVA

SEQ ID NO: 32185 - protein, 387 aa, Phoma betae
MGAKFWEVVSDEHGIDEKGAYRGDSDLQLERINVYYNEIPGGRYVPRAILVDLEPGTMDTIKASQYGGLFRPDNFVFGQNGAGNNWAKGYYTEGAELIDQFMDIVRKEAENCDSLQGFQITHSLGGGTGSGMGSLMASKIREEYPDRMMATFSVVPSPKVSDTVVEPYNATLVNHHLVDNSDETFCIDNEALYDICCRTLKLSNPSYGDLNHLVSSVMSGVTTCLRFPGQLNADLRELAVNMVPFPRLHFFMVGFAPLTSRSSQSYRQLTVPELTSQMFDARNMMAACDPRHGRYLTVAAIFRGKLSMKEIEHQMLNIQLKNSSNFVEWIPNSCKTAVCDIAPRGLKMSGTFIGNSTAIQELFKRVQIQFTAMIRRKASLHWYTGEG

SEQ ID NO: 32186 - protein, 209 aa, Panax notoginseng
AHLKGGAKKVVISAPSKDAPMFVVGVNEKEYKPELNIVSNASCTTNCLAPLAKVINDRFGIVEGLMTTVHSITATQKTVDGPSSKDWRGGRAASFNIIPSSTGAAKAVGKVLPALNGKLTGMAFRVPTVDVSVVDLTVRLEKKASYDQIKAAIKEESEGKLKGILGYTEEDVVSTDFIGDSRSSIFDAKAGIALNENFVKLVAWYDNEW

SEQ ID NO: 32187 - protein, 496 aa, Arabidopsis thaliana
MGKVAVGATVVCTAAVCAVAVLVVRRRMQSSGKWGRVLAILKAFEEDCATPISKLRQVADAMTVEMHAGLASDGGSKLKMLISYVDNLPSGDEKGLFYALDLGGTNFRVMRVLLGGKQERVVKQEFEEVSIPPHLMTGGSDELFNFIAEALAKFVATECEDFHLPEGRQRELGFTFSFPVKQTSLSSGSLIKWTKGFSIEEAVGQDVVGALNKALERVGLDMRIAALVNDTVGTLAGGRYYNPDVVAAVILGTGTNAAYVERATAIPKWHGLLPKSGEMVINMEWGNFRSSHLPLTEFDHTLDFESLNPGEQILEKIISGMYLGEILRRVLLKMAEDAAFFGDTVPSKLRIPFIIRTPHMSAMHNDTSPDLKIVGSKIKDILEVPTTSLKMRKVVISLCNIIATRGARLSAAGIYGILKKLGRDTTKDEEVQKSVIAMDGGLFEHYTQFSECMESSLKELLGDEASGSVEVTHSNDGSGIGAALLAASHSLYLEDS

SEQ ID NO: 32188 - protein, 219 aa, Oryza sativa (japonica cultivar-group)
MVEPSAAAAFPPAPQVAPAYPVNPMQLPEHQQHAIQQVQQLQQQQKEQLQAFWADQMAEVEQMTEFKLPNLPLARIKKIMKADEDVKMIAGEAPALFAKACEMFILDMTLRSWQHTEEGRRRTLQRSDVEAVIKKTDIFDFLVDIITDDKMKDDGMGSQAASMVSPYTSGGMGFSFDLYPNQHHLAYMWPPQEQQEQWPPQEQQEQKQKQDSDGGGQDE

SEQ ID NO: 32189 - protein, 808 aa, Arabidopsis thaliana
MNFNGFLDDGAGASKLLSDAPYNNHFSFSAVDTMLGSAAIAPSQSLPFSSSGLSLGLQTNGEMSRNGEIMESNVSRKSSRGEDVESRSESDNAEAVSGDDLDTSDRPLKKKKRYHRHTPKQIQDLESVFKECAHPDEKQRLDLSRRLNLDPRQVKFWFQNRRTQMKTQIERHENALLRQENDKLRAENMSVREAMRNPMCGNCGGPAVIGEISMEEQHLRIENSRLKDELDRVCALTGKFLGRSNGSHHIPDSALVLGVGVGSGGCNVGGGFTLSSPLLPQASPRFEISNGTGSGLVATVNRQQPVSVSDFDQRSRYLDLALAAMDELVKMAQTREPLWVRSSDSGFEVLNQEEYDTSFSRCVGPKQDGFVSEASKEAGTVIINSLALVETLMDSERWAEMFPSMVSRTSTTEIISSGMGGRNGALHLMHAELQLLSPLVPVRQVSFLRFCKQHAEGVWAVVDVSIDSIREGSSSSCRRLPSGCLVQDMANGYSKVTWIEHTEYDENHIHRLYRPLLRCGLAFGAHRWMAALQRQCECLTILMSSTVSTSTNPSPINCNGRKSMLKLAKRMTDNFCGGVCASSLQKWSKLNVGNVDEDVRIMTRKSVNNPGEPPGIILNAATSVWMPVSPRRLFDFLGNERLRSEWDILSNGGPMKEMAHIAKGHDRSNSVSLLRASAINANQSSMLILQETSIDAAGAVVVYAPVDIPAMQAVMNGGDSAYVALLPSGFAILPNGQAGTQRCAAEERNSIGNGGCMEEGGSLLTVAFQILVNSLPTAKLTVESVETVNNLISCTVQKIKAALHCDST

SEQ ID NO: 32190 - protein, 1294 aa, Arabidopsis thaliana
MVFKSKLFFSSKKSRSSSPSSSNSPRSVGSDSPIRSDKKKPKSNSKEETRSPNTKKHVSAKGKEASLEVHSSSPGKSNSSSSGSEAKKPITETPATSDVKEESPASVSPIMASSLGLNRIKTRSGPLPQESFFSFENDYAIPVLPCYKLSKLDTGKKEAGSSKVDIGPLRSSNPALLASGTGQFKVSPTISGPEGSAEVCTPENSYDLDDPKESDSPRYQALLRMTSAPRKRFPGDIKSFSHELNSKGVRPFPLWKPRRLNNLEVVFEATFSDILNLIRTKFDKAKEEVNSDLFAFGGDLLDIYDKNKESHPELLVTIEDLLVLAKTCAKTTSKEFWLQCEGIVQDLDDRRQELPPGVLKQLHTRMLFILTRCTRLLQFHKESWGQEEDAVQLRQSGVLHSADKRDPTGEVRDGKGSSTANALKVPSTKKAYSQEQRGLNWIEGFFVRPAPLSSPYNETSKDSESPANIDKMSSWKRLPSPASKGVQEAAVSKEQNDRKVEPPQVVKKLVAISDDMAVAKLPEVSSAKASQEHMSKNRHNISWGYWGHQSCISEESSIICRICEEEIPTTHVEDHSRICALADKYDQKGVGVDERLMAVAVTLEKITDNVIQKDSLAAVESPEGMKISNASLTEELDVLSPKLSDWSRRGSEDMLDCFPETDNSVFMDDMGCLPSMSCRTRFGPKSDQGMATSSAGSMTPRSPIPTPRPDPIELLLEGKGTFHDQDDFPQMSELADIARCAANAIPVDDQSIQLLLSCLEDLRVVIDRRKTILLSVEASIAQAENLLEKYLQLCELMDDEKGTIIDEDAPLEDDVVRSLRTSPVHLRDRISIDDFEVMKSISRGAFGHVILARKNTTGDLFAIKVLRKADMIRKNAVESILAERDILINARNPFVVSCSSFKHIKSSAEISYTNVRFFYSFTCSENLYLVMEYLNGGDFYSMLRKIGCLDEANARVYIAEVCRYYSCQVLALEYLHSEGVVHRDLKPDNLLIAHDGHVKLTDFGLSKVGLINNTDDLSGPVSSATSLLVEEKPKLPTLDHKRSAVGTPDYLAPEILLGTGHGATADWWSVGIILYEFLVGIPPFNADHPQQIFDNILNRNIQWPPVPEDMSHEARDLIDRLLTEDPHQRLGARGAAEYSDETNIMTQVKQHSFFKDIDWNTLAQQKAAFVPDSENAFDTSYFQSRYSWNYSGERCFPTNENEDSSEGDSLCGSSGRLSNHHDEGVDIPCGPAEFETSVSENYPFDNFSFKVFYHDFLPKIPCHPSIRYIIVLYSCRSSLACSFRIENLLQTLSV

SEQ ID NO: 32191 - protein, 456 aa, Haemophilus ducreyi 35000HP
MSKHYDYIAIGGGSGGIASINRAASYGKKCAIIEAKQLGGTCVNVGCVPKKVMFYGAHIADAINHYAEDYGFDVSLKQFDFKKLVASRQAYISRIHSSYQQVLSKNNVDVFNGFARFVDPKTIEVHYPDGSTENLTADHILIATGGRPTIPEVIGAEYGIDSNGIFALTELPKRVAIVGAGYIAVELAGVFNSFGVETHLFVRQHALLRTQDPLIVDTLLAVLAQQNIKLHTQAISKQVVKNADGSLTLTLQDGRQTEVDCLVWAIGREPTTDVINLAAAGVETNSRGFIKVDKFQNTNVTGIYAVGDIIEGGIELTPVAVAAGRRLAERLFNNKPNEHLDYSLVPTVVFSHPPIGTVGLTEPQAIEQYGAENVKVYTSSFTAMYTAVTQHRQPCRMKLVCIGEQEKIVGLHGIGFGVDEMIQGFAVAIKMGAVKADFDNTVAIHPTGSEEFVTMR

SEQ ID NO: 32192 - protein, 455 aa, Escherichia coli K12
MKKQTQLLSALALSVGLTLSASFQAVASIPGQVADQAPLPSLAPMLEKVLPAVVSVRVEGTASQGQKIPEEFKKFFGDDLPDQPAQPFEGLGSGVIINASKGYVLTNNHVINQAQKISIQLNDGREFDAKLIGSDDQSDIALLQIQNPSKLTQIAIADSDKLRVGDFAVAVGNPFGLGQTATSGIVSALGRSGLNLEGLENFIQTDASINRGNSGGALLNLNGELIGINTAILAPGGGSVGIGFAIPSNMARTLAQQLIDFGEIKRGLLGIKGTEMSADIAKAFNLDVQRGAFVSEVLPGSGSAKAGVKAGDIITSLNGKPLNSFAELRSRIATTEPGTKVKLGLLRNGKPLEVEVTLDTSTSSSASAEMITPALEGATLSDGQLKDGGKGIKIDEVVKGSPAAQAGLQKDDVIIGVNRDRVNSIAEMRKVLAAKPAIIALQIVRGNESIYLLMR

SEQ ID NO: 32193 - protein, 302 aa, Phoma herbarum
WAKGHYTEGAELVDQVLDVVRREAEGCDCLQGFQITHSLGGGTGAGMGTLLISKIREEFPDRMMATFSVVPSPKVSDTVVEPYNATLSIHQLVENSDETFCIDNEALYDICMRTLKLNNPSYGDLNHLVSAVMSGVTTCLRFPGQLNSDLRKLAVNMVPFPRLHFFMVGFAPLTSRGAHSFRAVTVPELTQQMFDPKNMMAASDFRNGRYLTCSAYFRGKVSMKEVEDQMRNVQNKNSSYFVEWIPNNVQTALCSVPPRGLKMSSTFVGNSTSIQELFKRVGDQFTAMFRRKAFLHWYTGEG

SEQ ID NO: 32194 - protein, 355 aa, Escherichia coli K12
MFVKLLRSVAIGLIVGAILLVAMPSLRSLNPLSTPQFDSTDETPASYNLAVRRAAPAVVNVYNRGLNTNSHNQLEIRTLGSGVIMDQRGYIITNKHVINDADQIIVALQDGRVFEALLVGSDSLTDLAVLKINATGGLPTIPINARRVPHIGDVVLAIGNPYNLGQTITQGIISATGRIGLNPTGRQNFLQTDASINHGNSGGALVNSLGELMGINTLSFDKSNDGETPEGIGFAIPFQLATKIMDKLIRDGRVIRGYIGIGGREIAPLHAQGGGIDQLQGIVVNEVSPDGPAANAGIQVNDLIISVDNKPAISALETMDQVAEIRPGSVIPVVVMRDDKQLTLQVTIQEYPATN

SEQ ID NO: 32195 - protein, 355 aa, Alternaria brassicicola
MAEFVRAQIFGTTFEITSRYTDLQPVGMGAFGLVCSAKDQLTSQAVAIKKIMKPFSTPVLSKRTYRELKLLKHLRHENIISLSDIFISPLEDIYFVTELLGTDLHRLLTSRPLEKQFIQYFLYQILRGLKYVHSAGVVHRDLKPSNILVNENCDLKICDFGLARIQDPQMTGYVSTRYYRAPEIMLTWQKYDVEVDIWSAGCIFAEMLEGKPLFPGKDHVNQFSIITELLGTPPDDVIQTICSENTLRFVQSLPKRERQPLSNKFKNAEPQAVDLLENMLVFDPKKRVRAEQALAHPYLAPYHDPTDEPIAEEKFDWSFNDADLPVDTWKIMMYSEILDYHNVDAAAQEQENNGS

SEQ ID NO: 32196 - protein, 261 aa, Arabis procurrens
QPGDLYKCSSKDTTIVPINVGETILLRVINSAMNQPLFFTVANHKLTVVGADASYLKPSTTNVVVLGPGQTTDVLITGDQPPNRYYMAARAYQSAQNAPFGNTTTTAVLQYKSAPCCGGGGGTNKGISVKPIMPLLPAYNDTNTVTRFSQSFRSLKRAEVPTQIDENLFVTIGLGLNNCPKNFRSRRCQGPNGTRFTSSMNNVSFALPSNYSLLQAHHHKIPGVFTTDFPEKPPVTFDYTSSNISRSLYQPSRGTKLYKLK

SEQ ID NO: 32197 - protein, 572 aa, Chlamydophila caviae GPIC
MLMNTQNGQATEAAHEEEAQKKLEELVSLAKDQGFITYEEINEILPMSFDTPEQIDQVLIFLTGMDIQVLNQADVERQKERKKEAKELEGLAKRTEGTPDDPVRMYLKEMGTVPLLTREEEVEISKRIEKAQVQIERIILRFRYSSKEAISIAQYLINGKERFDKIISEKEVEDKAHFLKLLPKLVTLLKEEDLYLESLLLALKQGNLSKQEIAKLNDNLEKCRIRTQAYLRCFHCRHNVTEDFGEVVFKAYDSFLQLEQQINDLKVRAERNKFAAAKLDAAKRRLHKREVAAGRTLEEFKKDVRMLQRWMDKSQEAKKEMVESNLRLVISIAKKYTNRGLSFLDLIQEGNMGLMKAVEKFEYRRGYKFSTYATWWIRQAVTRAIADQARTIRIPVHMIETINKVLRGAKKLMMETGKEPTPEELAEELGLTPDRVREIYKIAQHPISLQAEVGEGGESSFGDFLEDTGVESPAEATGYSMLKDKMKEVLKTLTDRERFVLIHRFGLLDGKPKTLEEVGSAFNVTRERIRQIEAKALRKMRHPIRSKQLRAFLDLLEEEKTTSGKAKNFKGK

SEQ ID NO: 32198 - protein, 344 aa, Shewanella sp. MR-7
MAVFNHVSFDEHEQVVFCHDKESGLKAIVAIHNTNLGPAVGGCRMWNYQSDDEALTDVLRLSRGMTYKNALAGLTMGGGKSVIIADPKRPDREALFRAFGRFINSLGGRYYSAEDVGTTTADIMIAHQETPYMAGLEGKSGDPSPFTALGTYLGIKAAVKHKLGLDSLKGLKIAVQGVGHVGYYLCKHLHEEGAELVVTDIHQASLDKVATDFGAIVVAPQDIYAQDVDVYAPCALGATLNDVTLPQLKAKIVAGCANNQLAEVRHGEQLKEMGILYAPDYVINAGGIINVSFEKDYDAAKSEAKVREIYNTLLKIFTKADAENRTTAAVADEMARAIYQAAKA

SEQ ID NO: 32199 - protein, 367 aa, Moorella thermoacetica
MELFKYMETYDYEQVLFCQDKESGLRAIIAIHDTTLGPALGGTRMWMYNSEEEALGDALRLARGMTYRNTAAGLNLGGGKTVIIGDPRKDKNEAMFRAFGRFIQGLNGRYITAEDVGTTVADMDIIYQETDYVTGISPEFGSSGNPSPATAYGVYRGMKAAAKEAFGSDSLEGKVVAVQGVGNVAYHLCRHLHEEGAKLIVTDINKEAVARAVEEFGAKAVDPNDIYGVECDIFAPCALGGIINDQTIPQLKAKVIAGSANNQLKEPRHGDIIHEMGIVYAPDYVINAGGVINVADELYGYNRERAMKKIEQIYDNIEKVFAIAKRDNIPTYVAADRMAEERIETMRKARSQFLQNGHHILSRRRAR

SEQ ID NO: 32200 - protein, 473 aa, Moorella thermoacetica
MAKEYDVVILGGGTGGYVAAIRASQLGLKTAVVEKGKLGGTCLHAGCIPSKALLRSAEVYAQTKNSEAFGVIVGDVRLDFAKVQARKATIVDQLHKGVQHLMKKGKIDVYAGIGRLLGPSIFSPLPGTVSVEMNDGSENEMLVPKFVVIATGSRPRTLPGLEPDGEFVMTSDEALQMEVLPSSILIVGGGVIGMEWASMLNDFGVEVTVLEYADRILPTEDEDVSKEMEKLLLRRGVNIVTGARVLAETLEKGNGVTIQAEHQGERKTFAADKMLVSIGRQANIEGIGLENTEIVVENGYIQTNEFGQTKESHIYAIGDVIGGLQLAHVAAHEGIVAIEHLAGRNPAPIDYSMVPRCIYTRPEAAAVGLTEQEAKAKGYDVKIGKFLFKAIGKALVFGEAEGFVKLIADRNTDDLLGVHMVGPHVTDLISEAGLARVLDAAPWEVAHAIHPHPTLSEAMAEAALAVDGKAIHF

SEQ ID NO: 32201 - protein, 175 aa, Hyacinthus orientalis
PGFTIHSNFHQPPTASRWRPRRRRSPREKKPAAADKPAGGAQGRSRRRPRRPPPGKKPKAEKKLPAKDAAAATDKKKKKKKGKGVETYKIYIFKVLKQVHPDIGISSKAMGIMNSFINDIFEKLAQESSRLARYNKKPTITSREIQTSVRLVLPGELAKHAVSDGTKAVTKFTSA

SEQ ID NO: 32202 - protein, 174 aa, Moorella thermoacetica
MAQNRHQALGLSDDTVLEMYETMLLARKLDERMWLVNRAGKIPFVISCQGQEAAQVGAAFALDRTKDYVLPYYRDMGVVLTFGMTARELMLAAFAKAEDPNSGGRQMPGHFGQKKNRIVTGSSPVTTQVPHAVGFALAAKMEKKDFVAFVTFGEGSSNQGDFHEGANFAGVHKL

SEQ ID NO: 32203 - protein, 997 aa, Burkholderia vietnamiensis G4
MKSSGSARTARRNAALPSTDAQTGALATVANGRAKPATKPKDSIRQTKRTTKAAGASKPAARTREDKDGPLFEDIRFLGRLLGDVVREQEGDTVFDVVETIRQTAVKFRREDDSQAAQTLEKKLRKLTPEQTVSVVRAFSYFSHLANIAEDRHHNRRRRIHALAGSAPQPGTVAYALEQLKTSGNASKRVLQRFFDDALIVPVLTAHPTEVQRKSILDAQHDIARLLAERDQPLTARERAYNESMLRARVTALWQTRMLRDARLTVGDEIENALSYYRTTFLDELPALYGDIEAALAEHGLPARVPAFFQMGSWIGGDRDGNPNVTAATLDEAINRQAAVILEHYLEQVHKLGAELSVSNLLVGANDAVKALAAASPDQSPHRVDEPYRRALIGIYTRLAASARVRLGEGTVPVRSAGRGAPPVRAVPYADSEAFVADLKVLTASLEEHHGASLAAPRLTPLMRAAEVFGFHLSSIDLRQSSDIHEAVVAELFARAGVHADYASLSEDDKLIALLAALADPRPLRSPYIEYSALAQSELGVFEKAREVRAQFGPRAVRNYIISHTETVSDLVEVLLLQKETGLLEGAFGAAHDSARNGLMVIPLFETIPDLRDAARIMREYFALPGIEALIAHQGAEQEVMLGYSDSNKDGGFLTSNWELYRAELALVDLFRDRKITLRLFHGRGGTVGRGGGPTYQAILSQPPGTVNGQIRLTEQGEVIASKFANPEIGRRNLETVVAATLEASLLPQSNAPAQLPAFEAAMQALSDAAMASYRALVYETPGFTDYFFAATPITEIAELNIGSRPASRKLQDPKNRRIEDLRAIPWGFSWGQCRLLLTGWYGFGSAVSAYLDGAPDAAARTKRVALLKKMNKTWPFFANLLSNMDMVLAKTDLAVASRYAQLVADRKLRKHVFERIVAEWERTAQALAEITGHEGRLATNPLLARSIKNRFPYLDPLNHLQVELIKRHRAGDTNARLRRGIHLTINGIAAGLRNTG

SEQ ID NO: 32204 - protein, 328 aa, Crocosphaera watsonii WH 8501
MSIKAFVTGGTGFIGANLIRLLLKKGYEVRALVRPQSSLENLKPLDIEIIKGDLNDINLSEKIRGCNVLFHVAAHYSLYQADKEQLHNSNVLGTRSILQAAKQANIERIIYTSSVAAIGVGNPGEIVNETHQSPVNELVGHYKKSKYWAEQEAKKAIIKGQDIVIVNPSTPIGPLDIKPTPTGEIILRFLRRQMPAYVDTGLNIIDVRDVAQGHLLALEKGKTGERYILGNKNLSLKALLEELSQLTGLKAPQQTLPLWLPLTVAWVEETLLSPLGKKPSIPMDGVKMSKQPMYYDPSKAINELGLPSSPIKNALQDAINWFTNNGYV

SEQ ID NO: 32205 - protein, 313 aa, Xanthomonas oryzae pv. oryzae KACC10331
MPESAQRLELPMLVFTHPACLGHDAGPEHPESPARLEAVLDALRAAFPDLDWREAPLAKLGDLCRVHEREQVDAVLETAFDGYRQLDVDTRMVPASRAAALRAAGAGIAAVDAVMQDQTRTAFCAVRPPGHHATAQVSMGFCLFNNIAVAAAHARDRHGLERITIVDFDVHHGNGTQAIFERDPAVQYLSTHQSGLYPHSGSVYERGVGNIHNLLLPPGSDGLRFRNVWEDEMLPLVDAFRPQLLLISAGFDAHLRDPLADLMLDDDDFAWLTGALRALADRHARGRVVSMLEGGYDLQALRESSVAHVAALR

SEQ ID NO: 32206 - protein, 344 aa, Vibrio vulnificus CMCP6
MTMKTLLPTSTAGSLPKPSWLAEPETLWSPWKLQGDELTDGKRDALRLSLHEQERAGVDIVSDGEQTRQHFVTTFIEHLSGVDFENRKTVTIRNRYEASVPTVVGPVSRTKPVFVDDAKYLRQQTKQPIKWALPGPMTMIDTLYDDYYGSREKLAWEFAKILNQEAKELEAAGVDIIQFDEPAFNVFFDDVNDWGIACLERAIEGLKCETAVHICYGYGIKANTDWKKTLGSEWRQYEEVFPKLQKSNIDIISLECHNSRVPIELLELIRGKKVMVGAIDVATNEIETPEEVANTLREALKYVDADKLYPCTNCGMAPLARDVSAAKLNALAAGAAIVRKELAK

SEQ ID NO: 32207 - protein, 272 aa, Thermus aquaticus
MSPFLGELIGTALLIIFGAGVCAGVNLKKSYAANSGWIVITMGWGLAVAVAVYAVGQYSGAHLNPALTVALALAGDFPWKDVPGYIAAQVLGAVMGAVIVYLHYWPHWKETDDPGVKLGVFATGPAVPNAAANLLSEIIGTFVVGVAILAIGANQFADGLNPFVVGFLIVAIGLSLGGTTGYAINPARDFGPRLAHFLLPIPGKGSSNWAYAWVPIVGPLLGGALGSLVYKAVFLGKPTGALWGVLAATAVVLAAAKMAKGKTANAASRRSL

SEQ ID NO: 32208 - protein, 162 aa, Zea mays
MAAKSHTRKAFLLCNYVLLGASSSCIFLTLSLRLLPSPCGLLLLFLHALTAVFSAAGCSGSFTAPATPAQWHNAHTAGAALTAIFQGAIALLAFTRTSDFLAELQSYVRDEDGAVILKMVGGLGTAIFVLEWAALALAFSLRLDEDDDDDDLQAKNWQSYHV

SEQ ID NO: 32209 - protein, 497 aa, Zea mays
MVLSHASSGRDDDDAVASTFASRYVRERLPRYRMPERSIPREAAQQIISDELMLDGNPRLNLASFVTTWMEPECDKLIMDSINKNYVDMDEYPVTTELQNRCVNMIAHLFNAPIKEDETAIGVGTVGSSEAIMLAGLAFKRKWQNKRKEQGKPCDRPNIVTGANVQVCWEKFARYFEVELKEVKLSEGYYVMDPVKAVEMVDENTICVAAILGSTLTGEFEDVKQLNDLLTEKNKETGWDVPIHVDAASGGFIAPFLYPELEWDFRLPLVKSINVSGHKYGLVYPGVGWVIWRSKDDLPEELIFHINYLGTDQPTFTLNFSKGSCQIIAQYYQLIRLGFEGYRNIMENCQENAAILREGIAATGRFDVLSKDAGVPLVAFSLRDSSRFSVFDVSENLRRFGWIVPAYTMPADAEHVAVLRVVVREDFSRSLAERLVSDVRKILRELDARATHAVRVSTATAEQSGDGVVAKKSVLEIEREVAARWMNAVNKKKTGVC

SEQ ID NO: 32210 - protein, 387 aa, Phoma herbarum
IGAKFWEVISDEHGIDPTGTYHGDSDLQLERINVYYNEATGGKYVPRAVLVDLEPGTMDSVRAGPFGQLFGPDNFVFGQSGAGNNWAKGHYTEGAELVDSVLDVVRKEAESCDCLQGFQITHSLGGGTGAGMGTLLISKIREEYPDRMMCTFSVVPSPKVSDTVVEPYNATLSVHQLVENSDETFCIDNEALYDICFRTLKLTTPTYGDLNHLVSAVMSGITTCLRFPGQLNADLRKLAVNMVPFPRLHFFMVGFAPLTSRGSQQYRALTVPELTQQMFDAKNMMAASDPRHGRYLTVAAMFRGRMSMKEVDEQMLNVQNKNSSYFVEWIPNNVKTAVCDIPPKGLKMSVTFIGNSTAIQELFKRISDQFTAMFRRKAFLHWYTGEG

SEQ ID NO: 32211 - protein, 494 aa, Ashbya gossypii ATCC 10895
MTEEVRKQAQQLTLDTQRSEEHSGNVVVVSNRLPVTIKKNDSGEYEYSMSSGGLVTALQGLKKSTKFQWYGWPGLEIPEGDREQVQRDLLEKFNAIPIFLSDELADLHYNGFSNSILWPLFHYHPGEINFDENAWLAYNEANRAFAEAIQKNLRDDDIVWVHDYHLMLLPELLRNYIATANLQNVKLGWFLHTPFPSSEIYRILPVRQEILRGVLSCDLLGFHTYDYARHFLSSVHRILNVNTLPNGVKFQGRFVNVAAFPIGIDVNNFTEGLQKESVVQRVKQLKETFKDCKIIVGVDRLDYVKGVPHKLHAIEVFLNEHPEWIGKVVLVQVAVPSRGHVEEYQYLRNVVNELVGRINGQFGTVEFVPIHFMHKSVPFEELISLYSISDVCLVSSTRDGMNLVSYEYIACQAENKGSLILSEFTGAAQSLNGAFIVNPWNTDELAEAIHESLTLPIEKREANWEKLYKYISKYTSSYWGETFVHELYKLSSQK

SEQ ID NO: 32212 - protein, 422 aa, Ashbya gossypii ATCC 10895
MGQLLSHPLTEKTIVYNDYLLEANGKHANLPDGSMKPYAKERHHRHLHLRRQFTENKSQEVVLTDTSSEITKEHASCTQFFNCVGSMQGYRMTQEDAHLVSNCDTQLVASFRNPMNNNAVEKLRISVFGVFDGHGGDECSQFLADSEKGLLKWIKYSFENHEYCSISDSASTASSRRAFCTVEGLISQIFRDAFALQDKDLHCHFANSPCGSTAVVAAIINSETLYVVNCGDSRCILASMNSCIKTMSFDHKPQHIGELIRINDDGGTVSLGRVGGVLALSRAFGDFQFKRSVAYKDSQLTNSIRRYIPAAEAQVTVEPDVLTHSCASAQDQLKPQALCIMTPIYSNKALTQFIKYHLTLGLTLDDIVTKVLDHGLAGADSNTGVGFDNMTIIIIVLNKPGETLSQWYAKMKMRMEQEKGLV

SEQ ID NO: 32213 - protein, 168 aa, Sinorhizobium meliloti
MNFLHRLASDVQLMLRRPARMQYAALCYRLARKTNALEILVITSRDTGRWVIPKGWPMQGKQAHEVAEREAYEEAGVKGKVQRAAIGAYVYQKRKDHGLEISCKVQVHALEVEDFCKNFPEKGSRRLEWVDYREAAKRVAEPSLKELILDFGRRVDPDPEQRPKASSN

SEQ ID NO: 32214 - protein, 162 aa, Triticum aestivum
  misc_feature (135)..(135): Xaa can be any naturally occurring amino acid
  misc_feature (141)..(141): Xaa can be any naturally occurring amino acid
  misc_feature (156)..(156): Xaa can be any naturally occurring amino acid
  misc_feature (158)..(158): Xaa can be any naturally occurring amino acid
  unsure (1)..(162): unsure at all Xaa locations
MVKSKAIRVHELGGPEVLRWEEVEVGEPGEGEIRIRTTAVGVNFIDIYFRKGVYAAPTMPFTPGMEAVGVVTAVGPGLTGRKVGDVVAYAGNPMGSYAQEQILPAAVAVPVPPSVDHKQAASVMLKGMTAHVLLXRVIKVXSGILSWSNAAAGGCXSXPCQW

SEQ ID NO: 32215 - protein, 281 aa, Acer pseudoplatanus
HSSWLRATVYGALIIYPKEGSSYPFPKPNREIPVLPGEWWDANPIDVVRQATITGAAPNVSDAYTINGQPGDLYNCSSKDTVIVPIDSGETHLLRVINSGLNQELFFTIANHKFTVVGADASYLKPFTTSVIMLGPGQTTDVLINGDQSPARYYMAARAYASAPTAPFDNTTTTAILEYKSAPCPTKKGQAIRPIMPSLPAYNDTNTVTAFTTKFRSPQKVEVPTEIDENLFFTVGLGLNNCPKNFKSNQCQGPNGTRFTASMNNVSFVLPSNFSLLQAHH

SEQ ID NO: 32216 - protein, 250 aa, Zea mays
  misc_feature (189)..(189): Xaa can be any naturally occurring amino acid
  misc_feature (211)..(211): Xaa can be any naturally occurring amino acid
  misc_feature (217)..(217): Xaa can be any naturally occurring amino acid
  misc_feature (237)..(237): Xaa can be any naturally occurring amino acid
  unsure (1)..(250): unsure at all Xaa locations
MAFFRGLAAVSRLRSRMGQDATTLGGVRWLQMQSASDLDLRSQLQEMIPEQQDRLKKLKSEHGKVQLGNITVDMVLGGMRGMTGMLWETSLLDPEEGIRFRGLSIPECQKVLPAAVKDGEPLPEGLLWLLLTGKVPTKEQVDALSKELLSRSTVPGYVYKAIDALPVTAHPMTQFTTGVMALQVESEFXKAYDKGMPKTKFWEPTYEDCLXLIARLXTSGFYGYRRISRMGSYAADXTLDYAANFPHALV

SEQ ID NO: 32217 - protein, 658 aa, Ashbya gossypii ATCC 10895
MASEDVQLARKAVEFNRENLESVLKRRFFFAPAFELYGGVSGLYDYGPPGCAFQANIVDVWRKHFILEEDMLEVDCTMLTPYEVLKTSGHVDKFSDWMCQDPKSGEIFRADHLVEEVLEARLKGDKAARGISAAPEEEDADKKKRKKKVKQIKAEKLDDSVIQEYESVLAKIDGYSGEELGELMVKFNIGNPVTGETLEPPKAFNLMFETAIGPSGQLKGYLRPETAQGQFLNFNKLLEFNNGKTPFASASIGKSFRNEISPRSGLLRVREFLMAEIEHFVDPENKNHPRFDEVKNLKLKFLPKGVQEAGRTEPIESTVADAVASGMIDNQTLGYFIARIYQFLTKIGVDEEKLRFRQHMSNEMAHYATDCWDAELKTSYGWIECVGCADRSAYDLTVHANKTKTALVVREKLDVPRQVTQWEIELTKKLFGPKFRKDAPKVENYLLNLSQDELASKAEQLSSDGKIVFQVEGIEGDIELDSKFISIEHKTKTEHVREYVPNVIEPSFGIGRIIYAIFEHSFWSRPEDAARSVLSFPPLVAPTKVLLVPLSNNADLAEVVTEVSRVLRKEQIPFKVDDSGVSIGKRYARNDELGTPFGITIDFESIKDGSVTLRERDSTRQVRGSVTDIIRAIRDITYNGVTWEEGTKSLTPFVSQSE

SEQ ID NO: 32218 - protein, 366 aa, Geobacillus thermocatenulatus
MELFKYMEMYDYEQVLFWQDKESGLKAIIAIHDTTLGPALGGTRMWMYNSEEEALEDALRLARGMTYKNAAAGLNLGGGKTVIIGDPRKDKNEAMFRAFGRFIQGLNGRYITAEDVGTTVADMDIIYHETDYVTGISPEFGSSGNPSPATAYGVYRGMKAAAKEAFGSDSLEGKVVAVQGVGNVAYHLCRHLHEEGAKLIVTDINKEAVARAVEEFGAKAVDPNDIYGVECDIFAPCALGGIINDHTIPQLKAKVIAGSVNNQLKEPRHGDMIHEMGIVYAPDYVINAGGVINVADELYGYNRERSMKMIEQIFDNIEKVFAIAKRDNIPTYAADRMAEERIETMRKARSQFLQNGHHILSRRRAR

SEQ ID NO: 32219 - protein, 416 aa, RICKETTSIA HEILONGJIANGENSIS
DSEFAELKIRGKIFKLPILKASIGEDVIDISRVSAEADCFTYDPGFMSTASCQSTITYIDGDKGILRHRGYDIKDLAEKSDFLEVAYLLIYGELPSGEQYNNFTKQVAHHSLVNERLHYLFQTFCSSSHPMAIMLAAVGSLSAFYPDLLNFKEADYELTAIRMIAKIPTIAAMSYKYSIGQPFIYPDNSLDFTENFLHMMFATPYTKYTVNPIIKNALNKIFILHADHEQNASTSTVRIAGSSGANPFACISTGIASLWGPAHGGANEAVINMLKEIGSSEYIPKYIAKAKDKNDPFRLMGFGHRVYKNYDPRAAVLKETCKEVLKELGQLDNNPLLQIAIELEAIALKDEYFIERKLYPNVDFYSGIIYKAMGIPSQMFTVLFAIARTVGWMAQWKEMHEDPEQKISRPRQLYTG

SEQ ID NO: 32220 - protein, 271 aa, Nocardioides sp. JS614
MTPPHEARGGTLEARTAIVTGGSTGIGMATARSLAGRGAHVVIAGRDRDRGTRAAANLAAGTPGTVTYVELDVREAESVAGLVATTVETFGSLDILVNNSGVEAEEGPDGPSEPDWDRMFATNAKGTWLCCRAALPHLERTHGVIVNNASMAGLIGVAGGAGYAASKAAVVSLTKSLALAYAERGVRVNAVCAGPVDTQMTYDEWELVGGPEEGLRRALALSPARRITAPEEVAELICFLASDDAASITGAAIPIDGGKTAGLMPTERYRW

SEQ ID NO: 32221 - protein, 606 aa, Candida glabrata CBS138
MLLNLIKSRAKVTTALAKVRVVGRQRRFLISPLTTASIATGAISLSIYHNRREHLLNETLEPDPTGDTFEMGLYIASEKERETLAASGKLDVIRKSRSLLVRSILKLWVVLDDNIIEPVLTVCRFLELMGLFLPVFSLYPICWLGRRIKLNDDITDTRGSIIWCKLIRIALELAGPSFIKLGQWAGSRTDIFSETLCYELGKLHSKVRPHSIEYSKKMITSSFEVDDFDEIFDSFGEKPLGVGAIAQVHVGKLNDAFYNKYSNKTPENNKWCAIKIIHPRVRNQIYRDLKIMKFFACVIDGIPTMEWLSLPNEVEQFSILMKLQLDLRIEALNLKRFNENFKDATQVKFATPYLELSNRDVLFEEYLHGFPMEDFLKVKRHIKDDDLCRRVSDPFVEAFLQMLIRDDFVHADLHPGNVMIRFVKTNKYGTQIISSEESSYNISHTLREKWRNKDSDLIPYLKSALTTYTPQICYIDTGLVTELNDRNRVNFIALFNALAQFDGYRAGELMIERSRTPETAIDKDLFALKVEKLVDKVKQRTFTLGNVSIGDLLDQMLRMVRSHHVRMEGDFVSVVVAILLLEGIGRQLDPDLDLFERFVFYYSLHF

SEQ ID NO: 32222 - protein, 476 aa, Geobacillus thermocatenulatus
MAKEYDVVILGGGTGGYVAAIRASQLGLKTAVVEKGKLGGTCLHAGCIPSKALLRSAEVYAQTKNGEAFGVIADGVRLDFAKVQARKAAIVDQLHKGVQHLMKKGKIDVFAGIGRLLGPSIFSPLPGTVSVEMNDGSENEMLVPKFVVIATGSRPRTLPGLEPDGEFVMTSDEALQMETLPSSILIVGGGVIGMEWASMLNDFGVEVTVLEYADRILPTEDEDVSKEMEKLLRRRGVNIVTGARVLAETLEKGNGVTIQAEHQGERKTFAADKMLVSVGRQANIEGIGLENTEIVVEKGYIQTNEFGQTKESHIYAIGDVIGGHASLPHVAAHEGIVAIEHLAGRNPAPIDYTMVPRCIYTRPEAAAVGLTEQEAKAKGYDVKVGKFPFKAIGKALVFGEAEGFVKLIADRNTDDLLGVHMVGPHVTDLISEAGLARVLDAAPWEVAHAIHPHPTLSEAMAEAALAVDGKRFIFKF

SEQ ID NO: 32223 - protein, 224 aa, Arabis procurrens
QCPIRPGKSYTYRFTIQGQEGTLWWHAHSSWLRATVYGALIIHPTIGSSFPFPKPDRQTAIMLGEWWNANPVDVMKEATRTGAAPNISDAYTINGQPGDLYKCSTKETVVVPINSGETSLLRVINAALNQPLFFTVANHKLTVVGADASYLKPFTTKVLMLGPGQTTDVLLTADQPPKRYYIAARAYQSAQNAPFDNTTTTAILQYRKTATTSPPIVPFLPPYN

SEQ ID NO: 32224 - protein, 362 aa, Glycine max
MFRVCDVRRLRSLPPLFSRMFSSEPVLTQETINQHVVKAEYAVRGELVLLANKHQKTMQQNPNHSLPFKEIIYCNIGNPQILGQKPLTFFRQVTACCEYPALLDLPNVMPEDVKERAKKLLASMGNSTGAYSSSQGVPIVLNNVAKFIEERDGHPANAEDIFLTDGASVGVQRMLRLLIRDDKDGILIPIPQYPLYSATIDLYGGQRVGYYLNEEANWRLDTPQLEKALDEAKKKGINTRALVVINPGNPTGNTMDRKAMEEVVDFCYRNKLILMADEVYQDNIYKEGQSFISFKKVLREMEEKYQKLELVSFHSVSKGFYGECGKRGGYLEMVNISEPVKEHKSLQPGGSTTSRAVATAEE

SEQ ID NO: 32225 - protein, 475 aa, ASPERGILLUS NIDULANS FGSC A4
MLEDPSYAEIVRWGDDGDSFVVLECEKFTKTILPKHFKHSNFASFVRQLNKYDFHKVRQNNEENGQSPYGQNAWEFKHPEFRANSKESLDNIRRKAPAPRKQAQAHDDSVPTQQIDLLNQQIVAQQQQIQHISDRYAQMSVDHQLMLQEVLRVQKTVVNHENVIHQLVNYLVSIDARQKRDNKAGSFQAQVGASPSQVTPMDDGVSTPLQQASKLLSDMNAEVQFNLVPVESMGEPPKTGVVSTPTMETAPRRVAPQPAAAATNPALVYPKMNGEMEPVVYPVGATNGIDPMYGEHVNNVPYTVPPKQDMDDRRQFPENRKKSNHVDPGWMRSPRILLVEDDATCRQIGGKFLYSFSCEIDTALDGLEAVNKVQDGSKYDLILMDIIMPNLDGVSACHLIRQFDRTPIIAMTSNIRSDDIQLYFQHGMDDVLPKPFTRKSLLEMLEKHLVHLKTVPQGMEAPPTCDRSHVGTSLN

SEQ ID NO: 32226 - protein, 173 aa, Geobacillus thermocatenulatus
MAQNRHQALGLSDDTVLEMYETMLLARKLDERMWLLNRAGKIPFVISCQGQEAAQVGAAFALDRTKDYVLPYYRDMGVVLTFGMTPRELMLAAFAKAEDPNSGGRQMPGHFGQKKNRIVTGSSPVTTQVPHAVGFALAAKMEKKDFVAFVTFGEGSSNQGDFHEGANFAGVQA

SEQ ID NO: 32227 - protein, 331 aa, Kluyveromyces lactis NRRL Y-1140
MVRVAINGFGRIGRLVLRIALSRPNVEVVAINDPFISVDYAAYMFKYDSTHGRFAGEVSHDENSLIIDGKKVLVFQERDPATLPWGEHNVDIAIDSTGVFKELDSAQKHIDAGAKKVVITAPSSTAPMFVVGVNEDKYNGETIVSNASCTTNCLAPLAKVVNNAFGIEEGLMSTIHSITATQKTVDGPSQKDWRGGRTASGNIIPSSTGAAKAVGKVLPELQGKLTGMAFRVPTVDVSVVDLTVKLAKEATYDEIKAVIKKASENELKGILGYTEDAVVSSDFLGDTNSSIFDAAAGIQLSPKFVKLVTWYDNEYGYSTRVVDLVELVAKN

SEQ ID NO: 32228 - protein, 431 aa, Mycobacterium tuberculosis H37Rv
MADTDDTATLRYPGGEIDLQIVHATEGADGIALGPLLAKTGHTTFDVGFANTAAAKSSITYIDGDAGILRYRGYPIDQLAEKSTFIEVCYLLIYGELPDTDQLAQFTGRIQRHTMLHEDLKRFFDGFPRNAHPMPVLSSVVNALSAYYQDALDPMDNGQVELSTIRLLAKLPTIAAYAYKKSVGQPFLYPDNSLTLVENFLRLTFGFPAEPYQADPEVVRALDMLFILHADHEQNCSTSTVRLVGSSRANLFTSISGGINALWGPLHGGANQAVLEMLEGIRDSGDDVSEFVRKVKNREAGVKLMGFGHRVYKNYDPRARIVKEQADKILAKLGGDDSLLGIAKELEEAALTDDYFIERKLYPNVDFYTGLIYRALGFPTRMFTVLFALGRLPGWIAHWREMHDEGDSKIGRPRQIYTGYTERDYVTIDAR

SEQ ID NO: 32229 - protein, 480 aa, Escherichia coli O157:H7
MSRRLRRTKIVTTLGPATDRDNNLEKVIAAGANVVRMNFSHGSPEDHKMRADKVREIAAKLGRHVAILGDLQGPKIRVSTFKEGKVFLNIGDKFLLDANLGKGEGDKEKVGINYKGLPADVVPGDILLLDDGRVQLKVLEVQGMKVFTEVTVGGPLSNNKGINKLGGGLSAEALTEKDKADIKTAALIGVDYLAVSFPRCGEDLNYARRLARDAGCDAKIVAKVERAEAVCSQDAMDDIILASDVVMVARGDLGVEIGDPELVGIQKALIRRARQLNRAVITATQMMESMITNPMPTRAEVMDVANAVLDGTDAVMLSAETAAGQYPSETVAAMARVCLGAEKIPSINVSKHRLDVQFDNVEEAIAMSAMYAANHLKGVTAIITMTESGRTALMTSRISSGLPIFAMSRHERTLNLTALYRGVTPVHFDSANDGVAAASEAVNLLRDKGYLMSGDLVIVTQGDVMSTVGSTNTTRILTVE

SEQ ID NO: 32230 - protein, 103 aa, Prochlorococcus marinus str. MIT 9313
MAAVSLSVSTVKPLGDRVFVKVSESEEKTAGGILLPDTAKEKPQVGEVVQVGPGKRNDDGSRQAPEVGVGDKVLYSKYAGTDIKLSTDEYVLLSEKDILAVVN

SEQ ID NO: 32231 - protein, 393 aa, Crocosphaera watsonii WH 8501
MLSGINKSNKLDFIAKELQETEKNNNIRQLKAICPQDGVTIVKNGKSLINFSSNDYLGLSKHPSLMLASQNYTKQYGTGSTASRLVTGTYDIHEKLEQKLAKVCGKEAALLFNTGFQANTTIIPSLVDQKSLVLCDRLVHNSILQGIFLSKARWKRYQHNDLSHLERLLKKAVLQGYNRILIVTETVFSMEGDRSDVDGLIQLSQQYNTLLYLDDAHALGIMGEKGMGLTANKSGIDISLGTFGKAIGSFGAFITTSKLIRDYLINCCPGFIYTTALPPAVIGSIDAAIDLVPSLDQERTYLGGRIDYLQNQLINLGYKVCNSISPIIPVIIGDEEKALNLSQYLETNGILATAIRPPTVPKNTARIRFVLSSKHQPEQINYLISLLKQYHES

SEQ ID NO: 32232 - protein, 415 aa, Magnaporthe grisea 70-15
MSLQVGGSSRGTRFRPLSLDVPKPLFDVAGHPIIWHCLTAISTVPSIHEVYLIGYYDESVFRDFIKDSSTEFPNLSIKYLREYQALGTAGGLYHFRDAILKGRPERLFVLNSDVCCSFPLNEMLKMFTEKDAEAVILGTRVGEEAATNFGCIVSDNHSRRVLHYVEKPESQISNLINCGVYLFSTEAIFPSIRSAIKRRTDRPRLSSYRSSENLEASFIEYADDDEGSKNEVIRLEQDILSDMADTKQFFVYETQDFWRQIKTAGSAVPANALYLQQAWQGGSKELAAPSANIIPPVFIHPSATVDPTAKLGPNVSIGPRATVGPGARVKESIVLEDAEIKHDACVLYSIIGWGSRVGAWARVEGTPTPSTSHTTSIVKQGVKVQAITILGKECGVSDEVRVQNCVCLPFKDLKR

SEQ ID NO: 32233 - protein, 621 aa, Triticum aestivum
MWRSRVSRGLREAKAAAAAASRRFSTTSSYTVVDHTYDAVVVGAGGAGLRAAIGLSEHGFNTACITKLFPTRSHTVAAQGGINAALGNMSEDDWRWHMYDTVKGSDWLGDQDAIQYMCREAPKAVIELENYGLPFSRTEDGKIYQRAFGGQSLDFGKGGQAYRCACAADRTGHAMLHTLYGQAMKHNTQFFVEYFALDLIMDKEGTCQGVIALNMEDGTLHRFRSTNTILATGGYGRAYFSATSAHTCTGDGNAMVARAGLPLQDLEFVQFHPTGIYGAGCLITEGSRGEGGILRNSEGERFMERYAPTAKDLASRDVVSRSMTMEIREGRGVGPMKDHLYLHLNHLPPEVLKERLPGISETAAIFAGVDVTKEPIPVLPTVHYNMGGIPTNYHGQVVDIKGDNPDTVIPGLMAAGEAACASVHGANRLGANSLLDIVVFGRACANRVAEISKPGETQKPLEKDAGEKTIAWLDKLRNANGSLPTSKIRLNMQRIMQNNAAVFRTQETLTEGCELISEAQKSFHDVKLSDRSLIWNSDLIETIELENLLINACITMHSAEARQESRGAHAREDFKTRDDDKWMKHSLGYWEDEKVRLEYRPVHMNTLDDEVETFPPKARVY

SEQ ID NO: 32234 - protein, 328 aa, Zea mays
MASGEEGKGETVLVTGASGFIGSTLVRGLLGRGYNVRAGVLDPDDRAETDHLLALAAGAGRLSFFRCDLLDGAALLDAARGCSGVFHLASPCTVDPVKDPQNQLMVPAVEGTLNVVRAAKDAGGVRRVVVTSSISAVVPNPGWPAGEVVDERCWTDIDYCEKNGVWYPASKTLAEKAAWKFAEENGLDVVVVNPGTVLGPMIPPAINASMAMFCRLLQGCTEEYADFFLGPVHVEDVAMAHILVFESASASGRHLCVHSICHWSDFAAKVAELYPDYKVPKFPKDTQPGLVRQEVGSKKLIALGLQITPMEKIIRDAVESLKSRGHIS

SEQ ID NO: 32235 - protein, 120 aa, Triticum aestivum
MPPPTPLSSASAALRRRLQQSLRTRGGAESGPSRWTSPGHEERPKGYLFNRTPPPPGQSRKWEDWELPCYVTSFLTIVILGVGLNAKPDLTIETWAHEKALERLKIENSLAAAATNNSES

SEQ ID NO: 32236 - protein, 553 aa, Buchnera aphidicola str. Sg (Schizaphis graminum)
MTKNYIFITGGVVSSLGKGIAAASLGAVLEARNLKITIMKLDPYINVDPGTMSPIQHGEVFVTEDGAETDLDLGHYERFIRTKMTCLNNFTTGSIYSEVLKKERRGDYLGSTIQVIPHITNAIKDRIILCSKNSDIILVEIGGTVGDIESLPFLEAIRQLAVDIGRKNVIYIHLTLVPYIKTAGEIKTKPTQHSVKELLSIGIQPDILICRSQKTVPINERKKIALFCNVPVNAVISLKDVDSIYTIPKLLKDQKLDNYICEYFKLNVPQADLKEWEKVIYEEKNASKEIIIGIIGKYIKLPDAYKSVIEALKHAGLKNKIKVKIELINSQEIENKNFKLLQNLNGILIPGGFGDRGIIGKLLSVQYARENNIPYFGICLGMQIAIIEFAQNVIGIKEANSTEFDPQCKFPVIDLIKTKKNDIKDTRQGKKNNKSNFGGTMRLGSQPCKLIFNSLSRKLYKKDTIIERHRHRYEVNNFLLKKIEKNGLKIAGRSKKNNIVEIIEIFDHPWFIGCQFHPEFTSTPRDGHPLFIDFIKSAKKNKKNNFKIKVKNV

SEQ ID NO: 32237 - protein, 389 aa, Nostoc punctiforme PCC 73102
MNQANNVLESIYQPDLEIMNQPELELEELLIDDEEDLLIIDEGDDEFLEPQSDEDDAKSGKAAKSRRRTQSKKKHYTEDSIRLYLQEIGRIRLLRADEEIELARKIADLLELERVRERLSEQLDRDPRDSEWAEAVQLPLPAFRYRLHVGRRAKDKMVQSNLRLVVSIAKKYMNRGLSFQDLIQEGSLGLIRAAEKFDHEKGYKFSTYATWWIRQAITRAIADQSRTIRLPVHLYETISRIKKTTKLLSQEMGRKPTEEEIATRMEMTIEKLRFIAKSAQLPISLETPIGKEEDSRLGDFIESDGETPEDQVSKNLLREDLEKVLDSLSPRERDVLRLRYGLDDGRMKTLEEIGQIFNVTRERIRQIEAKALRKLRHPNRNSVLKEYIR

SEQ ID NO: 32238 - protein, 809 aa, Burkholderia vietnamiensis G4
MAKTTGGKKATGKCSTEPTKKVTAAKSASSTRTTSSATSAPAGKKTAAGTAQAAPAPAAGSRAAARPDSGPAKPAAKRASAKSARDTTAAADETAVRTTHAPTVQPAVVQQPRVDIAGTANSMTKKLNEVSVDDDANQSDEQQPAAAAAAAAPGKSKVRDRRAKEKALLKEAFATSTPGTAEELEERRVKLRALIKLGKERGFLTYGEINDHLPDNFTETEALEGIIGTFNDMGVAVYEQAPDAETLLLNDNAPAASSDDEVEEEAEVALSTVDSEFGRTTDPVRMYMREMGTVELLTREGEIEIAKRIEDGLRHMVMAISACPTTIADILAMAERVANEEIRVDELVDGLLDPNAADAADTDGFSAKEAEAIENEDEEAEEEEEEEEEEDDDGAAQATANAAQLEALKRASLEKFSQISEWFDKMRRAFEKEGYKSKSYLKAQETIQTELMTIRFTARTVERLCDTLRAQVDEVRQVERQILHIVVDKCGMPRSEFIARFPGSETDLDWAEKIAAEGHSYSAVLSRNIPAIREQQQRLLDLQARVVLPLKDLKETNRQMAAGELKARQAKREMTEANLRLVISIAKKYTNRGLQFLDLIQEGNIGLMKAVDKFEYRRGYKFSTYATWWIRQAITRSIADQARTIRIPVHMIETINKMNRISRQILQETGLEPDPATLAEKMEMPEDKIRKIMKIAKEPISMETPIGDDDDSHLGDFIEDNNTVAPADAALHASMRDVVKDVLDSLTPREAKVLRMRFGIEMSTDHTLEEVGKQFDVTRERIRQIEAKALRKLRHPSRSDKLKSFLEGN

SEQ ID NO: 32239 - protein, 385 aa, Methanothermobacter thermautotrophicus
MDETLLMIPGPTRVAQRVLKAMSENIVNHRSALFGKILSETSEMMSDVFRTNNKSYLLTGSGTAAMEAAIANIIEPGDKVLNVVGGKFGQRFSQIVEAFGGESIRIDVEWGKAVNPDEIGYALEENDDIKAVTVVHNETSTGVANPIKEIGKIMSDYDALYVVDTVSSLGGDEVDVDGYGIDICVTGSQKCLAAPPGMAAITLSDDAWSAVEGVSNSRTYYLNLKKYRKSGDAEPPETPYTPAVSLIYAMHEPLKVIMEEGLNNRIKRHKLAAEATRNAIKALGLELFPDESVSSTTVTAVRLPEGVTDGELRGTMRNKYHVELAGGQDHLKGKIFRIGHMGNITHRELITTISGLEMTLRELGFEVEMGEAVAAVADTYLPENL

SEQ ID NO: 32240 - protein, 498 aa, Chlamydomonas reinhardtii
MADEMDPMTACITALTDAAMTTAQATALCGQFAFAADNSDLSDRLDQTNQGLNTLYLVSCGALVFVMHAGFAMLCAGAIRSKNTMNILLQTVMDAAVSAVAFYILGYGFAYGIGNNPNGFIGDSLFGLSRWVSHSSSSDAGANWQAWFFQWAFAATATTIPAGAVAERLNFNAYLIYSFFISAFVYPVVVHWVWAAEGWLGYARFGGYSHLFRSGMIDFAGSGVVHMTGGLAGLAGCIMVGPRMGRFDSNGQPVEMPGHSATLVVLGTVLLWFGWYGFNPGSQLIINYTASAAVVGRAAVTTTLSGAAGCLSCLLTAFLRHKAWDLVSGCNGALVGFVSITASANVVEPWAALIAGLVGGWVFDAVCLLFLKLRIDDPLSAAPMHAFCGAWGVFFAGLLAKKEYICESYGRDCEGYVADGLFYVGDGRLLAQVIGIISIFAWVFGLMLLLFGGLKAVGLLRISAEEEQAGLDVSKHGGSAYNYDHGLGKPEKAQALGL

SEQ ID NO: 32241 - protein, 478 aa, Bacillus cereus ATCC 10987
MRKKVMMSLMLMTFLSAVEGTIVSTAIPRITSDLSGVELVSWVYAIYMLATAVSTPIYGKLADLFGRKKVLLIGATIFLIGSALCGVVTSMEQLIFFRALQGIGAGAVMPITMTIIGDLYSEAKDRAKAQGWMSAVWGVSGVIGPLVGGFLVDSLSWRYIFFLNVPFGIIACLMIAIYYKESIKPAKHHIDYLGATVFSLSTIALLYALLTGSSKQNWGDITIIGLLIFAVVSFLIFLFIEKKSPEPLIPLALFSNRTLSTINILTLIAGAMIISITMYLPIWSQGVLGKNATEAGLILMPIPVMWTFGAIFSGNLVGKLKTKQIILLGASILSVATFLLFTLSTNSPSFLIYVAVGLFGLGMGLVTPIYMVTIQAAVPAHTRGTAVGLNTFINTFSQTLGAAIFGTIFNTMIHARGIKNLDLVSGGHGGTTTNVVTESQSALASSVHVIYMSTFVLAVCTLIIAWLLLKPATQTSEQ

SEQ ID NO: 32242 - protein, 521 aa, Xanthomonas axonopodis pv. citri str. 306
MTTSISPGASAGARLPLQIPFIIGNEACERFSFYGMRNILVQFLITSLLLQEISGPGREAEAKHILHSFMIGVYFFPLLGGWLADRFSGKYNTILWFSLVYCAGHACLALFEGSRDGFFLGLGLIALGAGGIKPLVASFMGDQFDQSNKHLAKVVFDAFYWIINFGSLFASLLIPLALKNLSPAWAFGIPGILMFVATLVFWLGRKRYVLVPLPPKDPHGFAAVVRTALLTHAPGQGRPGLLLAVVSVLLALAGFALIEPLGIVVCLCIALVLLLAGIGGGTWWQLERARGTHPDVAVEGVRALLRVLVIFALVMPFFSLFDQKASTWVLQGREMTMPAWFTASQMQALNPLLVMLLIPFNNLVLYPLLRRGGWEPTPLRRMTSGIAFSGVAWIAVGAIQMIMDGGEPMHIAWQILPYALLTFGEVLVSATGIEFAYSQAPPSMKGVVMSFWYLTTTVGNLWVLLSNVAVRNATVTAHIADTGLSEAAFLMFFFAAFAFLAALAFGLYARRYRMVDNYRTA

SEQ ID NO: 32243 - protein, 211 aa, Buchnera aphidicola str. Sg (Schizaphis graminum)
MHNNSKKNIIWQKHSVTRIKREQKNGHKSIVIWFTGLSGSGKSSIANSLEEILFQNNFNTYLLDGDNIRSSLCSDLSFSILDRNENIRRIGEVSKLMIDAGIIVLVSVISPYRNQRKKIRLMLGKINFLEVFVDTPLNICEERDPKKLYQKSRLGKISDLTGIQSLYEIPEKPDLHLDETISLKNNTKKLIHILCDKNIISFPNIDETFLF

SEQ ID NO: 32244 - protein, 324 aa, Phaseolus vulgaris
MVLHSFSSSTTTFAIAFFTLFLIGSSSAQLSENFYAKKCPKVLYAVKSVVQSAVAKEPRMGASLLRLFFHDCFVNGCDGSVLLDGPSSEKTAPPNDKSLRGYEVIDAIKSKVEALCPGIVSCADIVAIAARDSVNILGGPFWKVKLGRRDSSTGFFQLASSGALPSPASSLDTLISSFKDQGLSAKDMVALSGAHTIGKARCAVYGSRIYNEKNIESLFAKARQKNCPRNSNGTPKDNNVAPLEFKTPNHFDNNYYKNLINKKGLLHSDQVLFDGGSTDSLVRAYSNDQRAFESDFVTAMIKMGNIKPLTGSNGQIRRLCGRPN

SEQ ID NO: 32245 - protein, 302 aa, Pleospora herbarum
WAKGHYTEGAELVDQVLDVVRREAEGCDCLQGFQITHSLGGGTGAGMGTLLISKIREEFPDRMMATYSVVPSPKVSDTVVEPYNATLSIHQLVENSDETFCIDNEALYDICMRTLKLNNPSYGDLNHLVSAVMSGVTTCLRFPGQLNSDLRKLAVNMVPFPRLHFFMVGFAPLTSRGAHSFRAVTVPELTQQMFDPKNMMAASDFRNGRYLTCSAYFRGKVSMKEVEDQMRNVQNKNSSYFVEWIPNNVQTALCSIPPRGLKMSSTFVGNSTSIQELFKRVGDQFTAMFRRKAFLHWYTGEG

SEQ ID NO: 32246 - protein, 162 aa, Pseudomonas syringae pv. syringae B728a
MSAFHDIKLKALGGQELPLANFRKKVVLVVNVASKCGLTPQYAALENLYQQYKDQGLEILGLPCNQFAGQEPGTEQEIAEFCQLNYGVTFTLGEKLDVNGPNRHSLYRLLAGEGAEFPGDITWNFEKFLVGKNGGVSARFSPRTTPDDPAVIQAIEKALAQS

SEQ ID NO: 32247 - protein, 558 aa, Listeria monocytogenes str. 4b H7858
MNVARLNFSHGDFEEHGARIVNIREASKKTGKQVAILLDTKGPEIRTNDMVGGKLEFQTGDVVRVSMTPVEGTKEKFSVTYGELYDDVEIGSSILLDDGLIGLEVIEKDEANRELVTKVLNPGVLKNKKGVNVPNVSINLPGITEKDAADIRFGLEQGIDFIAASFVRRATDVLEITKILEEHNATHVQIIPKIENQEGVDNIDEILQVSQGLMVARGDLGVEIPAEEVPIVQKELIRKCNKLGKPVITATQMLDSMQRNPRPTRAEASDVANAIFDGTDAIMLSGETAAGDYPVEAVKMMAKIAVRTEEVLVAQDKFALKLHENTDMTEAIGQAVGHTAKNLNVQTIVAATQSGHTARMISKYRPKSHIVAVTFNEHVYRGLALSWGVYPRLATPVSNTDEMFDLAVKESLASGVAKQGDLIIITAGVPVTESGTTNVMKIQLIGEKVVKGQGIGSKSVIGKAIVAKSNAEALEKAEEGGILIVKTTDKEMLPAFEKSAAVVVEEGGLTSHAAVVGINLGIPVIVGAKDATSLVKDGEIITVDSRQGVVYNGKTATH

SEQ ID NO: 32248 - protein, 344 aa, Anabaena variabilis ATCC 29413
MVQERTIPKFNTANAKITKEEGLLLYEDMTLGRFFEDKCAEMYYRGKMFGFVHLYNGQEAVSTGVIQAMRPGEDFVSSTYRDHVHALSAGVPAREVMAELFGKATGCSKGRGGSMHMFSAEHGLLGGYAFVAEGIPVAAGAAFQSKYRREVLGDPNADQVTACFFGDGAANNGQFFETLNMAALWKLPIIFVVENNKWAIGMAHDRATSDPEIYKKASVFNMVGVEVDGMDVLAVRAVAQEAVARARAGEGPTLIEALTYRFRGHSLADPDEMRSKAEKEFWFSRDPIKKLAAYLIEQNLADEAELKAIERKIQDVIDDAVKFAESSPEPDPSELYRFVFAEDE

SEQ ID NO: 32249 - protein, 549 aa, Leuconostoc mesenteroides subsp. mesenteroides ATCC 8293
MTELGKHVVYQVYPKSFQDSNGDGVGDLPGIIQRLPYLAKLGVTMIWLNPVFPSPQNDNGYDISNYTAIDPLFGTMTDFENLVKEAKTYHMGIMLDMVFNHTSTDHTWFQKALAGDQKYQDYYYLRPYRDDGHEPTNWVSKFGGSAWAKFGDTNLAYLHLYDPTQADLNWHNPAVRQELYDVLNFWLAKGVRGFRFDVINVIGKSEVLVDDETDNGGKFLYTDTPIVQDYIQEMNAATFGKYPDVITVGELSSTTVQNTAAYTNPDNKALSMGFNFHHLKVDYDHGNKWTKVPYEFESLRHIWHEWSQGLMENHGWPAWFWNNHDQPRAINRFIKTPKYYRVGAKMLAMLVHLNRGTPYVYMGEEIGMIDPTYHKIETYVDVESKNAYQMLLKQGLTKQQAFEIVQTKSRDNSRVPMQWRNEDYAGFSTHEPWLQNANYEQINVAQDEKSADSLYAFYQNLIRLRQENEVIADGDYTPKYEESEEIIAFERQLAGKHILVVTHFGETPVSISISDEIVKNGQVLVTNYPAQPVSGTMLLKPYESFAIAY

SEQ ID NO: 32250 - protein, 680 aa, Ashbya gossypii ATCC 10895
MTQFSDVDRLAVSTIRLLSVDQVSKANSGHPGAPLGLAPAAHVVWKQMRLNPKSPKWINRDRFVLSNGHACALLYSLLHLFGYDLSIEDLKQFRQVGSKTPGHPEYELPGVEVTTGPLGQGISNAVGLAIAQANLAATYNKPGYELSDNYTYVFLGDGCLQEGVSSEASSLAGHLKLGNLIAFYDDNKITIDGHTEVSFDEDVLKRYEAYGWEVLNVANGDENLEDIASALEQAKKNKDKPTLIKLTTTIGFGSLNAGSHTVHGAPLKADDVKQLKTKLGFNPDESFIVPQEVYDLYHNSTIQPGAESEKEWNALLEKYAGEYPKEAAELKRRLAGKLPENWESKLPVYKPTDSAVASRKLSEIVLQSIFEDVPELIGGSADLTPSNLTRTTNAVDFQPPQSGLGDYSGRYIRFGVREHGMGAIINGLSAYGANYKVFGATFLNFVSYAAGAVRLAALSGHPVIWIATHDSIGLGEDGPTHQPIETLAHLRAIPNMMVWRPADGNEVSAAYKVALESQDTPSVIALSRQNLPQLDGSSIEKASKGGYILQDVENPDIAIVSTGSEVGIAVEAAKLLAEKNMKVRIVSLPDFHTFSRQPKEYQLSVLPDRVPILSVEVLSTSGWSEYAHQSFGLNRFGASGKGPEVYKFFEFTPEGIASRAEKTVAFYKGKEVLSPLNKAF

SEQ ID NO: 32251 - protein, 185 aa, Triticum aestivum
KYPYIAGMGVYVFKRDVLLNLLKSRYAELHDFGSEILPRALHDHNVQAYVFTDYWEDIGTIRSFFDANMALCEQPPKFEFYDPKTPFFTSPRYLPPTKSDKCRIKEAIISHGCFLRECKIEHSIIGVRSRLNSGSELKNAMMMGADSYETEDEISRLMSEGKVPIGVGENTKISNCIIDKNRSIG

SEQ ID NO: 32252 - protein, 368 aa, Brassica napus
WWKADVEDVIKQSTQSGLPPNLSDAHTINGLTGPITGCNNSHGYTIHVETGKSYLLRIINAAVNDELFFKIAQHNLTVVEVDASYTKPFNTETLFLGPGQTANAILTANHPTGNFLMTISPFMDTVVPVNNATATAFLRYKTTTTQSLTLSKIPPINATSIAQNFSDALRSLNSRDCPTNVPLKVDHSLFFAIGVGVNPCATCINGTKNIADINNVTFVMPTMALLQAHYFNKSKGVFTDDFPGRPLTPFDYTGGNKSIPLSNLQTKNGTQVYRLEFNATVHIVIQGTSVIAPESHPTHLHGSNFFVVGKGLGNFDPLMDPKKFNLVDPVERNTVSVPTAGWTAIRFIADNPGVWFFHCHLEVHTTWG

SEQ ID NO: 32253 - protein, 644 aa, Gloeobacter violaceus PCC 7421
MQDWTIEDSAELYQIHGWGEPYFKINDKGHVAVMPRGEGNGEIDLFHLVQDIQKRGLNMPMLIRFSDILADRIARLNACFVEAIREYDYPGIYKGVYPVKVNQQRHVVEEVVEFGRPFQYGLEAGSKPELLIALATLKTPGALIICNGYKDSEYIETALLAQRLGHTPFVVIERFHELTLLIEAAQKLGIRPLIGVRAKLTARGIGRWGDSTGDRAKFGLSAGEIMEVVAQLKAADLLSSLQLLHFHIGSQISAINVIKTALREASCVYVELAQMGAPMQYCDVGGGLAIDYDGSKTNFRASKNYNMQEYAYDVVAAFQDACRTKNVPVPTLVSESGRAITSHQSVLVFDVMGVSHLQFGEPEPPARNEHSIIRNLYETYTQITPDNVQEAFNDASQFKEEALSLFALGYLGLGERARAERLYWGCCEKILNLVRELDYIPDELADLEKNMASTYYCNFSVFQSAPDSWAIDQLFPIMPIHRLDEEPKARGTLADLTCDSDGKIDQFIDLRDVKGVLELHPVRPEEPYYLGMFLNGAYQEILGDMHNLFGDTNTVHIHLASDEPGEQSYRLEHVVKGDTMTEVLKYVQYDHEAMLESIRRETEQALRERRITLSESRLLLQHYERSLSGYTYLTNELQVELAAR

SEQ ID NO: 32254 - protein, 494 aa, Aeropyrum pernix K1
MIQRVPLCQRGDTQFLTSDSNTGFPGISWFQLGGCIHLGVIDVLAAVGERFPAVRKPERKPTLYRRLAWTGVILVLYFIMSNIPLYGIPPQNIGGQVDLQRIIFASSAGTLMELGIGPIVTASLIIQVLVGAKIIKLDLADPEGRRKFTSAQKVLALAFAALEAVAFTVGGRYWVGTAIEPGPLDYALVSLQLFLGALLVIYFDEVMQKGWGIGSAISLFILAGVAQGVVWSIFGTIPGVAQDYGLVPAIISNPDLTLLARPNGFPDLTGFFTTLAAIILLVYLQAMRVEIPITSERFKGIRSRVPLQFIYVTNIPILLVGILVSDLLLVQRLLADYLGVESRAYQIYSSIVYYLSPPRGVVQSIADPVKTAVFIASWTVLSIVFGYMWVEIAGLNPREQAERLIKGGLAIPGMRSDPRVLERVLRRYIYPLTFLSSLIVAALVIVADIFGAYGTGTGLLLAVGIINQYYAMITRERALETYPLLRRILGEEVV

SEQ ID NO: 32255 - protein, 290 aa, Brassica napus
QPGDLYKCSSQDTTIVPINVGETILLRVINSALNQPLFFTVANHKFTVVGADASYLKPFTTNVIVLGPGQTTDVLITGDQPPNRYYMAARAYQSAQNVPFGNTTTTAILQYKSAPCCIGGAKKGTSIKPIMPLLPAYNDTNTVTRFSQSFKSLRKAEVPTELDENLFITIGLGLNNCPKNFRSRRCQGLNGTRFTASMNNVSFALPSNYSLLQAHHHNIPGVFTTDFPAKPLVKFDYTGSNISRSLYQPDRGTKLYKLKYGSRVQIVLQDTGIVTPENHPIHLHGYDFYI

SEQ ID NO: 32256 - protein, 170 aa, Arabidopsis thaliana
  misc_feature (36)..(36): Xaa can be any naturally occurring amino acid
  misc_feature (86)..(86): Xaa can be any naturally occurring amino acid
  unsure (1)..(170): unsure at all Xaa locations
VATEESSGEVTDRGLFDFLGGNKDYLKPEETPIASXFEYKVHISQPDPEVKHESFLEKLQRSDRSSSSSREEEGSDGEKRKNKKEXRKPATEVEAQDEEKKGFMEKLKEKLPGRHKPEYGSRVAAAPVVVPPPVEEAHPEKKKGILEKIKEKLPGYHPKTTVDEEKIDNE

SEQ ID NO: 32257 - protein, 493 aa, Pseudomonas fluorescens
MTQQNLFLGIDCGTQGTKAIVLDASSGKVLGLGAAAHTLISGANGRREQHTQEWLDAFTEATHRALQQAGVDGQDILGIGVSGQQHGLVLLDDSGQVLRPAKLWCDTETALENERLLAYLGGEGGSLERLGVAIAPGYTVSKLLWTREQHPDVFARIAHVLLPHDYLNYWLTGRAVAEYGDASGTGYFNVRTRAWDMALLKHIDPSGRLEAALPTLIEADQSVGTILPAIAERLGINPNARVSSGGGDNMMGAIGTGNIAPGVITMSLGSSGTVYAFADQPNVSPQASVATFCSSSGGWLPLICTMNLTNATGVIRELFELDLNAFNALVEQAPIGADGVSMLPFLNGERVPALPHATGSLHGLTMTNLTRANLCRAVVEGTTFGLRYGLDLLRHTGLQSQSIRLIGGGSKSPVWRQMVADIMNTEVICTEQSEAAALGAAIQAAWSQSGESLASLCDKCVSVDPASRTLPVAANVGAYQLAYERYQQHVATL

SEQ ID NO: 32258 - protein, 655 aa, Glycine max
  misc_feature (118)..(118): Xaa can be any naturally occurring amino acid
  unsure (1)..(655): unsure at all Xaa locations
RFWFQNRRTQMKTQLERHENSLLRQENDKLRAENMSMREAMRNPICSNCGGPAMIGEISLEEQHLRIENARLKDELDRVCALAGKFLGRPISSLTGSIGPPMPNSSLELGVGSNGFGXGLSTVPSTMPDFGVGISSPLAMVSPSSTRPTTTALVTPSGFDNRSIERSIVLELALAAMDELVKMAQTGEPLWIRSLEGGREILNHEEYTRTITPCIGLRPNGFVTEASRQTGMVIINSLALVETLMDSNRWSEMFPCMIARTSTAEVISNGINGTRNGALQLMHAELQVLSPLVPVREVNFLRFCKQHAEGLWAVVDVSIDTIRETSGAPTFVNCRRLPSGCVVQDMPNGYSKVTWVEHAEYDESQIHQLFRPLLSSGMGFGAQRWVTTLQRQCECLAILMSSAAPSREHSAISSGGRRSMLKLAHRMTNNFCSGVCASTVHKWNKLNAGNVGEDVRVMTRKSVDDPGEPPGIVLSAATSVWLPVSSQRLFDFLRDERLRSEWDILSNGGPMQEMAHIAKGQDHANCVSLLRASAINANQSSMLILQETCTDASGSLVVYAPVDIPAMHVVMNGGDSAYVALLPSGFAIVPDGSVEENGGASQQRAASGGCLLTVAFQILVNSLPTAKLTVESVETVNNLISCTVQKIKSALHCES

SEQ ID NO: 32259 - protein, 400 aa, Sulfolobus tokodaii str. 7
MFERFLSKDVSNLRSSEIRDLLKLTEGKKVISLAGGLPDPTTFPVEEIRKITDDVLREKSDRALQYSTTSGITEFKKELVNLSRYRGISGINENNTFVTVGSQEALFMIFNLLVDPGDTVIVEMPTYLAALNILRARKPNFIGVHLTQNGPDLDELERKVKESISNGKKPKLMYVIPTAQNPGGTTMSLDDRKRLLEIAQKYDFLLIEDDAYGFLVFDGEAPPPLISLDKEGRVIYTSTFSKILAPGLRLGWVIAQEEFIREMELYKQNIDLHTPTLTQMIAMEAIKRGVIQNQLPLIRRVYREKRDVMLAAIEKYFPKEATWSRPVGGMFVFAWLPEKIDTVKMLEESMRRGVAYVPGSSFYHDYSGRNTMRLNFSYPTKQELEEGIKILGNTILDFLK

SEQ ID NO: 32260 - protein, 346 aa, Burkholderia fungorum LB400
MKALVYHGPGKKSLDERPMPQLASATDAIVKVTRTTICGTDLHILKGDVPTCQPGRILGHEGVGIVQQVGAAVSSLKEGDHVLISCISACGKCDYCRRGMYSHCTTGGWILGNRIDGTQAEYVRIPHAETSLYPIPAGADEEALVMLSDILPTGFECGVLNGKVQPGSAVAIVGAGPIGLASLLTAQFYSPAQIIMIDRDERRLEVASRFGATACIDSRVAEPVVEVMKLTGHVGVDCAIEAVGVPDTFELCQALVAPGGVIANIGVHGVKADLHLESLWDRNISITTRLVDTVSTPMLLKTVQSGRIDPARLITHHFQLDDVLNAYDTFGRAADSHALKVIIEMS

SEQ ID NO: 32261 - protein, 242 aa, Bacillus subtilis
MPYLKRVLLLLVTGLFMSLFAVTATASAQTGGSFFDPFNGYNSGFWQKADGYSNGNMFNCTWRANNVSMTSLGEMRLALTSPAYNKFDCGENRSVQTYGYGLYEVRMKPAKNTGIVSSFFTYTGPTDGTPWDEIDIEFLGKDTTKVQFNYYTNGAGNHEKIVDLGFDAANAYHTYAFDWQPNSIKWYVDGQLKHTATNQIPTTLGKIMMNLWNGTGVDEWLGSYNGVNPLYAHYDWVRYTKK

SEQ ID NO: 32262 - protein, 128 aa, Brassica napus
MAEEAPTPVVAPVEAPTLVLGEPMDLMTALQLVMKKSSAHDGLVKGLREAAKSIEKHAAQLCVLAEDCDQPDYVKLVKALCAEHNVHLVTVPSAKTLGEWAGLCKIDSEGKARKVVGCSCVVVKDYGE

SEQ ID NO: 32263 - protein, 294 aa, Zea mays
  misc_feature (175)..(175): Xaa can be any naturally occurring amino acid
  misc_feature (269)..(269): Xaa can be any naturally occurring amino acid
  misc_feature (281)..(281): Xaa can be any naturally occurring amino acid
  unsure (1)..(294): unsure at all Xaa locations
MGKDDVVESGAGGGGEFAAKDYTDPPPAPLVDAAELGSWSLYRAVIAEFIATLLFLYVTVATVIGYKHQTDASASGAGADAACGGVGVLGIAWAFGGMIFVLVYCTAGISGGHINPAVTFGLFLARKVSLVRALLYMVAQCLGAVCGVGLVKAFQSAYFDRYGGGANSLASGYSXRGAGLGAEIVGTFVLVYTVFSATDPKRNARDSHVPVLAPLPIGFAVFMVHLATIPVTGTGINPARSLGAAVVYNKDKPWDDHWIFWVGPLLGAXIAAFYHQYILRXGAIKALGSFRSNA

SEQ ID NO: 32264 - protein, 421 aa, Mesorhizobium loti
MSQSQVWHPFTQHALEPAIPEIVRTEGAYLYKADGTRILDAISSWWVVTHGHRHPRIIRAIETTASSLDQIIFAGFTHEPAERLARALVGLAPTGLDWVFYSDSGSTSVEVALKMALGYFRNIGAPRSRIVVMEHSYHGDTIGTMSVGARGVFNAAYEPLLFEVDTIPFPASGREQETLDRFEAVSRDRRAAALIVEPLVLGAGGMLMYPASVLTELKKIAETSGTLLIADEVMTGWGRTGTMFACEQASISLDILCTSKGLTGGAIPLAATLATDAIFQAHYSEDRTKTFFHSSSYTANPIACAAALANVEIWRDEPVAERIATLSAKQAAGLQRFRDNPYFTDCRATGTIAALDLRTGSAGYLAEIGPKLRAFFLERGLLVRPLGNVLYLLPPYCITGEELDGLHDAIEEAGERFGTKP

SEQ ID NO: 32265 - protein, 294 aa, Saccharomyces cerevisiae
TTPLVHVASVEKGRSYEDFQKVYNAIALKLREDDEYDNYIGYGPVLVRLAWHTSGTWDKHDNTGGSYGGTYRFKKEFNDPSNAGLQNGFKFLEPIHKEFPWISSGDLFSLGGVTAVQEMQGPKIPWRCGRVDTPEDTTPDNGRLPDADKDADYVRTFFQRLNMNDREVVALMGAHALGKTHLKNSGYEGPWGAANNVFTNEFYLNLLNEDWKLEKNDANNEQWDSKSGYMMLPTDYSLIQDPKYLSIVKEYANDQDKFFKDFSKAFEKLLENGITFPKDAPSPFIFKTLEEQGL

SEQ ID NO: 32266 - protein, 369 aa, Helicobacter pylori 26695
MLLFTPGPVAINEEMRTSFSQPMPHHRTKDFEKIFQSVRENLKKMTGLEEVLLLSSSGTGAMEASVISLCQKELLFVNAGKFGERFGKIAKAHSIKAHELVYEWDTPAQVDEILSVLKANPNIDAFCIQACESSGGLRHPVEKIAQAIKETNPNVFVIVDAITALGVEPLEITHVDALIGGSQKAFMLPPAMSLVALSQNAIERIEERNVGFYFNLKSELKNQRNNTTSYTAPILHTLGLQRYFELVQNLGGFEALYRETKKAALATQKAVLALGLKIFPKSPSLSMTTIVNEHAKELRNLLKEKYQVQFAGGQEPYKDALIRINHMGIIPVYKSAYALNALELALNDLDLREFDGVANATFLKQYYGI

SEQ ID NO: 32267 - protein, 526 aa, Emericella nidulans
MAASSSLDHLSNRMKLEWHSKLNTEMVPAKNFRRTSIICTIGPKTNSVEKINALRRAGLNVVRMNFSHGSYEYHQSVIDHAREAEKQAAGRPVAIALDTKGPEIRTGNTVGDKDIPIKAGHEMNISTDEQYATASDDQNMYVDYKNITKVISAGKLIYVDDGILSFEVLEVVDDKTLRVRCLNNGNISSRKGVNLPGTDVDLPALSEKDISDLKFGVKNKVDMVFASFIRRGSDIRHIREVLGEEGREIQIIAKIENQQGVNNFDEILEETDGVMVARGDLGIEIPAPKVFIAQKMMIAKCNIKGKPVICATQMLESMTYNPRPTRAEVSDVANAVLDGADCVMLSGETAKGNYPCEAVTMMSETCLLAEVAIPHFNVFDELRNLAPRPTDTVESIAMAAVSASLELNAGAIVVLTTSGNTARMISKYRPVCPIIMVSRNPAATRYSHLYRGVWPFYFPEKKPDFNVKIWQEDVDRRLKWGINHGLKLGIINKGDNIVCVQGWRGGMGHTNTVRVVPAEENLGLSE

SEQ ID NO: 32268 - protein, 396 aa, Macfadyena unguis-cati
MALKLNAINFQSPKCSSFGLPPVVSLRSPKLSVAATLRSGLRDVETVKKTFSPAREVHVQVTHSMAPQKIEIFKAMEDWAENNILVHLKNVEKCPQPQDFLPDPASDEFHDQIKELRERAKEIPDDYFVVLVGDMITEEALPTYQTMLNTWDGVRDETGASPTSWAIWTRAWTAEENRHGDPLNKYLYLSGRVDMKQIEKTIQYLIGSGMDPRTENSPYLGFIYTSFQERATFISHGNTARLARDHGDFKLAQICGTIASDEKRHETAYTKIVEKLFEIDPDGTVLAFGDMMKKKISMPDHFMYDGRDDNLFDHFSSVAQRLGVYTAKDYADILEHLVGRWKVEKLTGLSAEGQKAQDYVCGLPPRIRRLEERAQIRAKQAPRLPFSWIYDREVQL

SEQ ID NO: 32269 - protein, 320 aa, Leuconostoc mesenteroides subsp. mesenteroides ATCC 8293
MSEILTLGEPVVTFASTDLNKGLVDSINYYKFLGGAELNVMIGATRLGHNTEYISQVGADPLGQFTIKEIARYNVGNHYIATDEGNWTAFQLKELVDQGDPSTFNFRRNSAAAHFDKSLIDQVDFSDVKIAHLSGIFPAISLQAREAFRYFAEQLIDHGIRTTFDPNLRPALWESREVMIETINDLAKYGEIVLPGIDEGEILIGSRDPETIADFYLNNSDRTQTVVVKIGSDGAYVKNKSGESYIVNGFKVEKVVDTVGAGDGFALGLITGLIEGLTMADAVRRGNAVGALQVQTPGDNDGYPTQEELEAFLADNKKEA

SEQ ID NO: 32270 - protein, 521 aa, Lycopersicon esculentum x Lycopersicon peruvianum
MVLNNINSILEALQANPILIFFFIIPLFFLYLFSTSRRKRYPPGPLGWPLIGNMMIMDQLTHRGLAKLAQKYGGVFHLKMGYVHKIVISGPEEARQVLQVQDNIYSNRPKTVAISYLTYDRADMAFADYGPFWRQMRKLCVMKLFSRKRAESWDSVRDEVDSMVKIVTTNAGTSINLGELVFCLTRNIIYRAAFGTSSDEGQDDFIKILQEFSKLFGAFNMADFIPWLGWIGKQGLNVRLAKARASLDGFIDTIIDDHIERKKAIHVINDDGYRESDMVDELLAFYSEETKVNESEDLQNAIRLTRDNIKAIIMDVMFGGTETVASAIEWAMAELMKSPEDLKKVQQELANVVGLNRKVDESDFENLTYLKCCLKETLRLHPPIPLLLHETAEESTVSGYYIPANSHVIINSFAIGRDKNSWEDPDSFKPSRFLKEGVADFKGGNFEFLPFGSGRRSCPGMQLGLYALEMAVAHLLHCFTWELPDGMKPSELNMDDMFGLTAPLANRLVAVPTPRLLCEIY

SEQ ID NO: 32271 - protein, 275 aa, Brassica napus
VPINVGETILLRVINSALNQPLFFTVANHKFTVVGADASYLKPFTTNVIVLGPGQTTDALITGDQPPNRYYMAARAYQSAQNVPFGNTTTTAILQYKSAPCCIGGAKKGISIKPIMPLLPAYNDTNTVTRFIQSFKSLRKAEVPTELDENLFITIGLGLNNCPKNFRSRRCQGLNGTRFTASMNNVSFALPSNYSLLQAHHHSIHGVFTTDFPAKPPVKFDYTGSNISRSLYQPDRGTKLYKLKYGSRVQIVLQDTGIVTPENHPIHLHGYDFYI

SEQ ID NO: 32272 - protein, 312 aa, Pseudomonas fluorescens
MYLVCGEALFDFFSEEDASGQASKVTYKAIAGGSPFNVAVGLRRLGIEAGLFGGLSSDFLGRRLLQVLKDEGVSERFLVEFAAPTTLSMVAVGADGSPQYNFRGEGCADRLLEVAHLPVLGDEVRGLHIGSFSLVVQPIGDTLLSLVKRESGKRLISLDPNVRLNPQPDIQLWRDRVAELAKHADLIKVSDEDLHLLYPGQSPESVLQGWLQHRCQLVFLTRGGDGASVFSRQHGTWSQPAQRVVMADTVGAGDTFQAALIAWLTEHQLDSVQGLQQLTRVQIDAMLGFAIRAAALTCGKTGPDLPYRQQLG

SEQ ID NO: 32273 - protein, 429 aa, Silicibacter pomeroyi DSS-3
MMNQDLSTRARASLPGGVSHELRYRDPYPVFIDRAQGGEKWDVEGRRYIDFKMGSASQMLGHCHPAIVEAIQKQAERSVFSADCHTREIEWAEWVNRLYPSADRTRFTASGTESTMLALRLGRAYSGKDHVLRVEGHFHGWHDHALKGAKPGSDQVPSLGIPDAINDLIHICAADPQAMESALQDDRIGTVIIEASGANYGCVPLATDTLRALHDVVRAAGVVLIFDEIITGFRWSPGGRQARDGIVPDLTTLAKVVTGGLPGGAICGRADIMELLNNATVRNGFGPAVSHKGTFNGSPLIAAAACAAMPLLANGEAQAQADAMAERMRDGMNAAMKRQGVAGIAYGDSSIFHVFFGRDRLDGLGPAEIRGLPKPLVKAYRDGMLSRGVDMMAYTSGLTSSAHTPELIDEALLAFDDTLSEMIRDGALT

SEQ ID NO: 32274 - protein, 545 aa, Sinorhizobium meliloti
MAAKEVKFGRSAREKMLRGVDILADAVKVTLGPKGRNVVIDKSFGAPRITKDGVSVAKEIELEDKFENMGAQMVREVASKTNDIAGDGTTTATVLAQAIVREGAKAVAAGMNPMDLKRGIDLAVAEVVKDLLAKAKKINTSDEVAQVGTISANGEKQIGLDIAEAMQKVGNEGVITVEEAKTAETELEVVEGMQFDRGYLSPYFVTNPEKMVADLEDAFILLHEKKLSNLQAMLPVLEAVVQTGKPLLIIAEDVEGEALATLVVNKLRGGLKIAAVKAPGFGDRRKAMLEDIAILTGGTVISEDLGIKLESVTLDMLGRAKKVSITKENTTIVDGAGQKSDIEGRVAQIKAQIEETTSDYDREKLQERLAKLAGGVAVIRVGGATEVEVKEKKDRIDDALNATRAAVQEGIVPGGGVALLRSSVKITVKGENDDQDAGVNIVRRALQSPARQIVENAGDEASIVVGKILEKNTDDFGYNAQTGEYGDMIAMGIIDPVKVVRTALQDAASVASLLITTEAMIAELPKKDAPAMPGGMGGMGGMDMM

SEQ ID NO: 32275 - protein, 135 aa, Brassica napus
EERKKKTKQRERTMNALAATNRNFRLASRLLGLDSKLEKSLLIPFREIKVECTIPKDDGTIASFVGFRVQHDNARGPMKGGIRYHPEVEPDEVNALAQLMTWKTAVANIPYGGAKGGIGCDPSKLSISELERLTR

SEQ ID NO: 32276 - protein, 98 aa, Sinorhizobium meliloti
MASTNFRPLHDRVVVRRVESEEKTKGGIIIPDTAKEKPQEGEIVAVGSGARDESGKVVPLDVKAGDRILFGKWSGTEVKINGEDLLIMKEADIMGVIG

SEQ ID NO: 32277 - protein, 334 aa, Ralstonia eutropha JMP134
MSASAMQAGPSGLPLDKETLLTVYRKMRTIREFEERLHVDFGRGDIPGFVHLYAGEEAAGVGILHHLHDGDRIASTHRGHGHCIAKGVDPVAMMKEIYGKKGGSCNGKGGSMHIADLSKGMMGANGILGAGAPLICGAALAAKFRGKGEVGITFSGDGASNQGTFLESLNLAAVWNLPVIFVIENNGYAESTSRDYGTAVDSYVDRAAGFGIPGVTVDGTDFFAVHEAAGEVIRRAREGGGPSLLECKMVRFYGHFEGDAQTYRAAGELDDIRANKDCLKLFSRAVTQAGVVSREELESIDREVATLIEHAVQEAKAAPLPGPEDLLTDVYVSY

SEQ ID NO: 32278 - protein, 604 aa, Emericella nidulans
MTIGSKFSLLAGTRKTDGPTEISASSPPDVETPSAEKTATASAGNKEVGINDNSSDEALPSQHVQTGVQKIQAVTLVWSKWSLVAVFCLLWLVTLANGFRQSILYSLTPYATSSFQSHSLLTVINIVSSAMVSALYIPVAKVVDVWGRAEGWLVMVGLSTLGLIMMAASKNLETYCAADVFYSVGFAGMNYILCVLAADITNLRNRGIAFAFTSSPYMITAFAGSKAAEKFLVNVNWRWGFGAFAIIFPFVASPVYFVLKVGLNRAEKQGIIQPRLRSGRTLSQNFKYYFFAFDIPGVILLAGGLTVFLLPFTLATRAPNGWKSDYIIAMIVTGFVVMVLFVLYQAYWAPQPFLKYEFLTNRTVLGACLIDATYQMSYYCWNSYFNSFLQVVCNLPVAEAGYVGSTFQVVSGVLLFMVGFAIRKTGYFRWLLFIGVPLYIFAQGLMIHFRQPNQYIGYIVMCEIFISIGGSIFVLLQQLAVLVAVDHQYVAAALAVLFISGGIGGAVGNAISGAIWTNTFLPALMRNLPESAKANAVAIYGDLRVQLSYPVNSPERIAIQESYGYAQARMLAAGTGLMALMFIWMFMVKNYNVKNMSQTKGMVF

SEQ ID NO: 32279 - protein, 396 aa, Methanocaldococcus jannaschii DSM 2661
MRNMQEKGVSEKEILEELKKYRSLDLKYEDGNIFGSMCSNVLPITRKIVDIFLETNLGDPGLFKGTKLLEEKAVALLGSLLNNKDAYGHIVSGGTEANLMALRCIKNIWREKRRKGLSKNEHPKIIVPITAHFSFEKGREMMDLEYIYAPIKEDYTIDEKFVKDAVEDYDVDGIIGIAGTTELGTIDNIEELSKIAKENNIYIHVDAAFGGLVIPFLDDKYKKKGVNYKFDFSLGVDSITIDPHKMGHCPIPSGGILFKDIGYKRYLDVDAPYLTETRQATILGTRVGFGGACTYAVLRYLGREGQRKIVNECMENTLYLYKKLKENNFKPVIEPILNIVAIEDEDYKEVCKKLRDRGIYVSVCNCVKALRIVVMPHIKREHIDNFIEILNSIKRD

SEQ ID NO: 32280 - protein, 357 aa, Brassica napus
NEALKYGLAPNVSDAHMINGRPGLAKNCSSDQEGYKLSVKNGKTCLLRLVNAALNEELFFKVAGHLFTAVEVDAVYVKPFKIDTIVIAPGQTTNVLLTASKSTGKYLVTASPFMDSPIAVDNVTATATVHYSGTLSSSPTILTLPPPQNATSVATNFTNSLRSLNSKKYPALVPTTIDHHLFFTVGLGLNPCPTCKAGNGSRVVASINNVTFVMPKIALLPAHYFNISGVFTPDFPKNPPHVFNYSGGSVTNMATETGTRLYKLPCNATVQLVLQDTGIIAPENHPIHLHGYNFFEVGRGLGNFNPKKDPNNFNLVDPVERNTIGVPSGGWVVIRFRADNPGVWFMHCHLEVHTTWG

SEQ ID NO: 32281 - protein, 785 aa, Arabidopsis thaliana
MSINLRSSGCSSPISATLERRLDSEVQTRANNVSFEQTKEKIRKMLEKVELSVSAYDTSWVAMVPSPSSQNAPLFPQCVKWLLDNQHEDGSWGLDNHDHQSLKKDVLSSTLASILALKKWGIGERQINKGLQFIELNSALVTDETIQKPTGFDIIFPGMIKYARDLNLTIPLGSEVVDDMIRKRDLDLKCDSEKFSKGREAYLAYVLEGTRNLKDWDLIVKYQRKNGSLFDSPATTAAAFTQFGNDGCLRYLCSLLQKFEAAVPSVYPFDQYARLSIIVTLESLGIDRDFKTEIKSILDETYRYWLRGDEEICLDLATCALAFRLLLAHGYDVSYDPLKPFAEESGFSDTLEGYVKNTFSVLELFKAAQSYPHESALKKQCCWTKQYLEMELSSWVKTSVRDKYLKKEVEDALAFPSYASLERSDHRRKILNGSAVENTRVTKTSYRLHNICTSDILKLAVDDFNFCQSIHREEMERLDRWIVENRLQELKFARQKLAYCYFSGAATLFSPELSDARISWAKGGVLTTVVDDFFDVGGSKEELENLIHLVEKWDLNGVPEYSSEHVEIIFSVLRDTILETGDKAFTYQGRNVTHHIVKIWLDLLKSMLREAEWSSDKSTPSLEDYMENAYISFALGPIVLPATYLIGPPLPEKTVDSHQYNQLYKLVSTMGRLLNDIQGFKRESAEGKLNAVSLHMKHERDNRSKEVIIESMKGLAERKREELHKLVLEEKGSVVPRECKEAFLKMSKVLNLFYRKDDGFTSNDLMSLVKSVIYEPVSLQEESLT

SEQ ID NO: 32282 - protein, 491 aa, Zea mays
MDPYKHRPSSAFNPPYWTTNSGAPVWNNDSSLTVGARGPILLEDYHCEKLANFDRERIPERVVHARGASAKGFFEVTHDITHLTCADFLRAPGVQTPVIVRFSTVIHERGSPETLRDPRGFAVNFYTREGNWDLVGNNFPVFFIRDGIKFPDMVHALKPNPRTHIQDNWRILDFFSHHPESLHMFSFLFDDVGIPADYRHMDGSGVHTYTLVSRAGTVTYVKFHWRPTCGVRSLMDDEAVRCGANHSHATKDLTDAIAAGNFPEWTLYIQTMDPEMEDRLDDLDPLDVTKTWPEDRFPLQPVGRLVLNRNIDNFFAENEQLAFCPGLIVPGIYYSDDKLLQTRIFSYSDTQRHRLGPNYLLLPANAPKCAHHNNHYDGSMNFMHRHEEVDYFPSRYDAVRNAPRYPIPTAHIAGRREKTVISKENNFKQPGERYRAMDPARQERFITRWVDALSDPRLTHEIRTIWLSNWSQADRSLGQKLASRLSAKPSM

SEQ ID NO: 32283 - protein, 389 aa, Streptomyces avermitilis MA-4680
MRDAVIVEAVRTPIGKGKPNGSLAHVHPVELLAHTLRTLVERSGVDPALIDDVIGGTVDQVGEQAMNTTRYAVLSAGFPETVPATTVDRQCGSSQQAVHFAAQGVMSGAYDLVVACGVESMSRVPMWSNVPAGQDPFGPGVARRYPEGLVPQGISAELIAAKWSITRDQMDAFAVSSHQKAAAAWAGGLFDAEVTPLEGVRRDECVRPASTTEILAGLKPAYYDPNFAERFPGIEWNVTAGNASPVNDGASAVLITSSETAARLGLRPIARLHSFAVTGSDPLLMLTGVVPATEKVLRKAGLTIDDIDLFEVNEAFSSVVLAWRQETGADLSRVNVHGGAIAIGHPLGASGTRLTTTLVHAMRARGARYALQTMCEAGGLANAMVLETV

SEQ ID NO: 32284 - protein, 142 aa, Candida glabrata CBS138
MSDVEEVVEVQEEVVEQTAEVSIEDALKVVLRTALVHDGLARGLRESTKALTRHEAQLVVLVSSVTEDNIIKLVEGLANDPNNKVPLIKVADAKQLGEWAGLGKIDRDGNARKVVGASVVVVKKWGAETDERNMILEHFSQQ

SEQ ID NO: 32285 - protein, 594 aa, Bacillus halodurans C-125
MLWRSVVGKLWFTIILLVSFVLTVLMVMLLQFFERFHVNEAESQLLNHANMIATIYEEYDDRVTARMTITEYANAFEKKVVIIEDRANYWSTGEAGLVNLPLEVFVEHPMLSQVFQGERAVVTEDDFSEFYRGDSDTGMMIVGIPLHLDDGNDAVFLYQPLATIEETSAETKRIVYFSAGIAIVLTTVFAFFLSSRITSPLRKMRQVALEVAQGKFNTKVPILTHDEIGQLAIAFNRMRRELNRNVTELNQEKEQLSRILSSMADGVITLDKRGKVMVTNPPAERFIQAWHYEQGLVPSEKNELPQAIHQLYQQVVALESEQMTELDVQGRSWAILMTPLYDNSYVRGAVAVIRDMTEERRHDKLRKDFIANVSHELRTPISMLQGYSEAIIDDIAGTDQEKKELAKIIYDESLRMGRLVNELLDLARMEAGHIDLSYEEIEVKTFCERITRKFQGLAKEQQLTLDFIYRGDEGKRIQVDPDRLEQVLTNLLSNAIRHTDPGGTVQLACHVMENGVKIDVTDTGTGIPEEDLPYVFERFYKADKARTRGRSGTGLGLAIVKNIVDAHSGEISVHSKQQEGTTFTAFFPNARTIL

SEQ ID NO: 32286 - protein, 509 aa, Solanum tuberosum
MTLRISELFAAALIYIIVHIIISKLIATVRERGRRLPPGPTGWPVIGALSLLGSMPHVALAKMAKKYGPIMYLKVGTCGMVVASTPNAAKAFLKTLDINFSNRPPNAGATHLAYNAQDMVFAPYGPRWKLLRKLSNSHMLGGKALENWANVRANELGHMLKSMFDASHVGECVVIADMLTFAMANMIGQVMLSKRVFVEKGVEVNEFKNMVVELMTVAGYFNIGDFIPKLAWMDLQGIEKGMKSLHKKFDDLLTKMFNEHEATTYERKENPDFLDVVMANKDNSEGERLSTTNIKALLLNLFTAGTDTSSSVIEWALAEMMKNPQIFKKVQEEMDQVIGKNRRLIESDIPNLPYLRAICKETFRKHPSTPLNLPRVSTEPCTVDGYYIPKNTRLSVNIWAIGRDPDVWENPLEFNPERFLSGKNAKIEPRGNDFELIPFWAGRRICAGTRMGIVMVEYILGTLVHSFDWKLPNDVIDINMEESFGLALQKAVPLEAMVTPRLSLDVYCC

SEQ ID NO: 32287 - protein, 572 aa, Magnaporthe grisea 70-15
MTENGHPNLSERSPLLRNDQPAVNGTFNHSPSSSDSECSTPILAADLERVVSAAEDAGLPGPSIGGGGRGDANENGNGSASRGGSRPGGPPPNMKLLMPAISIGVYLCAVDQLLAVATYAKIGSDLNALNSTSWVATAFQPLSGKLSDIFGRKECLLASYFIFGLGCLGCGLARDMTQLIIARAVSGIGGGGMTSVVSILLTDLVPLRERGVWQGYINIVYAMGSATGAPIGGLLADSVGWRWSFIGQFPICLAAFAAVYFILKSPDMGHAHWREKLAKIDFLGAACLIAAVFSLLLALDYGSNNGWGQIFTIVSLALAPVLFIVFVLVEMKVASHPFAPGHIIFDRSLFACYAANFFGVGGQMPVAYYGMTVVEASLLFIPGSIAGVVASLGSGYIIKRTGRYYWLTVVSYATLLLSSLPLVLSTGILTDSVVGTTVGLALSSFGNGAGLTTTLVGLISNAAPEDAAVVIACSYLFRSLGLSIGVSVMSAVMQQALRTQLAAKLGDGDEALRIGERVRESLDYIGQLEPQLADVVRKSYRFGVAAVFMSNAIFLVFALVAAFYIREKRVTK

SEQ ID NO: 32288 - protein, 428 aa, Shewanella sp. MR-7
MADLKAKLELPGNDSIELPVKQGSAGFDVIDISKLGSKGYFTFDPGFLATASCESAITYIDGDQGILLHRGYPIEQLAVDSDYLDLCYLLLYGELPTKEQYTEFVHTVKTHTMVHEQLAFFFRGFRRDAHPMAMLCGVTGALSAFYQDSLDVNDPRHREIAAYRLVSKMPTIAAMCYKYSSGQPFVYPRNDLSYAGNFLSMMFAVPCEEYKVNPIVERAMDRIFILHADHEQNASTSTVRLAGSSGANPFACIAAGIASLWGPAHGGANEACLQMLEEIGSVDRIPEFIARAKDKNDPFRLMGFGHRVYKNFDPRAKVMRETCHEVLKELKVQDPLLDVAMELERIALEDEYFISKKLYPNVDFYSGIIMKAIGIPTSMFTVLFALARTVGWIAHWKEMLDQPGHKISRPRQLYTGETARDFVSQDKR

SEQ ID NO: 32289 - protein, 391 aa, Methanocaldococcus jannaschii DSM 2661
MFEVKHMDGIDVFFFMWAASLIFFMKAGFIALEIGQFRAKNVSYHCVLKLLDLAAVFIAYLFIGYGISYGFENIMPLITGTFDADLGAWWMKMVMFAAAAVTIITGGVAERIKILPYFIGALIVGGILYPIVEHLVWGGGFANLGINFHDYAGSGAVHLFGGLVGLMAAYVLGPRIDKYINGKPQAIPGHNIPIAVLGAFILAFGWYGFNIGSASGIANGVELASVAMATTMALAGGIIGGALSSRNDPLYTANGMCAGLVAVCSGVDLFTPIGAFIVGLLAGIQQPFTYKFIEEKLKIDDVCAIGPVHAMSGLIGVICAGIPFLLKADAVSKVSITGQIIGAIVIALIAIVGGLIIYKGLDLTIGLRVSEEAEKVGLDTAILQTTAYSEE

SEQ ID NO: 32290 - protein, 272 aa, Crocosphaera watsonii WH 8501
MKPYLAAAIQMTSKPNLEQNLVEAEELIELAVRRGAELIGLPENFAFLGKEEDKLSQAQEISQKAEKFVKTMAQRFQVTILGGGFPVPVEGDGSKAYNTAILVDPTGQEVSRYQKAHLFDVDVPDGNTYRESSTVMPGKQLPDIYASQDLGNLGLSICYDVRFPELYRHLSRQGVEVLFVPAAFTAFTGKDHWQVLLQARAIENTCYIVAPAQTGNHYARRFTHGHAVIIDPWGIILDDAGQQPGMALAEINPNRVKQVRQQMPSLQHRVFV

SEQ ID NO: 32291 - protein, 486 aa, Crocosphaera watsonii WH 8501
MVIKTPEWVKNAIFYQIYPDTFARKVPDRQKWLLDVPLEDWEAPPTSQGYKGGNLWGVIDKLDYLQDLGVDALYLTPIFRSACNHRYHTQDYYAIDPLLGDREAFDHLLKTAHDKGFKVVLDGVFNHASRGFFFFNDILENGPNSPWLDWFKIEGWPLSAYDGSRPANYVSWIDYRALPQFNHDNPAVREYIMQVGEYWLQQGIDGWRLDVPNCVEAEGFWEEFRERVKAVNPEAYIVGEIVSDATQWLDGKQFDGVMNYPFARLTACFVIGDRLDKETIPSFYKPYETLDAAEYAKGLEELLARHPWEIQLTQLNLLDSHDTSRFLTMAGGDRTSLQLATLLLFTFPGTPNIFYGDEIGIEGGKDPDGRKGFPTEEKWEQETLTYHKQLIQIRKKYTALRTGEYRVITAQENVYVFARILGEEGLIIAVNNGEDKTEIQIDKFDKVSSILQTKPSQIIYGEGSINWHDNQLKITMHPRSGLVIAP

SEQ ID NO: 32292 - protein, 573 aa, Hypocrea lixii
MSKEESGHVTPEKGDNVVDYQASTTVLPSEGPERDANWFTRNGLNVDSFKKKHYGPGMVELERPMKARHLHMIAIGGSIGAGFFVGSGGALAKGGPGSLFVDFLIIGIMMFNVVYALGELAIMYPVSGSFYTYSARFIDPAWGFAMGWNYVLQWAAVLPLELTVCGITISYWNSEITTAAWISLFLGVIIIINLFGALGYAEEEFWASCFKLAATVIFMIIAFVLVLGGGPKDGRYHEYWGARYWYDPGAFKNGFKGFCSVFVTAAFSFSGTELVGLAAAESTNPTKNMPGAIKQVFWRITIFYILGLFFVGLLINSDDPALLSSAAYADSKASPFVLVGKYAGLKGFDHFMNLVILASVLSIGVSGVYGGSRTLTALAQQGYAPKLFTYIDKSGRPLPSVIFLILFGFIAYVSLDATGPVVFDWLLAISGLAALFTWGSVCLAHIRFRKAWKYHGHTLDEIPFKAAGGVYGSYLGLFICVIVLMAQFYTAIAAPPGSPGVGTAEDFFKQYLAAPVVLGFWIVGWLWKRQPFLRTKNIDVDTGLREFDWDEINAERTRIAPLPAWRRIIHHTF

SEQ ID NO: 32293 - protein, 242 aa, Magnaporthe grisea 70-15
MASTEEATPALPDYVTDENAVTKDKAKWRYGRAPDYSKTRKIWAESKKSNHTAGSLPDLIEKLVKNWEVEASFKVDLADWRTVDRETYCFSVNGGPPQTGQHMLEVGTYNALIQSNEFYCPAHSTFEDSHKTFKRMMPTFAWEVLEVYSGPPVAAFRWRHWGTFKENYKGVNGKGEKVTMKAHGGTIDIEGIAVATLNDKLQIKKVDIWFDPMAMFHQMKEVLGDESVKEIVHPAAQGEASA

SEQ ID NO: 32294 - protein, 345 aa, Rhodobacter sphaeroides 2.4.1
MTDLAKIPVTVITGFLGAGKTTLIRHLMQNPGGRRLAVLVNEFGTVGVDGDLIRACADENCPDEAIVELANGCLCCTVADEFIPTIEALMALPKRPDHILIETSGLALPKPLLKAFDWPAIRSRITVDGVIALADAEAVAAGRFAPDAEAVAAQAQAEGADHETPLSEVFEDQLACADLVLLTKADLAGEAGLAAARAAVEAESPRPIPILAVTEGAVDPQVILGIEAAAEDDLAARPSHHDGADDHEHDDFASTVIDLPEIADPERLAEAIRALATERNVLRVKGHVAVQGKPMRLLVQAVGARVRHQFDRPWSGARQSRLVVIAERGDLDEAAIRQDLLARIG

SEQ ID NO: 32295 - protein, 401 aa, Arabidopsis thaliana
MALKFNPLVASQPYKFPSSTRPPTPSFRSPKFLCLASSSPALSSGPKEVESLKKPFTPPREVHVQVLHSMPPQKIEIFKSMENWAEENLLIHLKDVEKSWQPQDFLPDPASDGFEDQVRELRERARELPDDYFVVLVGDMITEEALPTYQTMLNTLDGVRDETGASPTSWAIWTRAWTAEENRHGDLLNKYLYLSGRVDMRQIEKTIQYLIGSGMDPRTENNPYLGFIYTSFQERATFISHGNTARQAKEHGDIKLAQICGTIAADEKRHKTAYTKIVEKLFEIDPDGTVMAFADMMRKKISMPAHLMYDGRNDNLFDNFSSVAQRLGVYTAKDYADILEFLVGRWKIQDLTGLSGEGNKAQDYLCGLAPRIKRLDERAQARAKKGPKIPFSWIHDREVQL

SEQ ID NO: 32296 - protein, 128 aa, Burkholderia fungorum LB400
MSELFQGLFRPLRGAGGEAPLADIKVDVTESDSAYTVKAELPGVDKKDIDVKIDGNLVSISAKVERNQEMKEGERVIRRERYAGAVSRAFSLASEVDESAAAAEYKDGVLSLTLPKKAASERKRLQIN

SEQ ID NO: 32297 - protein, 399 aa, Archaeoglobus fulgidus
MSDGNVAWILASTALVMLMVPGVGFFYAGMVRRKNAVNMIALSFISLIITVLLWIFYGYSVSFGNDISGIIGGLNYALLSGVKGEDLLFMMYQMMFAAVTIAILTSAIAERAKVSSFILLSALWLTFVYAPFAHWLWGGGWLAKLGALDFAGGMVVHISSGFAALAVAMTIGKRAGFEEYSIEPHSIPLTLIGAALLWFGWFGFNGGSALAANDVAINAVVVTNTSAAVAGFVWMVIGWIKGKPGSLGIVSGAIAGLAAITPAAGFVDVKGAIVIGLVAGIVCYLAMDFRIKKKIDESLDAWAIHGIGGLWGSVAVGILANPEVNGYAGLLFGNPQLLVSQLIAVASTTAYAFLVTLILAKAVDAAVGLRVSSQEEYVGLDLSQHEEVAYTLEHHHHHH

SEQ ID NO: 32298 - protein, 615 aa, Zea mays
SHSATPAPRPLLSEATPRALLPCPVSGPPAPSARQPAVTEARSGPRENEDIQLRLNSIRRLSTIARALGEERTRKELIPFLSENNDDEDEVLLAMAEELGVFIPYVGGVEHAHVLLPPLETLCTVEETCVRDKAVESLCRIGAQMKETDIVDWFIPVVKRLAAGEWFTARVSSCGLFHIAYPSASDQLKTELRTIYGQLCHDDMPMVRRAAASNLGKFAATVEQNHLKTEIMSIFDDLTQDDQDSVRLLAVEGCAALGKLLEPQDCVAHILPVIVNFSQDKSWRVRYMVANQLYELCEAVGPEPTRADLVPAYVRLLRDNEAEVRIAAAGKVTKFCRILNPQLSVQHILPCVKELSSDSSQHVRSALASVIMGMAPVLGKDATIEQLVPIFLSLLKDEFPDVRLNIISKLDQVNQVIGIDLLSQSLLPAIVELAEDRHWRVRLAIIEYIPLLASQLGVGFFDDKLGALCMQWLEDKVFSIRDAAANNLKRLAEEFGPEWAMQHIIPQVLEKINNPHYLYRMTILQAISLLAPVMGAEITCQKLLPVVINSSKDRVPNIKFNVAKVLQSLVPILDQSVVEKTVKPSLVELSEDPDVDVRYYANQALQACDQMMVSS

SEQ ID NO: 32299 - protein, 479 aa, Anabaena variabilis ATCC 29413
MSDLVLFWHRRDLRITDNIGLATARQHSSKVVGVFCLDPNILERDDVAPVRVTYMIGSLQELQQRYVQAGSQLLILRGDPVQAIPHLAEALNAKAVFWNWDVEPYSQTRDRAIIATLKDKGIQCLTHNWDQILHSPDEIRSGSNTPYTVYTPFWKNWSSKPKAKPVETLHNVEGLTEAEQELAQKAGVKALPTAKDLGFFWDADLIIAPGEAAAQAKLAEFTAKAITEYQEQRNFPGVNGTSQLSAALKFGVIGIRTVWQTTLEALENSRSEETTTSIRTWQQELAWREFYQHAMYNFPELADGAYRATFKNFPWETNEEHFQAWCEGKTGYPIVDAAMRQMNESGWMHNRCRMIVASFLTKDLLINPQWGEKYFMQKLIDGDLSANNGGWQWSASSGMDPKPLRIFNPASQSQKFDPDAEYIRQWVPELRSMDTEYLVTGKITPLERHAVGYVKPIVDHQKQQQLFKQRYQQQKAIGI

SEQ ID NO: 32300 - protein, 184 aa, Amaranthus hypochondriacus
MASSMMSNAATAVAVAATSGGAQANMVAPFNGLKSIASFPVTRKSNDITSIASNGGRVQCMQVWPPVGKKKFETLSYLPPLSDAQLLAQVQYLLNKGWIPCIEFELEHPFVYRENHRSPGYQDGRYWTMWKLPMYGCTDPAQVLNEVEEAKKAYPTAFIRIIGFDNKRQVQCVSFIAYKPADSY

SEQ ID NO: 32301 - protein, 452 aa, Staphylococcus aureus subsp. aureus COL
MNYTQQLKQKDSEYVWHPFTQMGVYSKEEAIIIEKGKGSYLYDTNGNKYLDGYASLWVNVHGHNNKYLNKVIKKQLNKIAHSTLLGSSNIPSIELAEKLIEITPSNLRKVFYSDTGSASVEIAIKMAYQYWKNIDREKYAKKNKFITLNHGYHGDTIGAVSVGGIKTFHKIFKDLIFENIQVESPSFYRSNYDTENEMMTAILTNIEQILIERNDEIAGFILEPLIQGATGLFVHPKGFLKEVEKLCKKYDVLLICDEVAVGFGRTGKMFACNHEDVQPDIMCLGKAITGGYLPLAATLTSKKIYNAFLSDSHGVNTFFHGHTYTGNQIVCTVALENIRLYEKRKLLSHIETTSSTLEKQLHALKRHRNVGDVRGRGLMFGVELVTDKDSKTPLEIEKVERIVRNCKENGLMIRNLENVITFVPVLSMSNKEVKTMVRIFKKAVHNILDRKC

SEQ ID NO: 32302 - protein, 546 aa, Ashbya gossypii ATCC 10895
MQLNKLMLGFMLCASALADDGQQAAEPHTSANFCKIDKDQQVGSTCDITFHELNEINEQIRPQLARLVKTDFFRYFKLDLYKECPFWSDNNGYCVNRACAVDVVDDWESVPDIWQPEVLGGLDEDSVKSEGGESDECSFLNELCGRRREFARPEPLSIDYCDVTDFTNKDSVLVDLVANPERFTGYGGEQSAHIWSAIYKENCFTLGEQGFCLAKDVFYRLISGLHASIATHLSNDYLDTKTGKWGPNLELFMARVGNHPDRVANIYFNFAVVAKALWKIQPYLERVEFCNVYDTNVKDMISNVVSRLDSRVFNEDLLFQDDISMRMKDDFRRRFKNVTKIMDCVHCDRCRMWGKVQTTGYATSLKILFEMDAGDEKARQRVVDKLTKYELIGLFNTFDRISKSVNAINNFERMYHSQMETNTSSIAAFFQNNFFRLGFTETEDQETSNATADMPLPEDSASDNEPYFADLKIPARRSKKQTKEESTSALQQELQGVYHALQFIWNSYVNLPRNLLILVLDVANTWFNNFIGVPTQINILGDDASD

SEQ ID NO: 32303 - protein, 132 aa, Nicotiana alata
MAYSRMMFAFIFALVAGSAFAQAPGASPAASPKASPVAPVASPPTAVVTPVSAPSQSPSTAASPSESPLASPPAPPTADTPAFAPSGGVALPPSIGSAPAGSPTSSPNAASLNRVAVAGSAVVAIFAASLMF

SEQ ID NO: 32304 - protein, 212 aa, Brassica napus
QCPIRPGGSYTYRFNIEEQDGTLWWHAHSRWLRATVYGALIIRPPLSNPHYPFPVLPKREFTLLLGEWWDRNPMDVLNMAQFTGAAPNVSDAFTINGQPGDFYRCSSQETLRFLVGSGETVLLRVINSGLNQELFFGVANHKLTVVAADASYTKPFSTNVIMLGPGQTTDVLLTADQPPAHYYMAAHAYNSANAPFDNTTTTAILEYKDAPC

SEQ ID NO: 32305 - protein, 332 aa, Streptomyces coelicolor A3(2)
MAELFYDADADLSIIQGRKVAVIGYGSQGHAHALSLRDSGVDVRVGLHEGSKSKAKAEEQGLRVVPVAEAAAEADVIMILVPDPIQAEVYEKDIKDNLKDGDALFFGHGLNIRYGFIKPPAGVDVCMVAPKGPGHLVRRQYEEGRGVPCIAAVEQDATGNAFALALSYAKGIGGTRAGVIKTTFTEETETDLFGEQAVLCGGTAALVKAGFETLTEAGYQPEIAYFECLHELKLIVDLMYEGGLEKMRWSISETAEWGDYVTGPRIITDATKAEMKKVLAEIQDGTFAKNWMDEYHGGLKKYNEYKKQDSEHLLETTGKELRKLMSWVDEEA

SEQ ID NO: 32306 - protein, 180 aa, Amaranthus hypochondriacus
MASSLMSNAITAVVGASGAQANMVAPFNGLKSIASFPVTRKSNDITSIASNGGRVQCMQVWPPVGKKKFETLSYLPPLSDAQLLAQVQYLLNNGWIPCIEFELEHPFVYRENHRSPGYQDGRYWTMWKLPMYGCTDPAQVLNEVEEAKKAYPSAFIRIIGFDNKRQVQCVSFIAFKPPGY

SEQ ID NO: 32307 - protein, 593 aa, Leuconostoc mesenteroides subsp. mesenteroides ATCC 8293
MTDIKHAIKYFAKYLKRYWLALSFVVVVTIASTYFQVKAPVYMGKAITELSTYLGQYLNPQTHAVASKTPFYHALEAMMIFFTLTAVTMFISSFISSRISSEASGRMRIGLFAKLQRMTIKYFDTHQDGEILSLFTSDLDNIFNAMNQAIFQLLSQFALFVGIIIMMFQQNVKLAWVTMASTPVAIIVAWFVISRARKYIDTQQDETGRMNGYINEQINGEKIIITQGLQQESIANFGPYNERVKQATFKGQMYSGMLFPLMQGLSLLNLAIVIFFGSWLIVHDGMDKSVGLGLIVVFVNYSQQYYQPITQITSIYNMLQLAVTGARRLSDVHEQAEEVNPESGQKLTNLKSGVTLENIHFGYNDDKEILHGVSIDVKKGEMIALVGPTGSGKTTVMNLLNRFYDVTEGSVKFDGTDVRKLDLKSLRDHVGIVLQESVLFSGTVADNIKFGEPDATEEEMIDAAKQANIHDFIMTLPEGYQTKVDDENSVFSTGQKQLLSIARTILTNPDFLILDEATSNVDTVTEAKIQAAMDNVIAGRTSFVIAHRLKTILGADKIVVLKDGRVIEKGSHQELVAEGGFYSELYHNQMVFD

SEQ ID NO: 32308 - protein, 488 aa, Ralstonia eutropha JMP134
MIRQTIARTAIGIAALAAIGGGYAYLQKEVITPGYAASAPAVSAAPAQAAAVATPMDFSGIVDQYGPAVVNISVTARAQRTAMQAPSGMDPDDPLFQFFKRFGPQFQGPQSGQQLVKGLGSGFIVSPDGLILTNAHVVDGAQEVTVKLTDRREFKAKVLGTDPQTDVAVIRIDAKDLPTVRLGDPARVKVGEPVLAIGSPYGFENTVTAGIVSAKSRSLPDDTYVPFIQTDVAVNPGNSGGPLFNQRGEVIGINSQIYSQTGGYQGLSFAIPINVATKVEQQLVAHGKVTRGRLGISVQEVNQALAQSFGLPKPSGALVNSVEADSPAAKAGVKPGDVIVQLDDDVIDHSGDLPEHVADIKPGTQTTLKIIRKGQPMTLAVKVGAAKEESVAQKGNDSQAGGRLGLAVRSLTPSERRESGIDGGLVVEDVAGPAARVGIQPGDVILSLNGTPITSADQLRALVAKSGKQVALLVQRDEARIFIPLDLG

SEQ ID NO: 32309 - protein, 588 aa, Shewanella sp. MR-7
MSIPVREFDAVVIGAGGAGMRAALQISKEGKSCALLSKVFPTRSHTVSAQGGITVALGNAHEDHWEQHMYDTVKGSDFIGDQDAIEFMCQTGPEAIIELEHMGLPFSRFDNGKIYQRPFGGQSKNFGGEQAARTAAAADRTGHALLHCLYQQNVKHKTQVFSEWYALDLVKNQDGAIVGCTAIEIETGEIVYFKAKATVLATGGAGRIYASTTNAHINTGDGVGMAMRAGVQMQDMEMWQFHPTGIAGAGVLVTEGCRGEGGYLLNKDGERFMERYAPNAKDLASRDVVARSMMTEIREGRGLDGPLGPHCLLKLDHLGKETLEARLPGVCELSRTFAHIDPADGPIPVLPTCHYMMGGLPTKVSGQVIRKNDDGSEQDVVGLFAVGEIACVSVHGANRLGGNSLLDLVVFGRAAGQHLGKALDETADPKDATDAEIQATLARLNRWESNKSGEDPAQIRKDLQLCMQLNFSVFRRGDAMAEGLEQLKAIRKRLENAKLSDNSREFNTQRIECLELDNLMATAIATAYAANFRTESRGAHSREDYLERDDDNWLCHSLFDPVTETMDRRAVNMAPKLREAFPPKKRTY

SEQ ID NO: 32310 - protein, 352 aa, Ginkgo biloba
QCPISSGESYTYRFTITGQEGTLWWHAHSSWLRASVYGALIIYPRAGTTYPFTRPHRETPLLLGEWWNRNPIDVVNQATRTGAAPNVSDAFTINGQPGDAYRCSRQDTYRVSVKPGETNLLRVVNAALNTELFFTVANHRLTVVAVDASYTKPYRTNVIMLGPGQTTDVLMVADQRPGRYYIAARAYASGRGVPFDNTTTTAILQYQVGRSSSSSRPLMPRLPFYNDTRTATRFSTVLRSLATREHPVFVPRTVDENFFFTVGLGLIKCPPNRSCGGPNGTRFSASMNNVSFVLPKSAAILQAHYHGINGVFTTDFPVNPPIKFDYTAQNISRRLWSPVRATKAKVLKYNTR

SEQ ID NO: 32311 - protein, 456 aa, Carboxydothermus hydrogenoformans Z-2901
MYDVAILGGGPGGYVAAIRAAQLGLSVVVVEKDELGGTCLNRGCIPTKALVSTAERLHQIKNSAAFGIEVTGYNFNFQKAAERKNQVVERLVKGIHYLFKKSKITLIKGTGKLTGKNEITVETSDGLEKVEAKNIILATGSKPALISALGYDGERVITSDEALNLEKLPAEMVIIGGGVIGSEFATIFSEMGVKVTIVELLPSILANTDKEVSRYLTTLFKKRGIQVKTKVAVKEVKKGEKVTVVLENGEELVTDMVLISIGRVLNTKDIGLEEVGVALGPKGEVLVDEYLRTNVENIYAIGDITSKMQLAHVASAQGIRVVENLVGEPQPMSYDVVPGCIFTLPEIAMVGLTSQEAEEKGIKIITGKFPFQASGKAVAMEETEGFVKIIADFYTHRILGGHIVGPHATDLIGEIALAVQKGLTLEEVAHTIHAHPSLPEAVMEAAEAALNRAIHI

SEQ ID NO: 32312 - protein, 689 aa, Neurospora crassa
MPAQTSFPSLAALRRLQTLNHVYAPLRRTGTGRITNGWTCASCRSQLSASSASSSSSSSSLSVSLYNSTLARRSFSSSSKRSSDQNSNGSSSSSSSSSSSNGNGKTNNNNNNNNNNGRRTVLLAAGGGAAAAGLLAVGDDVKYTYEAVERTGRVASTLAICVNDYRVTLNAREKIEDPEEKQRLLRECHQRCADRTLEVLEKSGGIFIKLGQHLSAMNYLLPPEWTTTFIPLQDKCPVSSFESIERMFLEDTGTSLWDYFSEFSREPIGAASLAQVHLATIKETGQRVAVKRWAPLDMRLTSTTFKTLKYFFPEYDLEWLSSEVEISLPKELDFTCEAENARRTSRYFAEFAPSLPLVIPDVLWAKKRLLVMACESGHRLDDLAYMDAYGIDRDEVSATLARIFNEMIFGEGAPLHCDPHGGNIAIRYHDNSNKSKSKSNFDIILYDHGLYRDIPLPLRRSYAKLWLAIIDGDIPKMKRYVHEVAGIGEDKFPLFASAITGRDFINVVSATDSGGVLKPKEASEQKSMSTALQEGLIVDLVQMLGQVPRIILLILKTNDLTRALDESLHTKQGPVRQFLILARYCMRTVFYEQLEEIRGLGSIWSPANLVRLVGAWWGMARVEVKLEVFELWLRVKRTLGLGSGFGMGMGTGEEAQQQVVPVGKKGQKRLEREVEAAAAVSVAAAAAAA

SEQ ID NO: 32313 - protein, 380 aa, Prochlorococcus marinus str. MIT 9313
MQSQPTSRRRQLRTWRPGPGPAEFKPVSPQGKSKPLLDLASNDYLGLCRHPDLIEAAGAALHSEGVGAGGSRLVTGSRPVHVALEEALADWLGRERILLFPSGFQANLAAVIALANRNTPVLADRLAHHSLLMGVKASGARLQRYGHNDLADLERRLKLCRHHQPHQRPLVVTESLFSMEGTSPPLSTMAELCEVHGARLLVDEAHALGVIGPQGRGLCHGLSAPVSIISGTFGKAFGSGGAFLAGDCAMGDHLLQTSGAFRYTTALAPPLAAAALTALNLIQSHPQWGKQLQERAEQWRGQLTARGWARPPGYGPILSLVIGSDQQALNRQSQLEEAGLLSVAIRPPTVPEGTARLRLVLRRGLPDETLERLMSALETG

SEQ ID NO: 32314 - protein, 292 aa, Helicobacter pylori 26695
MICASVLQHAYCGSRKKTIEHTANLLEQALKKHPKTNLVVLQELNPYSYFCQSENPKFFDLGEYFEEDKAFFSALAQKFQVVLVASLFEKRAKGLYHNSAVVFEKDGSIAGVYRKMHIPDDPGFYEKFYFTPGDLGFEPIVTSVGKLGLMVCWDQWYPEAARIMALKGAEILIYPSAIGFLEEDSNEEKKRQQNAWETIQRGHAIANGLPLIATNRVGVELDPSGAIKGGITFFGSSFVVGALGEFLAKASDKEEILYAEIDLERTEEVRRMWPFLRDRRIDFYNDLLKRYI

SEQ ID NO: 32315 - protein, 760 aa, Nicotiana tabacum
MLRWLFLGLLISLVIISVKANDTEFSNCNCDEEGMWSIHNILECQKVSDFLIAVAYFSIPLELLYFISCSNIPFKWVLIQFIAFIVLCGLTHLLNGLTYNSAHPSFQLIMSLTVAKILTALVSCATAITLLTLFPLLLKIKVRELFLTQNVMELDQEVGLMKKQKEVCMQVRMLTREIRKSIDKHNILYTTLVELSKTLNLHNCAVWMPNENRSVMNLTHGLSPGSAVEYHRSLPIDDPDVLEITKDKGVRILRQDSVLAAASSGGPGEPCTVAAIRMPLLRASDFKGGTPVLVDTRYAILVLVLPSGDFDWSSNEMEIVEVVADQVAVALSHATVLEESQLMREKLEIRNGLLQQAKENAVKATQARNSFQKVMNNGMRQPMHSVLGLLSILQDENFTSSNQRIIIDTMMRTSTVLSTLTNDAMDISEKDEGRIPVEMMPFQLHSLIREASCLVKCLCIYKGFGFSTDFPNSLPNLVMGDEMRTFQVLLHMVGHLLNISFGSGSVVFRVGTEDGNDKIWGARRHSIVDEYVTIKFETKINLESSQRNSSMSSIHFGGRRYNSKELKEGLSFRMCKKLVQMMQGNVYMSSNSEGRAQGMTLILRFLKQSSFRKHMFDLGNPLEQAISSSMFKGLQVLLADDDDVNRMVTKKLLEKLGCQVIAVSTGFQCLSAMGHSKTSIQVVILDLHMPEMDGFEVAIRVRKFHSHGWPLIIALSATSEELVWDRCLQVGINGLIRKPVLLQGMAEELQRVLQRAGEGF

SEQ ID NO: 32316 - protein, 147 aa, Ashbya gossypii ATCC 10895
MSQNLTEEQIAEFKEAFALFDKDNSGSISSSELATVMRSLGLSPSEAEVADLMNEIDVDGNHNIEFSEFLALMSRQLKSNDSEQELLEAFKVFDKNGDGLISAAELKHVLTSIGEKLTDAEVDEMLREVSDGSGEINIKQFAALLSK

SEQ ID NO: 32317 - protein, 219 aa, Leptospira interrogans serovar lai str. 56601
MHIIEFSNERDFLDHCLDRIKEISANKIQTKSSFHIVLTGGDTAKLLYSELKHLKTDWSKWFFYFGDERCVPKDHIDSNWLMAERVLFKFIPVNERQIFKIPGHLGPQRGALEYSESIKSISSFDLVLLGLGEDGHIASLFPGMDLTNEEDVIAIYDSPKLPKERVSLSLRKINSSEFVFIIAKGKKKAEVIKRIEIGEILPVTLLTPLKGLELCYFSD

SEQ ID NO: 32318 - protein, 324 aa, Pseudomonas syringae pv. syringae B728a
MKKTVLAFSRVSPEMAERLAQDFNVIVPNPKQGDINAQFAEALPESHGLIGAGRKLGREQLQSATKLEVVSSISVGYDNYDVDYLSERGILLTNTPDVLTESTADLGFSLIMSSARRVAELDAYTKAGQWTRSIEPPHFGTDVHGKTLGIVGMGNIGAAIARRGRLGFNMPILYAGNSRKTQLEQELGAQFRSLDQLLAEADFVCLVVPLSEKTKHLIGRRELSLMKPGAILVNIARGPIVDEPALIEALQNGTIRGAGLDVYEKEPLSESPLFQLKNAVTLPHVGSATTETRQAMADRAYGNLRSALLGERPQDLVNPQVWKG

SEQ ID NO: 32319 - protein, 383 aa, Arabis procurrens
QCPIRPGGSYTYRFNIEEQEGTLWWHAHSRWLRATVYGALIIRPPLSSPHYPFPVLPKREFTLLLGQWWDRNPMDVLNQAQFTGAAPNVSDALTINGQPGDLYRCSSQETLRFLVRSGETILLRVINSALNQELFFAVANHKLTVVAADASYTKPFSTNVIMIGPGQTTDVLLTADQPPAHYYMAAHAYNSANAPFDNTTTTAILQYKGAPCVTLQGKSQARAISAQLPGFNDTATAAAFTAQMKSPSKVEIPLDIDEDLFFTVGLGLFNCPTPNTQRCQGPNGTRFTASINNVSFVFPKRNSIMQAYYQGNPAGVFTTDFPPVPPLAFDYTGNVSRGLWQPTRGTKAYKLKFMSKVQIILQGTSIVTIENHPMHLHGYDFYI

SEQ ID NO: 32320 - protein, 1955 aa, Oryza sativa
MEMALRPQSLLCPRSRLKVVIRPASSASGGGLAQYFLMTRRYTGSRIVRCMVSSSDCPNRKAKRTISLHTEVASSRGYAPRIAAESSIQEREHINSDEETFDTYNRLLRNESTEWKKLDTTEVDLSQDVSSSSMRKVDATDEAKLDILEDDLPRNLLNGVTMGEVDMLDEAGAEDDVFEVDLSALHNSTVGKMDAVNEVGTENDLFEVDLSALHSAAVGKVDVVDGAKAKEDLFEMDSLALHSVTMGKVDAINAAGAEGDKFEVDLSALASNNSMIEAVNVMDEAKAIEDTLEVDLSGNATSSSTYGEVKFEVDSLGNTSSTVMYGPADGAYEPRSDEVTFKVDSSENASNNVMYGRADVVDESWADEGIFEVDFFTNASSGAEYGKVDVVDEAKTDDFTFEIDSLEKDSNNKMHGKAHMVDEAWDDEAIFEVDLFGNASSIPIYGEVNVLDEARADDGKFEVDLLGNTSSNSTHEEVDVVDEAQTGEATFEVDLLGNALSSAIYKEVPVMGGAQDDEVDVDFSINASITETEKEADAVDEARVEDETFDMDLVGKQISIDSMNDDVVEEGTKHHRYPMLSSAFIEVKTIHETPVSLKPELMSVVMDQEQDKPISSVYQQEGSIFNLHAENQSTVDFHEREQMAITFDKQKESVAKLSKEDQQTAGLPEQNMSFDGVHRKSQSIIGLPFQHQSIVSSPEKYRSIVGFHGQNQSIISSHKQDKSIVGVPKKIQSIVGSTKHDDSIVGFRKQDRSIVSVPEQKQSIVGFHKQDLSIVAVSEQNLSIVAIPRESQSKQISIVRRHDPLHLKEVETKDRDGISKKSGGDDDLPHMLFEEELSQVEDVARAIAYKKQHEVDVISLTPDIQESPQDNIDPQELRRMLQELADQNCSMGNKLFVFPEAVKANSTIDVYLNRNLSALANEPDVHIKGAFNSWRWRPFTERLHKSELSGDWWSCKLHIPKEAYRLDFVFFNGRLVYDNNDSNDFVLQVESTMDEDSFEEFLVEEKKRELERVATEEAERRRHAEEQQRMGEQRAAEQAAREQAKKEIELKKNKLQNLLSSARTHVDNLWHIEPSTYRQGDTVRLYYNRNSRPLMHSTEIWMHGGCNSWTDGLSIVERLVECDDENGDWWYANVHIPEKAFVLDWVFADGPPGNARNYDNNGRQDFHAILPNAMTNEEYWVEEENCIYTRLLHEIREREEAIKIKVEKRAKMKSEMKEKTMRMFLLSQKHIVYTEPLEIRAGTTVDVLYNPSNTVLNGKPEVWFRWSFNRWMHPSGVLPPKKMVKTEDGCHLKATVSVPSDAYMMDFVFSESEEGGIYDNRNGTDYHIPVSGSNAKEPPIHIVHIAVEMAPIAKVGGLADVVTSLSRAIQELGHHVEVILPKYNFMNQSNVKNLHVRQSFSLGGTEIKVWFGLVEDLSVYFLEPQNGMFGGGWVYGGNDAGRFGLFCQSALEFLLQSGSSPHIIHCHDWSSAPVAWLYKEHYAESRLATARIIFTIHNLEFGAHFIGKAMTYCDKATTVSHTYSKEVAGHGAIAPHRGKFYGILNGIDPDIWDPYTDNFIPMHYTSENVVEGKNAAKRALQQRFGLQQTDVPIVGIITRLTAQKGIHLIKHALHRTLERNGQVVLLGSAPDPRIQSDFCRLADSLHGENHGRIYAGSDFILVPSIFEPCGLTQLVAMRYGSIPIVRKTGGLYDTVFDVDHDKDRARVLGLEPNGFSFDGADCNGVDYALNRQMNGPTLDTNIYGYTYFRMENWNWNLEGEKLACLGQPGKVVVKKARQGARDGEELVQAGAPTRSHSVYAMCCVAERRQAEANRIREKYPDRIPVIVEKAERSDIPDIDKKKSVLNHFTFKNKSSATLSLFVLASYVDTSFFMLLKIVLANYTRYLVPADLTVGQFVYVVRKRIKLSAEKAIFIFVKNTLPPTAALMSAIYEENKDEDGFLYMTYSGENTFGLFV

SEQ ID NO: 32321 - protein, 590 aa, Kluyveromyces lactis NRRL Y-1140
MTITKFVSEHPQTDPKWWKEAIVYQVYPASFKDSNHDGWGDIKGIDSKLEYIKELGANAIWICPFYDSPQEDMGYDISDYEKVWPRYGTNEDIFNLIDRAHGLGIKIIVDLVINHCSSEHAWFKEARSSLDNPKRDWFIWKAPKGFDSNGKPIPPNNWRSFFGGSAWEYDEHTGQFYLRLFAKGQPDFNWENEVTRNAIYESAVGFWLDHGVDGFRIDTAGLYSKQPGFPDVPIINPGLDFQHPDPAILNGPRIHEFHKEMNKFMRERVKDGRELLTVGEIPCGTHDVCKAYTSAKEQEITQLFEFEHVSVGRKPGNVGVVNFKLSEFKDGIAAAFQFIDKTDSWSTVYIENHDQPRSVTRFGDDSPEYREISAKLLALLETSLTGTLYVYQGQELGMINFRDWPIEKYEDVEVKGMYKMMVDQFGADSDQVKDYVNGLQLISRDHARTPFPWTSEAPYAGFTDGKEPWFPLTETFQEGINAEDELKDPKSVFNFWKTAIEVRKTHKDVLNYGYDFTFVDHANEKLFAFTKKYGEKVLYVVLNFSKEEIEFSFLEGYNSYDYIFGNYPEAEIDTGSNKLQPWEGRFYYAN

SEQ ID NO: 32322 - protein, 208 aa, Zea mays
RIHSGEVTNEEKEGIPADQERLVFAVKQLEDGRTLADYNIQKESTLHLVLRLRGGMQIFVKTLTGKTITLEVESSDTIDNVKAKIQDKEGIPPDQQRLIFAGKQLEDGRTLADYNIQKESTLHLVLRLRGGMQIFVKTLTGKTITLEVESSDTIDNVKAKIQDKEGIPPDQQRLIFAGKQLEDGRTLADYNIQKESTLHLVLRLRGGM

SEQ ID NO: 32323 - protein, 214 aa, Medicago sativa
MATIKVHGSPISTATMRVTATLYEKELEFEFVSINMRNGEHKKEPFISINPFGQVPAFEDGDLKLFESRAITQYIDHEYADKGTKLTSSDSKKMAIMSVWSEVESLHYDKVASILVWELGIKTLFGIPLDSKVVEENEAKLDSILDVYEKRLSESKYMGGECFTLVDLHHLPSLHYLMKSQSKKLFESRPYVNAWVDDITARPAWSKVLAMIPN

SEQ ID NO: 32324 - protein, 541 aa, Streptococcus agalactiae A909
MTIDKRKVVYQIYPKSYKDTTGNGVGDLRGIIEKLPYLAELGIDMVWLNPFYPSPQRDNGYDISDYTAINPDFGTMDDFEEMIEVGRQYRIDFMLDMVLNHCSIEHEWFKKALAGDRYYQDFFILRDNPTDWVSKFGGNAWTPFGDTGKYYLHLFDITQADLNWRNADVRKELFKVVNFWRDKGVKGFRFDVINLIGKDEILENCPINDGKPAYTDRPITHDYLKMLNNASFGQDDSFMTVGEMSSTTIANCILYTAPEREELSMAFNFHHLKVDYKDGQKWTIMAFDFPALRDLFHSWGEGMSEGNGWNALFYNNHDQPRALNRFVDVKRFRNEGATMLAASIHLSRGTPYIYMGEEIGMLDPDYSSMDDYVDIESLNAYQIMLDEGKSQEEAFSIIRAKSRDNSRVPMQWDDSTNAGFSEGAPWLKVGKSYKEINVAKEKTGLIFTFYQELIRLRKQLPIIADGNYKAAFKDNEKVYAFERHLDKEKLLVLNNFFAEKVKIKLPENYLQGQVLLSNYKDVTLDETVTLQPYQTLAILVS

SEQ ID NO: 32325 - protein, 581 aa, Triticum aestivum
MCGILAVLGCGDESQGKRVHVLELSRRLKHRGPDWSGLHQVADNYLCHQRLAIIDPASGDQPLYNEDKSIAVAVNGEVYNHEELRARLSGHRFRTGSDCEVIAHLYEEYGESFIDMLDGVFSFVLLDARDNSFIAARDAIGVTPLYIGWGIDGSVWISSEMKGLNDDCEHFEIFPPGNLYSSKEKSFKRWYNPPWFSEVIPSVPYDPLRLRSAFEKAVIKRLMTDVPFGVLLSGGLDSSLVAAVAARHFAGTKAAKRWGTRLHSFCVGLEGSPDLKAAKEVADHLGTVHHEFNFTVQDGIDAIEDVIYHIETYDVTTIRASTLMFQMSRKIKALGVKMVISGEGADEIFGGYLYFHKAPNKEEFHQETCRKIKALHQYDCLRANKATSAWGLEVRVPFLDKEFINEAMSIDPEWKMIRPDLGRIEKWILRKAFDDEERPFLPKHILYRQKEQFSDGVGYSWIDGLKDHAASNVSDKMMSNAKFIYPHNTPTTKEAYYYRMIFERYFPQSSAILTVPGGPSVACSTAKAIEWDAQWSGNLDPSGRAALGVHLSAYEQDTVAVGGSNKPGVMNTVVPGVAIET

SEQ ID NO: 32326 - protein, 998 aa, Vibrio fischeri ES114
MMEKHAAILIQRVRDDKKAVQMIDALLLEYSLDTKEGILLMCLAEALMRIPDAETADALIRDKLSVADWKSHLKNSDSTFVNASTWGLLLTGKVVSMDVKADGSPSNALSRLVNKFSEPVIRQAMNQAMKIMGHQFVLGRTIEEAQKKGLSMREKGYTYSFDMLGEAALTQTDAHKYFKDYIMAIESVGRAASIANSPEPTVSIKLSALHPRYEVANKERVMNEMYQSVLQLLERARELDVGITIDAEEMDRLELSLELFEKLYRSDIVKGWGKFGLVVQAYSKRALPVLVWLTALSKEQEDLIPLRLVKGAYWDTELKLSQQFGFARYPVFTRKEATDVSYLACARYLLSEHVKGKIFPQFASHNAHTVAAIASMATHDEFEFQRLHGMGDALYEHAMDMFNRSVRIYAPVGSHKDLLPYLVRRLLENGANSSFVHRLVDANCPIESLTVHPVDSLLACPSLENQLIPLPPYIFSDRKNSYSINLDVESEAHPFERQVKEQMKTYWQGGPIVSNIRDYESMIKEHGSALHVINSPYDRGNDVGSLVWSSQEQVSNALDIAHDYFPIWQQTPVAERADYLEALADKLEMNMPELVALCHKEAGKTIHDSIDEVREAVDFCRYYAVQAKLNFTTAETIVGFDDISRQIERQGRGVFVCISPWNFPLAIFLGQVTAALVAGNTVIAKPAEQTSLIAVRAIELLLETGIAPQAVHLLPGDGKTVGAPLTSDHRVAGVAFTGSTETAQLINRTLANRSIEGEGVSPVPFIAETGGQNAMIVDSTALPEQVVRDVIRSAFASAGQRCSALRVLFVQQDIADRIINLIKGAMAELSVGLPELHCTDVGPVIDVRAKDKLMAHIERMTKEGVLVAQAELPNWSEKGDFVPPSAFEIESIKQLENEQFGPILHIVRFKASDIDKVISEINSTGFGLTMGVHSRNEVTYTRIEKNIKVGNCYINRDQVGAVVGVQPFGGQGLSGTGPKAGGPRYLIRYTKANTTTSK

SEQ ID NO: 32327 - protein, 675 aa, Treponema denticola ATCC 35405
MKNELEAIALSIRSLSMDAIEKANSGHPGLPLGAAELGAALYAKILKHNPKNPDWKDRDRFVLSAGHGSMLLYSALHISGYDVSIEDIKSFRQLGSKCPGHPEYGDTPGVETTTGPLGQGISTAVGMAIAEKMLAARFNTAEHKIVDHYTYALVGEGCLMEGVSSESSSLAGHLKLGKLIVYYDENKITIDGSTDLTFTENIEERYKAYGWQVLRGSMYSFEDIERLTLEAKKDERPTLIILKSVIGQGAPTVAGKNKAHGAPLGKDGIAEAKKNLLLEGKGDFYVAEEAYAFFKKRNEELALAEAEWNKTFEVWSKANPEKRKEWDLSFAQGGADEALVKSVKLPEFKKDESLATRAASKKALNEFAKVLPNLVGGSADLEGPNAVGLDGISAFSHQNPSGRYIYFGIREFAMGTITNGIQLHGGFRAFCATFLVFADYLRPALRLAALMKLPSIYVFTHDSIFVGEDGPTHQPIELLASLRAIPNVLVLRPADAEETGEAWKQALLHKDGPVCLILSRQNLPVLEKSDLFWRESIKNGAYIVKDVEASASGCTVGKPDRTPDVTVLATGSEVSMAVKAASLVKDKKVRVVSVMSKERFENSPKDFKHGVLGGCKKHIRVVTAEAGVAQGWEGWTGCKCDNFSIEGFGTSAPGAKVAEHLGFTSENLAKLIEKN

SEQ ID NO: 32328 - protein, 198 aa, Arabidopsis thaliana
MEQSEEGQQQQQQGVMDYVPPHAYQSGPVNAASHMAFQQAHHFHHHHQQQQQKQLQMFWANQMQEIEHTTDFKNHTLPLARIKKIMKADEDVRMISAEAPVIFAKACEMFILELTLRAWIHTEENKRRTLQKNDIAAAISRTDVDFLVDIIPRDELKEEGLGVTKGTIPSVVGSPPYYYLQQQGMMQHWPQEQHPDES

SEQ ID NO: 32329 - protein, 244 aa, Neurospora crassa
MAAQETNTTNGTSQPADNRVVFFFDIDNCLYPKSAKVHDLMADLIDQYFARHLNLPWEDAVRLHKEYYQNYGLAIEGLVRHHQIDPLEYNAKVDDALPLDNIIKPSDALKQLLADIDKRKVKLWLFTNAYINHAKRVVKLLEIEDFFEGITYCDYSQTPLICKPHEDMFKKAMREADVVDRWGDCYFVDDSYLNCKKAQELGWTTAHLVEEGVTPPKTPASKYQISTLQELRTVFPELFKKDEE

SEQ ID NO: 32330 - protein, 167 aa, Limonium latifolium
GYDGFEGVKTLVDVGGSSGDCLRMIINKYKDIPKAINFDLPEVVAKAPKIPGITHVGGNTFESVPSGDAIFVKWVLTCFTDEEVITLMRNCNKALPVGGKLICSEPTLPENSDESHRTRALLVADIFIMTTYRAKGKHRTEEEYRQLGLLAGFPKFRVIHVDYFFPV

SEQ ID NO: 32331 - protein, 437 aa, Bordetella pertussis Tohama I
MSNTYFPRWRLADDTVPGAVIAPDERLSWPKNIAMGAQHVVAMFGSTVLAPLLMGFDPNVAILMSGIGTLIFFLFVGGRVPSYLGSSFAFIGGVVAVTGYVAPGANANIGVALGAIIACGLVYALIGLVVWAASARGNGARWIEAMMPPVVTGAVVAVIGLNLAPIAAKGAMGSSGFEASMALMTILCVGGIAVYTRGMVQRLLILVGLVLACVIYAVCANGLGLGAPMDFAKVAAAPWFGLPSFAAPVFEPQAMGLIVPVAIILVAENLGHVKAVAAMTGQDLDRYVGRAFVGDGVATMVSGAVGGTGVTTYAENIGVMAVTRIYSTLVFVVAAVIALVLGFSPKFGALIQTIPGPVLGGMSVVVFGLIAIAGARIWVVNQVDFSDNRNLIVAAVTLVLGAGDFSVKLGDFSMNGIGTATFGAIILYALLGLARRR

SEQ ID NO: 32332 - protein, 510 aa, Candida albicans SC5314
MGRATIKSGSINLLNTIIGAGILAMPYGLKNNGLLFGCILIIWSSLTSSMGLYLQNKVAKYTGQRGSVSYFSLSQLTYPNLSILFDSAISIKCFGVGVSYLVVIGDLMPKIVESLVGGGNINSDSLLMARNFWITIFMIVIVTPLSYLKKLDSLKYTSILALFSVGYLICLVVAHYFTTPTTSPSGGGGGDDDDIVYHYIGPISLKSTLSSFPIFVFAYTCHQNMFAIINELKPSDTDGSQTRQSNLIIRNAISIACLSYLIVGIFGYLTFGNSVNANIITMYPHNSISSLIGRLCIVVMVSLSFPLQCHPCRGSINHVIHFCTHGVQQSKFRSTTTNNNYNNGDQHGYTSLSSDIESLQSIGGNDTTAGSIGSIGGGDSVVGDADESFISTTPVEGAQDTDGHDPIIVPMTTKKFYIITTVIVVLSYLVAISVTSLAHVLAFVGSTGSTSISFILPGLFGYLLIKPIEGNTSLNNLEKFCKYGGLFLAIWGILVMIVCLSATIFLGATH

SEQ ID NO: 32333 - protein, 555 aa, Oryza sativa (japonica cultivar-group)
MTTSSSGSVETSANSRLGTFSFASASFTDLLGGNAGAGGGGVSRYKAMTPPSLPLSPPPVSPSSFFNSPIGMNQADFLGSPVLLTSSIFPSPTTGAFASQHFDWRPEVAAAQSADQGGKDEQRNSYSDFSFQTAPASEEAVRTTTFQPPVPPAPLGDEAYRSQQQQQPWGYQQQPAGMDAGANAASFGAAPFQATSSEMAPQVQGGGGYSQPQSQRRSSDDGYNWRKYGQKQVKGSENPRSYYKCTFPNCPTKKKVERSLDGQITEIVYKGTHNHAKPQNTRRNSGSSAAQVLQSGGDMSEHSFGGMSGTAATPENSSASFGDDEIRVGSPRAGNGGGDEFDDDEPDSKRWRKDGDGEGISMAGNRTVREPRVVVQTMSDIDILDDGYRWRKYGQKVVKGNPNPRSYYKCTTAGCPVRKHVERASHDLRAVITTYEGKHNHDVPAARGSAALYRPAPPAAAATSSHPYLPNQPPPMSYQPTGPQPYALRPDGFGGQGPFGGVVGGSSFGGFSGFDDARGSYMSQHQQQQRQNDAMHASRAKEEPGDDMFFQNSLY

SEQ ID NO: 32334 - protein, 471 aa, Arabidopsis thaliana
MASLLIFPHLHHFDSSLDRREVLVVRHSQASRRFLTPKASINGSGITNGAAAETTSKPSRKGRKKKQTSTVIEKDNTETDPELNPELADYDDGIEFPYDDPPLVCCFGAVQKEFVPVVRVHDNPMHPDMYSQWKMLQWDPPEFGRAPGGPPSNVAISHVRLGGRAAFMGKVGEDDFGDELVLMMNQERVQTRAVKFDENSKTACTRVKIKFKDGKMMAETVKEPPEDSLFASELNLAVLKEARIFHFNSEVLTSPTMQSTLFTAIQWSKKFGGLIFFDLNLPLPLWRSRNETRKLIKKAWNEANIIEVSQQELEFLLDEDYYERRRNYTPQYFAEDFDQTKNRRDYYHYTPEEIKSLWHDKLKLLVVTDGTLRLHYYTPTFDGVVIGTEDVLITPFTCDRTGSGDAVVAGIMRKLTTCPEMFEDQDVMERQLRFAVAAGIIAQWTIGAVRGFPTESATQNLKEQVYVPSMW

SEQ ID NO: 32335 - protein, 492 aa, Hypericum perforatum
MDPYKYRPSSAFNSPFWTTNSGAPVYSNDHSLTVGSRGPILLEDYHLVEKLANFDRERIPERVVHARGASAKGFFEVTHDISHLSCADFLRAPGVQTPVIVRFSTVIHERGSPETLRDPRGFAVKFYTREGNFDLVGNNFPVFFIRDGMKFPDMVHALKPNPKSHIQEDWRILDFFSHHPESLHMFSFLFDDIGIPQDYRHMEGSGVNTYTLVNKAGKVHYVKFHWKPTCGVKSLLEDEAIKVGGSNHSHATKDLYDSIAAGNYPEWKLFIQTIDPDHEDRFDFDPLDVTKTWPEDILPLQPVGRLVLNKNIDNFFAENEQLAFCPAIVVPGIYYSDDKLLQTRIFSYSDTQRHRLGPNYLQLPVNAPKSAHHNNHHEGFMNFMHRDEEVNYFPSRYDPVRHAEKYPIPPVVLNGRREKCMIAKENNFKQPGERYRSFSPDRQERFLNRWISSLSDPRVTHEIRAIWVTYWYQADKSLGQKLASRLNVRPNM

SEQ ID NO: 32336 - protein, 356 aa, Populus tomentosa
MFHTKKPSTMNSHDRPMCVQGDSGLVLTTDPKPRLRWTVELHERFVDAVTQLGGPDKATPKTIMRVMGVKGLTLYHLKSHLQKFRLGKQPLKDFSDHSIKDASALDLQRSAASSSGMMSRSMNEMQMEVQRRLHEQLEVQRHLQLRTEAQGKYIQSLLEKACQTLAGDQNLASGSYKGLGNQGIPGMGAMKEFGSLNFPAFQDLNIYGGDQLDLQHNMDRPSLDGFMANNDNICLGKKRPSPYDGSGKSPLIWPDDLRLQDLGSGPACLEPQDDPFKGDQIQMAPPSMDRGTDLDSISDMYEMKPALQGDGLDEKKFEASAKLKRPSPRRSPLAAERMSPMINTGAMPQGRNSPFG

SEQ ID NO: 32337 - protein, 243 aa, Oryza sativa (japonica cultivar-group)
MAAAAAGASTPFNFCRHGSHAEYDAVFSGSWMARRPSAAPHGGGASGSGSGSGYGAASYVAPTFGAAFRQQHLDLLDYLSDDQGVPAPPPAAVPSASYVTPAPAMAPAEPVVPDAVAAAGGYPRSVAAAAAAVAGEGRDRTTTDKIAFRTRSDDEILDDGYKWRKYGKKSVKNSPNPRNYYRCSTEGCNVKKRVERDKNDPRYVVTMYEGIHNHVCPGTVYYAAQDAASGRFFVAGISHPDLN

SEQ ID NO: 32338 - protein, 478 aa, Haemophilus influenzae 86-028NP
MSRRLRRTKIVCTMGPSTDRDNNLEKIIAAGANVVRMNFSHGTPDDHIGRAERVRSIAKKLGKTVAILGDLQGPKIRVSTFKDGKIFLNVGDKFILDAELPKGEGTQESVGLDYKTLPQDVVPGDILLLDDGRVQLKVLSTDGAKVFTEVTVGGPLSNNKGINKLGGGLSADALTEKDKADIITAARIGVDFLAVSFPRSSADLNYARELAQQAGLNAKIVAKVERAETVANDEAMDDIILASDVIMVARGDLGVEIGDPELVGVQKKLIRRSRQLNRAVITATQMMESMISNPMPTRAEVMDVANAVLDGTDAVMLSAETAAGQYPSETVAAMASVCLGAEKMPSINVSRHRMDKEFETIEESVAMSAMYAANHMKGVAAIVTLTSTGRTPLLMSRISSGLPIFALSRNQETLNLCALYRGVTPIYHGEESRTEAGAKAALQSLKEKGYLSTGDLVLVTQGGQGATQTNVCRTLIVE

SEQ ID NO: 32339 - protein, 293 aa, Hordeum vulgare subsp. vulgare
DEPQPDDDPEKEVSERLPIKKRLVFPGKTMKKMKAKKKKKKNKFIKLEDDDIDDKAPDKTTSSKQSDVPDEWESEKTIRKSTRTAVIVRQAEREAIRAEKQATAKPIKKRKEGEEKRMTQEEMLLEAAETEIMNMRNLERVLAREGEVKKKAVVQKAVYEGPTLRFHSRDGESRLEFINGASFGSELCTTSTPYPEKSVCVVTGLPAKYRDPKTGLPYATMAAFKIIRESFLKEEPDKKRPNMSNMGELLESVAGEHSTPKKNRIEGRSPISVDLRHGGRFRRIPALDVMDED

SEQ ID NO: 32340 - protein, 166 aa, Prochlorococcus marinus subsp. marinus str. CCMP1375
MNTNFFLSSRRSFLVGILSAFLGIVLGPKKVLAASNSDSWSLTKDQWKQRLSREAYYVLREEGTERPFSSLLNDEKREGIFACAGCDLPLFDSSRKFDSGTGWPSFWEPLPNAIETKTDFKLIVPRTEYHCSRCGGHQGHVFNDGPRPSGKRYCNNGVALVFTVSK

SEQ ID NO: 32341 - protein, 636 aa, Vibrio fischeri ES114
MEHSVNLERIRAEYNVKHWSQGFYGIDDNGEVYVSPRTDASHQVPLSHIVNQLEQRNIGLPALVRFPQIVHQRVHNICNAFNQAIDEYQYENHYLLVYPIKVNQQKEVVDEILASQAQLEQKQLGLEAGSKPELLAVLALAQKASSVIVCNGYKDREYVRLALIGEKLGHSVFIVLEKLSELDLVLSEAKALGVKPRLGLRIRLASQGAGKWQASGGEKSKFGLSASQVLTVINRLKAEDQLDILELVHFHLGSQMANIRDVRNGVSEAARFYCELRDIGAKLKYLDVGGGLAVDYDGTRSQSSNSMNYGLAEYARNIVMTIGDICQLYSQPMPVIISESGRSLTAHHAVLITNVIGTESYTPEAIEAPRADDPLLLHNMWRNLEQLENGSDDRALIEIYNDTQCDVAEAHNQFATGMINLQHRAWAEQVSLRINYELSVKMSTKNRYHRPILDELSERLADKFFVNFSLFQSLPDAWGIDQVFPVLPLSGLDNADEHRAVVLDITCDSDGTIDQYVDGQGIETTLPVPAWNPDEPYLMGFFLVGAYQEILGDMHNLFGDTHSVVVNVDENGEANIDYINEGDTVEDMMRYVHIDVDLIRQNYKDMVTAKVAEEEQQSVLEELEQGLMGYTYLEDF

SEQ ID NO: 32342 - protein, 655 aa, Rhodopseudomonas palustris CGA009
MANAIRFLAIDGVEKAKSGHPGMPMGMADVATVLFTRFLKFDPADPAWADRDRFVLSAGHGSMLLYALLHLTGYPDVTIDQLKSFRQWGSKTPGHPEYGHTQGVETTTGPLGQGLATSVGMALAERMMNARYGDALVDHHTYVIAGDGCLMEGVSHEAISLAGHLKLNKLIVLWDDNHISIDGDTSLSCSDDQLARFAASGWATTRVDGHDPEAVAAAIEQAKKSDRPSLIACRTTIGFGSPKVAGTEKAHGAPLGADEVEKTRAALNWPHPPFEIPDPILARWREAGGRGKAAHEAWTQRLAAADAATRTGFTDALAGKLSADYEGALQGLIAKFDADKPTIATRQASQLTIDAIVPASPNILGGSADLTHSNLTHAKGTASVKPGAFGGSYLHYGIREFGMAAAMNGIALHGGFVPFGGTFLVFADYSRPAIRLAALMGVRVIHVMTHDSIGLGEDGPTHQPVEHVPSLRAIPNVLVFRPADAIETAQAWDCALKQTSRPSVLALSRQGLPALPRPNGATGNPVARGAYVVVDPGQRDVTLIATGSEVSLALDAASKLEAEGIKAAVVSAPCFELFADQDDAYRASVLGTAPRIGIEAARDTDWRRWIGDTGAFVGMTGFGASAPAPVLYQKFGITADAVVDAAKGAIARGKH

SEQ ID NO: 32343 - protein, 379 aa, Hordeum vulgare subsp. vulgare
MADHAADEQEPPVLLERAARATRGKRITKLVEEEVENDEAFWGQDALKEDEEDDNYQEEQDAGDVFDSDFDEDVRSLLLLRPICSIGEPQPDDDPEKEVSERLPIKKRLVFPGKTMKKMKAKKKKKKNKFIKLEDDDIDDKAPDKTTSSKQSDVPDEWESEKTIRKSTRTAVIVRQAEREAIRAEKQATAKPIKKRKEGEEKRMTQEEMLLEAAETEIMNMRNLERVLAREEEVKKKAVVQKAVYEGPTLRFHSRDGESRLEFINGASFGSELCTTSTPYPEKSVCVVTGLPAKYRDPKTGLPYATMAAFKIIRERFLKEEPDKKRPNMSNMGELFESVAGEHSTPKKKRIEGRSPISVDLRHGGRFRRIPALDVMDED

SEQ ID NO: 32344 - protein, 577 aa, Arabidopsis thaliana
MYRFASNLASKARIAQNARQVSSRMSWSRNYAAKEIKFGVEARALMLKGVEDLADAVKVTMGPKGRNVVIEQSWGAPKVTKDGVTVAKSIEFKDKIKNVGASLVKQVANATNDVAGDGTTCATVLTRAIFAEGCKSVAAGMNAMDLRRGISMAVDAVVTNLKSKARMISTSEEIAQVGTISANGEREIGELIAKAMEKVGKEGVITIQDGKTLFNELEVVEGMKLDRGYTSPYFITNQKTQKCELDDPLILIHEKKISSINSIVKVLELALKRQRPLLIVSEDVESDALATLILNKLRAGIKVCAIKAPGFGENRKANLQDLAALTGGEVITDELGMNLEKVDLSMLGTCKKVTVSKDDTVILDGAGDKKGIEERCEQIRSAIELSTSDYDKEKLQERLAKLSGGVAVLKIGGASEAEVGEKKDRVTDALNATKAAVEEGILPGGGVALLYAARELEKLPTANFDQKIGVQIIQNALKTPVYTIASNAGVEGAVIVGKLLEQDNPDLGYDAAKGEYVDMVKAGIIDPLKVIRTALVDAASVSSLLTTTEAVVVDLPKDESESGAAGAGMGGMGGMDY

SEQ ID NO: 32345 - protein, 539 aa, Wolbachia endosymbiont strain TRS of Brugia malayi
MKEAKFIFVTGGVVSSLGKGLVASSVGALLQAHGFKVRIRKLDPYLNIDPGTMSPTQHGEVFVTEDGAETDLDLGHYERFTGIKATKDDNITTGKMYHELLKKERRGDYLGKTVQVIPHVTDLIKSFIFNGTEGLDFVICEIGGTVGDIESQPFLEAIRQISYKLGKQRVILIHLTLVPYLAVAQELKTKPTQHSVRELNFVGLQPDIILCRSEKEISDNQRGKIANLCNVSLSNVISAPDVSHIYELPVLYNQCGLGTQVLEHFHLSKPKPSLVGWNQIVHSMRHPMQEVTVSIVGKYTEFPDTYKSLVEALSHSAISNRIEVKINWVNSREKSGKPINEKFMGDKLKNSHAILVPGGFGDDGIEGKMLAISYARTNNIPFFGICLGMQLAVIEFARNVIKFKDVHSEEFYTCKHPIIKLAGDKNVDLGGTMRLGAYKCNISPNSKMAGAYSDTIISERHRHRYIINLDYKDDLEKNGLICSGMSEDGTYIEAVELENHPWFIGVQFHPEFQSKPFSPHPLFVSFIKAVVNKVKKTEG

SEQ ID NO: 32346 - protein, 338 aa, Escherichia coli
MRVLVTGGSGYIGSHTCVQLLQNGHDVIILDNLCNSKRSVLPVIERLGGKHPTFVEGDIRNEALMTEILHDHAIDTVIHFAGLKAVGESVQKPLEYYDNNVNGTLRLISAMRAANVKNFIFSSAATVYGDQPKIPYVESFPTGTPQSPYGKSKLMVEQILTDLQKAQPDWSIALLRYFNPVGAHPSGDMGEDPQGIPNNLMPYIAQVAVGRRDSLAIFGNDYPTEDGTGVRDYIHVMDLADGHVVAMEKLANKPGVHIYNLGAGVGNSVLDVVNAFSKACGKPVNYHFAPRREGDLPAYWADASKADRELNWRVTRTLDEMAQDTWHWQSRHPQGYPD

SEQ ID NO: 32347 - protein, 338 aa, Escherichia coli
MRVLVTGGSGYIGSHTCVQLLQNGHDVIILDNLCNSKRSVLPVIERLGGKHPTFVEGDIRNEALMTEILHDHAIDTVIHFAGLKAVGESVQKPLEYYDNNVNGTLRLISAMRAANVKNFIFSSTATVYGDNPKIPYVESFPTGTPQSPYGKSKLMVEQILTDLQKAQPDWSIALLRYFNPVGAHPSGDMGEDPQGIPNNLMPYIAQVAVGRRDSLAIFGNDYPTEDGTGVRDYIHVMDLADGHVVAMEKLANKPGVHIYNLGAGVGNSVLDVVNAFSKACGKPVNYHFAPRREGDLPAYWADASKADRELNWRVTRTLDEMAQDTWHWQSRHPQGYPD

SEQ ID NO: 32348 - protein, 677 aa, Arabidopsis thaliana
  misc_feature (194)..(194): Xaa can be any naturally occurring amino acid
  unsure (1)..(677): unsure at all Xaa locations
MIPLSFAALGDIVDKKLDEDYVKEEVEMMIQVSLLSTQAAPGERPTMSEVEIFRNSCLCYINWFCNIISIIYSNSLLLRIDSGSSSISVVFLVFTLSRMEQRRMLTAARPRLSSTIRTITSHVAFSASRLLKPYVAYRLGLEDANQRKTENESTGGDKEIANSLLHCLKFHYLLLHFPSFSLQIHNRSTSLSLXRFEKMAKLVMLLVLCILPAIAMAARRGNIGKNTMVVQGSTYCDICKFGFETPESSYFIPGATVKLSCKDRKTMEEVYTDKAVSDKEGKYKFIVHDDHRDQMCDVLLVKSSDKTCSKISVGREKSRVILNHYSGIASQIRHANNMGFEKEVRMATSTTMSHQAIGSVVSQRPFKASQFLKEPLNNVPMKFRQKRFKIEATASQISVVDNTFLSPSPSKNKPHESKKKSNEAALILIRHGESLWNEKNLFTGCVDVPLTQKGVGEAIEAGKKISNIPVDLIFTSSLIRAQMTAMLAMTQHRRKKVPIILHNESVKAKTWSHVFSEETRKQSIPVIAAWQLNERMYGELQGLNKKETAERYGTQQVHEWRRSYEIPPPKGESLEMCAERAVAYFEDNIKPELASGNNVMIAAHGNSLRSIIMYLDDLTSQEVTTLDLSTGVPLLYIFKEGKFMKRGSPVGSTEAGVYAYTKRLAQYREKLDAAATI

SEQ ID NO: 32349 - protein, 153 aa, Oryza sativa
MSSGTSSGSSQGTRSSRSEDDLNLQAQMEKKRKRRKESNRESARRSRMRKQQHLDELTSQVNQLKNQNQQLSMALSLTTQNLVAVQAQNSVLQTQELELQSRLCALTDILMCMNNTSATPTPTIPATTTSACDIFGASSWNQPPIDLYQYQCF

SEQ ID NO: 32350 - protein, 430 aa, Ustilago maydis 521
MSWQQNPYPPPQGYGAPPPMPQGGYGGYSAPVGPPPPHTGGYGAPPQAPYGGGYAPPPPGPPQHHHHNHHHQQQHHPSPPQHGYGAPVGPPPTGGAGAYYLGVPVPPPPPNQPAPPPPGYNAAQDVERIRKATKGFGTDEGALIATLAPLDAWQVDALRHTFKASVGKDLLTVLEKETSGWFEAALRAKVLGPVLYDCWLIKRACQGAGTHEDLLNEVLLGRTNSEMHILKQAYQATYGKNMEKVVEEELSFKTKRMFVMAMQGVRQEDNIPVDPRAVEADVAALHGAARGAGTDEIAICGILIQRSSPHLAAVAQAYQQRHRRPLSKMIDAEFSGHMQDALRFIVDGAEHDGQGITRDARLLEDSMKGMGTKDERLIYRVARLHWNKPRFEGQIKPAYAQLFHKKGLKNRVEGETSGDYKRMLSAMIGS

SEQ ID NO: 32351 - protein, 558 aa, Bacillus cereus ATCC 10987
MKIRIRHIQRYRDIAMAFSRNGFGLIVKELGLQDLLSFPKRFNKVEQQEIHLKTKAERIRSFLEELGPTFIKIGQIASTRPDLIPADIIHELEQLQDKVSSFSYQEVKQIIEEELDCAIEDIFEEFQENPLAAASIGQVHYGLLKSGERVAIKIQRPNIEKIIETDLEILQHLAELAEIRLEWAARYQLRDIIEELSKSLRAELNYTIEGQNAEKVAHQFKYNPNICVPKVYWDYTTSKVLTMEYIEGIKLNELKKMDNQGLNRKVLAERVVQSILHQILIEGFFHGDPHPGNIIFLPGEVIVFMDFGMVGSLSPELKQHLASLVISMMRQNTRGVIKAITQMGLVPDDVNMKQLTADVEYLKQNYYDVPLSQLSLGKAVQELFNIAYKHHIQIPSDITLLGKTLLTIEGLVEKLDPELSILKVAEPFGRQLLKERYHPRKVTEDVLDYVIENGEILIQLPKQLKELTAVMQKGNMRIAITIPELNLFLTKLDRISNRLSFSIVLLSFSIIMVGLIIGSSLSRKSTLLWNLPAIEIGFGVAILMFLWLLYSIFKSGKF

SEQ ID NO: 32352 - protein, 535 aa, Streptococcus pneumoniae TIGR4
MSTKYIFVTGGVVSSIGKGIVAASLGRLLKNRGLKVTIQKFDPYINIDPGTMSPYQHGEVFVTDDGAETDLDLGHYERFIDINLNKYSNVTTGKIYSEVLRKERRGEYLGATVQVIPHITDALKEKIKRAALTTDSDVIITEVGGTVGDIESLPFLEALRQMKADVGADNVMYIHTTLLPYLKAAGEMKTKPTQHSVKELRGLGIQPNMLVIRTEEPAGQGIKNKLAQFCDVAPEAVIESLDVEHLYQIPLNLQAQGMDQIVCDHLKLDAPAADMTEWSAMVDKVMNLKKQVKISLVGKYVELQDAYISVVEALKHSGYVNDAEVKINWVNANDVTAENVAELLSDADGIIVPGGFGQRGTEGKIQAIRYARENDVPMLGVCLGMQLTCIEFARHVLGLEGANSAELAPETKYPIIDIMRDQIDIEDMGGTLRLGLYPSKLKRGSKAAAAYHNQEVVQRRHRHRYEFNNAFREQFEAAGFVFSGVSPDNRLVEIVEIPENKFFVACQYHPELSSRPNRPEELYTAFVTAAVENSN

SEQ ID NO: 32353 - protein, 474 aa, Streptomyces lividans
MLQAHTGYDLAIIGSGAGAFAAAIAARNKGRSVVMVERGTTGGTCVNVGCVPSKALLAAAEARHGAQAASRFPGIQATEPALDFPALISGKDTLVGQLRAEKYTDLAAEYGWQIVHGTATFADGPMLEVALNDGGTATVEAAHYLIATGSAPTAPHIDGLDQVDYLTSTTAMELQQLPEHLLILGGGYVGLEQAQLFARLGSRVTLAVRSRLASREEPEISAGIENIFREEGITVHTRTQLRAVRRDGEGILATLTGPDGDQQVRASHLLIATGRRSVTNGLGLERVGVKTGERGEVVVDEYLRTDNPRIWAAGDVTCHPDFVYVAAAHGTLVADNALDGAERTLDYTALPKVTFTSPAIASVGLTEAQLTEAGIAHQTRTLSLENVPRALVNRDTRGLVKLIAERGTGKLLAAHVLAEGAGDVITAATYAITAGLTVDQLARTWHPYLTMAEALKLAAQTFTSDVAKLSCCAG

SEQ ID NO: 32354 - protein, 686 aa, Bacillus circulans
APDTSSSNKQNFSTDVIYQIFTDRFSDGNPANNPTGAAFDGTCTNLRLYCGGDWQGIINKINDGYLTGMGVTAIWISQPVENIYSIINYSGVNNTAYHGYWARDFKKTNPAYGTIADFQNLIAAAHAKNIKVIIDFAPNHTSPASSDQPSFAENGRLYDNGTLLGGYTNDTQNLFHHNGGTDFSTTENGIYKNLYDLADLNHNNSTVDVYLKDAIKMWLDLGIDGIRMDVVKHMPFGWQKSFMAAVNNYKPVFTFGEWFLGVNEVSPENHKFANESGMSLLDFRFAQKVRQVFRDNTDNMYGLKAMLEGSAADYAQVDDQVTFIDNHDMERFHASNANRRKLEQALAFTLTSRGVPAIYYGTEQYMSGGTDPDNRARIPSFSTSTTAYQVIQKLAPLRKSNPAIAYGSTQERWINNDVLIYERKFGSNVAVVAVNRNLNAPASISGLVTSLPQGSYNDVLGGLLNGNTLSVGSGGAASNFTLAAGGTAVWQYTAATATPTIGHVGPMMAKPGVTITIDGRGFGSSKGTVYFGTTAVSGADITSWEDTQIKVKIPAVAGGNYNIKVANAAGTASNVYDNFEVLSGDQVSVRFVVNNATTALGQNVYLTGSVSELGNWDPAKAIGPMYNQVVYQYPNWYYDVSVPAGKTIEFKFLKKQGSTATWEGGSNHTFTAPSSGTGTINVNWQP

SEQ ID NO: 32355 - protein, 289 aa, Ashbya gossypii ATCC 10895
MDKLLHWSIANAQGDKEAAAKAGAPDPKLLQQLFGGGPDEPALMRDAMAVIMNPEATVDNKLVAFDNFEMLIENLDNANNIENMRLWAPLISILESEEEQLRECALSVVGTAVQNNEKSQSNFLKHDGAMKKIIELARKDSESEQVRTKAFYALSNIVRHNKDASALFVDNGGLEIMAPVLKHQNTGEKMKIRALALLTSVLTSLSADEKFSDRIREDKILEASLEHLAPSANPYLIDRVLNLLVLMKGSGAKFDTDELSKIRKSFASLYPVKDQLNEDDYNAVKEMLG

SEQ ID NO: 32356 - protein, 234 aa, Limonium latifolium
ETLLKAWPFLHTAILDASTEPFARVNGEPAYQYYGKNDELNKNMQYAMSGVSVPYMKALLGSGYDGFEGVKTLVDVGGSSGDCLRMIINKYKDIPKAINFDLPEVVAKAPKIPGITHVGGNMFESVPSGDAIFVKWVLTCFTDEEVITLMRNCNKALPVGGKLICSEPTLPENSDESHRTRALLVADIFIMTTYRAKGKHRTEEEYRQLGLLAGFPKFRVIHVDYFFPVVEFQK

SEQ ID NO: 32357 - protein, 206 aa, Limonium latifolium
RAYQYYGKNDELNKNMQYAMSGVSVPYMKALLGSGYDGFEGVKTLVDVGGSSGDCLRMIINKYKDIPKAINFDLPEVVAKAPKIPGITHVGGNMFESVPSGDAIFVKWVLTCFTDEEVITLMRNCNKALPVGGKLICSEPTLPENSDESHRTRALLVADIFIMTTYRAKGKHRTEEEYRQLGLLAGFPKFRVIHVDYFFPVVEFQK

SEQ ID NO: 32358 - protein, 329 aa, Bordetella pertussis Tohama I
MASNIVKAVRIEQHGGPEVLQVVDVEVPPPAANEVTIRQHAAGLNFIDIYFRTGLYPHPLPHGLGFEGAGVVEAVGADVRHLKKGDRVAYGQSPLGAYAQARNVPAAQVVKLPKGIGFDEAAALMLKGLTVQYLFRQTYRLQGNETILFHAAAGGVGLIACQWAKALGVKLIGTVSSPEKAELARAHGAWATIDYSRENVVERLLELTGGKKVPVVYDGVGKDTWEISLDCIEPRGLMVSFGNASGPVAGVNLGILNQKGSLYVTRPSLGVHVNTHEKLAAAADELFGLVLKKKIKVRIDQRYSLAQAGDAQTALAGRKTTGATVLTLD

SEQ ID NO: 32359 - protein, 467 aa, Triticum aestivum
AESSCAALVVASISSFGINHQFTPMMYPLLISSVGIIACLITTLFATDFFEVKEVDQIEPALKKQLIISTAVMTAGIALVSWLGLPYTFTIFNFGAQKTVHSWQLFLCVAVGLWAGLVIGFITEYYTSNAYSPVQDVADSCRTGAATNVIFGLALGYKSVIIPIFAIAFSIFLSFSLAAMYGVAVAALGMLSTIATGLAIDAYGPISDNAGGIAEMAGMSHRIRERTDALDAAGNTTAAIGKGFAIGSAALVSLALFGAFVSRAGITTVDVLTPNVFIGLLVGAMLPYWFSAMTMKSVGSAALKMVEEVRRQFNTIPGLMEGTAKPDYATCVKISTDASIKEMIPPGALVMLTPLIVGTFFGVETLSGVLAGALVSGVQIAISASNTGGAWDNAKKYIEAGASEHAKSLGPKGSDCHKAAVIGDTIGDPLKDTSGPSLNILIKLMAVESLVFAPFFATYGGILFKYL

SEQ ID NO: 32360 - protein, 188 aa, Limonium latifolium
HGTTRSRHGSSSSSSPTANGFEGVKTLVDVGGSSGDCLRMIINKYKDIPKAINFDLPEVVAKAPKIPGITHVGGNMFESVPSGDAIFVKWVLTCFTDEEVITLMRNCNKALPVGGKLICSEPTLPENSDESHRTRALLVADIFIMTTYRAKGKHRTEEEYRQLGLLAGFPKFRVIHVDYFFPVVEFQK

SEQ ID NO: 32361 - protein, 513 aa, Camellia sinensis
MASTLGCSATDLVPHLTGVNNATAVADFICGRLDAVSTKLSDTTYAVDTTYLLFSAYLVFAMQLGFAMLCAGSVRAKNTMNIMLTNVLDAAAGGLSYYLFGFAFAFGSGSRSNAFIGHYSFALTGVPSATHDYSFFLYQWAFAIAAAGITSGSIAERTQFVAYLIYSSFLTAFVYPIVSHWVWSGDGWLSASRTSGALLFSSGAIDFAGSGVVHMVGGIAGLWGALIEGPRIGRFDRSGRSVALRGHSASLVVLGSFLLWFGWYGFNPGSFLTILKSYGTAGTYYGQWSAVGRTAVTTTLAGCTAALTTLFGKRLLDGHWNVVDVCNGLLGGFAAITSGCSVVEPWAAIVCGFVSAWVLIGCNKVAEKLKYDDPLEAAQLHGGCGSWGILFTGLFAKKKYVDEVYSAGRPYGLFMGGGGKLLAAQLIEILVIFGWVSVTMGPLFYGLKKLKLLRISREDEMAGMDLTRHGGFAYIYRDEDDLANRPGFMMRKVEPQNSSPTPDHNSSSPAEAV

SEQ ID NO: 32362 - protein, 608 aa, Arabidopsis thaliana
METNSSGEDLVIKTRKPYTITKQRERWTEEEHNRFIEALRLYGRAWQKIEEHVATKTAVQIRSHAQKFFSKVEKEAEAKGVAMGQALDIAIPPPRPKRKPNNPYPRKTGSGTILMSKTGVNDGKESLGSEKVSHPEMANEDRQQSKPEEKTLQEDNCSDCFTHQYLSAASSMNKSCIETSNASTFREFLPSREEGSQNNRVRKESNSDLNAKSLENGNEQGPQTYPMHIPVLVPLGSSITSSLSHPPSEPDSHPHTVAGDYQSFPNHIMSTLLQTPALYTAATFASSFWPPDSSGGSPVPGNSPPNLAAMAAATVAAASAWWAANGLLPLCAPLSSGGFTSHPPSTFGPSCDVEYTKASTLQHGSVQSREQEHSEASKARSSLDSEDVENKSKPVCHEQPSATPESDAKGSDGAGDRKQVDRSSCGSNTPSSSDDVEADASERQEDGTNGEVKETNEDTNKPQTSESNARRSRISSNITDPWKSVSDEGRIAFQALFSREVLPQSFTYREEHREEEQQQQEQRYPMALDLNFTAQLTPVDDQEEKRNTGFLGIGLDASKLMSRGRTGFKPYKRCSMEAKESRILNNNPIIHVEQKDPKRMRLETQAST

SEQ ID NO: 32363 - protein, 375 aa, Limonium latifolium
MANHSSAAAMVVDETSEARNNARLKIIELANLISVPMSLTAIVRLKVPEAIWSNGSNTPVSAAEILSRLPDAPATADAENLQRLLRVLTSFGVFSEHLDTTSSSSSSTSERRYCLTEVGQTLVSFDESCPSHGAYVLQHHQETLLKAWPFLHTAILDASTEPFARVNGEPAYQYYGKNDELNKNMQYAMSGVSVPYMKALLGSGYDGFEGVKTLVDVGGSSGDCLRMIINKYKDIPKAINFDLPEVVAKAPKIPGITHVGGNMFESVPSGDAIFVKWVLTCFTDEEVITLMRNCNKALPVGGKLICSEPTLPENSDESHRTRALLVADIFIMTTYRAKGKHRTEEEYRQLGLLAGFPKFRVIHVDYFFPVVEFQK

SEQ ID NO: 32364 - protein, 432 aa, Carboxydothermus hydrogenoformans Z-2901
MPLKIDRSIEAFSEAKKVIPGGVNSPVRAFKSVGLNPVFIERGEGSKIYDIDGNCYIDYVGSWGPLILGHRHPKVEEALANCLKKGTSFGAPTLLETEMAEIIVNAFPAMDMVRMVNSGTEATMSAIRLARGFTGRNKIVKFEGCYHGHADSLLIKAGSGALTLGVPTSPGVPANIANNTITAQFNDLALLEEIFAQEGNDIAAVILEPVAGNMGVVPPKPGFLEGVRELTRKYGALLIMDEVMTGFRVHWGGAQVLYNVEPDITTLGKIIGGGLPVGAYGGRREIMEMVAPAGPVYQAGTLSGNPLAMTAGIATLTVLKEEGVYEQLEEKSSYLESGLKEAARAAGLKLWFNRVGSMLCTFFTSEEVVDYKTACTSDTQKFAVFFKTLLENGIYIAPSQFEAMFVSLAHSKDDLDKTIEASYKAFKAAAEN

SEQ ID NO: 32365 - protein, 447 aa, Mycobacterium tuberculosis CDC1551
MDDGSVSDIKRGRAARNAKLASIPVGFAGRAALGLGKRLTGKSKDEVTAELMEKAANQLFTVLGELKGGAMKVGQALSVMEAAIPDEFGEPYREALTKLQKDAPPLPASKVHRVLDGQLGTKWRERFSSFNDTPVASASIGQVHKAIWSDGREVAVKIQYPGADEALRADLKTMQRMVGVLKQLSPGADVQGMVDELVERTEMELDYRLEAANQRAFAKAYHDHPRFQVPHVVASAPKVVIQEWIEGVPMAEIIRHGTTEQRDLIGTLLAELTFDAPRRLGLMHGDAHPGNFMLLPDGRMGIIDFGAVAPMPGGFPIELGMTIRLAREKNYDLLLPTMEKAGLIQRGRQVSVREIDEMLRQYVEPIQVEVFHYTRKWLQKMTVSQIDRSVAQIRTARQMDLPAKLAIPMRVIASVGAILCQLDAHVPIKALSEELIPGFAEPDAIVV

SEQ ID NO: 32366 - protein, 338 aa, Escherichia coli
MRVLVTGGSGYIGSHTCVQLLQNGHDVIILDNLCNSKRSVLPVIERLGGKHPTFVEGDIRNEALMTEILHDHAIDTVIHFAGLKAVGESVQKPLEYYDNNVNGTLRLISAMRAANVKNFIFSSVATVYGDNPKIPYVESFPTGTPQSPYGKSKLMVEQILTDLQKAQPDWSIALLRYFNPVGAHPSGDMGEDPQGIPNNLMPYIAQVAVGRRDSLAIFGNDYPTEDGTGVRDYIHVMDLADGHVVAMEKLANKPGVHIYNLGAGVGNSVLDVVNAFSKACGKPVNYHFAPRREGDLPAYWADASKADRELNWRVTRTLDEMAQDTWHWQSRHPQGYPD

SEQ ID NO: 32367 - protein, 461 aa, Oryza sativa
MVNGEAEAECTRASLLGRYEIGRTLGEGNFGKVKYARHLATGAHFAIKILDRNKILSLRFDDQIRREIGTLKLLKHPNVVRLHEVAASKTKIYMVLEYVNGGELFDKIAVKGKLSEHEGRRLFQQLIDAVSYCHDKGVYHRDLKPENVLVDRRGNIKISDFGLSALPQHLGNDGLLHTTCGSPNYIAPEVLQNRGYDGSLSDIWSCGVILYVMLVGYLPFDDRNLVVLYQKIFKGDTQIPKWLSPSARDLLRRILEPNPMKRINIAGIKEHEWFQKDYTPVVPYDDDDDNYLDSVLPIKEQIDEAKQEKPTHINAFQLIGMASALDLSGFFEEEDASQRKIRFTSTHSPKDLFDKIENVVTEMGFQVQRGNSKLKVMKNGKGSKNLRNPSSFLVCTEVVELGPSLYVVELKKSHGDPILYRQLCERLSDDLGVCKTEQIQRTESLEDDLESFDSGSSLPGF

SEQ ID NO: 32368 - protein, 338 aa, Escherichia coli
MRVLVTGGSGYIGSHTCVQLLQNGHDVIILDNLCNSKRSVLPVIERLGGKHPTFVEGDIRNEALMTEILHDHAIDTVIHFAGLKAVGESVQKPLEYYDNNVNGTLRLISAMRAANVKNFIFSSSATVYGDQPKIPYVESFPTGTPQSPFGKSKLMVEQILTDLQKAQPDWSIALLRYFNPVGAHPSGDMGEDPQGIPNNLMPYIAQVAVGRRDSLAIFGNDYPTEDGTGVRDYIHVMDLADGHVVAMEKLANKPGVHIYNLGAGVGNSVLDVVNAFSKACGKPVNYHFAPRREGDLPAYWADASKADRELNWRVTRTLDEMAQDTWHWQSRHPQGYPD

SEQ ID NO: 32369 - protein, 141 aa, Chromobacterium violaceum ATCC 12472
MSMLPARHSLFDEFFRDFTPGFLVKPLHGDALPSQIKMDVKETGEAYQVEAELPGVGKEDIHVEIDGALVTIKAEIKQFDQQGKDERSLRSERYYGLVSRSFQLPQEIDRDAAGAKYENGVLSLTLPKRRNSGVGQRLRIE

SEQ ID NO: 32370 - protein, 354 aa, Carboxydothermus hydrogenoformans Z-2901
MKALILSGGQGTRLRPLTYSIAKQLVPVANKPILHFVIEDIINAGITDIGVIIAPETGEEIKKSITNAGFPAKFTFILQEKPLGLAHAVKVAKDYLEDDDFIMYLGDNLINSGIKEFVEEYKENRYDATILLKEVQDPTRFGVAVVDENFKVQRLIEKPKEPPSNLALVGIYIFSPKIFSAIDRIKPSWRGELEITDAIQELINQGGMVKAHKITGWWLDTGKKDDLLEANRVVLDDLIQRDIRGKIDEQTKINGRVVIEGGAEIENSIIRGPAVIGKNTKVKNSFIGSYTSIGNNCLVENSAIEFSVILDHSEIIGVERLDESLIGRKTRVIKDGSVNKAVKLMIGDDAEVRL

SEQ ID NO: 32371 - protein, 233 aa, Clostridium tetani E88
MNKNTIIVVDDEKEIRDLICIYLENEGYRVIKAENGIKALELLEKEKVDLIILDIMMPNMDGIEACTKIREEKNMPIIMLSAKTEDMDKIWGLTAGADDYMTKPFNPLELIARVKSQLRRYKKFNVQNGYINDDIIEIDELTINTATHEVQVGEKKVRLTPREFDILELLARNKGIVFSIEKIYERVWKEEFFKSDNTVMVHIRKLREKIEENPRKPKYVKTVWGVGYKVEKL

SEQ ID NO: 32372 - protein, 701 aa, Triticum aestivum
  misc_feature (646)..(646): Xaa can be any naturally occurring amino acid
  unsure (1)..(701): unsure at all Xaa locations
MTVMELKALPLGFRFHPTDEELVRHYLKGKITGQIKNEVEVIPEIDVCKCEPWDLPDKALIRSEDPEWFFFAPKDRKYPNGSRSNRATEAGYWKATGKDRVIKSKGEKKKQHMIGMKKTLVFHRGRAPKGERTGWIMHEYRTTEPEFESGEQGGYVLYRLFQKQLEKTERSIPEEMDRSGYSPTPSRSTPDNMEANEEAITLINKESPESGLHGCPIELPGTIDTPGTPVTRWLADRNGNSGIDEANVLGMPSHGNVDESPKADMSVGSLAHLIDSQTKNLGSHEFATVSAPMLSHDDLDKLLLQLPHNSVEDFLNETIADPDEHSSTACNVQYDADTGFMQAQGELLYDGPNWFGNFLSDDTNPQQSGLYENAALLPYGTNPDVLSMDSGDESLQDLFNSMDDSSGQNDVWSNGFGFNPMHQQLQSTVHPNYIFSQQGIAPRRLRLLDSLSDVNVESRECMTRDEHEGEESDIVTSKCTSESVESSADVDDSESTGVTIMTRRRALTRSVPSDCDDAQSTGITIMARRPAPSSNMPSDEADAEATGIDIMSRHTAPSSSTDSSFNTEQGTAVRRLRLQSNLDAGSCSSVDGSSSCIIEHGSENEGLEAEIEEHVDTNFPDDAGNSHADEQMYMPDHEANSGMRLXRKTAEKSDKESKQECGLQSHVRAPRKRGGFAARMILPVLSVALLVLVSVGIYGWA

SEQ ID NO: 32373 - protein, 378 aa, Medicago sativa
MAIHHHHQQHTCSLFDALYCDEEKWEDDEGEVVDEGEQSDVTTTNYDILDSTSLLPLLLLEQNLFNEDEELNTLFSKEKIQQETYYEDLKNVINFDSLSQPRREAVEWMLKVNAHYGFSALTATLAVNYLDRFLLSFHFQKEKPWMIQLVAVTCISLAAKVEETQVPLLLDLQVQDTKYVFEAKTIQRMELLILSTLKWKMHPVTTHSFLDHIIRRLGLKTNLHWEFLRRCENLLLSVLLDSRFVGCVPSVLATATMLHVIDQIEQSDDHGVDYKNQLLNVLKTSKEKVDECYNAILHLTNANNYGHKRKYEEIPGSPSGVIDAVFSSDGSNDSWTVGASSYSTSEPVFKKTKNQGQNMNLSPINRVIVGILATATSP

SEQ ID NO: 32374 - protein, 222 aa, Medicago sativa
MAIHHHHHNHQQLQQHTSSLFDALYCDEEEKWEDDEGEVVDEGEQSDVTTTNYDILDSTSLLPLLLLEQNLFNEDEELNTLFSKEITQQETYYEDLKNVINFDSLSQPRREAVEWMLKVNAHYGFSALTATLAVNYLDRFLLSFHFQKEKPWMIQLVAVTCISLAAKVEETQVPLLLDLQVQDTKYVFEAKTIQRMELLILSTLKWKMHPVTTHSFLDPGNS

SEQ ID NO: 32375 - protein, 354 aa, Neisseria gonorrhoeae FA 1090
MKAARFYNKGDIRIEDIPEPTVAPGTVGINVAWCGICGTDLHEFMEGPIFIPPCGHPHPISGESAPVTMGHEFSGVVYAVGEGVDDIKVGQHVVVEPYIIRDDVPTGEGSNYHLSKDMNFIGLGGCGGGLSEKIAVKRRWVHPISDKIPLDQAALIEPLSVGHHAYVRSGAKAGDVALVGGAGPIGLLLAAVLKAKGIKVIITELSKARKDKARESGVADYILDPSEVDVVEEVKKLTNGEGVDVAFECTSVNKVLDTLVEACKPAANLVIVSIWSHPATVNVHSVVMKELDVRGTIAYCNDHAETIKLVEEGKINLEPFITQRIKLDKLVSEGFERLIHNNESAVKIIVNPNL

SEQ ID NO: 32376 - protein, 372 aa, Neisseria gonorrhoeae FA 1090
MPLTRLFLKLYALLRLFLGKNAQTAWIFHPACTGHDPGANHPDSPDRILCIEQALRRAGIWQHLQTVEAEEISDTRLALVRSSKYLNRLESCLPEDGKICRLDDDTVISKNSLSAARFSAGSAVQAVDMVMKRKAWHAFCAARPPEHHAKSGKAGGFCLLNNVAAGVMHAIAEYRLKRIAVIDFDVHYGDGTAEIFKDDPRILFFNLFETDLFPFPENNGMPDGGNMVHLPLPSGTGSRTFREAVRRQWLPRLAAFKPELVLLSAGFDAHRLDESGRLNLHEADFAWLTHKIIQTASSCPGKIVSVLEGGYTLEPLAQSAAEHIRVLAGLGKSDAATAYQKTLNPTKKPFAKPKTGQVRQPTQSDRYDINAV

SEQ ID NO: 32377 - protein, 319 aa, Rhodopseudomonas palustris CGA009
MAHPHDVSVCGTYILDILGVPVTEIPAGGGRALIDEIRLTVAGTAGGTVVPCARLGLKALAVGAVGTDEKADWVLDAMVREGIDISVMEKIAGAPTSATILPIRPDGSRPVLHARGASARWKISPEAQKVACGSKVLHLGGVGSLLAMDGEPTVSLLRDAKAAGCITTVDLIQARGETLPLLEPLMPYTDFFMPSIDETHALIGSGDPATCARYFIGKGAGACAISLGEHGSFVMTRDGRQLTVPAFDITVRDTSGCGDSYTGGFIAGLVRDWDLQDCARLATATAAIVATGLGSGANLVSFEETVKAMNTLPVRGARA

SEQ ID NO: 32378 - protein, 493 aa, Rhodopseudomonas palustris CGA009
MNLVVVSNRVARASGNEPMTGGLAAALLPVVEKSGAIWVGSSGRVRDGVHREPFAEIEPLGAGALAMLDLPAAHYGGYYEGFANSALWPALHSRPDLIRVSHDDYRSYREVNAFMARALLRFRKPDTAFWIQDYHFLALGAELRQLGVQHPIGFFLHTPWPSRATIGCVPHHRELIEAMLTYDLIGFQTEEDRRNFLGYVESELGLKIDGSEVSTTHGTARCEVFAISIDADAFAQQAQKAMTHPEVSRLRKSLNGEKLVIGVDRLDYSKGLINRVKAFDKMLTDRPALQRVVSLLQIATPSRGTIEAYGNLQGDLAKLVSDVNGRLGEVDWTPIRYLNKGYRQSVLAGLYRSAHVGLVTPLQDGMNLVAKEYVAAQNPLDPGVLVLSKFAGAANELDTALQVNPHDIEGMSRVIATALAMPLTERRLRWEAMMAKLRDNSIRRWFADFLAALDQAHTANRSVGPIPLAPPPSIMMAGGRSRLAPRAAGAVLQ

SEQ ID NO: 32379 - protein, 527 aa, Zea mays
MATCVLLMLREVSPWALASVVASVSLLWLVVWTLEWAWWTPWRLERALRVQGLKGTRYRLFTGDLRETARANREARKKPLPLGSHDIAPRVQPMHHSTIKEYGKLSFTWFGPTPRVMIPDPELVKEVLSNKFGHFGKPRSNRIGRLLANGLVNHDGEKWAKHRRILNPAFHHEKIKGMMPVFSTCCIEMITRWDNSMPSEGSSEIDVWPEFQNLTGDVISRTAFGSNYQEGRRIFELQGELAERLIQSVQTIFIPGYWFLPTKNNRRMRAIDVEIRKILREIIGKREKDTKNRETNNDDLLGLLLESNTRQSNGNASLGLTTEDVIEECKLFYFAGMETTSVLLTWTLIVLSMHPEWQERAREEVLSHFGRTTPDYDSLSRLKTITMILHEVLRLYPPATFLTRRTYKEMELGGIKYPAGVDLLLPVIFIHHDPDIWGKDASEFNPERFANGISSATRHQAAFFPFGGGPRICIGQSFALLEAKMTLCTILQRFSFELSPSYTHAPYTVITLHPQHGAQIRLKKLSP

SEQ ID NO: 32380 - protein, 218 aa, Pinus taeda
MSASVGGMEKSGTSAQQENNRSLDFAETELKLGLPGVATGERQRICGKRSFSEARESRKFSIPHEEAHKFHEPNLGTEKQMVRPANDPPKMGPPPPRKAQIVGWPPVKDFRKVRTIAASSSLYVKVSMDGAPYLRKVDLKMYSTYHDLSSALENMFGCLITMGKSGSHALNESNLFDVRNGSEYVPTYEDKDGDWMLVGDVPWDMFVDSCQRMRIMKA

SEQ ID NO: 32381 - protein, 334 aa, Triticum aestivum
AKDTSALSIDRPCPVRGWRRTPVTTDRAASVDHPSGSGSAPPPAPGHRRDSRGPPPSPRPPPPPPPPPAQQRGDHHGHGEPEVVGEEAAGVGVATTSYQHQQYELAVMVAALTHVISSTRPGPAAAAGATAPGQQAVTRQHSAPLAVAATSSSSTASEQQQQRPRYRGVRQRPWGKWAAEIRDPVKAARVWLGTFDTAEDAARAYDAAALRFKGAKAKLNFPGAGGAPAPPRHAVGQLLAPGGGASPSMRQQQRPVVVAFRPQINSLAAVAREEFPDLHRYAHILQSGDVDLRAVAAGGNTPGQSSSSTPAHDSRSPPRPDDRGYGERSAGPGC

SEQ ID NO: 32382 - protein, 302 aa, Pinus taeda
MERFANDGDEHSLKETELRLGLPGVCESDTGLGQTRNGKRAFSEVMDSTKASSFNDNKWIFPSVKCQPPTSAITETAEACKGSQPGLFSATPGQKIMMQGGCGAPQSWAGDNGLSKSTAPKDELHPKTPRGGPTEKTNAASQSQAATDPAMAPAPKAQVVGWPPIRSFRKNTLAANSKPNDEGSSSNALYVKVSMDGAPYLRKVDLKMYSTYHELSSALEKMFSCFTMGQCGSPGLSESKLIDLLNGSEYVPTYEDKDGDWMLVGDVPWEMFVDSCKRLRITKASEAIGLAPRAMEKSRSKN

SEQ ID NO: 32383 - protein, 252 aa, Pinus taeda
MSCSVGNMAMVLEKSGGNAQHEKRDSLDFAETELKLGLPGVAAGARQRICGKRSFSEAMESRNYTIPDEDITNTSTHEDLDKFKGPIVKEKQMALSANDPPRMGPPPPSKAQVVGWPPVRDFRKVRTVAASNSLYVKVSMDGAPYLRKVDLKLYSTYHELTSALEKMFSCLIIMGKCGSLALNESNLMDLPNGSEYVPTYEDKDGDWMLIGDVPWQMFVDSCQRMRIMTASEAIGLAPRTMENCKNRNRVHP

SEQ ID NO: 32384 - protein, 256 aa, Bifidobacterium longum NCC2705
MGARGCRLNRMTYKLVLLRHGQSAWNKTNQFTGWVDVPLTEQGEAEAKRGGELLKEKNVLPDIVFTSLLRRAINTANIALDAADRLWIPVQRDWRLNERHYGALQGKNKTEIREEYGDEKFMLWRRSYATPPPEIDPNDQYAQNNDPRYAGDPVPEAECLANVVERVKPYFESAIEPELKAGKTVLIAAHGNSLRAIVKMLDNLSEEEIAKVNIPTAIPLLYELDENFKPIKPRGEYLDPEAAAAGAAAVAAQGQK

SEQ ID NO: 32385 - protein, 340 aa, Capsicum annuum
MGHHCCSKQKVKRGLWSPEEDEKLIKHITTHGHSCWSSVPKLAGLQRCGKSCRLRWINYLRPDLKRGCFSEQEERIIIDVHRILGNKWAQIAKHLPGRTDNEVKNFWNSCIKKKLISQGFDPNTHNLLSRAAAAATPPHRNNKKKTNNNHTTSSVFTIETSLSPSSTKELVSMDMIKASLAALSPFPHTNSSTTVLTMPQFQTSWSHLYESACNYYNHVPIKTNIVYQNHSTSTGTFGIINENCMWGVTGFEPHHEFGPSNNIGHEEMQQGAQVQLQEENCLEEVYKVNDLHEFNKHGRIAENVTFDDSSDFDFEFVDSELIPCGIYTNVNSIDQLAWDC

SEQ ID NO: 32386 - protein, 526 aa, Arabidopsis thaliana
MGQALDIAIPPPRPKRKPNNPYPRKTGSGTILMSKTGVNDGKESLGSEKVSHPEMANEDRQQSKPEEKTLQEDNCSDCFTHQYLSAASSMNKSCIETSNASTFREFLPSREEGSQNNRVRKESNSDLNAKSLENGNEQGPQTYPMHIPVLVPLGSSITSSLSHPPSEPDSHPHTVAGDYQSFPNHIMSTLLQTPALYTAATFASSFWPPDSSGGSPVPGNSPPNLAAMAAATVAAASAWWAANGLLPLCAPLSSGGFTSHPPSTFGPSCDVEYTKASTLQHGSVQSREQEHSEASKARSSLDSEDVENKSKPVCHEQPSATPESDAKGSDGAGDRKQVDRSSCGSNTPSSSDDVEADASERQEDGTNGEVKETNEDTNKPQTSESNARRSRISSNITDPWKSVSDEGRIAFQALFSREVLPQSFTYREEHREEEQQQQEQRYPMALDLNFTAQLTPVDDQEEKRNTGFLGIGLDASKLMSRGRTGFKPYKRCSMEAKESRILNNNPIIHVEQKDPKRMRLETQAST

SEQ ID NO: 32387 - protein, 577 aa, Arabidopsis thaliana
MTTEQALLSMEALPLGFRFRPTDEELINHYLRLKINGRDLEVRVIPEIDVCKWEPWDLPGLSVIKTDDQEWFFFCPRDRKYPSGHRSNRATDIGYWKATGKDRTIKSKKMIIGMKKTLVFYRGRAPRGERTNWIMHEYRATDKELDGTGPGQNPYVLCRLFHKPSDSCDPAHCEEIEKVNFTPTTTTRCSPDDTSSEMVQETATSGVHALDRSDDTERCLSDKGNNDVKPDVSVINNTSVNHAETSRAKDRNLGKTLVEENPLLRDVPTLHGPILSEKSYYPGQSSIGFATSHMDSMYSSDFGNCDYGLHFQDGASEQDASLTDVLDEVFHNHNESSNDRKDFVLPNMMHWPGNTRLLSTEYPFLKDSVAFVDGSAEVSGSQQFVPDILASRWVSEQNVDSKEAVEILSSTGSSRTLTPLHNNVFGQYASSSYAAIDPFNYNVNQPEQSSFEQSHVDRNISPSNIFEFKARSRENQRDLDSVVDQGTAPRRIRLQIEQPLTPVTNKKERDADNYEEEDEVQSAMSKVVEEEPANLSAQGTAQRRIRLQTRLRKPLITLNNTKRNSNGREGEASHRKC

SEQ ID NO: 32388 - protein, 231 aa, Pinus taeda
MSCSVGGMEKSSTGAQQENKCSLDIFAETELRLGLPGVAAGERQRICGKRSFSEAMESRNFSIPQEEAHKFHEPNLGTEKQMVRPANDPPKMGPTPPKAQIVGWPPVKDFRKVRTIAASSSLYVKVSMDGAPYLRKVDLKMYSTYHDLSSALENMFGCLITMGKCGSSGIKESNLMDVVNGSEYVATYEDKDGDWMLVGDVPWQMFVDSCQRVRIMKASEAIGLAPRAMEK

SEQ ID NO: 32389 - protein, 400 aa, Ralstonia metallidurans CH34
MSSAEAFYASIRAELDSIRAAGLYKRERVIATPQGAKIRTADGREVINLCANNYLGLSSHPKVIEAAHEALRTHGYGLSSVRFICGTQDLHKELEGRLARFLGTEDTILYGSAFDANGGLFETILGPEDAVISDELNHASIIDGIRLSKARRLRYRHNDLDDLRAQLRQADADGARFKLVFSDGVFSMDGTVARLDEIRKICDEHGALLGIDECHATGFMGARGRGTHEARGVFGKIDIITGTLGKALGGASGGFTSGRKEVVELLRQRSRPYLFSNTVAPAIVGGSIAVLDILEGSTELRDRLEQNTQFFREGIAKLGFDIKPGDHPIVPIMVYDAEKAQQLADRLLELGVYVVGFFYPVVPKGQARIRVQMSAVHDAVTLQSALDAFGQAGRELGLIR

SEQ ID NO: 32390 - protein, 380 aa, Glycine max
MQQSHINATPYLWCEQGCPNLQLASFEFWSVICCFGERVDMDERYETLKELGSGNFGVARLAKDKETGELVAIKYIERGKKIDANVQREIVNHRSLKHPNIIRSFLQVFLTPTHLAIVLEYAAGGELFERICNAGRLSEDEARFFFQQLISGVSYCHSMQICHRDLKLENTLLDGNPAPRLKICDFGFSKSALLHSQPKSTVGTPAYIAPEVLSRKEYDGKVADVWSCGVTLYVMLVGAYPFEDPEDPKNFRKSIGRIMSVQYAIPDYVRVSKECRHLISRIFVANPAKRINISEIKQHLWFRKNLPREIIEAERRGYEETQKDQPSQSVEEIMQIIQEARTKIHTGEQAGTGTSDVVRGDEANEEVDINDHFAKYLTLD

SEQ ID NO: 32391 - protein, 229 aa, Candida albicans SC5314
MVKSNVESAWETMEDTFSEIQNKFHQIYKPIDTGKPDEDDETTKKESLDITDDSTLSVSPITQLLYLARSKFYDLTPLDNQKSPFPFKNLRGKVVLIVNVASRCGFSFQYNGLEQLNKRFANDDFVLLGVPCNQFLWQEPGTNDQIVTKCKKKYDVSFQILDKINVNGEQADPVYKFLKAQKEGLWGTNRVKWNFEKFLIDKNGRVVERYSTFTRPVAIIPKIEQLLES

SEQ ID NO: 32392 - protein, 344 aa, Glycine max
TRNSEEVRCCRAGIFVSHSLSCSLNNNDALTDINTSFRCYLIHQMQQIHSMPGGRFFSGSGSADRRLRPHHQNQQALKCPRCDSLNTKFCYYNNYNLSQPRHFCKNCRRYWTKGGVLRNVPVGGGCRKSKRSSKPNKITPSETASPPPPPHPDHNNNSNSHSSSESSSLTAAAATTTEAVSAPETLNSDSNNNNNMQESKLLIPALETNNSLEQGTGDCGGIFSEIGPFTSLITTTTSTNEPLGSGFGFGNSTLPDASSFQWHYQKVSSNNEELKLPENSFLDHTVDLSGMHSKTSHGGGFGSLDWQGGADQGLFDLPNTVDHAYWSHTHWSDHDNSSSLFHLP

SEQ ID NO: 32393 - protein, 400 aa, Candida albicans SC5314
MSFRTTSMRMARLATAKATLSKRTFSLLANATTRYTAASSAAKAMTPITSIRGVKTINFGGTEEVVHERADWPKERLLDYFKNDTFALIGYGSQGYGQGLNLRDNGLNVIIGVRKGSSWEAAVEDGWVPGENLFEVDEAISRGTIIMDLLSDAAQSETWFHIKPQLTEGKTLYFSHGFSPVFKDLTHVEPPSNIDVILAAPKGSGRTVRSLFKEGRGINSSYAVWNDVTGKAEEKAIAMAIAIGSGYVYKTTFEREVNSDLYGERGCLMGGIHGMFLAQYEVLRENGHTPSEAFNETVEEATQSLYPLIGKYGMDYMYDACSTTARRGALDWYPRFKDALKPVFEELYESVKNGSETKRSLEFNSRSDYKERLEEELQTIRNMEIWRVGKEVRKLRPENQ

SEQ ID NO: 32394 - protein, 270 aa, Fusobacterium nucleatum subsp. nucleatum ATCC 25586
MKDISFLKEKAKEIRKSIVSMIAEAKSGHPGGSLSATDILTALYFSEMNVDPTNPKMEGRDRFVLSKGHAAPAIYATLAEKGYFSKDELMTLRKFGSRLQGHPDMKKLSGIEISTGSLGQGLSVANGMALNAKIFDENYRTYVVLGDGEIQEGQIWEAAMTAAHYKLDNLCAFLDSNNLQIDGNVTEIKGVEPLDKKWEAFGWNVIKIDGHDFEQILSALEKARECKGKPTMIIAKTIKGKGVSFMENVCGFHGVAPTVEELERALAELA

SEQ ID NO: 32395 - protein, 309 aa, Fusobacterium nucleatum subsp. nucleatum ATCC 25586
MSKKSTRQAYGEALVELGRINNDIVVLDADLSKSTKTDLFKKEFPKRHLNIGIAEADLMGTAAGFATCGKIPFASTFAMFAAGRAFEQIRNTIAYPKLNVKIAPTHAGISVGEDGGSHQSIEDIALMRAIPEMVVLCPCDAVETKKMVFAAAEYNGPVYLRLGRLDVETVLDDNYDFQIGIANTLRDGSDVTIVSTGLLTQEALKAAEELAKENISVRVINCGTIKPLDGEIILKAAQETKFIITAEEHSVIGGLGSAVSEFLSETHPTLVKKLGVYDKFGQSGKGAEMLEKYELTAAKLISMVKENLK

SEQ ID NO: 32396 - protein, 487 aa, Streptococcus mutans
MPITIKTMLITYADSLGKNLKELNENIENYFADAVGGVHLLPFFPSTGDRGFAPIDYHEVDSAFGDWDDVKRLGEKYYLMFDFMINHISRQSKYYKDYQEKHEASAYKDLFLNWDKFWPKNRPTQEDVDLIYKRKDRAPKQEIQFADGSVEHLWNTFGEEQIDLDVTKEVTMDFIRSTIENLAANGCDLIRLDAFAYAVKKLDTNDFFVEPEIWTLLDKVRDIAAVSGAEILPEIHEHYTIQFKIADHDYYVYDFALPMVTLYSLYSGKVDRLAKWVKMSPMKQFTTLDTHDGIGVVDVKDILTDEEITYTSNELYKVGANVNRKYSTAEYNNLDIYQINSTYYSALGDDDQKYFLARLIQAFAPGIPQVYYVGFLAGKNDLELLESTKEGRIINRHYYSSEEIAKEVKRPVVKALLNLFTYRIQSAAFDLDGRIEVETPNEENIVIERQNKDGSHIATAEINLQDMTYRVTENDQTISLSMISCQT

SEQ ID NO: 32397 - protein, 447 aa, Methanocaldococcus jannaschii DSM 2661
MVGMMRKTKILVTLGPSLENKLDKAINLIDGVRFNMSHATTDYCEKFLNILEKNNIAKVMDLKGIKIRIKEVKLKNKILKMGEKVVIGEDIKLNYNIDTIEEGHFILINDGKIKLRVVEKTDKIIAVVEVGGEIKEGMGVNLPDTRIELPIIDETDLKNIKFAVEKDFEYIALSFVRNKEDVKELKDIISEYKGDCEVISKIETKEGLKNIKEIARESDGVMVARGDLGVEVPIENIPIEQKNILRIANRYGILSITATQILDSMINNPFPTRAEVTDIANAIYDGTDCLMLSNETTIGKYPIEAIKVLNKVAKVADEHYEEFGDRVCLEVESIDEGLVYAVYELYKKLNTKLVITPTYSGRTAKLISKLRINSKIIAPTPNIRTLKRLRLVWGVESCLMEEFDDMEKIINTCREMAKKEIGKGIYLITLGHPIGQKKTNTIKVESI

SEQ ID NO: 32398 - protein, 777 aa, Oryza sativa (japonica cultivar-group)
MEEWKDSNHRGADYLMTMPMQNFLADAFPPPELLEGEGGFEKHGLSVAVGSPPPTPPPPEDGCSPLPLTPQFGQKFGSGGGGGGSLADRRARGGFSNVARISVPYNQPAADVSSAGAPSPYVTIPPGLSPTTLLESPVFSNAMGQASPTTGKLHMLGGANDSNPIRFESPRIEEGSGAFSFKPLNLASSHYAAEEKTKSLPNNQHQSLPISVKTEATSIQTAQDEAAANQLMQPQFNGGKRSRAAPDNGGDGEGQPAEGDAKADSSSGAAAVAVVAAAAAAVAEDGYSWRKYGQKQVKHSEYPRSYYKCTHASCAVKKKVERSHEGHVTEIIYKGTHNHPKPAASRRPPVHPPPPSPATTTTTPLPPGDAQADHAPDGGGGSTPVGAGQAGAEWHNGGVVGGEGLVDATSSPSVPGELCESTASMQVHEGAAAAQLGESPEGVDVTSAVSDEVDRDDKATHVLPLAAAAADGESDELERKRRKLDSCATMDMSTASRAVREPRVVIQTTSEVDILDDGYRWRKYGQKVVKGNPNPSSSSSMDADRSLVVVVVIRSYYKCTHPGCLVRKHVERASHDLKSVITTYEGKHNHEVPAARNSGHPAGSASPGGGAGSSSQPHGVGVGGRRPEVPSVQESLMRLGGGCGAAPFPPHFGLHLPPPPPRDPLAPMSNFPYSLGHAPSPALRGLPPPPPPPPSASALAVAGLGGVVEGLKYPMLAPPSVHSLLRHRQGGGMEAVVVPKAEVKQEAMRPAAAVAGAGRGAAVYQQAMSRVSLGNQL

SEQ ID NO: 32399 - protein, 349 aa, Triticum aestivum
VVTSRMSDTEEENPEENDEGLTGLEGELKGWRVGETFEGFTGTSSLSTTNDDDASSTNTEAVFVISPNGKFKRNIKSWMRGALLGSGSFGMVYEGISDEGAFFAVKEVSLLDQGSNAQQSILSLEQEIALLSQFEHENIVQYYGTDKEESKLYIFIELVTQGSLSSLYQKYKLRDSQVSAYTRQILNGLVYLHERNVVHRDIKCANILVHANGSVKLADFGLAKEMSKINMLRSCKGSVYWMAPEVVNPRKTYGPAADMWSLGCTVLEMLTRQIPYPNVEWTNAFFMIGKGEQPPIPSHLSAEAQDFIRQCVRVDPDERPSASQLLAHPFVNRPLRASFDSLSPPINRP

SEQ ID NO: 32400 - protein, 661 aa, Bacillus cereus E33L
MEQLEHHVTDNQRKHALTTNQGVKIAEDEFSLKMGLRGPTLMEDFHFREKMTHFDHERIPERIVHARGVGAHGYFQLYESLEAYTKADFLTNPSKKTPVFVRFSTVQGSKGSNDTVRDVRGFATKFYTDEGNYDLVGNNMPVFFIQDAIKFPDFVHAVKPEPHNDIPQGASAHDTFWDFVAHNPESTHMVMWQMSDRAIPRSLRMMEGFGVHTFRLINKEGKAHFVKFHWKPTLGVHSLVWDEAQRIAGKNPDFHRQDLYEAIEKGDYPEWELGLQLIPEEDEHAFDFDILDPTKLWPEEEVPVKLVGKMTLNKNVDNFFAETEQVAFHPGHVVPGIDFSNDPLLQGRLFSYTDTQLSRLGGPNFHQIPINQPVCPFHNNQRDGMHQMQIHRGQTSYHPNGLNDNQPATVQAEQGGYEHYQEKIDGHKIRGRSKSFLNFYSQAKLFYNSMSPIEKQHIKDAFCFEVGKCKSDMVKANVITLLNHVDRQLAKEVANIIGAPLPKENHEVNSDAKSPALSMSNTICKSDSKNVAILLNGDPSVSLLSEWIQAFAQHRINYGIIDKKIYHFTDSIKVTDTYTTADSSLFDAVLVFSSESVIHSPVLEFAETTFKHFKPIAHVLSNPHALDNSKIKLDGAGIYNLANTSIESFIEGIAQGRFWNR

SEQ ID NO: 32401 - protein, 448 aa, Wolbachia endosymbiont strain TRS of Brugia malayi
MPSNVKLLEARLKAEYYTVIVAHDSEEAIDLVAKQQPDIILLDIMMPKINGFKVCKNLKSTPLTTHIPIIMVTALHDTHDRVQGINAGADDFLTKPIDETALSARIKSLTRLKMVIDELRLRGETNAEICGVAGSSIMDYSNQIFDSNILVVDEDIFQAEQIHNVLKQRFKLINILNDPMEALKVGIEDNYDLIISDMQFSETDGLRLCSEFRSKVETRYTPILILSEDYNKNNLVKALDVGANDYLTVPLDESELIARVNLQVKRKRYQDALRMNLFNNAEMSIKDPLTNCYNRRYFDTHLRNIIKDSVEKNRRLSLMILDIDYFKIVNDDFGHSAGDELLKQIQKRISENIRVTDLLARFGGEEFVVVMPDTNISDAYIVAERIREIIATEPFILSDKNTTHNVTVSIGVVEMQESDLDNIEKFIVRADRYLYKAKNSGRNRVVTS

SEQ ID NO: 32402 - protein, 268 aa, Arabidopsis thaliana
MALTWTHKDRGEIRVHENLEELSIDLVDYIAEISEASIKEHGAFCIVLSGGSLISFMGKLIEPPYDKIVDWAKWYVFWADERVVAKNHDDSNYKLAKDNLLSKVNVFPRHICSINDTVSAEEAATEYEFAIRQMVRSRTVAASDNSDSPRFDLILLGMGSDGHVASLFPNHPALEVKDDWVTFLTDSHKPPPERITFTLPVINSAANVVVVATGESKANAIHLAIDDLPLPDSSLSLPARLVHPSNGNLIWFMDKQAGSKLDRFKFSE

SEQ ID NO: 32403 - protein, 384 aa, Prochlorococcus marinus subsp. marinus str. CCMP1375
MKEKLTLMIPGPTPVPERVLKALSKHPIGHRSREFQDIVKSTTELLKWLHQTKGDVLTITGSGTAAMEAGIINTLSKGDKVICGENGKFGERWVKVAKAYGLEVITVKANWGEPLDPENFKNLLNDHQDIRAVIITHSETSTGVINDLEKISSYVKHHKNAITIADCVTSIGACEVKMDDWGVDVIASGSQKGYMMPPGLSFVAMSEKAWQANIRSDLPKFYLDLISYKKTVDKDSNPFTPGVNLYFALEEALIMMKEEGLESIFMRHQRHMKATQEAMKSIGLNLFAKNGFGSPSITSIMPEGIDAEKIRKTVKEDFDILLAGGQDNLKGKIFRIGHLGFINDRDIITAIASIEATLNKLGKSKYPIGTGVAIATKILNERSN

SEQ ID NO: 32404 - protein, 520 aa, Trametes versicolor
MSRFHSLLAFVVASLTAVAHAGIGPVADLTITNAAVSPDGFSRQAVVVNGGTPGPLITGNMGDRFQLNVIDNLTNHTMLKSTSIHWHGFFQKGTNWADGPAFINQCPISSGHSFLYDFQVPDQAGTFWYHSHLSTQYCDGLRGPFVVYDPNDPAADLYDVDNDDTVITLVDWYHVAANVGPAFPLGADATLINGKGRSPSTTTADLSVISVTPGKRYRFRLVSLSCDPNYTFSIDGHNMTIIETDSINTAPLVVDSIQIFAAQRYSFVLEANQAVDNYWIRANPNFGNVGFTGGINSAILRYDGAAAVEPTTTQTTSTEPLNEVNLHPLVATAVPGSPVAGGVDLAINMAFNFNGTNFFINGASFTPPTVPVLLQIISGAQNAQDLLPSGSVYSLPSNADIEISFPATAAAPGAPHPFHLHGHAFAVVRSAGSTVYNYDNPIFRDVVSTGTPAAGDNVTIRFRTDNPGPWFLHCHIDFHLEAGFAVVFAEDIPDVASANPVPQAWSDLCPTYDALDPSDQ

SEQ ID NO: 32405 - protein, 455 aa, Pseudomonas syringae pv. tomato str. DC3000
MSANNNPQTLEWQALSSEHHLAPFSDYKQLKEKGPRIITRAEGVYLWDSEGHKILDGMSGLWCVAIGYGREELADAASKQMRELPYYNLFFQTAHPPVLELAKAISEIAPQGMNHVFFTGSGSEGNDTMLRMVRHYWALKGQPNKKTIISRVNGYHGSTVAGASLGGMTYMHEQGDLPIPGIAHIPQPYWFGEGGDMTPDEFGVWAAEQLEKKILELGVENVAAFIAEPVQGAGGVIVPPESYWPKIKEILSRYDILFAADEVICGFGRTGEWFGSDFYGLKPDMMTIAKGLTSGYVPMGGLIVRDEIVAVLNEGGDFNHGFTYSGHPVAAAVALENIRILREERIVERVKSETAPYLQKRLRELNDHPLVGEVRGVGLLGAIELVKDKVTRERYTDKGAGMICRTFCFENGLIMRAVDDTMIIAPPLVISFAQIDELVEKARTCLDLTLAALQS

SEQ ID NO: 32406 - protein, 488 aa, Neisseria gonorrhoeae FA 1090
MRYFHIQTRDLFHAQGGTSAKSPRRSGRACAHPGQAPTPPFRKTGPTIKETLIKMKKHIWAASLLPASLSAEPLNWWKPYSAVNSGDTAWVMTAAALVLLMTLPGLALFYGGMVRKKNLLSTMMHSFSIATLVGILWVAVGYSLAFTPGNAFIGGLGRVFLSGMQIDAAARMLTVSPNAPTVPEPVFMFFQMTFAIISTAIITGAFAERMKYSAMMLFSGIWFLLVYVPGAHWVWGGGFMSKGGVLDYAGGTVVHINAGIAGLVAALVLGRRIGYGREAMPPHNMAMTLIGAAMLWFGWFGFNAGSALAADAAAGMAMAVTQVSAVFGAAGWLACEKIAGHKPSALGLASGAVSGLVGITPAAGFTGPSGAAAIGILTAAACFVSVTVVKHKLRYDDSLDAFGIHGFGGLVGGILTGIFFDNRIFGGDAAVWQQLWIQVKDGFIMAAYSGLMSWAILKAVGKICGGLRVGKDVEREGLDLNIHGEHVE

SEQ ID NO: 32407 - protein, 277 aa, Thiobacillus denitrificans ATCC 25259
MSLPIPAAYSLDSYIQTVSHYPMLSLEEEQKLARAWHDEQDLEAARRLVLSHLRVVVSIARHYLGYGLPHADLIQEGNVGLMKAVKRFDPDRGVRLVSFALHWIRAEIHEYVLKNYRMVKLATTKAQRKLFFNLRSLKQSLNALTVQQADAMAQELNVSRKDVLEMETRLSGHDVSIDPMVDDGEDDYSPIAYLASAEENPAQRLEREQTERLRESGLTSALEELDERSRHIIQARWLSEGDVATLHELAAQYGVSAERIRQIEARALQKMRASIPA

SEQ ID NO: 32408 - protein, 351 aa, Francisella tularensis subsp. tularensis SCHU S4
MKALAKLKKQPGIWIINDAPIPEYGYNDVLIKIKKTAICGTDLHIYNWDKWSQNTIPVPMITGHEFAGEVVAKGDGVTSVDIGDRVSGEGHLVCGQCRNCRAGKRHLCRKTIGIGVNVQGAFAEYLVMPAVNVFKIPDSISDDIASTFDPMGNAIHTALSFNLTGEDVLITGAGPIGLMAVKIARFCGARRIVITDINEYRLQMARDFGATVALNVAPFKNQDELVKQMRKVMSDIGMTEGFDVGLEMSGINSAISMMLDVMNHGGKLSLLGISAGDISVDWGAILFKGLTLKGIYGREMFETWYLMTSMLQAGMDMNPIITHRLHIDEFQKGFEIMKSGQCGKVILDWSS

SEQ ID NO: 32409 - protein, 139 aa, Cryptococcus neoformans var. neoformans JEC21
MAPKSVASKAPASQASKAPAAASKAPAKAAKTSAAPKDGAKKRSKKRVESYSSYIYKVLKQVHPDTGISNKAMAILNSFVSDIFERIATEASKLASYNHRSTISSREIQTSVRLILPGELSKHAISEGTKAVTKYSSSK

SEQ ID NO: 32410 - protein, 398 aa, Francisella tularensis subsp. tularensis SCHU S4
MNKDFYTNINSKILEIKQAGTYKSERVIATPQEPIINLENGETLINFCANNYLGFANNPEIVAYAKEHIEECGYGMASVRFICGTNSVHKQLEKELSNFFEFEDTILYPSCFDANTGLFETLLTKDDAIISDSLNHASIIDGVRLCKAMRFRYNNNDMQDLEAKLIEADQAGARFKMIATDGVFSMDGIIADLKSICDLADKYNAIVMVDDSHAAGFVGKHGKGSIEHCDVMGRVDILTGTLGKGLGGASGGYICAKKEVVDLLKNLSRPYLFSNSLAPIIAKTSIKALEITKGSNELREQLQANQQRFRSKMTAAGFDLIPGEHPIIPVMIYDEKKAAEFAEKLLDYGIYVIAFSYPVVPKGKARIRTQMSATHTFEQIDKAVDGFTKAAKELGIIQ

SEQ ID NO: 32411 - protein, 138 aa, Cryptococcus neoformans var. neoformans JEC21
MARTKQTARKSTGGKAPRKQLATKAARKQTTTSAAGGVKKPHRYRPGTVALREIRRYQKSTELLIRKLPFQRLVREIAQDFKTDLRFQSSAVMALQEASEAYLVSLFEDTNLAAIHAKRVTIQPKDLQLARRLRGERS

SEQ ID NO: 32412 - protein, 579 aa, GIBBERELLA ZEAE PH-1
MTSKEEKVDIGTHTPPSHEVAPGHQKDVFTGDIEGVREDFREDDFMTRNGLNLKSFQRRDYGTGVVELDRSMKKRHLHMIAIGGSIGAGFFVGSGGAFTKGGPGAVLICFMIAGVMIFNVVHALGELAVMYPVSGGFYTYSTRFIDPSWGFAMGWNYVFQWVIVLPLELTVASFTVQYWNPNINEGIWITVFWLFIIFINVFGTLGYAEEEFWSSCFKLAAIIIFMIVAVVLICGGGPSRGNFSTYQGAKLWYDPGAFQNGSRGFCAVFVTAAFSFAGTELVGLAAAESRNPAKALPGAIKQVFWRITLFYIVGLTLVGMLVSSTDDRLLNSANPYKDGVSPFVLAALDAGLNGYDDFMNLVICVSVVSIGVSCVYGGSRTLTALAEQDYAPKCFTYIDRSGRPLMSVIFNLAWGALAYIVLASSGGLVFDWLLAVSALAALFTWGSICACHIRFRSAWKRQGRTLDQIPFHAAGGVYGSWLGLTLCFVILGCQLYVAVCPPFKEGYGNAEDFFMACLAIPVVLVFWIIGYIWKRPQWLTIDKIDLDTGLREHDWDEINAYRAKVASWPAWRRALNKFM

SEQ ID NO: 32413 - protein, 243 aa, Citrus sinensis
MGRGRVQLKRIENKINRQVTFSKRRAGFLKKAHEISVLCDAEVAVIIFSHKGKLFEYSTGSCMEKILERYERYAYAERQLIAPDPESQRNWPLECNNLKAKIDLLQKDQRHYLGEDLESLSLKDIQQLEQQLDTALKHIRSRKNQLMQESISELQKKEKSIEEQNNLLVKQIKEREKAAAQQAQWGNQIQNQVPNTLSFLLPQPPPCLRLGGAYQEQASEMRRNELNLTLEPVCSCSLGCFAG

SEQ ID NO: 32414 - protein, 321 aa, Triticum aestivum
MSSDTERAATEKLEAEKKDAAASTGPIGGTGDRARILPARMTICSCEETINEFEMLTRDAARVQLDTLKKILEANAGAEYLRQFGLDGRTDAASYKSCIPLCVHSDVEPFIQRVADGDSAPVVTGKPITSLSLSSGTTQGKPKFLPFNDELLENTLQIFRTSYAFRNREYPISEGKALQFVYGSKQALTPGGILATTATTNLYRSQRYKEGMKDIQSQGCSPDEVIFGPDFNQSLYCHLLCGLIYSDEVHSVFSTFAHSLVHAFQTLEEVWEDLCADIRDGVLSEKITVPSIREAVSKILKPNPELADSIHKKCAGLSNWY

SEQ ID NO: 32415 - protein, 305 aa, Candida albicans
MQIFVKTLTGKTITLEVESSDTIDNVKSKIQDKEGIPPDQQRLIFAGKQLEDGRTLSDYNIQKESTLHLVLRLRGGMQIFVKTLTGKTITLEVESSDTIDNVKSKIQDKEGIPPDQQRLIFAGKQLEDGRTLSDYNIQKESTLHLVLRLRGGMQIFVKTLTGKTITLEVESSDTIDNVKSKIQDKEGIPPDQQRLIFAGKQLEDGRTLSDYNIQKESTLHLVLRLRGGMQIFVKTLTGKTITLEVESSDTIDNVKSKIQDKEGIPPDQQRLIFAGKQLEDGRTLSDYNIQKESTLHLVLRLRGGF

SEQ ID NO: 32416 - protein, 337 aa, Bifidobacterium longum NCC2705
MTVLVTGGCGYIGAHVVHALHQAGEKVVVVDDLSYGKPTRIEGSRLYGMDIATPGAGERLAEILDAEGVDSVIHFAARKQVGESVEKPLWYYQQNINGMLNVLTGMTQSKNAKKLVFSSSAATYGVPPVDVVPEDVVPMLPINPYGQTKLFGEWMARACEQPFGIRFCALRYFNVAGCGPVELEDPAILNLIPMLFNRLKQGKAPAIFGDDYPTPDGTCVRDYIHVSDLADAHIAALKYLDRDKRKYDAFNVGTGEGTSVRQIVDEVKKVTGLPFTEAVMARRAGDPPHLIGSPKRINEEMGWHAKYDVEDIVKSAWDAWQANPEHHIDVDTWKQAD

SEQ ID NO: 32417 - protein, 429 aa, Bordetella pertussis Tohama I
MGPRIITHGEGVYVFDDQGNRYLEGMAGLWSVAVGFGEQRLVEAAARQFQELPYYHTFTHKSHPSVIALAERLIGYTDGRMAQAFFTNSGSEANDTVVKLVWYYNNALGRRDKKKIIARQRGYHGVTVASASLTGLPGNHKDFDLPLPQIRHTACPHYYRYGLPGETEEDFATRMAGELEAMILREGPDTVAAFIGEPVMGAGGVIVPPRTYWQKIQAVCRKYDILVIADEVITGFGRLGQRFGSQVFDIEPDIMVLSKQITSSYQPLGAVLLNTRVADVVAEHSGRLGTFGHGYTASGHPVATAVALENLRLIDERGLIEHAAEMGALLHQELQALSSHPLVGEVRGVGLIAGVELVADKATRQPFDPLGKAGGYAYERAHDHGLIVRGIQDTVAFCPPLIITAEQVRDMVARFARTLDDVAAHVAQG

SEQ ID NO: 32418 - protein, 491 aa, Shigella sonnei
MKKTTLALSRLALSLGLALSPLSATAAETSSATTAQQMPSLAPMLEKVMPSVVSINVEGSTTVNTPRMPRNFQQFFGDDSPFCQEGSPFQSSPFCQGGQGGNGGGQQQKFMALGSGVIIDADKGYVVTNNHVVDNATVIKVQLSDGRKFDAKMVGKDPRSDIALIQIQNPKNLTAIKMADSDALRVGDYTVAIGNPFGLGETVTSGIVSALGRSGLNAENYENFIQTDAAINRGNSGGALVNLNGELIGINTAILAPDGGNIGIGFAIPSNMVINLTSQMVEYGQVKRGELGIMGTELISELAKAMKVDAQRGAFVSQVLPNSSAAKAGIKAGDVITSLNGKPISSFAALRAQVGTMPVGSKLTLGLLRDGKQVNVNLELQQSSQNQVDSSSIFNGIEGAEMINKGRDQGVVVNNVKTGTPRAQIGLKKGDVIIGANQQAVKNIAELRKVLDSKPSVLALNIQRGDRHLPVNAVISLNPFLKTGRGSPYNL

SEQ ID NO: 32419 - protein, 134 aa, Oryza sativa (indica cultivar-group)
MGLEDADNEGSSGGMGGGAGGKPVRKPRLVVHTLSDIDINIDILDAGFRWRKYGQKVVKGNPNPRSYYKCTTVGCPVRKHVERALHDTRAVITTYAGAVVQRDPAVGSANGAGAAFQRTKDKPRDDLFVESLLC

SEQ ID NO: 32420 - protein, 137 aa, Triticum aestivum
  misc_feature (23)..(23): Xaa can be any naturally occurring amino acid
  unsure (1)..(137): unsure at all Xaa locations
QIVRIEAGPSLSTREMSRATKRXLISIRKMIPPLLPKFYKGQMGSVAVIGGSQDYTGAPYFSAMACAKTGADLVHVICEPQAAQVIKTYSPNLMIHPLMRQSDRASTEDSAQSIASKIIELLPRLHVLVIGPGLGKR

SEQ ID NO: 32421 - protein, 441 aa, Propionibacterium freudenreichii subsp. shermanii
MSVSDELFAEALKVMPGGVSSPVRAYRSVGGTPRFVKRALGSHIVDVDDKRYVDLVCSWGPMIAGHAHPEVVAAVLQAVADSTSFGAPSEVELRLAQAVVARMGGAIDKVRFTCSGTEAVMTAARLARGITKRPLLVKFVGCYHGHSDSFLVSAGSGVASLGLPDSPGVPKEVAGDTVALPYGRIDMVEELFAERGDQVAAIVTEGVPANMGVIVPPEGFNRRLHDIAHAHGALLIQDEVLTGFRLSPTGAWGLQGAKEGWTPDLFTFGKVIGGGMPLAAVGGSAQLMDYLAPEGPVYQAGTLSGNPAACAAGLATLALMDDAAYSRLDATADRVSAMADAALESAGVPHRINKVSNLFSVFLTDAPVTDFASASKQDTKAFSRFFHAALDAGLWLAPSGFEAWFCSTALDDDDLEVIDAGLHKAAQAAAQGLSSLEDVRR

SEQ ID NO: 32422 - protein, 429 aa, Xanthomonas campestris pv. phaseoli
MNHSRSHALFAQAQTLLPGGVNSPVRAFKSVGGEPFFVARADGPYLFDVDDNRYIDYVGSWGPMIAGHNHPAVREAVEQSIRNGLSFGAPCAAEVTMAQTIARLVPSCEMVRMVNSGTEATLSAVRLARGATGRNRIIKFEGCYHGHGDSFLVKAGSGMLTLGVPTSPGVPAGLSELTATLSFNDFEGATALFDEIGAEVAAVIIEPVVGNANCIPPQAGYLQHLRTLCTRHGALLIFDEVMTGFRVALGGAQAHYGVTPDLTTFGKIIGGGMPVGAYGGRRDLMEQVAPAGPIYQAGTLSGNPVAMAAGLAMLELVQEPGFHTRLSEATSMLCEGLEDAARAAGIAVTTNQVGGMFGLFFTDDVVESYAQATACDITSFNRFFHAMLQRGVYLAPSAYEAGFMSSAHDEAVIEATLAAAREAFADVAR

SEQ ID NO: 32423 - protein, 303 aa, Glycine max
SARDQIDANVQREIVNHRSLRHPNIIRFKEVFLTPTHLAIVLEYAAGGELFERICNAGRLSEDEARFFFQQLISGVSYCHSMQICHRDLKLENTLLDGNPAPRLKICDFGFSKSALLHSQPKSTVGTPAYIAPEVLSRKEYDGKVADVWSCGVTLYVMLVGAYPFEDPEDPKNFRKSIGRIMSVQYAIPDYVRVSKECRHLISCIFVANPAKRISISEIKQHLWFRKNLPREIIEAERRGYEETQKDQPSQSVEEIMRIIQEARTKIHTGEQAGTGTSDAVHGDEANEEVDINDHYAKYLALN

SEQ ID NO: 32424 - protein, 443 aa, Lactobacillus johnsonii NCC 533
METIKNIIIGFGKGGKTLAKFLAQKGEEVLVIEKSNKMYGGTCINIACLPSKRLIIEAANGVSYVDAVNGKNEMTAQLREKNYHMLADEKTVTVLDGEAHFIADHEIEVKLPNGKKVQYKGDRIFINTGAVPVMLPIPGLKESKYILDSTQAMDEKKMPKNLTIIGAGYIGLEFASMFAKYGSKVTVLDHNKEFLAREDEDISNAVRKDMEDAGIKFELGADIEKITDETSDAKITYQINEERKTINADRILVATGRKPNTENLGLENTAIETTDRGAIKVDDFLRTTVDNVWAIGDVKGGLQFTYISLDDFRIIKDQLFGTGARMVSDRKVVPYSVFISPALSQVGLNEKQANKLGKEYKLFKLPVTAIPKAKVAKDNRGLFKALVDPETEKILGATLYGIESYELINMISLAMKAHLSYTVLRDQIYTHPTMSEAFNDLFK

SEQ ID NO: 32425 - protein, 536 aa, Treponema denticola ATCC 35405
MDYSDRSSVLYQVDYAEKLLKSGKITDALIRSRILHLNTKNFEEVDKINLKSIEKTEAAFLQSIEEKNWDEAVRYFRSLTSIGKRPAGWTEERLFEERNILWKKNADLPLLNLQNKKNPSAGSASFPQNIDEMIKGSLTVWVNRGTRIQRGYASPDIVIGSGFFIDSRGYFITNYHVIQSEVDKKYNGYSRLYIKSPDNPNIKIPARVVGWDPLFDLALVKTEYTPQFIFNLGSSKDLGVGSRIYAIGSPAGLEKTLTSGIVSAKYRRLFSMVDIMQIDAAVNHGNSGGPIVDDKGLVQAVVFAGLERNEGLNFAIPVELLKAVLPDLYKGGEVKHTWLGCHGQNQKSGSGNAGRVSDGVLVNYVLPDGPFSISGINEGTVIKEVNGIPVNSVEEIQANLLSIAPETIVLIKGYQKNEAGVYEEKTWPVLCAERPLYPGNSVFRKDSIARSMLPVFGFKLESVGKKNSYRVAEVIPGSFASENAFGVNDYIEINGKRWDNENEEIIHVNIYTKKVRAGYMDSFMVLSAYLDNPLFF

SEQ ID NO: 32426 - protein, 447 aa, Lilium longiflorum
MGKEKVHINIVVIGHVDSGKSTTTGHLIYKLGGIDKRVIERFEKEAAEMNKRSFKYAWVLDKLKAERERGITIDIALWKFETTRYYCTVIDAPGHRDFIKNMITGTSQADCAVLIIDSTTGGFEAGISKDGQTREHALLAFTLGVKQMICCCNKMDATTPKYSKARYDEIIKEVSSYLKKVGYNPDKIPFVPISGFEGDNMIERSNNLDWYKGPTLLEALDLINEPKRPTDKPLRLPLQDVYKIGGIGTVPVGRVETGIVKPGMVVTFGPTGLTTEVKSVEMHHEALLEALPGDNVGFNVKNVAVKDLKRGFVASNSKDDPAKEAANFTSQVIIMNHPGQIGNGYAPVLDCHTSHIAVKFAEILTKIDRRSGKEIEKEPKFLKNGDAGFVKMIPTKPMVVETFSEYPPLGRFAVRDMRQTVAVGVIKSVEKKDPTGAKVTKAAIKKK

SEQ ID NO: 32427 - protein, 330 aa, Lactobacillus johnsonii NCC 533
MRVLVIGGAGYIGSHAVRKLIEEGNDVVVLDSLYTGHRKAVDKRAKFYQGDIEDTNLVSKILRDENIDAVMHFAAYSLVGESVKKPLKYYDNNVSGMISLLQAMEDAKVKYLVFSSSAATYGIPEKLPITEDTPLNPINPYGETKMMMEKIMHWADKANGIKSIALRYFNVAGASSDGSIGEDHGPETHLIPNILKSAIAGDGNFTIFGDDYNTKDGTNVRDYVQVEDLIDAHILALKHVMDTNKSDVFNLGTAQGYSNLEILEAAKKVTGIDIPYTIGARRGGDPDSLVADSSKARKVLGWKPKHEDVDDVIATAWNWHKSHPKGYEDK

SEQ ID NO: 32428 - protein, 274 aa, Schizosaccharomyces pombe
MTDVQETQKGALKEIQAFIRSRTSYDVLPTSFRLIVFDVTLFVKTSLSLLTLNNIVSAPLWDSEANKFAGLLTMADFVNVIKYYYQSSSFPEAIAEIDKFRLLGLREVERKIGAIPPETIYVHPMHSLMDACLAMSKSRARRIPLIDVDGETGSEMIVSVLTQYRILKFISMNCKETAMLRVPLNQMTIGTWSNLATASMETKVYDVIKMLAEKNISAVPIVNSEGTLLNVYESVDVMHLIQDGDYSNLDLSVGEALLKRPANFDGVHTCRATD

SEQ ID NO: 32429 - protein, 117 aa, Arabidopsis thaliana
DAIPETVGGKLIGLVTSREEIPDLLKLDDVIDLVIPRGSNKLVSQIKNSTKIPVLGHADGICHVYVDKSGKLDMAKRIVSDAKLDYPAACNANGNLLVHKDLEQNGFLDDLIYVLQT

SEQ ID NO: 32430 - protein, 619 aa, Treponema denticola ATCC 35405
MTDLEKNPAIIKLLEYAKRKRTIGLGDLDDLLPEDLMSPETIPDILDILEGAGVQIKNEGISESNSESDSDSQSGNDEDYRLLDDTYEEEDDDIKSPYSDEIETPYIEKEKPRHETAKKLVRTSHEAGVDDPIKLYLQEIGKEDLLTADEEVSLSKSMEDGEAIIKKVIKNSGILIPEFFVIGQKAFSKLDPAESNKPRKELSEEMAEKKRLKQVYGDSLRNIYSEIKQYMSLKKHCYDRESLESFLESPELQALRKKMFNSLKRIHIESEEIEKISDRFIEATEKVQDYQHKKERKEKQLGIKSYADLRKLGKRLAIPREREKLEKELNISANEVKDIYTQIQVLTRKIRKIEYDFEATVDEVIDLTSEIKNGQRMLKNAKDKLINANLRLVVSIAKKYINRGLQFFDLVQEGNIGLIKAVEKFEYRKGYKFSTYATWWIRQAITRSISDQARTIRVPVHMIEQINKVNRESRQLMQKLGREPNDDEIALQLGWSIEKVKQVKNVAREPISLETPIGEEEDTLLGDLIEDKGVENPSNRTELTLLQEQLEMVLSSLPEREQEVLKMRFGIEGGYPLTLEEVGLYFDVTRERIRQIEAKGLRRLRHPKRSRKLKDYLDN

SEQ ID NO: 32431 - protein, 250 aa, Oryza sativa (japonica cultivar-group)
MAKVRGKAGAGAGAAAAAATRTKWRSGAQERIYGRRLLDALRATRDGAAGGGGGAPPQPRAVKAAADSALALTARGQSRWSRAILLAGAASSRRRVLVKAGGKIRRGGGGNSCRRPQARAAAAAAAKAAAAASSAGEPPMLKERKVKERLRVLGRLVPGCRKLPAPALLEETADYVAALEMQVKAMRALADALAAAQLSSSTPQQAEAAADETEMERVWDLRRVIAMIDAADNAAAAAAADDDDDDDDDL

SEQ ID NO: 32432 - protein, 337 aa, Prochlorococcus marinus str. MIT 9313
MAAKGTTMSIPPAIVAAARMGWHWQWIQLMNGLAPADAKGNYQRPPSQHQQARLPAEQELSNRSADQYPRLIIGRSCPWAHRTWLVLQLRNLQSSLTLHLARADHKAGRWQLDPAWLGCNSLLALYQRCGSPPSHRATVPALVDPGTMTSQSPQLLGNESAQLVEVLNLWPAAKDAPDLAPSNLQGEINGWQKLLQPAVNDGVYRCGFARNQAAYDKACNELFDTLAQVDRSLSNKGPWLCGDQLTLADVRLFPTLIRWEMVYAPLFGCSQQPLWAFPHLWHWRQRLLALPGVAKTCDSQAWRQDYFGALFPLHPSNIVPAGPDLAKLVNASAPDQR

SEQ ID NO: 32433 - protein, 157 aa, Nicotiana benthamiana
VRAPCCEKMGLKKGPWTPEEDQILISFIQTNGHGNWRALPKQAGLLRCGKSCRLRWTNYLRPDIKRGNFTKEEEDTIIQLHEMLGNRWSAIAGKLPGRTDNEIKNVWHTHLKKKLKDYKPPQNSKRHSKNHDSKGPTTSRSSNNSDLTTQKHIDSPV

SEQ ID NO: 32434 - protein, 317 aa, Burkholderia sp. 383
MTTALDQLKQYTTVVADTGDFQQLAQYQPQDATTNPSLILKAVQKDAYKPILEKTVRDHRNESTDFIIDRLLIAFGTEILKLIPGRVSTEVDARLSFDTPRSIDKGRELIKLYEAAGIGRERILIKLASTWEGIRAAEVLQKEGIKCNMTLLFSLVQAAACAEAGAQLISPFVGRIYDWYKKQAGAEWNEEKDGGANDPGVQSVRRIYTYYKTFGYNTEVMGASFRTTSQITELAGCDLLTISPDLLQKLQDSNDTVTRKLSPDALQDKPAARVAIDEAAFRFQLNDDAMATEKLAEGIRVFAADAVKLEKLIDSLR

SEQ ID NO: 32435 - protein, 248 aa, Lycopersicon esculentum
TGVISGALLYIRDDFKSVGKRTWLQETIVSMAVAGAIFGAAFGGWFNDKYGRRKSILLADILFFIGAIVMAVAPAPWVIIIGRVLVGLGVGMASMTSPLYISEASPARIRGALVSTNGLLITGGQFLSYLINLAFTRTKGTWRWMLGVASIPALVQFILMLSLPESPRWLYRADKKDEARAILEKIYPAHEVEDEMKALQTSIEVEKADKEFLGDGVFSKVKSAWSNTIVRRGLYAGITVQVAQQFVG

SEQ ID NO: 32436 - protein, 998 aa, Listeria monocytogenes str. 4b H7858
MDGEIAARPNNVLYDNELTIGENWSGRDRYVWLKTTITFPDTKTDTRLIGYFDFGNTGDGHNSGFESLLFVNGEPYQGVDQNHREVLFPDSFAGKKVELVFRLWSGLEGGGTPTIQTHQLKEAFIGYLNLVIDDLYFTSKATLKTLDQLEEKNPTHAPLLQAINRAYLAIDWSTPGSEQNLASMATANQILQAALEKMPKNFPIKVAAVGHTHIDVAWLWRLKHTREKAARSFSTVLHLMEDYPEYLFLQSQPQLYAYIKEDYPEIYAKIKTKISEGNWEADGGMWLEADCNIPSGESLVRQMLYGQKFLREEFGKPSSFLWLPDVFGYSWALPQILRKSGIKTFMTTKISWNQYNRMPHDTFQWRGIDGTEILTHFITAPEKNSRISTYNGKMTARELVGLWDKYQDKEVNQELLLAYGYGDGGGGVNREMLEMRRRYDTMPGIPEVKPKSATSYFNDLHETINTTDQYVHTWNGELYFEYHRGTYTSQAFTKKMNRKIELGLRNSEWLSVLANLKQGTSYPTEKLAGIWQILLRNQFHDIIPGSSIKEVYDDALIEYTEAMTENNTLISNQLTNLTTDADEKITLWNSSTWSRPRYIEISPDNQSNHLAFYDENNAPLPAQKLVNNAWLIQHPNIPALGATTISVKETANILEQPSFHYKNNQLETPFYQIKWNKAGQFTSIFDKKNNRQVIAENARGNVFQLFEDKPMWHDAWDIDLFYQEKQKEISALDSVEITENGPLQFTMKQVLHSEKSQITQWIHFYHESPEIRFETEVDWRDRNQLLKVAFPVAVHASEASYDIQFGNVKRPTHWNTSWDYARFETVGHQWADLSEKNYGVSLLNDSKYGYDIKDSTIRLTLLKAAGYPDPDADLGIHQFTYSLYPHQGDFLDGETVQAAWELNNPIFTSKGEIETFSLFQVTNPYVMIDSIKQAEDGDGIILRLHEFAGTHGEVTITSGYPITSITECNLLEENETSLSNPTFAVAPFEIKTYRIHLA

SEQ ID NO: 32437 - protein, 169 aa, Borrelia burgdorferi B31
MSMLLQKTLCIVKPDGVRRGLIGDVVSRFERVGLKMVAAKMLIVDESLAKKHYLYDDIVFRHSEAVWNSLIKFISNSPVFTFVVEGVESIEVVRKLCGATEPKLAIPGTIRGDFSYHSFKYSNEKGFSIYNVIHASANEADAMREIPIWFKDNEILNYKRDDECEHYYC

SEQ ID NO: 32438 - protein, 254 aa, Triticum aestivum
  misc_feature (118)..(118): Xaa can be any naturally occurring amino acid
  misc_feature (128)..(128): Xaa can be any naturally occurring amino acid
  misc_feature (137)..(137): Xaa can be any naturally occurring amino acid
  misc_feature (144)..(144): Xaa can be any naturally occurring amino acid
  misc_feature (156)..(156): Xaa can be any naturally occurring amino acid
  misc_feature (158)..(158): Xaa can be any naturally occurring amino acid
  misc_feature (186)..(186): Xaa can be any naturally occurring amino acid
  misc_feature (194)..(194): Xaa can be any naturally occurring amino acid
  misc_feature (236)..(236): Xaa can be any naturally occurring amino acid
  unsure (1)..(254): unsure at all Xaa locations
MAMDAERRQAELIEQFSAQAAALSSGPQLAALVLEATSHPALFAFSELLTLPALSKLTGTQYASSLDLLRLFAYGTLKDYKSNSSALPALLPDQARKLKQLSVLTLAESTKVLPYDQXLMQELDVFNXKKNLENFFXNEVHGTXGIGQKAKLDQIXGXGLWKVQIWQLGKGPSQPWIKLNQTMDWXTLGLNWVXGTSDNLLHHIQEKIKWADTTSELNKKHQKEFEDRVEEAKKSXRQTMTYGGMTTFSLNLEE

SEQ ID NO: 32439 - protein, 717 aa, Arabidopsis thaliana
MAEGQSPENSPPSPTPPSPSSSDNQQQSSPPPSDSSSPSPPAPPPPDDSSNGSPQPPSSDSQSPPSPQGNNNNDGNNGNNNNDNNNNNNGNNNNDNNNGNNKDNNNNGNNNNGNNNNGNDNNGNNNNGNNNDNNNQNNGGGSNNRSPPPPSRNSDRNSPSPPRALAPPRSSGGGSNSSGNNEPNTAAIVGIVAGAGLLFLVMILFCVCCCRKKKKKHQMPYYAGNGYATGKGDQYQQQQYNNQSDHVMNLSQQYPGSNGNNNWMNSPPPPPPGSWQPSPPPPPPPVSGGMNGNSSDFSSNYSGPHGPSVPPPHPSVALGFNKSTFTYDELAAATQGFSQSRLLGQGGFGYVHKGILPNGKEIAVKSLKAGSGQGEREFQAEVDIISRVHHRFLVSLVGYCIAGGQRMLVYEFLPNDTLEFHLHGKSGKVLDWPTRLKIALGSAKGLAYLHEDCHPRIIHRDIKASNILLDESFEAKVADFGLAKLSQDNVTHVSTRIMGTFGYLAPEYASSGKLTDRSDVFSFGVMLLELVTGRRPVDLTGEMEDSLVDWVRNHMARPICLNAAQDGDYSELVDPRLENQYEPHEMAQMVACAAAAVRHSARRRPKMSQAKNDHYGPMLKQIVRALEGDATLDDLSEGGKAGQSSFLGRGSSSDYDSSTYSADMKKFRKVALDSHEYGASSEYGNTSEYGLDPSSSSSEEIRRGGANNNKTTPSRDH

SEQ ID NO: 32440 - protein, 473 aa, Glycine max
MEEKLKYPCLSSLLTLFLCISATSTNPHNSQTQTLLLHTLPDPPTLSWPESATVEPDPEPTTSLSLHHIDALSFNKTPSQLFHLRLERDAARVKTLTHLAAATNKTRPANPGSGFSSSVVSGLSQGSGEYFTRLGVGTPPKYLYMVLDTGSDVVWLQCKPCTKCYSQTDQIFDPSKSKSFAGIPCYSPLCRRLDSPGCSLKNNLCQYQVSYGDGSFTFGDFSTETLTFRRAAVSRVAIGCGHDNEGLFVGAAGLLGLGRGGLSFPTQTGTRFNNKFSYCLTDRTASAKPSSIVFGDSAVSRTARFTPLVKNPKLDTFYYVELLGISVGGAPVRGISASFFRLDSTGNGGVIIDSGTSVTRLTRPAYVSLRDAFRVGASHLKRAPEFSLFDTCYDLSGLSEVKVPTVVLHFRGADVSLPAANYLVPVDNSGSFCFAFAGTMSGLSIIGNIQQQGFRVVFDLAGSRVGFAPRGCA

SEQ ID NO: 32441 - protein, 367 aa, Serratia marcescens
MNGSQTLVVKLGTSVLTGGSLRLNRAHIVELVRQCAQQHAAGHRIVIVTSGAIAAGREHLGYPELPATIASKQLLAAVGQSRLIQLWEQLFSIYGIHVGQMLLTRADLEDRERFLNARDTMTALLDNRIVPVINENDAVATAEIKVGDNDNLSALAAILAGADKLLLLTDQQGLYTADPRNNPQAELIREVHGIDDALRAIAGDSVSGLGTGGMGTKLQAADVACRAGIDVVIAAGSKPGVVADVIEGKPVGTRFHALETPLENRKRWIFGAPPAGEITVDDGAVEAMMARGSSLLPKGIREVKGDFSRGEVIRIRNLTGRDLAHGVSRYNSDAMRMIAGHHSQEISEILGYEYGPVAVHRDDMIVS

SEQ ID NO: 32442 - protein, 417 aa, Serratia marcescens [sequence omitted]

SEQ ID NO: 32443 - protein, 379 aa, Streptococcus agalactiae A909
MKNEMLALILAGGQGTRLGKLTQSIAKPAVQFGGRYRIIDFALSNCANSGINNVGVITQYQPLELNTHIGNGSSWGLDGIDSGVTVLQPYSATEGNRWFQGTSHAIYQNIDYIDRINPEYVLILSGDHIYKMNYDDMLQTHKDNLASLTVAVLDVPLKEASRFGIMNTDSNDRIVEFEEKPEHPKSTKASMGIYIFDWKRLRTVLIDGEKNGIDMSDFGKNVIPAYLESGERVYTYNFDGYWKDVGTIESLWEANMEYIGEDNKLHSRDRSWKIYSKNLIAPPNFMTEDANVKDSLVVDGCFVAGNVEHSILSTNVQVKPNAIIKDSFVMSGATIGEGAKINRAIIGEDAVIGDGVVIDGSKEVEVIGYKEVAGVPNED

SEQ ID NO: 32444 - protein, 546 aa, Zea mays
  misc_feature (49)..(49): Xaa can be any naturally occurring amino acid
  unsure (1)..(546): unsure at all Xaa locations
MYTLPVRATTSSIVASLATPAPSSSSGSGRPRLRLIRNAPVFAAPATVXCKRDGGQLRSQTREIERERKGGHPPAGGHKRGGERGQRRGGEEEEDEQLPLPSEKKGGASEGEAVHRYPHLVTPSEPEALQPPPPPSKASSKGMDPTVERLKSGFQKFKTEVYDKKPELFEPLKSGQSPRYMVFACSDSRVCPSVTLGLQPGEAFTVRNIASMVPPYDKIKYAGTGSAIEYAVCALKVQVIVVIGHSCCGGIRALLSLKDGAPDNFTFVEDWVRIGSPAKNKVKKEHASVPFDDQCSILEKEAVNVSLQNLKSYPFVKEGLAGGTLKLVGAHSHFVKGQFVTWEPPQDAIERLTSGFQQFKVNVYDKKPELFGPLKSGQAPKYMVFACSDSRVCPSVTLGLQPGEAFTVRNIAAMVPGYDKTKYTGIGSAIEYAVCALKVEVLVVIGHSCCGGIRALLSLQDGAAYTFHFVEDWVKIGFIAKMKVKKEHASVPFDDQCSILEKEAVNVSLENLKTYPFVKEGLANGTLKLIGAHYDFVSGEFLTWKK

SEQ ID NO: 32445 - protein, 339 aa, Escherichia coli
MAILVTGGAGYIASHTILSLIEQGNEVIIIDNLSNSYYDSLLKIKEITGCDCLFYKGDILDKKLLLKIFDENNITAVMHFAGAKSVSESVIRPLQYYRNNVSGTFSLVEAMEESGVENLIFSSSATVYGEPKIIPVNESCAIGGTTNPYGTSKLFVENFLRDYSKASPNFKTIVLRYFNPIGAHSSGKIGEDPNGIPNNLMPFICQVAIGKQKTLKIYGNDYPTKDGTGIRDYIHVMDLAEGHVAALNNINQGANYRVYNLGTGIGYSVLELLEAFQKVTTRRVPYVFTKRRSGDIAECWSDPTKAYEELGWKARRGLEDMIRDAWNWQQKNPNGFKKV

SEQ ID NO: 32446 - protein, 581 aa, Glycine max
MCGILAVLGCSDDSRAKRVRVLELSRRLKHRGPDWSGLHQHGDCFLAHQRLAIVDPASGDQPLFNEDKSVIVTVNGEIYNHEELRKQLPNHNFRTGSDCDVIAHLYEEHGEDFVDMLDGIFSFVLLDTRDNSFIVARDAIGVTSLYIGWGLDGSVWISSEMKGLNDDCEHFECFPPGHLYSSKERGFRRWYNPPWFSEAIPSAPYDPLVLRHAFEQAVIKRLMTDVPFGVLLSGGLDSSLVASITSRYLANTKAAEQWGSKLHSFCVGLEGSPDLKAAKEVADYLGTVHHEFTFTVQDGIDAIEDVIYHIETYDVTTIRASTPMFLMSRKIKSLGVKWVISGEGSDEIFGGYLYFHKAPNKEEFHRETCRKIKALHQYDCLRANKSTFAWGLEARVPFLDKAFINAAMSIDPEWKMIKRDEGRIEKWILRRAFDDEEHPYLPKHILYRQKEQFSDGVGYSWIDGLKAHAAKHVTEKMMLNAGNIYPHNTPKTKEAYYYRMIFERFFPQNSARLTVPGGASVACSTAKAVEWDAAWSNNLDPSGRAALGVHISAYENQNNKGVEIEKIIPMDAAPLGVAIQG

SEQ ID NO: 32447 - protein, 457 aa, Lactobacillus johnsonii NCC 533
MSKNSSESSEVKTMKRSLTNAHIQLIALGGTIGTGLFLGVGNSIELAGPAVIFIYCLVGFFLFLLMRALGELILSDIKKNTYIDFISEYLGKSIGTTTGYLYWFSWLTLAMAEITALGIYFQYWWPNLQSWIPGLITLLVLLGINLISARVFGNLEFSFAIIKIVTIIAFVILVFYLLITNSSTKYGHVSWNNMMIDGGIFAKGPKGFLLGFQMVIFSFIGVELIGLTAAEAKEPKKTITRAIDQLPVRIILFYVLAILSILLAIPWTKVSTSSSPFVQALGATGIKNAGSIINFVVISAAISSTNSFIYSAGRLLFSINYNGKNKISKHLGKLDHRQLPKNALVFSTVLIALAPLLNLFLKDAFTFISATATSMFLLIWSIMIVTHMTYRKKTPKNELPTFRMPLYPISDIAVLIFFIAMIIVLLIFPNYRIPMISAGIIFTVLVCLTHFIQKKSN

SEQ ID NO: 32448 - protein, 424 aa, Streptococcus agalactiae A909
MKFNEQSNSQAALLGLQHLLAMYAGSILVPIMIASALGYNAKQLTYLIATDIFMCGIATLLQLRLSKHFGVGLPVVLGCAFQSVAPLSIIGAQQGSGYMFGALIASGIYVVLVAGVFSKVANFFPPIVTGSVITTIGLTLIPVAMGNMGDNAKEPSLQSLTLSLVTIGVVLLINIFAKGFLKSISILIGLISGTILAAFMGLVDASVVADAPLVHIPKPFYFGAPRFEFTSILMMCIIATVSMVESTGVYLALSDITNDKLDSKRLRNGYRSEGLAVLLGGLFNTFPYTGFSQNVGLVQISGIRTRKPIYFTALFLVILGLLPKFGAMAQMIPSPVLGGAMLVLFGMVALQGMKMLNQVDFEHNEHNFIIAAVSIAAGVGFNGTNLFISLPNTLQMFLTNGIVISTLTAVVLNIILNGLPKKLI

SEQ ID NO: 32449 - protein, 306 aa, Zea mays
MASLQVTPTSAFTQWNELKFEGLYLFHNYVGSGANQTQVISNKAPIGIGATVVNNWTVCDGPGPNAKLIARAQGLHIQAGNWVNSFSLVFVDQRFSGSTLEVTGIVVESGEWAIVGGTGQFAMANGVISKKLHGKTSEGDIIQLTIHAFCPVLGATKRSATKVGPWGGSGGSPMDITAEPQRLKSITVATGIAVTSIAFSYVDSAGQTQSAGRWGGSGGETEPVIQLGDSEVLTELSGTIGNVDGLTVITSIKFVTSLKTYGPFGAWGNGSDTPFAIPVQQGSAIVGFFARAGVYLDALGVYVRSL

SEQ ID NO: 32450 - protein, 442 aa, Arabidopsis thaliana
MEKRVEKRRIVLVPVAAQGHVTPMMQLGKALQSKGFLITVAQRQFNQIGSSLQHFPGFDFVTIPESLPQSESKKLGPAEYLMNLNKTSEASFKECISQLSMQQGNDIACIIYDKLMYFCEAAAKEFKIPSVIFSTSSATIQVCYCVLSELSAEKFLIDMKGLHPLRYKDLPTSGFGPLEPLLEMCREVVNKRTASAVIINTASCLESLSLSWLQQELGIPVYPLGPLHITASSPGPSLLQEDMSCIEWLNKQKPRSVIYISLGTKAHMETKEMLEMAWGLLNSNQPFLWVIRPGSVAGFEWIELLPEEVIKMVTERGYIAKWAPQIEVLGHPAVGGFWSHCGWNSTLESIVEGVPMICRPLQGEQKLNAMYIESVWKIGIQLEGEVEREGVERAVKRLIIDEEGAAMRERALDLKEKLNASVRSGGSSYNALDELVKFLNTE

SEQ ID NO: 32451 - protein, 329 aa, Wolbachia endosymbiont strain TRS of Brugia malayi
MKAENFTKEQVIEFYRKMLLIRRFEEKAGQLYGMGLIGGFCHLSIGQEAVAVGTYAASRPGDAFVTSYRDHGLMLACDSNPDVVMAELTGKETGCSKGKGGSMHIFDVEKQFFGGHGIVGAQVPIGTGIAFANRYKKKDNVVFTYFGDGAANQGQVYESFNMASLWKLPVVYIIENNEYAMGTSVQRSTLVTELYKRGESFGIPGKQVNGMDFFSVYAATSEAAEYARSGKGPILLEMETYRYRGHSMSDPATYRSKEEVEDMKQNHDPISTLKKCIIDNKIASEEECKAIDKEIRDLVKKSEGFSKNSEEPNIDELYTDVYKSASRSL

SEQ ID NO: 32452 - protein, 398 aa, Cryptococcus neoformans var. neoformans JEC21
MSGVVNGVRVATDDPNRVITVSAQWGKTGADTTISYTNCKAVGNGSFGVVFAAKMSPVKHEDGSEEPESDIAIKKVLQDKRFKNRELQIMRLVHHPNIVDLRAFFYSNGDKKDEVYLNLVLELVPETVYRASRHYAKLKQAMPMLQVKLYMYQLFRSLAYIHSIGICHRDIKPQNLLLNPATGVLKLCDFGSAKILVAGEPNVSYICSRYYRAPELIFGATNYTTNIDIWSTGCVMAELMLGQPLFPGESGIDQLVEIIKVLGTPTREQIKTMNPNYMEHKFPQIKPHPFTKVFRPRTPADAISLISTLLEYTPSARYTAPEALVHPFFDELRVEGARLPNGKDMPELFNFTHEELSSRPDLIRQLVPTHAEEELRSRGIDVNDFKPIPPEQLRVTLD

SEQ ID NO: 32453 - protein, 171 aa, Nicotiana benthamiana
DQVYGTSEGEEVGDAETIADGNDERESKRRAIEVQTSEAASSASHRAVAEPRIIVQTTSEVDLLDDGYRWRKYGQKVVKGNPYPRSYYKCTSQGCNVRKHVERAPSDPKSVITTYEGKHNHDVPAARNSSHNTANNSVSQMSPHTPVVDKQDATRRIGFSNNEQQPIALLR

SEQ ID NO: 32454 - protein, 1043 aa, Vibrio vulnificus YJ016
MFTATDVLKPEFVAQPLDKLWALISPLYMVDESQWLEQLLPLATPSAEEKQAIANRTTQLIEAIRADKKSIQLIDALLLEYSLDTHEGILLMCLAEALMRIPDAATADALIKDKMSVADWKSHLKNSESVFVNASTWGLMLTGKVVGLGDDETQSASQALNRLVNKLSEPVIRKAMYQAMKIMGHQFVRGRTIEEAQKNGRPMRDKGFTYSFDMLGEAALTTADANKYFKDYLMAIEAVGRETYGNDTSPAPSVSIKLSALHPRYEVANEHRVMSELFDTLAQLLKRAVELDVAITIDAEEADRLELSLKLFEKLYRSETVKGWGKFGLVVQAYSKRALPVLVWLNALAKEQGDLIPLRLVKGAYWDSEVKWSQQRGYDNYPVYTRKEATDVAYLACARFLLSDDVRGNIFPQFASHNAQTVSSIATMATHSDYEFQRLHGMGDSLYNHVMEQYRQPVRIYAPVGSHKDLLPYLVRRLLENGANSSFVHRLVDARCPVAELTKHPVEALTSFETLNNTKIPLPAAIFPERKNSYGVNVDIESEAKPFEAQVESFLSKQWLAGPIINGASLAESMIKDGQAESVTAPYDRRIQVGQIAFANLDHVSQAIDIAQAAFADWNRTPLVEKARCLDNLADLMEANLAELVALCHQEAGKTLHDSIDEVREAVDFCRYYAKQAQNLQPFELEGFDGVKRIASREGLGVFVCISPWNFPLAIFLGQVTAALVAGNTVVAKPAEQTSLIAVRAVELMLQAGFPAGVVQLIPGRGADIGSALTSHPAIAGVAFTGSTATAQRINVTLAQREAKPVPFIAETGGQNAMIVDSTALPEQVVRDVIRSAFASAGQRCSALRVLFVQQDIADRVIGLIQGAMNELSVGVPHLHKTDVGPVIDARAKEKLLQHIEQMNQTQKPIAQLTLADDCQHGDFVAPTAFEISGIDVLKEEQFGPILHIVRFKASELTRVVEQINRTGFGLTMGIHSRNETTYRWIEKHARVGNCYINRDQVGAVVGVQPFGGQGLSGTGPKAGGPHYLYRFTQVQFNQTENA

SEQ ID NO: 32455 - protein, 49 aa, Moringa peregrina
GMSYFHETIWKGVPKFLRRIDTALKNIGINERLPYNAPLIQFSSWMGGD

SEQ ID NO: 32456 - protein, 156 aa, Francisella tularensis subsp. tularensis SCHU S4
MSIYDFKLTANDGSEYHLPKNKVLLIVNVASKCGFTKQYRGLQHLHKIYPDLEIVAFPCNSFGGQEPGSDEEIKNFCETNYNVTFPIMKKTKVNGKDAEPLFEYLKERAKGVLGTEAIKWNFTKFLVSKDGETIVRYAPKTIPEDLIPDIDNFLKD

SEQ ID NO: 32457 - protein, 451 aa, Neurospora crassa
MREIISLNVGQAGCQIANSCWELYCLEHGIQPDGYLTEERKAADPDHGFSTFFSETGNGNTFPRTIYADLEPNVIDEVRTGAYRGLFHPEHMISGKEDASNNYARGHYTVGKELIDQVLDKVRRVADNCSGLQGFLVFHSFGGGTGSGFGALLMERLSVDYGKKSKLEFCVYPAPQTATSVVEPYNSILTTHTTLEQRRDCSFMVDNEAIYDICRRNLGLERPNYENLNRLIAQVVSSITASLRFDGSLNVDLNEFQTNLVPYPRIHFPLVAYAPVISAAKAAHEANSVQEMTMSCFEPNNQMVKCDPRHGKYMATCLLYRGDVVPNDAHAAVATLKTKRTIQFVDWCPTGFKLGICYQPPHQVPNGRSGPRLTDAVCMLSNTTAIAEAWSASFVQVDLMYSKRAFVHWYVGEGMEEGEFSEAREDLAALERDYEEVAADSMEGEDVEAEY

SEQ ID NO: 32458 - protein, 1073 aa, Magnaporthe grisea 70-15
MGGESKPAAGGLKSYPLQAPKPVGKWIENIYKERLNQFKDGGQYSVQNVVGMLEEAVAKGAPHVKLSVWDAPGQTRPKFDEATSHEFEPTDVGAWFGPAWSTHWFKIQLKIPEHMLKADLLEFHWNAGNEGMVWTAEGNPIQGLSEQQREEWVIPDSFRDGKEHIIYIEMACNGMFGAAPGDSIQPPDPNKYFRLGKAEIVAVNPEARQLIIDHWIIGDAAREFPQDSWEQHKALKVATDMMEAFEFGNKESIVKARKIAREYLGDVNSHKVYDSEKEALVYGIGHCHIDTCWLWPWAETRRKTARSWSNQCDLMDRYPELHFAVSQAQQYKWLKEDYPYVFDRIKKKIKDGRFHPIGGSWVEHDTNMPSGESLVRQFLYGQRFFEGNFGKRCQTFWLPDTFGYSSQLPQICRLAGMNRFLTQKLSWNNINKFPHTTFNWVALDGTQVICHMPPSETYTAGANFGDVKRSITQHKSMNQDETSLLVFGHGDGGGGPTWEHLEKLRRCRGISDKVGLLPRIHLGNTVDDFFDKLQNKADDFVTWYGELYFELHRGTYTTQANNKLNNRKSETVLRDLEFLATIATIKDNKYKYPKKEIDDMWEWTLLCQFHDCLPGSSIEMCYDDSDELYAKLFETAARVRKEIYDVLGLSDVKATSIQSAAALNTLPWHRKEIIDINEDEGAVACGSGNILHVHPFKTSEKKQVSVSKEDDGVFIMENDDLKIKVKNGVITSMYDRRVGREVIPKGGKANQFVIFDDKPLYWQAWDVEVYHLDSRKELTSGTTEISENKAHRVSVVTKTKISDNSSIKTTISLSAAIQGQQSHVEVHSEVDWHETMKFLKVEFPVDIRNTEASYETQFGIVKRPTHYNTTWDMAKFEVCCHRFADLSENGYGVSILNDSKYGFATVGNLMRLSLLRAPKAPDAHADMGKHHIRWAILPHEGALGHTTVHRAIEFNNKLTVLSKPADEAAAMLSSCPIKVTGNPSLVLDTVKRGEDDEDVSVGLLPARKGRSVIVRIYDSLGGQARGAVETSWDVKKVRKVNILEDDGDELEFKDGKFEIELRAFEVATFRLEL

SEQ ID NO: 32459 - protein, 51 aa, Moringa borziana
RMSYFHETIWKGVPKFLRRVDTALKNIGINERVPYNAPLIQFSSWMGGDRD

SEQ ID NO: 32460 - protein, 393 aa, Burkholderia sp. 383
MNPSDLHPPHWQLSERARKLTSSAIREILKVTERPEVISFAGGLPAPATFPAERMRAAADRVLRDAPAAALQYSATEGYLPLREWIAERYSVRVSQVLITTGSQQALDLLGKALVDPGSPILVETPTYLGALQSFSLYEPRYVQVPTDEQGLLPDGLTPELTQGARLLYAQPNFQNPTGRRLPVERRRALAAFAQSSPFPVLEDDPYGALNYRGEPLPTMLSMAPDHIVHLGTFSKVLAPGLRIGYIIAPEELHFKLVQAKQATDLHTPTLTQRIAHEVIKDGFLDEHIPTIRELYSAQCDAMLAALERHMPEGITWNRPEGGMFIWVNLPAQIDSMKLLATAVDNHVAFVPGAPFFADNAQQNTLRLSFVTVPPEKIEEGVARLGKLLRERL

SEQ ID NO: 32461 - protein, 920 aa, Corynebacterium glutamicum
MTDFLRDDIRFLGRILGEVIAEQEGQEVYELVEQARLTSFDIAKGNAEMDSLVQVFDGITPAKATPIARAFSHFALLANLAEDLHDEELREQALDAGDTPPDSTLDATWLKLNEGNVGAEAVADVLRNAEVAPVLTAHPTETRRRTVFDAQKWITTHMRERHALQSAEPTARTQSKLDEIEKNIRRRITILWQTALIRVARPRIEDEIEVGLRYYKLSLLEEIPRINRDVAVELRERFGEDVPLKPVVKPGSWIGGDHDGNPYVTAETVEYSTHRAAETVLKYYARQLHSLEHELSLSDRMNKVTPQLLALADAGHNDVPSRVDEPYRRAVHGVRGRILATTAELIGEDAVEGVWFKVFTPYASPEEFLNDALTIDHSLRESNDTLIADDRLSVLISAIESFGFNLYSLDLRQNSESYEDVLTELFERAQVTANYRELSEEEKLEVLLKELRSPRPLIPHGSDEYSEVTDRELGIFRTASEAVKKFGPRMVPHCIISMASSVTDVLEPMVLLLKEFGLIAANGDNPRGTVDVIPLFETIEDLRAGAGILGELWKIDLYRNYLLQRDNVQEVMLGYSDSNKDGGYFSANWALYDAELQLVELCRSAGVKLRLFHGRGGTVGRGGGPSYDAILAQPKGAVQGSVRITEQGEIISAKYGNPETARRNLEALVSATLEASLLDVSELTDHQRAYDIMSEISELSLKKYTSLVHEDQGFIDYFTQSTPLQEIGSLNIGSRPSSRKQTSSVEDLRAIPWVLSWSQSRVMLPGWFGVGTALEQWIGEGEQATQRIAELQTLNESWPFFTSVLDNMAQVMSKAELRLAKLYADLIPDREVAERVYSVIHEEYFLTKKMFCVITGSDDLLDDNPLLARSVQRRYPYLLPLNVIQVEMMRRYRKGDQSEQVSRNIQLTMNGLSTALRNSG

SEQ ID NO: 32462 - protein, 227 aa, Phleum pratense
YYEAGARFAKWRAVLKIGPNEPSQLSIDQNAQGLARYAIICQENGLVPIVEPEILVDGPHDIDRCAYVTEVVLAACYKALNDQHVLLEGSLLKPNMVTPGSDAKKVAPRESLAEYTVRTLQRTVPPAVPAIVFLSGGQSEEEATVNLNAMNKLQTKKPWFLSFSFGRALQQSTLKAWSGKEENVGKAQKAFLVRCKANSEATLGTYKGDATLGEGASESLHVKDYKY

SEQ ID NO: 32463 - protein, 311 aa, Ralstonia metallidurans CH34
MSIDILAYGEPLIEFNQQPDDPSRYLQGFGGDTSNFCIAAARQGATTGYITAVGADSFGERLLALWTRERVDTRHVVVNASAPTGVYFVSHDNHGHRFDYLRERSAASRYHHEQLPLATIAQARFLHLSGISLAISTSACDAGLAAMEHARKAGAKVSLDTNLRLRLWSLARARGIMREAFSLTDICLPSWDDITILTGLDDRDAIVDYLLGCGVELVALKLGEEGSYIATQESRALVAPFPVRPVDATGAGDCFGGSFIARLAADADPFDAARYANIAAALSTTGYGAVAPIPHAETVRARLEQGVTVIA

SEQ ID NO: 32464 - protein, 233 aa, Streptococcus pyogenes SSI-1
MDIFGEFLGTVLLVLLGNGVVAGVVLPKTKTHASGWIVIASGWGIAVAVAVFISGKVAPAHLNPAVSLAFAMSGTIAWSTAIAYSLAQLLGAMLGSTLVFLQFRPHYLAAESQADILGTFATDPAIRDTSSNLLSEIFGTFVLMLGILAFGLYDMPAGLGTLCVGTLVIGIGLSLGGTTGYAINPARDLGPRLVHAILPLNNKGDSDWSYAWIPVVGPIIGAALAVLLFQVMS

SEQ ID NO: 32465 - protein, 546 aa, Desulfotalea psychrophila LSv54
MEQTVIEYVLSRLKDLGVKDVFGVPGDYAFPINDAVCNDKELRWIGNCNELNAAYAADGYARIHGLAALSTAYGVGELSAINGIAGAYAEHLPIFHLVGMPASRVQAAHRLVHHTLGNGEFDLFYKMTEPVVCARAIMTPDNCVAETERLIAAAFYHRRPVYMAFPGDYADMPVVGQAEAVVVATSEVGTLAAAVEAICHAVSVSKRACILPGIMATRFGLRDQAAAVVEASGLPFATMFMDKCVLNEAHPSYIGIYNGELMNEQVRAFVEGSDCLLAIGMMLTDFNSGSFTANIDPAASINIMPHRVRVGTAIYHNIEMKDVLVMLAEKLPRKYGLGPRVEGLGEPVGGEDDKITVDYLYPRWEQMLKADDILVAETGTCSMGLGFAKMPNGSLFLNQSLWGSIGWATPAALGAALAAPDRRTILITGEGSHQFTAQEISQFHRYGLKPIIFVLSNDGYLIERLLCRDPDIYYNDLAQWHYKDLPEVLGCDGWFSARVTTCGELDEAIRKAEACGSGAYIEVVTDKYEASELAQRLADSIATLYK

SEQ ID NO: 32466 - protein, 711 aa, Streptococcus pyogenes SSI-1
MMSKLVFFWQNREKEFRDFGGFSEKSVYFCDTIDNRKRLILVVINREVLLMTFDAIDQLAVNTVRTLSMDAIQAANSGHPGLPMGAAPMAYVLWNHFMNINPKTSRNWSNRDRFILSAGHGSAMLYSLLHLAGYDLSVEDLKNFRQWGSKTPGHPEVNHTDGVEATTGPLGQGIANAVGMAMAEAHLAAKFNKPGFDIVDHYTFALNGDGDLMEGVSQEAASMAGHLKLGKLVLLYDSNDISLDGPTSMAFTEDVKGRFEAYGWQHILVKDGNDLEEIAAAIEAAKAETEKPTIIEVKTIIGFGAEKQGTSAVHGAPLGAEGIAFAKKAYQWTHQDFEVPAEVTERFAQGLQARGEKAEQAWNDLFAAYEAEYPELAAEYQKAFTNEAAQVELEAHELGSSMASRVSSQQAIQQISEQVASFWGGSADLSASNNTMVKAETDFQPGHYEGRNIWFGVREFAMAAAMNGIALHGGTRVYGGTFFVFSNYLLPAVRMAALQNLPTVYVMTHDSIAVGEDGPTHEPIEQLASVRSMPNLNVIRPADGNETNAAWKRAIAETDRPTMLVLTRQNLPVLEGTKELAEDGLNKGAYILSEAKGDLDGILIATGSEVKLAMDTQEALEAEGIHVRVVSMPSQNIFDEQSAEYKESILPAAVTKRLAIEAGSSFGWAKYVGLAGKTLTIDTWGASAPGNRIFEEYGFTVANATELYKSL

SEQ ID NO: 32467 - protein, 960 aa, Zea mays
MPERHQSIDAQLRLLAPGKVSEDDKLVEYDALLVDRFLDILQDLHGPHLREFVQECYELSAEYENDRDEARLGELGSKLTSLPPGDSIVVASSFSHMLNLANLAEEVQIAHRRRIKLKRGDFADEASAPTESDIEETLKRLVSQLGKSREEVFDALKSQTVDLVFTAHPTQSVRRSLLQKHGRIRNCLRQLYAKDITADDKQELDEALQREIQAAFRTDEIRRTPPTPQDEMRAGMSYFHETIWKGVPKFLRRIDTALKNIGINERLPYNAPLIQFSSWMGGDRDGNPRVTPEVTRDVCLLARMMAANLYFSQIEDLMFELSMWRCSDELRIRAHELHRSSKKAAKHYIEFWKQVPPNEPYRVILGDVRDKLYYTRERSRHLLTSGISEIPEEATFTNVEQFLEPLELCYRSLCACGDKPIADGSLLDFLRQVSTFGLALVKLDIRQESDRHTDVLDSITTHLGIGSYAEWSEEKRQDWLLSELRGKRPLFGSDLPQTEETADVLGTFHVLAELPADCFGAYIISMATAPSDVLAVELLQRECHVKQPLRVVPLFEKLADLEAAPAAVARLFSIDWYMNRINGKQEVMIGYSDSGKDAGRLSAAWQMYKAQEELIKVAKHYGVKLTMFHGRGGTVGRGGGPTHLAILSQPPDTIHGSLRVTVQGEVIEHSFGEEHLCFRTLQRYTAATLEHGMHPPISPKPEWRALMDEMAVVATKEYRSIVFQEPRFVEYFRSATPETEYGRMNIGSRPSKRKPSGGIESLRAIPWIFAWTQTRFHLPVWLGFGAAIKHIMQKDIRNIHILKEMYNEWPFFRVTLDLLEMVFAKGDPGIAAVYDKLLVADDLQSFGEQLRKNYEETKELLLQVAGHKDVLEGDPYLKQRLRLRESYITTLNVCQAYTLKRIRDPSFQVSPQPPLSKEFTDESQPAELVQLNEQSEYAPGLEDTLILTMKGIAAGMQNTG

SEQ ID NO: 32468 - protein, 313 aa, Brassica napus
  misc_feature (82)..(82): Xaa can be any naturally occurring amino acid
  unsure (1)..(313): unsure at all Xaa locations
GVLPYTTKNVEDDYFLGQILGQGQFGTTFLCTHKKTAQKLACKSIPKRKLLCQEDYDDVLREIQIMHHLSEFPNVVRIRTRXEDTSSVHIVMELCEGGELFDRIVKRGHYSEREAAKLIKTIVGVVEACHSLGVMHRDLKPENFLFASCDEDASLKSTDFGLSVFCKPGATFSELVGSAYYVAPEVLHKHYSRECDVWSAGVILYILLCGFPPFWDESEFGIFRKILQGKIDFETRPWPSISESAKDLIVKMLEKDPKKRLTAHQVLCHPWIGDDKGAPDKPLDCAVLSRLKNFSAMDKLKKMAFRVIAERLS

SEQ ID NO: 32469 - protein, 149 aa, Carboxydothermus hydrogenoformans Z-2901
MERTFIMVKPDGVQRGLVGEIISRFEKRGFKLVGLKLMQISRELAETHYGEHKGKPFFEGLLNFITSGPVVAMVWEGKEVIATAREMMGATNPLKAQPGTIRGTYGIDVGRNVIHGSDSPESAAREIALFFKEEELLSYEKTLDTWIYE

SEQ ID NO: 32470 - protein, 376 aa, Burkholderia fungorum LB400
MMTEACVIPGNDPILLTPGPLTTSLRTREAMLRDWGSWDAAFNRMTHGVCADLLKIVHGENDYVCVPLQGSGTFAVEAALGTLVPRQGCVLVPNNGAYCARLIRILQRMGIAYIELVLREDEPVSAAAVEDAFNRHSRISHVAHVHLETSAGLLNPLDDIAAVCQRHGKSLIVDAMSSFGALPIDLRRGGIDALISASGKCLEGVPGMGFVIMRRSLLEDSEGRSPSLALDLHDQYVYMRKTTQWRFTPPTHVVAALREALDQFGAEGGQPARGARYARNCAALVGAMKALGFEPFLKPEVQAPVIVTFHAPRDPAWHFAAFYAAVREAGYVLYPGKLTQVETFRVGCIGAIDANELLNAAAAIGHALERLGIRVR

SEQ ID NO: 32471 - protein, 399 aa, Pseudomonas syringae pv. tomato str. DC3000
MLAHVESYAGDPILSLMEAFGKDPRADKVNLSIGLYYDAQGRIPQLACVATAQQQLAEGEQAASVYLPMEGLAAYRQAVQTLLFGADHPLVQAGRVATIQTVGGSGALKVGADFLKYAFPDSQVWVSDPTWENHLALFGGAGFKVNTYPYFDAQTGGVRFEAMLDTVQGLPAQSILLLHPCCHNPTGADLSVEQWDRLIEVIKDRQLIAFLDIAYQGFGKGIDEDAYAIRAMADAGITTLVSNSFSKIFSLYGERVGGLSVVCEDTASAANVFGQLKATVRRNYSSPPAHGAFLVSRVLNTPQLRDQWLSEVETMRLRIIDMRSRLVSVLAQKVAGRDFSFILRQSGMFSYTGLTPQQVDELKDVHGIYMLRSGRVCMAGLNERNIDKVCDAIASLFAH

SEQ ID NO: 32472 - protein, 82 aa, Triticum aestivum
MALSRRMTASALLLLFLLVATEMGTTTTKVAEARDCLSQSHKFKGACLSSSNCAAVCRTESFPEGDCHTPHFARKCFCKRPC

SEQ ID NO: 32473 - protein, 404 aa, Blastocladiella emersonii
APAPASPSSPSTAAGAGSASSTASSTTTAAASGNLSIPSPLVAGSTTSSSISHAQKMATAAHTNSDYSPSPAATPSAPLDAVAERRRRKTTLADLELRQTLGTGSFGRVHLVRLRSTGKYYAMKVLKKAEVVKHKQVEHTLNEKGILEQIDHPFLVALHSSFQDSANLYMVMEYVTGGELFTYLRRSQRFSNNVAKFYAAEVVLAFEYLHSKDIIYRDLKPENLLLDAQGHVKITDFGFAKHVPDITWTLCGTPDYLAPEIIQSRGYGRAVDWYALGVLIFEMLAGYPPFYDEDHVRMYEKILQGKVKWPSHFDPAAKDLLKRLLTTDLTKRYGNLKGGSKDIKMHKWFAGLDWTKLFNKQIPPPYTPPNRGDGDTSNFDAYPEETEPYGKVQPDPYAQLFKDF

SEQ ID NO: 32474 - protein, 532 aa, Haloarcula marismortui ATCC 43049
MKYNIISTNYLLSRDKYCYWPSMSTASDDSTETDSAIKQRHRDAAADAIPDNLSHYIGGEFVAGNSHKTIETRDPTTDAVLGEVPAGNAADIDDAVKAAQQAFDGGWKDASPGERQRVLSEMAHAVEENRKTLATLEVLDTGKTITEAMGDMGLVIDHLTYYAAAARNVNGETRQTNDLFDREKQVFTVKEPYGVVGAIVPWNFPLLIAIWKCGPALAAGNTVVLKPSEETPLSTLKLMELVDNTVPDGVINVVTGYGEDAGAPLSTHEDVPKISFTGSTEVGKEIIRNSAEDIKKTTLELGGKSPVIVYPDADLEEAVEAAMMAIFFNKGECCAAGSRLFVHEDIEEQFLETFTNAASGMTVGDPLLEETDMGPKVSDEQVQRTNEFVEAARESGATIRTGGSAPDDESLAGGAFYEPTVIDDIDHDHPSVQKEIFGPVMETFSWSDEDDVVELANDVDYGLAAGVISGDVTKALQTARRLEAGVVWVNHYNDVSAGQPFGGYKQSGTGRENAAEAIDEFTQTKAINVNLG

SEQ ID NO: 32475 - protein, 376 aa, Clostridium tetani E88
MKKYNFKFILSSILSIVFISFGITGSYVIHSTMKHSTLSTNSQLGSIEDLKSIQNRDKGLSKIINESQKLVMLVYADTEKGLSQGSGFLYNDKGDVITNAHVVGDAIDVNVRLIDSTLYKGTVIGKSPSLDIALIRVPALNKKSPLKINKNYKPKIGNEIIAIGSPFGLENTITTGIISAIDRNFTIGQYEYKNMYQITAPIDNGSSGGPLLDKHTGDIIGVNSAKAGDSSIGFSIPINQVIEYVETWSQNPAVDVTKDTSPKASIDDIKEKKYTSEYLIRYFYDGINAQNYLEAYTLLGSELQSKLTYENFKKNYADIKITNIKNISSKIKEDESISVTTTIQNAYDKVTQEVKMNFILDFENNTLKIINYKEIK

SEQ ID NO: 32476 - protein, 202 aa, Bradyrhizobium sp. ORS278
MRERTKTLHVTAERTGVVAELLRGRGTVRAYALLLRNLLPVYEALEAELVRHQASPVVGLTVRPELHRCPAIKADLAALDASDLPLLPEAIAYVRAIQEAGSGSGHPLLAHAYTRYLGDLSGGQIIKKILARSLELQPEALSFYEFPAITDIPRFKTEYREALEQAGSAMTEHDSVVEEAATAFQLNITLSQALQSAAGLGR

SEQ ID NO: 32477 - protein, 51 aa, Moringa ruspoliana
GMSYFHETIWKGVPKFLRRVDTALKNIGINERVPYNAPLIQFSSWMGGDRD

SEQ ID NO: 32478 - protein, 532 aa, Vibrio vulnificus YJ016
MAAKDVLFANDARQKMLKGVNLLADAVKVTLGPKGRNVVLDKSYGAPSITKDGVSVAKAIELKDKFENMGAQMVKQVASKANDEAGDGTTTATVLAQALINEGLKAVAAGMNPMDLKRGIDKAVDSAVEKLRAMAQPCSDKESITQVGSISANSDRAIGDIIAEAMEKVGRNGVITVEEGQGLSNELSVVEGMQFDRGYLSPYFITNQDSGAVELDNPYILLVDKKVSSIRELLPVLESVAKASRSLLIIAEDIDGEALATLVVNNLRGIVRAAAVKAPGFGDNRKAMLEDIAVLTAGTVISEEIGLELEKATIEQLGSAKKVTITKDTTTIVGGAAQESAIRDRVATIEKQIENTTSSYDKEKLQQRIAKLSGGVAVIKIGAATEVEMKEKKDRVDDALHATRAAVEEGIVAGGGVALTKIASELADLKGDNDDQNVGIRVALRAMEEPLRQIAINAGDEGSVVANAVKAGDAHYGYNAATGEYGNMIEMGILDPAKVTRSALQYAASVAGLMITTEAMITDHVADTSSEI

SEQ ID NO: 32479 - protein, 115 aa, Glycine max
  misc_feature (11)..(11): Xaa can be any naturally occurring amino acid
  unsure (1)..(115): unsure at all Xaa locations
MRSSGTSRDPXAPPESRVLGYVPSLNPLVKEFLNAADDKRKEVLSKIEEDVAKLSGSAAKHGKIYVTAAKKIIDKGSDYTKKETERLHRMLEKSISPSKADEFIVKKNILSIFSS

SEQ ID NO: 32480 - protein, 254 aa, Zea mays
  misc_feature (89)..(89): Xaa can be any naturally occurring amino acid
  misc_feature (116)..(116): Xaa can be any naturally occurring amino acid
  unsure (1)..(254): unsure at all Xaa locations
MGRSPCCEKAHTNKGAWTKEEDDRLVAYIKAHGEGCWRSLPKAAGLVRCGKSCRLRWINYLRPDLKRGNFTEEEDELIIKLHSLLGNKXAARPTSSTKAPTKALTVLSVYDLFVGXIPCVGRHRWSLIARRLPGRTDNEIKNYWNTHIRRKLLSRGIDPVTHRPINEHTSNITISFEDWGQGKALKCPDLNLDLCISPPCQEEEEAMLLRPVKREEAGLCFSCSLGLPKSADCKCSNFLGLRTAMLDFRRLEMK

SEQ ID NO: 32481 - protein, 591 aa, Vitis vinifera
MESTLKDIRDGASVLDLDPKATVGGGVEDLYGEDFATEDQLVTPWTVSVASGYSLLRDPRHNKGLAFNDKERDAHYLCGLLPPVVSTQELQERKLMNSIRQYQVPLQKYMAMMDLQERNERLFYKLLIDNVEELLPVVYTPTVGEACQKYGSIFRRPQGLYISLKEKGKILEVLKNWPERRIQVIVVTDGERILGLGDLGCQGMGIPVGKLSLYTALGGVRPSACLPITIDVGTNNEKLLANEFYIGLKQRRATGKEYSEFLQEFMSPVKQNYGEKVLIQFEDFANHNAFDLLAKYGTTHLAFNDDIQGTASVVLAGIVSALRLLGGTLADHKFLFLGAGEAGTGIAELIALEMSKQTKCPIEETRKKIWLVDSKGLIVGSRKDSLQQFKKPWAHEHEPVKDLLDAVKVIKPTVLIGSSGVGKAFTKEVIEAMASCNEKPLILALSNPTSQSECTAEEAYTWTQGRAIFASGSPFDPVEYNGKTFVPGQANNAYIFPGLGMGLVISGAIRVHDEMLLAASEALARQVTQENFDKGLIYPPFSNIRKISAHIAANVAAKAYELGLATRLPQPENLVKYAESCMYSPVYRSYR

SEQ ID NO: 32482 - protein, 689 aa, Aquifex aeolicus VF5
MVVQLDQIHFFIFHEVLKIFKTMPQLFKTSKKIDELVINTIRFLSVDMVERAKSGHPGMPLGASHIVYLLYDRIMKYNPKNPNWFNRDRFILSAGHGSAMLYAAFYMFGFDLTLEDLKAFRQLNSKTPGHPEYGLTPGVEVTTGNLGQGFGNAVGMAMAEKFLSHYFNREGYPVIDHYTYVLVSDGDLMEGVSYEAASLAGHFKLNKLIAIWDNNHITIDGDTKLTWTEDVLKRFEALGWEVYHLEDGYNLDLLEETILKAKESDKPTFISVRTHIGYGTPLQDTPEVHGKPMGKEIVEETKKKFGWPLEEFYVPEEALNYTRRKVEEGKALEEEWNKLYAEYREKYPDLAQTLEKALNKEWSLDWLEKVEEFKEDMPTRKASGKVLNVMADYIPTMIGGSADLSESVNTVLKKYGDFEADTPTGRNVHYGVREHAMGTILNGMAYHGGILPYGGTFLIFSEYMRPAIRTAALANLQVIFVYSHDSIGLGEDGPTHQPVEQLWSLRSIPNLWVVRPADANEVKYAWEIALKRKNGPTAIILTRQKVKTIDRSKYASPEGVRKGAYVIADTEGKPDVVIIATGSEVQVALGAKEILEQKGIKTRVVNMACCELFEEQPEEYKREVLPPEVTKRVAVEAGRDTGWYKYVGSDGLVISLNEFGKSAPGSVLFEYYGFTPENVANKVIEKWFS

SEQ ID NO: 32483 - protein, 187 aa, Zea mays
  misc_feature (92)..(92): Xaa can be any naturally occurring amino acid
  misc_feature (110)..(110): Xaa can be any naturally occurring amino acid
  misc_feature (137)..(137): Xaa can be any naturally occurring amino acid
  unsure (1)..(187): unsure at all Xaa locations
ITMDPTKFRPSSSHDTTVTTTNAGAPVWNDNEALTVGPRGPILLEDYHLIEKVAHFARECIPERVVHARGASAKGFFECIHDPTSLTCANFXLRAPGVRTSVIARFSTVXIHDRGSPENNPRPRAGFAGKFYTPRGXWNLLANNFPVFFLRYRLQFPPKGFRGSKPQPRGSHGARRNGRGDSNFPDR

SEQ ID NO: 32484 - protein, 461 aa, Xanthomonas campestris pv. campestris str. ATCC 33913
MPLPTDPVAETASSAAPALRHALKPRQLMMMGLGTAIGAGLFLGSGVGIHAAGPAVLVSYLIAGALVIIVMNALGEMAAAKPASGAFSVYAADAMGPTAGATVGWLWWLQIVVVIAAEAVGAASLLATVWPALPVPMLASVFMATFTVINLLGVRNFGEFEFWFAILKVVAILIFLMIGGALLAGLLPGVASPGLSNFTQHGGFAPKGLAGIGTALLVVVFAFGGTEIVAVAAAETADPGRSLARTIRTVAWRILVFYIGSISVIVAVVPWTSDALSSPFAAVLEVARIPGAATGITLVAVVALLSALNANLYGASRMIFSLAQRGEAPRWLGNTSRQQVPLVAVIASVLFGFAAAVLELLYPGKVLPMLLNIVGATCLLVWTISLLSQLILRARADRAGIALPFRMRGYPVLTLLALAILAVIFVLLALSADTRAQFLSMVGLTAGIALVSELARRMRKR

SEQ ID NO: 32485 - protein, 235 aa, Brassica napus var. napus
MAKSQIWFGLASLVALLVVSAVADDVVVLTDDSFEKEVGKDRGALVEFYAPWCGHCKKLAPEYEKLGASFKKAKSILIAKVDCDEHKSVCTKYGVSGYPTIQWFPKGSLEPQKYEGARNAEALAEYVNKEGGTNVKLAAAPQNVVVLTPDNFDEIVLDQNKDVLVEFYAPWCGHCKSLAPVYEKVATVFKQEEGVVIANLDADAHKSLGEKYGVSGFPTLKFFPKTTKLVKIMRG

SEQ ID NO: 32486 - protein, 419 aa, Hordeum vulgare
MTVDRKGAQAAAAAAATSAPFEIPALQPGRTCGAEESTRSHVLVEPIGSSDLLCNEYALLAQQNPKGDALPVASILRKKRPRRSRDGPNSVSETIKRWKEVNQQLEHDPQGAKRARKPPAKGSKKGCMQGKGGPENTQCGFRGVRQRTWGKWVAEIREPNRVSRLWLGTFPTAEVAAQAYDEAARAMYGPLARTNFPVQDAQAAPAVAVPVATEGVVRGSSASCESTTTSNHSDVASSSHNKQRQIQAPEISSRSDLLESTQSVEYSQQQSVPDAVSSIAMSTSEEDVYEPLEPISNLPDGEADCFDIEELLKLMEADPVEVDPVTVGSWNEFQDAGANARGSWNEFQCARANTGVSWNANAGMEMGQQEPLYLDGLDQGMLEGMLHSDYPFPVWISEDRPMHNPAFHDAEMSEFFEGL

SEQ ID NO: 32487 - protein, 400 aa, Ralstonia metallidurans CH34
MDNLKTGTDAMFILLGAIMVLAMHAGFAFLELGTVRKKNQVNALVKILVDFAVSTISYFFIGYTVAYGVQFMSGADVLAQKSGYELVKFFFLATFAAAIPAIISGGIAERSRFNPQLAATFVLVGFVYPFFEGIAWNNRFGIQDWIASVTGAPFHDFAGSVVVHAVGGWIALPAVLLLGARRGRYQKDGRISAHPPSNIPFLALGAWVLAVGWFGFNVMSAQTVDKISGLVAINSLMAMAGGTLAAWWAGRNDPGFAYNGPLAGLVAVCAGSDLMHPLGALITGAVAGVLFVHLFTLAQNKWHIDDVLGVWPLHGLCGAWGGIAAGIFGSHALGGIGGVSIVAQLIGTAMGIVIALVGGTVVYGTLKKVVGIRLDAEEEYNGADLTLHRISATPERETSW

SEQ ID NO: 32488 - protein, 240 aa, Podospora anserina
MLGSILPFNEETADRVSAYCEKNSHGIPDALVEHWEWTRTRFPDADKMSSRLQGSWMIFTARDRKPKRILEIGCYSGYSALAWYEGTRDTKAEIVTLEYSPKMIAASREAFKKYGVGDRVKLIEGPAENTLKTLEGEFDLIFVDANKDGYAGYVKTILDQGLLSANGIILCDNVFARGLTIGPDCAPWLNDHVRPYWNGCGQALDKFSAGLMEDPRIDVLLLPVFDGVTQIRWKDGAQRA

SEQ ID NO: 32489 - protein, 415 aa, Fusobacterium nucleatum subsp. nucleatum ATCC 25586
MLAKRYTGKKLVDNIFATSKKAKQAIVKFGKENVINATIGSLYNEDEKLAVYDVVESVYRNLPPEDLYAYATNVIGEDDYLEEVIKAVFFDDYKEALKELHIASIATTGGTGAISNTVKNYMDTGDKVLLPNWMWGTYKNIVIENGGKIETYQLFNENGDFNFEDFKNKVLELAKIQKNVVLILNEPSHNPTGFRMTYEEWVNLLDFFKSIKDTNIIVIRDVAYFEYDDRGEEETKKLRKLLIGMPKNILFMYAFSLSKSLSIYGMRIGAQIAVSSDEEVIQEFKDALPFSCRTTWSNIPKGGMKLFATIMKNPELKANFLKEKQGYMNLLNERANIFLKEAKEENLKVLPYKSGFFVTVPVGETVDKIIEDLESKNIFVIKFDTGIRIGLCSVPKRKIKGLAKKIKDSINKFKN

SEQ ID NO: 32490 - protein, 581 aa, Neurospora crassa
MDKETNTPEEVLGSAEKSMNVTSKTSNDDTKAHEFNEQTNYVPKRTIITIFLACAGVDLLALIDQTTLATSLYIIGNALGSTSQVSWIANGYFITSTVGQLLYGRLSDIWSRKVILLTGLAIFFLGSLASSLAQSVLQLTIFRAFTGIGGGGLMTVAQLIVSDVVPLRERGKYQGIIGAVVAIANGIGPVIGGALSSKSEDSWRWIFRINMPLTVLTILAVVFFMPLKKVRGDWKVKLKAVDFIGILVALAGTIVLMLGLTWGGGEYPWDSAHVIATLVTGFVACVAFVLWQWKGPRYPLVPLHIFKSKIVNGACITMAINGWNFVVQVYYIPSFYQLVYEYSATRAGAMLLPVTLVQTASSTLSGLVVHWVGRYRESILFGWVCWAVGLGLMSTLDETTGIGKQIGYSILIGVGVGNTLQPALIAVQAGVVRRDMAVVTSFRNFVRNLGATIGLAVCGTIIVVYTWSANTFISVGSNNVLAGSLGSLDIDHDASKTLLSNPQMYLRTVSKAEADRIRGVLIPAYRKGFHIIFMTGAALCALAFVIAFFMLPQVELSRPDDEKLREEGRKAYEDKKRQDSA

SEQ ID NO: 32491 - protein, 454 aa, Glomus intraradices
MKLSRQTRIIILLIIDISFFITEIILGYWINSLAIIADSFHMLNDIFSLVVALYALKLASRSTFSSKYSYGWQRAEVLGALINGVFLMALCLSIFIQAIERFFDPPDIKNPVVILGVGCAGLLSNIVGLLLFHEHGHGHSHGHSHDHGKKSADVDVPIDEILVHPAASRRSIVKAAQESRDSQEFKEIINDNSNHSNSSNNENISIKEEESDTNNNQKISETEDNQNHRDNQSHKKDKNLNMRGVFIHVLGDALGNIGVVCSGLFIYLTHFSWRFYIDPLTSLILTIIILMSAIPLVKSASFILLQKVPSGLPIDDVRSRIKELYGVLSVHELHIWQLSDTKRICSVHILLAPSANYMEIAADIRKILHVHGVHSITIQPEYVKIGLNKNDSGEVIMVVENSTKGEVELVANEVDNHETACLLRCNLDSSCTQNLCCPPPVSQPPKDMTTTPSN

SEQ ID NO: 32492 - protein, 772 aa, Neurospora crassa
MSNAGKDSGRNSPVPGNIPVRPSSPGGSFRPGSFRPSSFRARELGTSIPRADSIARLATPVLPQQQPSGTPTPIPIERGDAGALPPLPGAGSQSAGPGVSALAAALSNTYGASPPRFGTPPARALSPAPSAAQLQRSATPTTNYGSFETRSRLPSTGINGFGAYEDPEIIKRHLVQPGDSAGEETGERSKGKQPAEDDDEFSSLQLQGGDITRPIYRWAEEIEQRNKAKRSHSFSYPRPEPENEVLDINSIKVPGGFRRNYLRRNARDPSAHPDDSENGAGQGAPPPRLLTTSFLEFLSLYGHFAGEELEEDDEVLQPGEYFTSGSDEGEWWSDEGSVDDHEPMEDSTLLTPSRRKRRRKERGGSGRNSPMSAAMLLLKSFVGTGVLFLPRAYLNGGMVFSNAVLLFVAALSYYCFVLLVSTRLKVEGSFGDIGGILYGKWMRNLILFSIVISQLGFVAAYIVFTSENLQAFILAVTNCKTYISISWLIIMQMIIFLPFSLLRDIGKLGFTALIADAFIVIGLAYLFYYDVLTLNTSGLADIIMFNQKDWTLFIGTAIFTFEGIGLIIPIQESMRNPEKFPKVMAVVMIIITTLFTVMGAVSYAAYGSKTETVVLLNLPQDNKMVNGVQFLYSLAILLSTPLQIFPAIRITENALFTKSGKYNPYIKWQKNVFRFFVVAFCAMVAWAGADNLDKFVALVGNFACIPLVYIYPPMLHYRGVARSALWKFSDVALCVFGFIAMAYTTTLTVMSWAGAGEGGESPGYCDAKGLNP

SEQ ID NO: 32493 - protein, 612 aa, Bradyrhizobium japonicum USDA 110
MARPAVLTVADTIAKSFLRAAETRGDRPAIREKKFGIWQPTSWREWLEISKEIAYALRAIGFMPGDVASIIANAVPEWVHADMGILCAGGVSSGIYPTDASSQVQYLVNDSGTKVIFAEDEEQLDKILTCRTRCPSLQRIVVFDMEGLSGFSDDMVMSLDEFRALGRNHMVGREALWQEMIDSRGPEDLAVLVYTSGTTGPPKGAMHANRSVTHQMRHANDFIPARENEDRLIFLPLCHVAERIGGYYISVALGSVMNFAESTETVPDNLREVQPTIFLAVPRIWEKFYSAITIALKDATPLQQWVYRRAIGIGYRMVDCRIEGRAPPLSLRLANQLAYRLAFRNIRRMIGLDRCRIAFTGAAPIAPELIRWYLALGIDMHEVYGQTENCGVATMMPATRIKLGSVGTAVSWGEVALSPDGEILIKGDFLFMGYLNQPEKTAEAIDPRGWLHTGDVGTIDNEGFVRITDRMKDIIITSGGKNVTPSEIENQLKFSPYISDAVVIGDKRPYLTCLVMIDQENVEKFAQDHDIPFTNYASLCRATEIQDLIWREIEQVNVNFARVETIKRFFLIERQLTPEDEELTPTMKLKRSFVNKRYAAEIDAMYRERAVA

SEQ ID NO: 32494 - protein, 311 aa, Oryza sativa
  misc_feature (28)..(28): Xaa can be any naturally occurring amino acid
  misc_feature (42)..(42): Xaa can be any naturally occurring amino acid
  misc_feature (71)..(71): Xaa can be any naturally occurring amino acid
  misc_feature (106)..(106): Xaa can be any naturally occurring amino acid
  misc_feature (112)..(112): Xaa can be any naturally occurring amino acid
  misc_feature (132)..(132): Xaa can be any naturally occurring amino acid
  misc_feature (137)..(137): Xaa can be any naturally occurring amino acid
  misc_feature (210)..(210): Xaa can be any naturally occurring amino acid
  misc_feature (236)..(236): Xaa can be any naturally occurring amino acid
  misc_feature (253)..(253): Xaa can be any naturally occurring amino acid
  unsure (1)..(311): unsure at all Xaa locations
LGILLHDFRLYCIHSEAKSYFAHHGIKXQIDLAAMMAQKDNXLLKKNKVEYARGFWKFLYPSEVPVDLHGXRSTIFKGKNIMIATCSDVKSLPEVTIDEKKIVTYXPTGALXLSEIPKKLVIVGAGYIGLEXGSFWXRARSEVSVVEFASDIVPSMDGQIRKPFKHMLEKQKMKFMLKTMVVGVDASGSCVKLTVEPAAGGEQSILDVVXTNVKRVHTTGDAIPGPMLAHKAEEDXIACVEFIAGKGHLDYEXVPSVVYAHQEVASFGKIEEQVKASGVAYQVGKSSLLAHRCSKAIDDAEELVKVMAEKQ

SEQ ID NO: 32495 - protein, 96 aa, Vibrio vulnificus YJ016
MNIRPLNDKLIVERQEVENKSEGGIVLTSQSVKKSNRGKVIAAGLGKRLENGERASMEVKVGDVVIFNDGYGVKTEKMDGKEYLILSESDVLAIVE

SEQ ID NO: 32496 - protein, 316 aa, Triticum aestivum
  misc_feature (157)..(157): Xaa can be any naturally occurring amino acid
  misc_feature (245)..(245): Xaa can be any naturally occurring amino acid
  misc_feature (262)..(262): Xaa can be any naturally occurring amino acid
  misc_feature (278)..(278): Xaa can be any naturally occurring amino acid
  unsure (1)..(316): unsure at all Xaa locations
MAGGGELVVSFGEMLVDFVPTVAGVSLAEAPAFLKAPGGAPANVSIAVARLGGEAAFVGKLGDDEFGRMLAAILRDNGVDDGAVVFDAGARTALAFVTLRADGEREFMFYRNPSADMLLTADELNVDVIKRAAVFHYGSISLIAEPCRSAHLRAMEXAKEAGALLSYDPNLREALWPSLEEARTKILSIWDQADIVKVSEVELEFLTGINSVEDDVAMKLWRPTFKLMLVTLGDQGCKYYTKDFXGTVPSYKVQQVDTTGAXGDAFMGSLLRKIVQDXSALQDKTNLRGHKFANACGASRHEERAFSPLRFRLYCV

SEQ ID NO: 32497 - protein, 727 aa, Brassica napus
MEDEIDRSRAFAKDVKRIVVKVGTAVVTGKGGRLALGRLGAICEQLAELNSDGFEVILVSSGAVGLGRQRLRYRQLVNSSFADLQKPQTELDGKACAGVGQSSLMAYYETMFDQMDVTVAQMLVTDSSFRDKDFRKQLSETVKAMLKMRVIPVFNENDAISTRKAPYKDSTGIFWDNDSLAALLALELKADLLILLSDVEGLYTGPPSDPKSKLIHTYVKEKHQEEITFGEKSRLGRGGMTAKVKAAVNAAYGGIPVIITSGYAAENIAKVLKGLRVGTLFHQDAHLWARVVDTTSRDMAVAARESSRKLQALSSEDRKNILLDIANALEANEKIIKAENDLDVAAAQEAGYEESLVARLVMKPGKISSLAASIRQLAEMEDPIGRVLKKTEVADGLILEKTSSPLGVLLIVFESRPDALVQIASLAIRSGNGLLLKGGKEARRSNAILHKVITDAIPKTVGGKLIGLVTSRDEIPDLLKLDDVIDLVIPRGSNKLVSQIKNSTKIPVLGHADGICHVYVDKSCKVDMAKRVVSDAKLDYPAACNAMETLLVHKDLEQNGVLNELIYALQANGVTLYGGPKASGKLNIPEVKSFHHEYSSKACTVEIVEDVHGAIDHIHQHGSAHTDCIVTEDSEVAEIFLRQVDSAAVIHNASTRFCDGFRFGLGAEVGISTSRIHARGPVGVEGLLTTRWIMRGKGQVVDGDNGVAYTHKDLPVLERTKAVQNGH

SEQ ID NO: 32498 - protein, 150 aa, Oryza sativa
MAPKAEKKPAEKKPAEEKAGEKAPAAGKKPKAEKRLPASKGEKGGEGKKERGRKKAKKSVETYKIYIFKVLKQVHPDIGISSKAMSIMNSFINDIFEKLAGEAAKLARYNKKPTITSREIQTSVRLVLPGELAKHAVSEGTKAVTKFTSS

SEQ ID NO: 32499 - protein, 463 aa, Pseudomonas syringae pv. tomato str. DC3000
MSSTANSSELEQGLKPRHITMLSIAGVIGAGLFVGSGHAIAEAGPAVLLAYAAAGTLVVLVMRMLAEMAVASPDTGSFSTYADRAIGHWAGFTIGWLYWWFWVLVIPLEANAAATILHAWFPDIAIWMFTLVITLLLTATNLFSVKNYGEFEFWFALIKVVAIIAFVVLGVAAIFGLLPTSSVSGVSHLFDTGGFLPNGMGAVLAAMLTTMFSFMGTEIVTIAAAESRNPGKQITKATNSVIWRIFLFYLVSIFIVVSLVPWNDPRLAEVGSYQTVLDAMGIPNAKLIVDLVVLVAVTSCLNSALYTASRMLFSLGKRGDAPALSKRTSKGGTPYWAVIMSTAAAFLTVFANYVAPAAVFDFLLASSGAIALLVYLVIAVSQLRMRQKRIAAGETIDFKMWLFPWLTWAAIAFIVAVLTIMLIQQEHRVEIIATGVLSLLVIGAGLIVSRRRKAGPVGAAALG

SEQ ID NO: 32500 - protein, 389 aa, Arabidopsis thaliana
MTKISDLPRDLAEEVLSRVPVTYLRAIRFTCKKWNTLTKRRSFTKKLIGQEKAEAKVKEFHAIMTLNSRLHLMSVNLDGIHKDENVESSIKQKGKLISLTVADPDRIVISQVYHCDGLLLCITNEINSRLVVWNPYSGQTRWIEPRTSYREWDIYALGYESKNNAKRSYKILRYLDAYEDMGDMSVEPRTRVCEFEIYSLDTNSWKVIEVTTDWDLCFLHRGVTLKGNTYWFAREKIPPPPRERVIEDIPLEKFGSRLPLPFRPCVDDTITLSSVREEKLAVLYQRWDITWTGIWISNKIEPNAVSWSKLFFPMGRIRPLEAASGTFFVDEENKLVVLFDKGESILNPTRNTAYIVGEDGYIKPVDLGESVHKYCFPLACSYVPSSVQI

SEQ ID NO: 32501 - protein, 539 aa, Coprinopsis cinerea
MFKNLLSFALLAISVANAQIVNSVDTMTLTNANVSPDGFTRAGILVNGVHGPLIRGGKNDNFELNVVNDLDNPTMLRPTSIHWHGLFQRGTNWADGADGVNQCPISPGHAFLYKFTPAGHAGTFWYHSHFGTQYCDGLRGPMVIYDDNDPHAALYDEDDENTIITLADWYHIPAPSIQGAAQPDATLINGKGRYVGGPAAELSIVNVEQGKKYRMRLISLSCDPNWQFSIDGHELTIIEVDGQLTEPHTVDRLQIFTGQRYSFVLDANQPVDNYWIRAQPNKGRNGLAGTFANGVNSAILRYAGAANADPTTSANPNPAQLNEADLHALIDPAAPGIPTPGAADVNLRFQLGFSGGRFTINGTAYESPSVPTLLQIMSGAQSANDLLPAGSVYELPRNQVVELVVPAGVLGGPHPFHLHGHAFSVVRSAGSSTYNFVNPVKRDVVSLGVTGDEVTIRFVTDNPGPWFFHCHIEFHLMNGLAIVFAEDMANTVDANNPPVEWAQLCEIYDDLPPEATSIQTVVRRAEPTGFSAKFRREGL

SEQ ID NO: 32502 - protein, 361 aa, Chiloschista pusilla
SDSGKDAGRLSAAWQLYKAQEDLVKVAKEYGVKLTMFHGRGGTVGRGGGPTHLAILSQPPDTILGSLRVTVQGEVIEQSFGEENLCFRTLQRYTVATLEHGMQIPISPKPEWRALMDEMAIVATEEYRSFVFKEPRFVEYFRLATPELEYGRMNIGSRPSKRKPSGGIESLRAIPWIFAWTQTRFHLPVWLGFGAAFKHVIEKDPKNLLLLREMHNNWPFFRVTIDLIEMVFSKGNSGIAALYDKLLVSPELLPFGEQLRANYEETKDLLLQVAGHKSLLEGDPYLQRLRLRVPYITTLNVYQAFTLTDQRTKHRLQPHVSNQSKLNSNNTAAELVKLNPASEYAPGLEDTLILTMKGIAA

SEQ ID NO: 32503 - protein, 446 aa, Coprinopsis cinerea
  misc_feature (191)..(191): Xaa can be any naturally occurring amino acid
  unsure (1)..(446): unsure at all Xaa locations
LLSFALLAISVANAQIVNSVDTMTLTNANVSPDGFTRAGILVNGVHGPLIRGGKNDNFELNVVNDLDNPTMLRPTSIHWHGLFQRGTNWADGADGVNQCPISPGHAFLYKFTPAGHAGTFWYHSHFGTQYCDGLRGPMVVYDDNDPHAALYDEDDENTIITLADWYHIPAPSIQGAAQPDATLINGKGRYXGGPAAELSIVNVEQGKKYRMRLISLSCDPNWQFSIDGHELTIIEVDGRLTEPHTVDRLQIFTGQRYSFVLDANQPVDNYWIRAQPNKGRNGLAGTFANGVNSAILRYAGAANADPTTSANPNPVQLNEADLHALIDPAAPGIPTPGAADVNLRFQLGFSGGRFTINGTAYESPSVPTLLQIMSGAQSVNDLLPAGSVYELPRNQVVELVVPAGVLGGPHPFHLHGHAFSVVRSAGSSTYNFVNPVKRDVVSLGVT

SEQ ID NO: 32504 - protein, 517 aa, Coprinopsis cinerea
MLLLATALATSLLPFVLGAIGPSTNLVVANKVIAPDGFSRSAVLAGATQPTVQFPGPVIQGNKNSFFAINVIDALTDPTMLRTTSIHWHGMFQRGTAWADGPAGVTQCPISPGHSFLYKFQALNQAGTFWYHSHHESQYCDGLRGAMVVYDPVDPHRNLYDIDNEATIITLADWYHVPAPSAGLVPTPDSTLINGKGRYAGGPTVPLAVISVTRNRRYRFRLVSLSCDPNYVFSIDGHTMTVIEVDGVNVQPLVVDSIQIFAGQRYSFVLNANRPVGNYWVRANPNIGTTGFVGGVNSAILRYVGASNTDPTTTQTPFSNPLLETNLHPLTNPAAPGLPTPGGVDVAINLNTVFDFSSLTFSVNGATFHQPPVPVLLQIMSGAQTAQQLLPSGSVYVLPRNKVIELSMPGGSTGSPHPFHLHGHEFAVVRSAGSSTYNFANPVRRDVVSAGVAGDNVTIRFRTDNPGPWILHCHIDWHLVLGLAVVFAEDAPTVATMDPPPAWDQLCPIYDALPPNT

SEQ ID NO: 32505 - protein, 324 aa, Bacillus halodurans C-125
MKAIVVTAFGGPEHMMWEDVSTPVIKENEVLIKVVKTSVNFADIKARYGRKGGTLPFIPGLDAAGYVEKVGREVSDIQVGQRVIAFPKSGSYAEYVVAAESLVFPIPDEINFRTAAASPIVSFLSHRLLYNVAQMERGESVLVHAAAGGVGTTAIQMAKLLGAGTVIGTVGSADKITAAKESGADEVICYEEEDFTKSVQEMTNGVGVDIILDSVSGSVTEKSLQCLARYGRLVHFGNSSGAIGTIKTIDLHASCRSVLGFSLGTTRKCKPHLLKETARHVLPYLASGKLKVHIGHEYRLTDAANAHRLMESRLNRGKILLNVE

SEQ ID NO: 32506 - protein, 516 aa, Coprinopsis cinerea
MQLLAFVLAALPLARAAIGPVGNLVIANANVSPDGFVRSAVLAGATGTSLEHPGPVIVGQKGDTFHINVIDDLTDPTMLRTTSIHWHGFLQEGTAWADGPAGVTQCPIAPGHSFLYKFQAKNQAGTFWYHSHHMSQYCDGLRGVMVVYDPLDPHRHLFDVDNEDTIITLADWYHDPAPSAGLVPTPWSTLINGKGRYPGGPVVPLAVIHVSRGKRYRFRLVSLSCDPNYVFSIDGHTMTVIEVDGVNHEPLVVDHIQIFAGQRYSFVLNANRPVNNYWVRANPNLGSVGFGGGINSAILRYVGAPAVDPTTSQLPFSNPLLETNLHPLVNPAAPGGPSPGDVDVAINLDILFDVSILKFTVNGATFDEPPVPVLLQILSGAHTASSLLPSGSVYTLPPNKVIELTIPGGGIGAPHPIHLHGHTFKVVRSAGSSTYNFVNPVERDVVNVGQAGDNVTIRFVTDNAGPWILHCHIDWHLVLGLSVVFAEDVPTIDSSVQPPAWHDLCPIYDALPPGTR

SEQ ID NO: 32507 - protein, 311 aa, Bacillus halodurans C-125
MKTKPIDLYILSGFLGSGKSTLLKRLIEQEQARGNKIGVLMNELGEVSVDSSIVPKDTPLKEMLNGCICCTIQGELSAQLQSFIEEYELDVIFIEATGAAHPLEVVEACTHPVFAGQVRVRGVLTVVNARQWIEGKMSIKIKKLMEAQVTFADLIVVNKVDQVTDAQVEQLTTSIKDLNPKAINIPTTFSNLEPVHSERLHHAAAPSSRGSESKAHVHEHLHLRTMAVPIQHPVDRMELLSFLKGIQGQIYRVKGFIHLKESPGLFLFNYAYGDPMFERHRTDQAYAPVLVFIGDDLDHQAIEEGLQQLQQ

SEQ ID NO: 32508 - protein, 598 aa, Ehrlichia ruminantium str. Welgevonden
MSSSTYSIIDHEYDVVIIGAGGAGLRATFGMTSVGLSVACISKVFPTRSHTVAAQGGISAALGNVTEDDWRWHMFDTVKGSDWLGDQDAIEYMCKNAAEAVIELERYGVPFSRTSDGKIYQRPFGGMTTEFGKGKPAIRTCAASDKTGHAILHTLYQQSLKHNAEFFVEYFAIDLIMNEVGQCQGVIAWSLCDGTLHRFRSHAVVLATGGYGRIYFSATSAHTCTGDGGGMVSRINLPLEDMEFVQFHPTGIYGSGCLMTEGCRGEGGYLINSEGERFMERYAPKAKDLASRDVVSRAMTLEIREGRGVGPNKDHVYLSISHLGAEVIHDKLPGISETARTFAGVDVTKEPIPVLPTVHYNMGGIPTNYYGQVITLTDSEEKIVPGLFAIGEAACVSVHGANRLGSNSLLDLVVFGRAAAIKAKELIKPGMLHAPINKASEEKIIARFDGIRFSKGSLRVAEVRGKMQHVMQNHAAVFRTAEVLDEGKVKIKDVAKLMPEIVVQDKSMIWNSDLVEALELTNMMPQAVVTMECAANRQESRGAHAREDFPERDDENWMKHTLAWYDAANCSVEIKYKDVAKTTLTNDVQYFPPQRRVY

SEQ ID NO: 32509 - protein, 429 aa, Bacillus anthracis str. 'Ames Ancestor'
MRKFDKSIAAFEEAQDLMPGGVNSPVRAFKSVGMNPLFMERGKGSKVYDIDGNEYIDYVLSWGPLIHGHANDRVVEALKAVAERGTSFGAPTEIENKLAKLVIERVPSIEIVRMVNSGTEATMSALRLARGYTGRNKILKFIGCYHGHGDSLLIKAGSGVATLGLPDSPGVPEGVAKNTITVAYNDLESVKYAFEQFGDDIACVIVEPVAGNMGVVPPQPGFLEGLREVTEQNGALLIFDEVMTGFRVAYNCGQGYYGVTPDLTCLGKVIGGGLPVGAYGGKAEIMRQVAPSGPIYQAGTLSGNPLAMAAGYETLVQLTPESYVEFERKAEMLEAGLRKAAEKHGIPHHINRAGSMIGIFFTDEPVINYDAAKSSNLQFFAAYYREMVEQGVFLPPSQFEGLFLSTVHSDADIEATIAAAEIAMSKLKA

SEQ ID NO: 32510 - protein, 332 aa, Saccharomyces cerevisiae
MVRVAINGFGRIGRLVMRIALSRPNVEVVALNDPFITNDYAAYMFKYDSTHGRYAGEVSHDDKHIIVDGKKIATYQERDPANLPWGSSNVDIAIDSTGVFKELDTAQKHIDAGAKKVVITAPSSTAPMFVMGVNEEKYTSDLKIVSNASCTTNCLAPLAKVINDAFGIEEGLMTTVHSLTATQKTVDGPSHKDWRGGRTASGNIIPSSTGAAKAVGKVLPELQGKLTGMAFRVPTVDVSVVDLTVKLNKETTYDEIKKVVKAAAEGKLKGVLGYTEDAVVSSDFLGGSHSSIFDASAGIQLSPKFVKLVSWYDNEYGYSTRVVDLVEHVAKA

SEQ ID NO: 32511 - protein, 74 aa, Glycine max
ITTKHMLPTVLRMAGDPVANVRFNVAKSLQKIGPILDNSTLQSEVKPILEKLTQDQDVDVKYFAQEALTVLSLA

SEQ ID NO: 32512 - protein, 333 aa, Saccharomyces cerevisiae
MSEPSEKKQKVATSSLEQLKKAGTHVVADSGDFEAISKYEPQDSTTNPSLILAASKLEKYARFIDAAVEYGRKHGKTDHEKIENAMDKILVEFGTQILKVVPGRVSTEVDARLSFDKKATVKKALHIIKLYKDAGVPKERVLIKIASTWEGIQAARELEVKHGIHCNMTLLFSFTQAVACAEANVTLISPFVGRIMDFYKALSGKDYTAETDPGVLSVKKIYSYYKRHGYATEVMAASFRNLDELKALAGIDNMTLPLNLLEQLYESTDPIENKLNSESAKEEGVEKVSSINDEPHFRYVLNEDQMATEKLSDGIRKFSADIEALYKLVEEKM

SEQ ID NO: 32513 - protein, 185 aa, Prunus persica
EFCKNTKNWYCYGKAVAEQAAWEEAKAKGVDLVVVNPVLVLGPLLQPTINASIIHVLKYLTGSAKTYANSLQAYVHVRDVALAHILVYEIPSASGRYLCAESVLHRGDVVEILAKFFPEYPIPTKCSDEVKPRVKPYKFSNQKLQDLGLEFTPVKQCLYDTVKSLQEKGHLAVPKPQEDSIKIQS

SEQ ID NO: 32514 - protein, 234 aa, Oryza sativa (indica cultivar-group)
MYMAAAAAGASTPFSFCRHGSHAEYDDAVFSGSWMARRPSAAPHGGGASGSSFGAAFRQQHLDLLDYLSDDQGVPAPPPPAAVPSASYVTPAPAMGPAEPVVPDAVAAAGGGYPRSVAAAAAAVAGEGRDRTMTDKIAFRTRSDDEILDDGYKWRKYGKKSVKNSPNPRNYYRCSTEGCNVKKRVERDKNDPRYVVTTYEGIHNHVCPGTVYYAAQDAASGRFFVAGISHPDLN

SEQ ID NO: 32515 - protein, 441 aa, Taxus canadensis
MEKAGSTDFHVKKFDPVMVAPSLPSPKATVQLSVVDSLTICRGIFNTLLVFNAPDNISADPVKIIREALSKVLVYYFPLAGRLRSKEIGELEVECTGDGALFVEAMVEDTISVLRDLDDLNPSFQQLVFWHPLDTAIEDLHLVIVQVTRFTCGGIAVGVTLPHSVCDGRGAAQFVTALAEMARGEVKPSLEPIWNRELLNPEDPLHLQLNQFDSICPPPMLEELGQASFVINVDTIEYMKQCVMEECNEFCSSFEVVAALVWIARTKALQIPHTENVKLLFAMDLRKLFNPPLPNGYYGNAIGTAYAMDNVQDLLNGSLLRAIMIIKKAKADLKDNYSRSRVVTNPYSLDVNKKSDNILALSDWRRLGFYEADFGWGGPLNVSSLQRLENGLPMFSTFLYLLPAKNKSDGIKLLLSCMPPTTLKSFKIVMEAMIEKYVSKV

SEQ ID NO: 32516 - protein, 113 aa, Zea mays
MAAVETVVLKVAMSCEGCAGAVRRVLSKMEGVETFDIDLKEQKVTVKGNVKPEDDVFQTVSKSGKRTSYWEGEATAPDAAAAPEAEAAPGTAAEAPPAAAPAAPEITPTKADA

SEQ ID NO: 32517 - protein, 587 aa, Glycine max
MGVLQEKLSSFYKSRWLVFVAAMWLQSWAGIGYLFGSISPVIKSSLGYNQKQLAMLGVAKDLGDAVGFMTGLLCEILPIWGALLVGAALNVVGYGWVWLVVTSQVPVLPVWAMCALIFVGTNGETYFNTVSLVSCVQNFPKSRGPVVGILKGFAGLSGAILTQIYALFHSPNQASLIFMVAVGPSLVGIGLMFIVRPVGGHKQVRPSDGKCFTLIYGVCLLLAAYLLGVMVVQDLVEVSETVISIFTGVLLLILLVPIVIPITLTFGPEQRHPEEEALLPPPQNKEAGKSQLDSDEVILSELEDEKPKEVDMLPASERQKRIAHLQQRLLQAAAEGAVRVKRRRGPHRGEDFTLTQALIKADFWLLFISMIMGSGSGLTVIDNLGQMSQSLGFDNAHIFVSMISIWNFLGRVGGGYISELVVRDHAYPRPVALAVFQLIMTLGHVFLGMGWPGSMYVGTLLVGLGYGAHWAIVPATASELFGLRNFGALYNFITIANPAGTLVFSSLIASTIYDAEAEKQHRQNMILQVLNASEPLKCEGSVCFFLTSMIMAGLCVVGAGLCMVLVLRTRIVYANLYGKASSSRLRL

SEQ ID NO: 32518 - protein, 195 aa, Triticum aestivum
  misc_feature (92)..(92): Xaa can be any naturally occurring amino acid
  unsure (1)..(195): unsure at all Xaa locations
RVLKPRVPPPSQAIYLHISAWPPTVRALSATSVGPFQGVKSTAGLPVSRRSNGDSLGSVSNGGRIRCMQVWPIEGIKKFETLYYLPPLSTEXLLKQVDYLIRSKWVPCLEFSKVGFIFREHNASPWYYDGRYWTMWKLPMFGCTDATQVINEVEEVKKEYPDAYVRIIGFDNMRQVQCVSFIAFKPPGCEESGKA

SEQ ID NO: 32519 - protein, 332 aa, Clostridium tetani E88
MGGINLSILICGGAGYIGSHMVARLLEEKEDIIILDNFQKGHRKAILGGKVYKGDIRNKALLDKIFNENSIEGVIDFAASSLVRESVEKPLEYFDNNIGGTIVLLKSMIEHNVKNIVFSSTAATYGEPENIPIREEDKTNPTNPYGESKLAVEKILKWCDKAYGLKYTVLRYFNAAGAYDTGKIGEDHRPETHLIPIIIEVALGKRDKIQVFGNDYNTKDGTCIRDYVHVMDLTEAHLLAMNKLKNGGKSGIYNLGNGEGFSVKEVIDMVQKVTGRKIKWEVANRRKGDPRVLIASSEKAKTQLGWHPKYNSLEKIIETAWKWHKNNPDGYM

SEQ ID NO: 32520 - protein, 130 aa, Zea mays
RLGFLISIYLQGFRGGLSRRSKNACGQQGSYSNKLFYTLNMPIIFYSALITKLYFIFQLFYREDRGNFLGNLLGKRKEAEYSGHSISGGGLAYYVTAPSRLADVLANTFHALVYVGFMLAACALFLKTWI

SEQ ID NO: 32521 - protein, 114 aa, Zea mays
PVIKNCKINHSVVGLRSCISEGAIIEDSLLMGADYYETEADKKLLAEKGGIPIGIGKNSCIRRAIIDKNARIGDNVKVFQTDVPTVKNINLDFSLGYYIILDMPFCPLIFNIYF

SEQ ID NO: 32522 - protein, 290 aa, Oryza sativa (japonica cultivar-group)
MAKDIEAAAAAEGGEYMAKDYSDPPPAPLIDAEELTKWSLYRAVIAEFVATLLFLYITVATVIGYKHQSDPGANAADAACSGVGILGIAWAFGGMIFILVYCTAGVSGGHINPAVTFGLFLARKVSLVRAVLYIVAQSLGAICGVGLVKGFQSAFYVRYGGGANELSDGYSKGTGLAAEIIGTFVLVYTVFSATDPKRNARDSHVPVLAPLPIGFAVFMVHLATIPITGTGINPARSLGAAVIYNQHKAWHDHWIFWVGPLIGAAIAAAYHQYVLRASAAKLGSSSSFRG

SEQ ID NO: 32523 - protein, 282 aa, Clostridium tetani E88
MEASNAKVVDDYINMYLKEIGQSDLLTAEEEIDLAKRIEKGDERAKSELIKSNLRLVVSIAKKYIGRGLSFLDLVQEGNLGLMKAVDKYDYKKGYRFSTYATWWIKQAVTRSIADQSRTIRIPVHMNEVISKMIRTKKKLEQELDREPTEEEIAETAEISIEKIKRIYNVSQDPVSLETPVGENEDTILQNFISDDRYLPEDKVTEQMLGDTLSNVLSTLSPREERIVRLRYGLVGDGESRTLEEIGREFNLTRERIRQIEARAIRKLRHPTRIKKLQGYFE

SEQ ID NO: 32524 - protein, 282 aa, Helicobacter hepaticus ATCC 51449
MYQNAIAKLKGKNPKEIYEHLALEDIHRAAQILKYLWESNPTQGFISLEIDPLLCDDVAQSVDEGVRLYHSIAMPNVMIKVPATFAGYEIMNALATKGININATLVFTPSQAKECALALQEGFKKAQDSHLEHSNLLQGVISVFVSRFDRVVDEHIVQSHLCSQVGIMNAMDCYEVIEQYNVSHIRTLFASTGVKGEDLPKSYYIDKLILPHSINTAPLESIRAYQMSEDKEQKSLINISSRLAFWEDMKEKNIHRDIIAHRLLDEGLVAFKQSFEDLLKSL

SEQ ID NO: 32525 - protein, 494 aa, Arabidopsis thaliana
MVLTKTATNDESVCTMFGSRYVRTTLPKYEIGENSIPKDAAYQIIKDELMLDGNPRLNLASFVTTWMEPECDKLIMDSINKNYVDMDEYPVTTELQNRCVNIIARLFNAPLEESETAVGVGTVGSSEAIMLAGLAFKRKWQNKRKAEGKPYDKPNIVTGANVQVCWEKFARYFEVELKEVNLSEGYYVMDPDKAAEMVDENTICVAAILGSTLNGEFEDVKRLNDLLVKKNEETGWNTPIHVDAASGGFIAPFIYPELEWDFRLPLVKSINVSGHKYGLVYAGIGWVVWRAAEDLPEELIFHINYLGADQPTFTLNFSKGSSQIIAQYYQLIRLGFEGYKNVMENCIENMVVLKEGIEKTERFNIVSKDQGVPVVAFSLKDHSFHNEFEISEMLRRFGWIVPAYTMPADVQHITVLRVVIREDFSRTLAERLVADISKVLHELDTLPSKISKKMGIEGIAENVKEKKMEKEILMEVIVGWRKFVKERKKMNGVC

SEQ ID NO: 32526 - protein, 585 aa, Mannheimia succiniciproducens MBEL55E
MQKLQENDLSTSQTFKRLWPTIAPFKIGLIAAAAALVLNALTDSGLIYLLKPLLDDGFGKADTSFLKLMAVLVIVFIFIRGITSFISSYCLAWVSGKVVMTMRRRLFKHLMYMPVSFFDQNSTGRLLSRITYDSEQVANSSSNALVTIVREGAYIISLLAVMIATSWQLSVVLFIIGPVIAVLIRLVSKIFRRLSKNMQNSMGELTATAEQMLKGHKVVLSFGGQQIEEQRFNEVSNDMRRKGMKMVVADAISDPIVQIIASLALSAVLYLATIPSIMSQNLSAGSFTVVFSSMLAMLRPLKSLTNVNSQFQRGMAACQTLFDILDLDTEKDKGKYEAERVKGDVSFKDVSFTYQGKDQPALKHLSFDIPHGKTFALVGRSGSGKSTIANLVTRFYDINQGEILLDGVNVQDYTLSNLRTHCSVVSQQVHLFNDTIANNIAYAAKDKYSREQIIAAAKAAHAMEFIEPLENGLDTVIGENGASLSGGQRQRLAIARALLRDSPVLILDEATSALDTESERAIQAALEELQKDRTVLVIAHRLSTIEKADEILVIDHGEICERGSHEELLALNGAYKQLHKMQFNG

SEQ ID NO: 32527 - protein, 687 aa, Ustilago maydis 521
MKYIVVSGGVISGIGKGVIASSTGLLLKTLGLRVTAIKVDPYMNIDAGTMSPTEHGEVYVLDDGGEADLDLGNYERYLDVTLSRDNNITTGKIYREVIEKERKGDYLGKTVQIVPHLTNAIQDWIERVAQRPVDGTGESPEVCIIELGGTVGDIESAPFVEAMRQFQFRVGHENFALIHVSLVPVVGGEQKTKPTQAAIRDLRGLGLVPDMIAARCTVPLERAVINKLSMFCHVGPEQVMAVHDVSSTYHVPLLLEQQGMVRFFQKRLGLDINGSIARPMKEQGLELRTRWRDLTVGHDRMVDKVEIVLVGKYTSLHDSYMSVVKSLEHAALRCDRKLVLKWVESSDLEPLAESENPVKYHQAWQALCSAEGILVPGGFGTRGTEGMISAARWAREKKVPYLGICLGFQIAVIEYVRNVLGIDTAGSAELDANCKDPVVIYMPEISKTHLGGTMRLGLRPSIFQEGTEEWSKIRQLYGGQPVVWERHRHRYEVNPEYVERIENATANPSSKATPQKIPNDIPAASPPFTSPRLGSSSSFAAAQKTFTGVDELKFVGRDEKGERMQIAELRHHPYFVGMQAHPEFCSRPLNPSPPFLGFIAASAGLLEEQLAKQKNYVPPHPKSHMISESEMVKRREAGEVNDKPATTPPGAATPTRSLSVNKGPKADLAVAARIAAAEKANGAVADH

SEQ ID NO: 32528 - protein, 488 aa, Haloferax volcanii
MGWKDAAEPVLSRMPAVARPEGHVPFRRKLGWTGGILVLYFFLTNVTLFGLDAATANDLFGQFRSILAGQQGSVLQLGIGPIVTASIVLQLLGGADLLGLDTDNNPRDQVLYQGLQKLLVGVMICLTGLPMVFAGNFLPADQAVATSLGIGTVGVKGLIFAQIAVGGVLILFMDEIVSKWGVGSGVGLFIIAGVSQQLVGGLFSWQGLGGTSGFFATWIGIITGAIELPASPTDLLSTVFLGQGQLLALITTLLIFGIVVYAESVRVEIPLSHARVKGARGRFPVKLIYASVLPMILVRALQANIQFLGRFLNSSWVGMPAWLGQYTSGQVTGGLLYYLAPIQSRSDWMWFLGLTSADPLDIAIRVLIDLIFMIVGGAVFAIFWVETTGMGPKSTAQQIQNSGMQIPGFRRNPQVIERVMERYIPQVTVIGGALVGLLAVMANMLGTIGASGTGLLLTVSITYKLYEEIAEEQLMEMHPMMRNMFGSE

SEQ ID NO: 32529 - protein, 545 aa, Coprinopsis cinerea
MRDSALPVLFLLFGLFPGIQGKVLSSASTLVVHNQFVAPDGFNRSAVLVNGVHPSPLIKANKGETYYLNVVNKLHDSTMLRSTSVHWHGLLQHGTAWADGSQSVSQCPISPGHSFEYRFPGGDQAGTFWYHSHFGTQYCDGLRGPFVIYDENDPYKHLYDVDDENTIITVADWYHTPAPSLPIPAFADSTLINGKGRYPGGPKVDLAIVNVVKGKRYRFRLLSLACEPNYQFSIDGHRMTIIEADGYLTEPVVVDRIQIFTGQRYSFILEANRPVANYWIRALPNYGNNGLTLGFEGGINSAILRYAGAPKSEPIYSNWPLDRGVQLLESMLHPIYSPPAPGPPVPGAADVNIYLDMGFQPESLTYTVNGSVFEPPSVPVLLQIMSGAKNAAELLPKGTLYPLKRNQVVELTVPGGLIGGPHPFHLHGHSFSVVKSAGSQTYNFDNPVRRDVTNAGEEGEEVVIRFETDNSGPWLFHCHVEFHLQMGLAIVFAEDIEGMVDRNPVPGAWKELCPIYDALPEDEKTVTILEPTNNTEVSSDAPTTN

SEQ ID NO: 32530 - protein, 963 aa, Vicia faba
MEPFTRDHRGSLEVFNPSSSETNGTPNPNPNPNPSNSWNTGTSSRGTEAPPLRDSIISDEVPTATSWMALKETTPSPKSGESGSVAEQRAAEWGLVLKTDSETGKPQGVGVRGSGGGGGSRRDSNNSVRSSGESSDDGREGGRGIPRVSEDLRDALSAFQQTFVVSDATKPDYPIMYASAGFFSMTGYTSKEVIGRNCRFMQGADTDPNDVAKIREALAAGTSYCGRLLNYKKDGTTFWNLLTIAPIKDEHGKILKLIGMQVEVSKHTEGTKEKMLRPNGLPESLIRYDARQKEKANSSVTELVEAVSKRPRSLSESANRLPFNKKPTNGSNDHATPPNSESSSRKSGSTLRSFRRKSHSGAGNSNSMHPITELPENNNKSRRRSFMGFMRKSLSNNERFNHEQVIDRNSSEDEDRLDSFDEQNIAQKREKRKGFDLATTLERIEKNFVITDPRLPDNPIIFASDSFLELTEYSREEILGRNCRFLQGPETDPATVKKIRYAIDNQTEVTVQLINYTKTGKKFWNLFHLQPMRDQKGEVQYFIGVQLDGSQHVEPLHNGIAEDTAKEGENLVKKTAENVDDALRELPDANMKPEDLWMNHSKVVHPKPHRREDSAWRAIQKIMESGEQIGLKHFKPIKPLGSGDTGSVHLVELCGTDHHFAMKAMDKGVMPNRNKVHRACTEREILDMLDHPFLPALYASFQTKTHICLITDYCPGGELFMLLDRQPAKVLKEDAVRFYATEVVVALEYLHCQGIIYRDLKPENVLLQSTGHVSLTDFDLSCLTSCKPELIVPSTNDKKKGQHGPIFMAEPMRASNSFVGTEEYIAPEIITGSGHTCAVDWWALGILLYEMFYGYTPFRGKNRQRTFANILHKDLKLPKSKQVSLSAKQLIYHLLQRDPTSRLGSKGGANDIKHHSFFKGINWALVRCTKPPELDAPLFDTNKEEKEKDDKYVDNGQEDMSVF

SEQ ID NO: 32531 - protein, 533 aa, Coprinopsis cinerea
MSFAWKALATLAVAIASRSAFAQSIIGNQDTMTISNINAGPDGFTRPVIAVNGEFPSPLVRANKGDDFRINVVNNLDDDTMLRQTSVHWHGVFQHQSAWADGPDGVTQCPIPQSGQEFEYAFNAGQEAGTFWYHSHYGTQYCDGLRGPLVIYDPEDPHQDLYDVDDENTIITLADWYHLQAPSIQGPAVSQATLINGKGRRPGSTEGDIAVVNVEKDSRYRFRIVSLSCDPDYTFSIDNHTMTIIEADGQNTKPLEVESIRVFAGQRYSVVVNADQAIGNYWIRAEPNIGDTGLVGTSGGGVNSAILRYATADEVEPDTPRLTNRPALQESNLRALTSGVPGGDGPADITFTFNLGLNFATGTFSMNPGESWVHPDTPVMVQIMNGVPAEDLVPAESLHTITRGQVVEVVIPPFGIAGPHPFHLHGHAFSVIKSAGGSPNFVDPVRRDVVAVGTEAGQGDTIIRFVADNPGPWFFHCHIEFHLVTGLAAVFMEAPDEIASSNPPPPSWDALCPAFSALPPSATSIRIVPTPTP

SEQ ID NO: 32532 - protein, 473 aa, Burkholderia sp. 383
MSRLIVVSNRVAAGEDTRPSAGGLAVGVMDALKETGGVWFGWNGEIVDAPDTEPAIQQDGNVTYATVGLNRRDYDQYYRGFSNATLWPVFHYRGDLARFDRQEYAGYLRVNAMLAKQLAALLRPDDLIWVHDYHLLPFAHYLRELGVKNPIGFFLHIPFPSPDMLRLVPPHEELVKFMCAYDVAGFQTETDKQAFTDYIERRGIGAASDDGMLHAHGRVVKVAAYPIGVHPDAIAQAAVQYSARKPVKMLREALDGRKLVMSVDRLDYSKGLVERFQSFERMLANAPGWQGRVSLLQIAPPTRSDVKTYQDIRETLEGEAGRINGRFSQLDWTPIQYLNRKYERNLLMAFFRMSQVGYVTPLRDGMNLVAKEYVASQDPADPGVLVLSEFAGAAAELTGALLVNPYDLSQMAEALERALSMPLAERQARHEENLARLRVNDLSVWRDTFVADLRSVAAAASVTRRAGRRVAHA

SEQ ID NO: 32533 - protein, 532 aa, Coprinopsis cinerea
MTTRLLAYLQLGIALYHSGVRAQATLNPTDTMIISNAQVSPDGFARSAVVVNGVHPGPLLTGQKDDTFAINVVNELNDPTMLRSTSVHWHGLFQKGTNWADGAEGVNQCPISPASPENTENAFEYRFTPAGHAGTFWYHSHFGTQYCDGLRGPMVVYDPQDPYLGDYDVDNASTVITLADWFHTPAPSLRAPFRPDATLINGIGRTPGGEQVDLAVVNVEAGKKYRFRVVSLACDVNFQFSIDGHKLTIIEADGQLTDRLEVDRIQIFTGQRYSVILNANQEPGNYRIRAIPNAGVPGLVGTVDEGVNSAILRYAGAPIEEPSSDPPANPVDLREWELHAFSGPGFDPSAPGTPEIGAADVVLPLQFTFVGGKFQVNGVAYESPDVPTLLQIMSGRNPGELMPEGSVHYLPRNQVVEVQIPSGSISNSGPHPFHLHGHAFSVVRSAGNSTPNFVNPVKRDVVSIGGASDSVTIRFVTDNPGPWFFHCHIEPHLVDGLAIVFAEAMEDTVQANPLPEDREYCSVLHAFSGNLC

SEQ ID NO: 32534 - protein, 291 aa, Trichodesmium erythraeum IMS101
MWEYTEKVMDLFYNPQNQGTITDKKEGEKIVSGEVGSIACGDALSLHLKVNEASGEILDAKFQTFGCASAIASSSALTAMLKGKTIDEAMNIKNQDIAGYLGGLPEEKMHCSVMGEEALEAAIFKYKGIEVEVHEEDDEGSLVCSCFAITENKIKRVILENNLKTAEEVTNYVKAGGGCGSCLADIDDLVASVYEAPDTTTQQIPTTTKPATNLTNLQKITLIQQVLQQEVRPVLAEDGGDVELFDVDGDRVLVKLKGACGSCSNVLVTLKGAIEATLKERVSESLVVEAV

SEQ ID NO: 32535 - protein, 549 aa, Coprinopsis cinerea
MTSRLLGYLQLAIVLYNSVARGQMILSPSDTMVISNANVSPDGVTRSAVVVNGVHPGPVLIGEKDDVFAINVVNELTDPTMLRSTSVHWHGLFQRGTNWADGAEGVNQCPISPERSFLYRFSPAGHAGTFWYHSHFGTQYCDGLRGPMVVYDPDDPYKNEYDVDDVNTIITLADWYHTPAPSIRGPFFPDSTLINGIGRTPGGPKVDLAVVNVEAGKKYRFRIVSLACDVNFQFSIDKHKLTIIEADGQLTDPLEVDRIQIFTGQRYSVILNANQTPDVYRIRAIPNAGVHGLTDTTAGGVNSAILRYANAEATELPQEDELPSNLVDLQEWMLHAYAGGDPAAPGRPEAGGADVRIPLRFTFSGGRFFVNGTAYSSPSVPTLLQIMSGANPGELLPENSIYYLPRNQVIEVEIPSAGISASGPHPFHIHGHAFSVIRSAGNTSYNYVNPVKRDVVNIGGDSDLVTIRFVTDNPGPWFFHCHIEPHLVGGLAIVFAEAMKDTMSANPDVPDEWKDLCDIYDKLEPSLTSLSIIRRAEPTDLSAKFRGLY

SEQ ID NO: 32536 - protein, 222 aa, Bacillus cereus ATCC 14579
MRFFIDTANLEDIKKAYKLGVLAGVTTNPSLVAKEGVKFEDRIAEICQAVPKVESVSAEVTPDAVTAEEMIAQAEELIKINGGDKNVTIKLPMTLAGLEACRYLTEKGVKTNVTLIFTVNQALLAARAGATYVSPFLGRLDDISEDGVLLVAKIAELFDVHQLDTQIIAASVRHPDHVTRVAMAGAHIATIPYKVIEQLAMHPLTDQGIEKFAADWAKAPKL

SEQ ID NO: 32537 - protein, 567 aa, Coprinopsis cinerea
MSPAVIAAGSTSFPFVGSVATLNIGNANLSPDGFERPSSVVNGVFPAPLIKANKGDHFSLNVVNDMTDDTQFRATSIHWHGIYQKHTNWADGVAGVNQCPIGPGDSFLYQFDVPNQAGTFWYHSHFRTQYCDGLRGPLVIYDPEDPYRDLYDVDDENTVITIGDWYHLQSPSITGVASNDATVINGKGRYVGGPLVDLAIINVVPGKRYRLRIMAISCDPNYIFSIDGHQLTVIEADAQSTQPLVVDSIQIFAGQRYSAILTADQPIGNYWIRALPNSGNNNLFTGFIDGTNSAILRYAGAPIADPTTSAPDAPVLLDETLLVPLDTTPVPGQPFPGGADVNLLLNLDFNVDAWRFYVNNETFNPPTVPVLLQVMSGAVAAQDLLPAGSVYTLPPNASVEISIPGGVISSPHPFHLHGHSFSVVKSAGIDTPYNYVNPVKRDVVSTGDVGSNTTIRFFTDNSGPWILHCHIDWHLDLGLAIVLAEDPVGTPALNPTPQDWDDLCPAYDALDPSMTEIAVVATPSPLDPQVVSVPESYLATSTEAEDVTVTVTVTVTEGDDAAATDSS

SEQ ID NO: 32538 - protein, 440 aa, Zea mays
MATHAGENGSGHENGGGHAEWRFARAAKEGALAVAGDKMSIRAVRFKISASLDARDPRPVLPLAHGDPSAFPAFRTAAEAEDAVAAALRTGKFNCYPAGVGLPEARRALAEHLSSDLPYKLSSDDIFVTAGGTQAIEVVVSVLAQPGTNILLPRPGYPNYEARAGLHNLEVRRFNLIPERGWEIDIDGLESIADKNTTAMVIINPNNPCGSVYTREHLAKVAEVARKLGILVIADEVYGNLVFGDTPFVPMGVYGHIAPVLTIGSLSKRWIVPGWRLGWVAVCDPNKVLQETKIIASITNFLNVSTDPATFVQGALPHILKNTKEDFFKRIIGLLAETSEICFSGIKDIKCITCPHKPEGSMFVMVKLNLYLLESIHDDIDFCCKLAKEESVILCPGSVLGMENWIRITFAIDSSSLLDGLERLKSFCQRHKKKNLLNGH

SEQ ID NO: 32539 - protein, 482 aa, GIBBERELLA ZEAE PH-1
MRTFTILASLTIGASAGTVSAPLVKHGFHYGASIDKRDTLNLEALNNITGGGYYAEFQIGTPPQNISFLLDTGSSDTWVNSNNTDLCHSQAAQKKNGYCMTTFKPEKSRTFKVVDRDGFDIRYLDTRRIEGDYFNDTVTIDGKTVKQQQLGLAIKSVRPTGIMGLGFSANVATNKSYPAIVDNMVSQGLIDTAAYSLWLNDLDSDQGTILFGGIDTKRFYGKLATLPLLPESTKSLNVTSFSVSLQGLNVKTPKNSNGIKMDSLKKNTVAILDSGSTVCLLPDPQVNEIYKAFDVLSVQDVPIPFADCGYGKDKGKGISFDFEFDGKTISIPMSEMIVNAFPDNQDLFKDPRLDIYFKDWDGVCMFGISPASTYGIGTSKFAILGDTFLRSAYVVYDLANEQVGIAEAYRSNNESSVVELKANSKLPDVSGVPEPESAAGHVSPASLVTLIVAAGITLTLLKDLRHLCYCSYCSPNCYTVPA

SEQ ID NO: 32540 - protein, 199 aa, Zea mays
  misc_feature (190)..(190): Xaa can be any naturally occurring amino acid
  unsure (1)..(199): unsure at all Xaa locations
MASSVGKMAAVVDTENPAATVVVGPPCAVDDDDLSQRANWLRAAVLGANDGLVSTASLMLGVGAVKADARAMVISGFAGLLAGACSMAIGEFVSVCSQRDVELARLDRGAEEEKALPSPVQAAAASALAFSVGALLPLLAAGFVTDYRLRIGVVAAVATATLAAFGCVGAVLGRAPVARSCARVVSGGWXPPWPSPSAS

SEQ ID NO: 32541 - protein, 281 aa, Escherichia coli
MSQTSTLKGQCIAEFLGTGLLIFFGVGCVAALKVAGASFGQWEISVIWGLGVAMAIYLTAGVSGAHLNPAVTIALWLFACFDKRKVIPFIVSQVAGAFCAAALVYGLYYNLFFDFEQTHHIVRGSIESVDLAGTFSTYPNPHINFVQAFAVEMVITAILIGLILALTDDGNGVPRGPLAPLLIGLLIAVIGASMGPLTGFAMNPARDFGPKVFAWLAGWGNVAFTGGRDIPYFLVPLFSPIVGAIVGAFAYRKLIGRHLPCDICVVEEKETTTPSEQKASL

SEQ ID NO: 32542 - protein, 1360 aa, Streptomyces verticillus
SARGEPSGAVTGRPVSGEPSGTLTGQSVPGEPSGTATDGPVPGEPSVTATGQLASGEPPMTATDIASAAASQVAALRADWRGHDYPRFVAALKMAASHCYAAALAAFLPRPDAPFTAADLLRVGTVPRHATFLSAVLPELRRHRLVGRDDSGGYRLLRTRFDDTKALRDLILRFPRYAPEGRLALHGLRVLRAAGDHRPVEHLLSDGGLADLEQLYDTGVIGRFHNRLAQALLRVVVERWPDDRPLRVLEVGAGTGGTTAALLPLLPPERTRYVFTDVSPAFLTRAEHRFAAYDFLTFRTLDLDADPAAQGLPEGGFDVVVAANALHTARSVEAAVRNVAALAAPNGLLLAVESHDPYVLAPLFGALDTFWDRTDHHERPHSPLLTADRWAALFTRCGFTDVVRTGDDTAPCRDDFSVLLATAPRRPTPHPYPYPHPSPPGPGRHWTVVAETRGELPLAREVAARLPGPGDGPAHSVEAVDDVPAHRPSTPSRGATGICLILGAHQLPEPAATVTLTTRRAALLRRITAACPRRPDGARTALTVVTRPSGALPPPERPLAPEDAAVWGVMRTLANEEPELDVRTISLDRTGRTETDARRLARELLTATGETEVALTRSGGRFAPRELPLPAGHITTTAEHATAYALEIRTPGLSYRPAWVECAPEPVGPGEVAIDVRAAALNYRDIMQAVGLLPAEADEGTFTEAGPGLECAGVVTAVGDGVTTVRPGDRVFALAPASLASRTRTVVQAVGRMPHTMSFAEAATLPVVYATVHYSLHDLARLRPGETVLVHGGAGGVGLAALRYAHLRGARVIATAGTPAKRELLRHLGADHVLDSRGLDFAAHVRDVTDGRGVDVVVNSLAGEAITRGLELLRPGGRFVELGKRDIYENQPLLLRPFRHNLAFFGVDLTSLAFDPDQGARLFAEVTRRVHDGSYRPLPHSAYPAARVAEAFRLLQHSRHVGKVVVTFDPLDEPAVVERPVTAPRFGSQGTYLVTGGTSGFGAAGARWLADRGVRRLALVSRRGPHAPEAAGLLADLAARGVTATAYAADAADPDGMRRVIRLIDATGHPVDGVLHCAMHLDDDPLADLTDERFAAVLTPKTTGAAVLERLLADRPLETFLLYSSDTTFLGNIRQAAYVAANLHLEALARQRRQRGLPAQTLAWGAIDETGYVARNDLARTLTAVGIEPLSPREALTTAGLLISQGATVAGVGRYNWARLRGVLPLLASPRCASLLPEDLQEADHTHEEILRILATMPYEEAARAVAATLARLMADVLHLDERNIDHDRRLDEYGLDSLMLAELLVSLRKRFDIDIPPLELLRSGGTITDISHLVLLRLGITADDPEPPARDAEQSVGER

SEQ ID NO: 32543 - protein, 320 aa, Vitis vinifera
MRNPASASTSKTPCCTKVGLKRGPWTPEEDELLANYVKREGEGRWRTLPKRAGLLRCGKSCRLRWMNYLRPSVKRGQIAPDEEDLILRLHRLLGNRWSLIAGRIPGRTDNEIKNYWNTHLSKKLISQGIDPRTHKPLNPKPNPSPDVNAPVSKSIPNANPNPSSSRVGEIGSNHEVKEIESNENHKEPPNLDQYHSPLAADSNENWQSADGLVTGLQSTHGTSNDDEDDIGFCNDDTFPSFLNSLINEDVFGNHNHHQQQQQQQQLQQVQQPSNVIAPLPHPAISVQATFSSSPRTVWEPAALTSTSAPLVHDQKHSMSP

SEQ ID NO: 32544 - protein, 570 aa, Leptospira interrogans serovar Copenhageni str. Fiocruz L1-130
MLVTGTSGPQETLSYKLHSSSWRFWNANSFVWKKIWSIFWFFKLGKIFFPSYRDTDAHEKFFRTLGEDCRNFFLSMGGVYIKLGQYLGNLSHIFPDSFTESLQDLQDRVPPHPFSEIEERFRSEFGKEIIKVFPDISNVPEASASTAQVHVASIGGQKVAVKVLYPGIETLIANDLKNIRSFLKRINRYLFRFEYKKIHDEITRLVTRETDLKLEADSYDRMRQFFVEEPDYIFPKVIRQFSGKSVLVTEFIEGVKITRATPVLKGQAKSRPVELLVRAYVLMIFQYRFYHADPHPGNLIYTPEEKLCFLDFGAVGEINSGGAYALKKIFLCAIAKDYFGVVDGLEEMGALSASADRDKLEEVVRYSLEKLGRFVADTDYFRNLSLGQIHTREDQLFLKEINSSLKEIFRMIQIPENFIFLERVLGLLVGITSILDPYRTVLDYGEKPFRTVASGKEGGLEFLLLNEDKNLLGNTLSIPGEFYKVLQNINRGKQGIQLREVERHTRKMYILGHQILYSGFLIAGIHFGNDYLEKGMEIQSWGFFTSSVIFGFILIYSFWKNKLKKKGTSL

SEQ ID NO: 32545 - protein, 200 aa, Oryza sativa
  misc_feature (191)..(191): Xaa can be any naturally occurring amino acid
  unsure (1)..(200): unsure at all Xaa locations
MAAMMNNERSSSNKLQVDAENPAAVGDELDLAARANWLRAAVLGANDGLVSTASLMLGVGAVKAEARAMVISGFAGLLAGACSMAIGEFVSVCSQRDVELAQLERDGKRGGEEEKALPSPAQAAAASAMAFSVGAVVPLLAAGFIVNYRLRIAVVVAVASVALAAFGCVGAVLGRAAVARSSARVVLGGWXPPWASPSAS

SEQ ID NO: 32546 - protein, 342 aa, Haemophilus influenzae 86-028NP
MKERIKAICLEKPNNVVVKEVPYPEKSDNDVLIQVESMGICGSDIGAYRGTNPLVTYPRILGHEIVGRVIESGIGMPDRVRVGDRVIVDPYVFCGQCYPCSIGRTNCCESLKVIGVHIDGGMQEVIRHPAHLLTKVPDNLPIHQLPLAEPLTIALHALHRTTLKSGEHIVIIGAGAIGLMAALAAVQYGAIPILVDILEQRLEYAKSLGIEHIVNPHKEDDIKRIKEITSGRMAEVVMEASGANISIKNTLHYTSFAGRIALTGWPKTETPLPTNLITFKELNIYGSRTSKGEFEEALDMLATNKINASHIITKCIKFEEIPSFISDLSDHPENYLKINAVF

SEQ ID NO: 32547 - protein, 270 aa, Pyrus caucasica
AHYKSEADVGEAFAEAFKTGLIKREELFITTKIWNSDHGHVVEACKNSLEKLQLDYLDLYLVHYPMPTRHNAIGKTASLLGEDKVLDIDVTISLQQTWEGMEKTVTLGLVRSIGLSNYDLFLTRDCLAYSKIKPAVSQFETHPYFQRDSLVKFCIKHGVLPTAHTPLGGAAANKDMFGSVSPLDDPILNDVAKKYGKSVAQICLRWGIQRKTAVIPKSSKIQRLKENLVVLEFQLSDEDMQLIYSIDRKYRTSLPSKTWGLRRVCKGEFV

SEQ ID NO: 32548 - protein, 582 aa, Pectobacterium atrosepticum
MLNDKDLSTWQTFRRLWPMISPFKAGLAVAAIALIINAAGDTLMLSLLKPLLDEGFGKADRSVLLWMPLVVIGLMLVRGASGFVSSYCVSWVSGKVVMNMRRRLFSHIMGMPVAFFDQQSTGTLLSRITYDSEQVAASSSGALITVVREGASIIGLFILMFYYSWQLSIILIVIAPIVSIAMRMVSKRFRSISKNMQDTMGHVTTSTEQMLKGHKEVLMFGGQDVETKRFEQVSNRMRQQGMKMVSASSISDPIIQLIASLALAFVLYAASFPSVMETLTAGTITVVFSSMIALMRPLKSLTNVNAQFQRGMAACQTLFAILDMEQERDTGKREIERAKGELEFRQVNFAYPARENLALKNINLHIPVGKTVALVGRSGSGKSTIASLITRFYDIQSGEILLDGHDLREYRLSSLRNQVALVSQNVHLFNDTIANNIAYARNENYSREEIERAAKMAYAMDFINKMEHGLDTVIGENGVMLSGGQRQRIAIARALLRDSPILILDEATSALDTESERAIQAALDELQKDRTALVIAHRLSTIEKADEILVVEDGRIIERGNHTALLATNGAYAQLHRMQFGE

SEQ ID NO: 32549 - protein, 331 aa, Arabidopsis thaliana
MEDEAHEFFHTSDFAVDDLLVDFSNDDDEENDVVADSTTTTTITDSSNFSAADLPSFHGDVQDGTSFSGDLCIPSDDLADELEWLSNIVDESLSPEDVHKLELISGFKSRPDPKSDTGSPENPNSSSPIFTTDVSVPAKARSKRSRAAACNWASRGLLKETFYDSPFTGETILSSQQHLSPPTSPPLLMAPLGKKQAVDGGHRRKKDVSSPESGGAEERRCLHCATDKTPQWRTGPMGPKTLCNACGVRYKSGRLVPEYRPAASPTFVLAKHSNSHRKVMELRRQKEMSRAHHEFIHHHHGTDTAMIFDVSSDGDDYLIHHNVGPDFRQLI

SEQ ID NO: 32550 - protein, 475 aa, Prochloron didemni
MSKLILFWHRRDLRISDNMGLAAARKQSSKIVGLFCLDPNILNSNEVAPARVTYMLGCLQELKESYSKIGSQLLIVRGEPIEAIPQLAVALQVTGVFWHKDGEPYARERDGKVEQELLKQGIAVTNYWDQLLHPPEDILTQSGKPYTVYTPFWKNWSQKPKLEVAEKLDRIQGLTAEEIKIAQETGVVSLPTGKDLGYYWDGELILTPGETAAREQLEEFSERAIAQYQEQRNFPAVEGTSLLSPALRFGVIGIRTVWQATLEATKNSYSEEVRANIETWQKELAWREFYQHALYHFPQLTVEPYRQQFKDFPWDNNPEHFQAWCEGKTGYPMVDAAMRQLNETGWMHNRCRMIVASFLTKDLIINWQWGEQYFMQKLCDGDLASNNGGWQWSASCGMDPKPLRIFNPASQAKKFDPEGEYIRQWLPELSSIDTEYLVRGKIPDDERERCDYPQPIVDHNLRQREFKRRYKELSP

SEQ ID NO: 32551 - protein, 970 aa, Vicia faba
MEKHLKKSPSSSSSSSMRPSFPRDPRGSLEVFNPTSNTSSPVRSPSNLKNWTETEEPRNEFPDKVTNTSWMAIKEGETGAAVQRAAEWGLVLTTDAETGKPQGVAVRHSGGDEPNAVELESKRNSNNTVRTSGESSDGGDPRGFPRVSDDLKDALSAFQQTFVVSDATKPDYPILYASAGFFKMTGYTSKEVIGRNCRFLQGADTDPNDVARIREALEGGKSFCGRLLNYKKDGTPFWNLLTISPIKDDDGNVLKLIGMLVEVNKHTEGSKEKKLRPNGLPESLIRYDARQKEKATSSVSELLEAMKRPRAMSESGHRPFIRKSGGGGSSEEDERLENKSRRKSDSVASFRPKPQGKIRHSMERISELPENKQKNSRRGSFMGFMRKSHSIDESIDNEVIVDVSSGSEDDERDDSFEFDDKEKLKEKRKGLDLATTLERIEKNFVITDPRLPDNPIIFASDSFLELTEYSREEILGKNCRFLQGQETDPATVRKIREAIDNQTEVTVQLINYTKSGKKFWNLFHLQPMRDHKGEVQYFIGVQLDGSQHVEPLHNCIAEESAKEGELLVKETAENVGEAVKELPDANQKPDDLWKNHSKVVRPKPHRKDDDAWRAIQNVVGNGEQVGLKHFRPIKPLGSGDTGSVHLVELEGTGHYFAMKAMDKGVMLNRNKVHRACTEREILDMLDHPFLPALYASFQTKTHVCLITDYYPGGELFLLLDQQPTKVLKEDSVRFYAAEVVIALEYLHCLGIIYRDLKPENVLIQRNGHVSLTDFDLSCLTSCKPQLILPATEEKKKRKNKKKKGQPKNQEVPMFMAEPMRASNSFVGTEEYIAPEIITGSGHTSAVDWWALGILLYEMLYGYTPFRGKTRQKTFGNILHKDLKFPKSKPVSPHGKQLIYWLLHRDPKNRLGSLEGANEIKNHPFFKNVNWALVRCMKPPELDAPILLDNDEKKEAKDIDPGLDDLQKNIF

SEQ ID NO: 32552 - protein, 193 aa, Ustilago maydis 521
MQTIKCVVVGDGAVGKTCLLISYTTNAFPGEYIPTVFDNYSANVMVDGKPVSLGLWDTAGQEDYDRLRPLSYPQTDVFLVCFSLVSPPSFENVRTKWWPEVSHHAPNIPTILVGTKLDLREDPETIAKLRDRRMQPITYAQGNQMARDIHATKYLECSALTQKGLKGVFDEAIRSVLAPAPVKSKKKNNCMIL

SEQ ID NO: 32553 - protein, 492 aa, Debaryomyces hansenii CBS767
MNMNFIRFISIIAFLKISFSHPTRSLETFNVGEQDLFNPIVERASASNNDGTISLSLNKVQTGVYVTTITVGTPPQSVLVAFDTGTSDTWVRLFNSSDCRNSEEPCYITEKIFFDAPKSTSFESLDSGFSMIYGAGEINGTWTKDTFQIGGVGIDALQFGAGDESRELPMIYGLVGLGLKKFESTYTFEYGIKFKVKNTYYNTEKRHVYDNLPARLKKDGTIKKNCYSVFYPDSGKTNCRIVFGGADTAKYNSLITVPIIQKAVGDWSDYNEASMLAVDLSQIYVTHGNDKAPILSKNYPTLIDTLTYLTVAPTSVVENLATLLGGKYFADIYGIVYTCNNDIKLGFEFSGNTLFAPAVKLSDKSGISCIFPITTNEDDYMILGGKFLTQFYTFFDLDDLQISIGNYKESKEKKVQAIDINEKAPKSKKVKNYSSTFDYSRSDKLSIHYTSAIYRKGGHGSSSFFNDIWNSTMYSLGQAWAYLRSWFNNKFS

SEQ ID NO: 32554 - protein, 153 aa, Oryza sativa
MAPKAEKKPAAKKPAEEEPAAEKAEKAPAGKKPKAEKRLPAGKGEKGSGEGKKAGRKKAKKSVETYKIYIFKVLKQVHPDIGISSKAMSIMNSFINDIFEKLAGESAKLARYNKKPTITSREIQTAVRLVLPGELAKHAVSEGTKAVTKFTSS

SEQ ID NO: 32555 - protein, 342 aa, Burkholderia mallei ATCC 23344
MRARRPRGATETAMQKILVARPIFPDVIERLKQYFDVDWNDGDALAPDALKARLADKDGALTAGDMIDASVLAAAPRLRVVSNMAVGYNNFDIGAFDAAHVLGTNTPDVLTETTADFGWALMMAAARRITESEHWLRAGQWRKWSYDSFLGADIHGATLGVLGMGRIGQALARRARGFGMRVIYHNRSRVAPEIEAALNAEYVPKAALLAQADHVVLVLPYSAQSHHTIGAAELALMKPSATLTNIARGGIVDDAALADALREKRIAAAGLDVFEGEPSVHPALLDVPNVVLTPHIASASEGTRRAMANLAADNLIAALGAGPRAGRPPNPINPGVLGKARI

SEQ ID NO: 32556 - protein, 483 aa, Streptomyces violaceus
MTQGPLTTEAGAPVADNQNSETAGVGGPVLVQDQLLLEKLAHFNRERIPERVVHARGAGAYGTFTLTRDVSRWTRAAFLSEVGKRTETFLRFSTVAGSLGAADAVRDPRGWALKFYTEEGNYDLVGNNTPVFFIKDAIKFPDFIHTQKRDPYTGSQEADNVWDFWGLSPESTHQVTWLFGDRGIPASYRHMNGYGSHTYQWNNEAGEVFWVKYHFKTDQGIKNLTQDEANRLAGEDPDSHQRDLREAIERGDFPTWTVQVQIMPAADAAGYRFNPFDLTKVWPHEDYPPVEIGTLELNRNPENIFAEVEQSIFSPAHFVPGIGPSPDKMLQGRLFAYGDAHRYRVGINADHLPVNRPHATEARTHSRDGFLYDGRHKGAKNYEPNSFGGPVQTDRPLWQPTPVTGVTGDHAAPSHAEDDDFTQAGDLYRLMSEDEKGRLIDNLSGFIAKVSRDDIAERAIGNFRRADEDFGKRLEAAVQALRG

SEQ ID NO: 32557 - protein, 468 aa, Pyrococcus abyssi GE5
MGARDIIYAIEKWFPEVERPKKHVPLKEKFMWTGLALILYYVLAEIPVYGIPERIQDYFQFLRVVLAGRNGSILTLGIGPIVTAGIILQLLVGSEIIKLDLANPEDRRFYQALQRVFSVFMCFLEAAIWVLGGAFGRVGVDVTYAIAALMILQLAFGGIILIVLDELVSKWGIGSGISLFIAAGVSQRILTRSLNPLTDPNIIDPLTGKPAIVGAIPYFIQHILKGDLKGALYRGGTAPDMMAVIATIIVFLVVVYFESMRVEIPLGYRGVTIRGRYPIRFLYVSNIPIILTFALYANIQLWARVLDRLGHPWLGTFDPTTGNPVGGFVLYVIPPRSIFTVIDNPVRALVYLILTVISSLIFGFLWVELTGLDARTIARQLQRAGLQIPGFRRDPRTLERVLQKYIPYVTFWGSLTVALIAVLADFLGALGTGTGILLTVGILYRFYEEIAREQISEMFPALRRFFAT

SEQ ID NO: 32558 - protein, 338 aa, Haemophilus influenzae R2846
MAILVTGGAGYIGSHTVVELLNAGKEVVVLDNLCNSSPKSLERVKQITGKEAKFYEGDILDRALLQKIFAENEINSVIHFAGLKAVGESVQKPTEYYMNNVAGTLVLIQEMKKAGVWNFVFSSSATVYGDPKIIPITEDCEVGGTTNPYGTSKYMVEQILHDTAKAEPKFSMTILRYFNPVGAHESGLIGEDPNGIPNNLLPYISQVAIGKLAQLSVFGSDYDTHDGTGVRDYIHVVDLAVGHLKALQRHENDAGLHIYNLGTGHGYSVLDMVKAFEKANNITIAYKLVERRSGDIATCYSDPSLAAKELGWVAERGLEKMMQDTWNWQKNNPKGYRD

SEQ ID NO: 32559 - protein, 343 aa, Streptomyces viridochromogenes
MTFKAEYIWIDGTEPTAKLRSKTKIITGQPAGLDALPIWGFDGSSTNQAEGHSSDCVLKPVFTCPDPIRGGDDILVLCEVLNIDLTPHASNTRAALAEVAERFAAQEPIFGIEQEYTFFQDGYPLGFPKGGFPAPQGGYYCGVGADEIFGRDVVEAHLDNCLKAGLAISGINAEVMPGQWEFQVGPVSPLEVSDHLWVARWLLYRTAEDFDVAATLDPKPVKGDWNGAGAHTNFSTKAMRESYDAIITAAESLGEGSKPLDHVKNYGAGIDDRLTGLHETAPWNEYSYGVSDRGASVRIPWQVEKDGKGYIEDRRPNANVDPYVVTRLLVDTCCSALEKAGQV

SEQ ID NO: 32560 - protein, 421 aa, Streptomyces violaceoruber
MTRRVVITGVGVRAPGGSGTKEFWDLLTAGRTATRPISFFDASPFRSRIAGEIDFDAVAEGFSPREVRRMDRATQFAVACTRDALADSGLDTGALDPSRIGVALGSAVASATSLENEYLVMSDSGREWLVDPAHLSPMMFDYLSPGVMPAEVAWAAGAEGPVTMVSDGCTSGLDSVGYAVQGTREGSADVVVAGAADTPVSPIVVACFDAIKATTPRNDDPAHASRPFDGTRNGFVLAEGAAMFVLEEYEAAQRRGAHIYAEVGGYATRSQAYHMTGLKKDGREMAESIRAALDEARLDRTAVDYVNAHGSGTKQNDRHETAAFKRSLGEHAYAVPVSSIKSMGGHSLGAIGSIEIAASVLAIEHNVVPPTANLHTPDPECDLDYVPLTAREQRVDTVLTVGSGFGGFQSAMVLHRPEEAA

SEQ ID NO: 32561 - protein, 114 aa, Musa acuminata
VQFGAFIVATILKDRELYHEWTIELKAMADRIINMRQQLFDALRARGTPGDWSHIIKQIGMFTFTGLNTEQVTFMTKEYHIYMTSDGRISMAGLSSKTVPHLVDAIHAAVTSMK

SEQ ID NO: 32562 - protein, 344 aa, Bacillus thuringiensis serovar konkukian str. 97-27
MGEKMLGIINATGSFPSLKKVTGHRSLAALPFGGRYRLIDFMLSNMVNSNIHSVAVFTSHKNRSLMDHVGSGKQWDLDRKRDGLFLFPPNCQCDQDEFGSFAHFRRHIDYFLRSREEYVVITNSHLVTALNFQAVLERHIHTAADITEVCHEGVSLQTYVLKKQLLLDLFEAYKDMEQYSLFDVVREKRGKSLHIATYEHTGYVAIIDSIESYYKHSLEILQPAIWKQVFKKEAPIFTKVKDEPPTRYVKGAAVKNTMIANGSIIEGEVENSVVSRSVKIGKGSIVRNSIIMQKSQIGDNCIIDGVIIDKDVKIGDGVVLKGNADEPYVVEKGSVQNSTINSYS

SEQ ID NO: 32563 - protein, 151 aa, Pyrococcus abyssi GE5
MKTLKMQRRVAAELLKCGENRIWIDPERVDDVASAITREDIRRLIKEGVIKKKPVKGQSRYRARIRHEQKKKGRHRGPGSRKGKKTARMGKKELWIKTIRALRKELRKLKEQKKIDRRTYRMLYIRAKGGQFKSKHQLYMFLEEHNLLKKR

SEQ ID NO: 32564 - protein, 124 aa, Griffithsia japonica
MAPKGKSVPIAEKKVAKKAVPGATEKVTKKKKRSESYSIYIYKVLKQVHPETGISSKAMSIMNSFVDDLFERIATEAAKLATYNNSKTLTSREIQTAVRLLLPGELAKHAVSEGTKAVTKYSSS

SEQ ID NO: 32565 - protein, 433 aa, Synechococcus elongatus PCC 6301
MVTSSPFKTIKSDEIFAAAQKLMPGGVSSPVRAFKSVGGQPIVFDRVKDAIAWDVDGNRYIDYVGTWGPAICGHAHPEVIEALKVAMEKGTSFGAPCALENVLAEMVNDAVPSIEMVRFVNSGTEACMAVLRVVRAYTGRDKIIKFEGCYHGHADMFLVKAGSGVATLGLPSSPGVPKKTTANTLTTPYNDLEAVKALFAENPGEIAGVILEPIVGNSGFIVPDAGFLEGLREITLEHDALLVFDEVMTGFRIAYGGVQEKFGVTPDLTTLGKIIGGGLPVGAYGGKREIMQLVAPAGPMYQAGTLSGNPLAMTAGIKTLELLRQPGTYEYLDQITKRLSDGLLAIAQETGHAACGGQVSGMFGFFFTEGPVHNYEDAKKSDLQKFSRFHRGMLEQGIYLAPSQFEAGFTSLAHTEEDIDATLAAARTVMSAL

SEQ ID NO: 32566 - protein, 430 aa, Bifidobacterium longum NCC2705
MATAQLDVDSNKFNLPVVKASAGPDGIVVSKLRNDGWVTLDPGFLTTAQCESKITYIDGKHSILRYCGYPIEQLCENSDFLEVAWLLRHGELPSRAEYEQFCADINHKTMVGEDFRTFMGSFPRSAHPMSVLASAINALATFYPDTTDISDNDQLDEAAKIIMAKARTIVSYIFRRRRDEPMLYPDYARGYVDDFLRMCFAVPYEPFESDPLYVHALGRLLIIHADHEQNCSTSVVRIAGSAHANLYSAVAAGVNALSGPLHGGANEAVLRQLKAIRDSGKSVAEFVRDAKENGQKISGLGHRVYKSYDPRAAIARKYLEKIMEREDTQKLPSDERALFAVATELEDIALNDEYFVSRNLYPNVDFYTGLIYRAIGFDPAMFTTLFALGRIPGWIAQYREMLADPNTKIGRPRQVYTGPVERDFVPMDER

SEQ ID NO: 32567 - protein, 587 aa, Haemophilus influenzae 86-028NP
MQEQKLQENDFSTLQTFKRLWPMIKPFKAGLIASGIALVFNALADSGLIYLLKPLLDDGFGKANHSFLKIMAFVVVGMIILRGVTNFISNYCLAWVSGKVVMTMRRRLFKHLMFMPVSFFDRNSTGKLLSRITYDSEMIASSSSGSLITIVREGAYIISLLAVMFYTSWELTLVLFVIGPIIAVLITIVSKIFRKLSKNLQDSMGELTATTEQMLKGHKVVISFGGQFVEEERFNKVSNNMRRKGMKMVTADSISDPVVQIIASLALVAVLFLATTPLIAEDNLSAGSFTVVFSSMLAMMRPLKSLTNVNSQFQRGMAACQTLFAILDLEPEKDNGTYKAEPAKGALEFKNVSFAYQGKEELALNNISFSVPAGKTVALVGRSGSGKSTIANLVTRFYDIEQGEILLDGVNIQDYRLSNLRENCAVVSQQVHLFNDTIANNIAYAAQDKYSREEIIAAAKAAYALEFIEKLPQGFDTVIGENGASLSGGQRQRLAIARALLRNSPVLILDEATSALDTESERAIQSALDELKKDRTVIVIAHRLSTIENADEILVIDHGEIRERGNHKALLEQNGAYKQLYSMQFSG

SEQ ID NO: 32568 - protein, 655 aa, Dechloromonas aromatica RCB
MPTQANFAAVDGLHTFPRLLFHHAQTRPNAPAMREKYLGIWQTWTWLDVAERVRALACGLASLGFKRGDNLAIIGDNRPHLYMMMTAAQCLGGVPVPLYQDAVANEMLFVLQDAGIRFVVVEDQEQVDKMLEIQDQVPTLEHIVYDDPRGMRHYSQPFLHDIHELMEMGRIHDRNHSDFLNAEVEQGHFDDTSVMLYTSGTTGKPKGVCQTHAAFIAAAQGGVQVDKLGPDGDILSYLPMAWVGDHLFSYAQALVAGFTINCPESGETVMSDLREIGPTCYFAPPRVFESLLTSVMIRMEDAGKLKQKMFHHFMAVAKRCGSDILDGKSVGLGDRLQYWLGNLLVYGPLRNVLGMSRIRVAYTAGAAIGPELFRFYRSMGINLKQFYGQTETCAYVCLQPDGAIKFDSVGQPAPGVEIKIADNGEVLVKGPMLLKEYYKRPDATAETINADGWFMTGDAGFLDEDGHLKIIDRAKDVGKLSNGAMFAPNYIENKLKFFQHIKEVVCFGHERDMVCAFVNIDVGAVGNWAERRGIAYSGYADLAGKPEVLELIRECVEQINADLVNDTMVADSQIHRFLVLHKELDPDDDELTRTRKVRRNFVAEKYKVLIDALYSGKSNQFIETEVKFEDGRRGKVSADLRIIDAKTFPIVKKAA

SEQ ID NO: 32569 - protein, 84 aa, Triticum aestivum
PRVRPRVRRWPGCRVAWEGFSDASDADLIAEHEIWAAVHPLAKNEAFNCSTGDAFKWKQLWPLLTDRFPAKRAGYEARGHALRP

SEQ ID NO: 32570 - protein, 382 aa, Phanerochaete chrysosporium
MAFASSLLALVALAAVTSAAPATTQATCPDGTKVNNAACCAFIPLAQDLQETIFQNDCGEDAHEVIRLTFHDAIAISQSKGPSAGGGADGSMLLFPTIEPNFSANNGIDDSVNNLIPFMQKHDTISAGDIVQFAGAVALTNCPGAPQLEFLAGRPNKTIPAIDGLIPEPQDSVTSILERFKDAGNFSPFEVVSLLASHSVARADKVDETIDAAPFDTTPFVFDTQIFLEVLLKGVGFPGTANNTGEVASPLPLTSGSDTGELRLQSDFALARDERTACIWQGFVNEQALMAASFKAAMAKLAVLGHDRNTLVDCSDVVPAPKPAVNKPASFPATTGPQDLELSCNTKPFPSLSVDAGAQQTLIPHCSDGDMTCQSVQFNGPA

SEQ ID NO: 32571 - protein, 583 aa, Vibrio vulnificus YJ016
MSINTDESTWRTFKRLWTFIRLYKSGLAVAVVALIINAVSDTYMVSLLKPLLDEGFGSAESDFLRTLPLLVFGLMFIRGISSFVSTYCLSWVSGNVVMQVRRMVFNHYMQMPVSYFDKEKSGSLLSRITYDSEQVSAATSQALVSIVREGTSIIGLLVLMFYNSWQLSLVLILVAPVVAWAIGFVSKRFRKISKNMQTTMGIVTSSAEQMLKGHKVVLSYGGQEVEKSRFDVVSNQMRQQSMKLITAQAAANPIIQMIASIAIVVVLYLASVDTIKDQLTPGTFTVVFSAMFGLMRPLKALTNVTSQFQRGMAAAQTLFALVDLEPEKNTGTYSVERAKGEVNVKDISFTYEGAEKPALSHVSFDIPRGKTVALVGRSGSGKSTIANLFTRFYDVDSGEIQLDGVDVRDYELKNLRTQFALVSQNVHLFNDTIANNIAYAAGDKYSREDIERAAELAHAMEFISKMENGLDTVVGENGASLSGGQRQRVAIARALLRDAPVLILDEATSALDTESERAIQSALDELQKNKTVLVIAHRLSTIEKADQILVIDDGAVVERGSHSELIEKDGAYAQLHRIQFGEG

SEQ ID NO: 32572 - protein, 355 aa, Euphorbia esula
MEDSTQISLIFDGLYCEEQGIGEDFDDGNEDYVKKELSLSSVLLEQDLFWTDDELLNLISKEKETHFSFGDFSSHGSLMVARKEAIDWILRVKGFYGFNALSCVLAVNYFDRFISSLVFTRDKPWMGQLAAVACLSLAAKMEETQVPLLLDLQVEESKYVFEAKTIKRMELLVLSTLQWRMNPVTPICYFDHIIRRLGLKNHLHWEFLRRCELLLLSVISDSRFMSYAPSILATSIMIHVIKEVDPFSQMEYQNQLLDVIKINKEEVNQCYKLILELSGKQDQGYKRKYPSRPGSPNGVIDAYFSGDSSNDSWGVSSSISSSPSIPRFKRIKSQDQQMRLPSINRMFVDVLSSPH

SEQ ID NO: 32573 - protein, 70 aa, Festuca rubra
MSCSCGSSCGCGSNCKCGKMYPDLDEQASTTTQAVVVVGVAHENKAGQFEMASGEGCKCGANCKCDPCNC

SEQ ID NO: 32574 - protein, 280 aa, Arabidopsis thaliana
MASTFRLSISFLTLILFSLWVVEAHTSRKLISIKEKEGQDISHLLKDGEFDDPSLYMYFTLNDLKLGTKLLIYFYKNDLQKLPPLLTRQQADLIPFTKSKLDFLLDHFSITKDSPQGKAIKETLGHCDAKAIEGEHKFCGTSLESLIDLVKKTMGYNVDLKVMTTKVMVPAQNSISYALHNYTFVEAPKELVGIKMLGCHRMPYPYAVYYCHGHKGGSRVFEVNLVTDDGRQRVVGPAVCHMDTSTWDADHVAFKVLKMEPRSAPVCHFFPLDNIVWVTK

SEQ ID NO: 32575 - protein, 781 aa, Debaryomyces hansenii CBS767
MADFAKSIFGFSGFHKKDNQTNCLSNEASKENQRPYQQLPSQYPEQAQPLSQHTTGQSQFSDMASHHPSDSITSANKKFLPKGLAAVTPTTAISNQSMAYGTTTKNDNNTTSEAFLNQTFKNRNNNSNSNVNQDTYMASQSTNRGNHQQQSQHASTAASMNDDISINSEQYSKQPVIITTDETGQNQQPQSKSGSQPKGRLKVLIIEAKDLLINSNNSQPYVVCTFESSEFVTNAPGSFGKSSGYPSNQNKIQQLGGVPMVKFSDKNEKNRPALYQRQSSTQHLNLKNFKIGSTNPIWNHEAIFDVVGSKSELDISVYDAASDDSFLGHVRVFPSTNSSTSNKQNNAEWLELKTRIVGERVSGSIRVNWEYSSLGKKPYGPGDFEVLRLLGKGTFGQVYQVRKNDTDRIYAMKVLSKKVIVKKKEIAHTIGERNILVRTSTAASPFVVGLKFSFQTPADLYLVTDYMSGGELFWHLQKEGRFAEDRAKFYIAELVLALEHLHDNDIVYRDLKPENILLDANGHIALCDFGLSKANLNNDGTTNTFCGTTEYLAPEVLLDESGYTKMVDFWSLGVLIFEMCCGWSPFYAENTQQMYKNIAFGKVRFPKEVLSIEGRSFVKGLLNRNPKHRLGSANDARELRAHQFFQDIDWALLKAKSIPPPFKPHLTSETDTSNFDPEFTSESTSVLKKQLELASTPLSPGIQANFKGFTYVDDSTMEDHFGKSHRMNAFKSPGSFIPGNPDLPPDEDAIDDDQFDENEEMEIDEDHHMDDEEFVNGRFDL

SEQ ID NO: 32576 - protein, 749 aa, Streptococcus pneumoniae TIGR4
MSTTIIGFPRLGEFRELKFTTEKYFRKEISEEELLAAAKDLRAKHWNIVKEKGITEIPSNDFSHYDNFLDAAFLFNVVPASVQNLDLSDLERYFALGRGYQGEKGDVRALPMKKWFNTNYHYIVPKFEKDTQVKLAGHKIFDEFQEAKELGLNTRPVLVGPFTFLQLSDFEEGVKADDFVDSLVAAYQEVFAKLAELGATRIQLDEAALVKDLTAEEKALFLNLYNKLLADKKGLEVLLQTYFGDVRDVYADLVNLPVDAIGLDFVEGKKTLELVKGGFPADKTLYVGIVNGKNIWRNNYEKSLAVLEQIPAENIVLTSSCSLLHVPFTTANEEFEPALLNHFAFAVEKLDEIRDLDAIRNGQGSEALAANKELFATERVGENAELRARIAGLTDADYTRLPAFAEREAIQEEAFKLPALPTTTIGSFPQTKEVRAKRLAYRKGELSQKEYDAFLAETIDEWIKWQEDIDFDVLVHGEFERNDMVEYFGQNLSGYLFSKNGWVQSYGMRGVKPPIIWGDVTRLNPITVKWSSYAQSRTNKPVKGMLTGPVTILNWSFPREDISIKDSTLQIALAIKDEVLDLEAAGVKIIQIDEAALREKLPLRRSDWYEDYLDWAIPAFRLVHSTVAPDTQIHTHMCYSEFTDIIPAIDNMDADVISFEANRSNLEILDELKAKNFQTEVGPGVYDIHSPRVPNEGEIDNTIEAILAKVPSKKVWINPDCGLKTRGIPETKESLIRLVEAAKAAREKL

SEQ ID NO: 32577 - protein, 448 aa, Streptococcus suis 89/1591
MSNAKAYIQASFEAVKARNPHETEFLQAVEELFSTLEPVFEAHPEYIEENILARIVEPERIISFRVPWTDKDGNVQVNRGYRVQFNSAVGPYKGGLRFHPTVNQSILKFLGFEQIFKNVLTGLPIGGGKGGSDFDPKGKTDAEIMRFCQSFMTELQKHIGPSLDVPAGDIGVGGREIGYMYGQYKRLRQFDAGVLTGKPLGFGGSLIRPEATGYGLVYFTDNMLAANGKSFKDQTVLISGSGNVAQYAVQKATELGAKVISVSDSNGYIIDETGIDFDLLVDIKEKRRARLTEYAAEKATAKYFEGSVWNYDGKADIALPCATQNEINGEQAAALVKNGVYCVAEGANMPSDLDAIKVYKENGVLYGLAKAANAGGVAVSALEMSQNSLRLSWTHEEVDGRLKDIMANIFNTAKETAEKYDLGTDYLAGANIAAFEQIADSMIAQGLV

SEQ ID NO: 32578 - protein, 341 aa, Arabidopsis thaliana
MGSSSNGGVPPGFRFHPTDEELLHYYLKKKISYQKFEMEVIREVDLNKLEPWDLQERCKIGSTPQNEWYFFSHKDRKYPTGSRTNRATHAGFWKATGRDKCIRNSYKKIGMRKTLVFYKGRAPHGQKTDWIMHEYRLEDADDPQANPSEDGWVVCRVFMKKNLFKVVNEGSSSINSLDQHNHDASNNNHALQARSFMHRDSPYQLVRNHGAMTFELNKPDLALHQYPPIFHKPPSLGFDYSSGLARDSESAASEGLQYQQACEPGLDVGTCETVASHNHQQGLGEWAMMDRLVTCHMGNEDSSRGITYEDGNNNSSSVVQPVPATNQLTLRSEMDFWGYSK

SEQ ID NO: 32579 - protein, 363 aa, Microcoelia exilis
SDSKDAGRLSAAWQLYKAQEELVKVAKEYGVKLTMFHGRGGTVGRGGGPTHLAILSQPPDTILGSLRVTVQGEVIEQSFGEELLCFQTLQRYTTATLEHGMKLPFSPKPEWRATLMDEMAIVSTNEYRSIVFQEPRFVEYLRLATPELEYGRMNIGIRPSKRKPSGGIESLRAIPWIFAWTQTRFHLPVWLGFGAAFKHVIQKDQKNLQILREMYNEWPFFRVTIDLIEMVFTKGSPGIAALYDKLLVSPELLPFGEQLRANYEETKRLLLMVAGHKELLEGDPYLKQRLRLRYPYITTLNVFQAYTLKRIRDPSYHPAQPHLPTEIVHSNNQAAELVNLNPTSEYAPGLEDTLILTMKGIAA

SEQ ID NO: 32580 - protein, 279 aa, Bacillus cereus ATCC 14579
MKNLQSKTVLSNGVEMPWFGLGVFKVEEGPELVEAIKSAIKAGYRSIDTAAIYGNEAAVGEGIRAGIETTGISREELFITSKVWNADQGYEETIAAYEESLKKLKLDYLDLYLVHWPVEGKYKDTWRALETLYKEKRVRAIGVSNFQIHHLQDVIKDAEIKPMINQVEYHPRLTQKELQAFCKEQGIQMEAWSPLMQGQLLDNETLQEIAEKHGKTTAQVILRWDLQNGVITIPKSTKEHRIIANADVFNFELTKEDMEKIDALNQNHRVGPDPDNFDF

SEQ ID NO: 32581 - protein, 116 aa, Pyrococcus abyssi GE5
MEKMVRDIGLRIQPPAEKCDDPKCPWHGHLKIHGRVFEGIVVSDKPRKTVTVERQYYHYLKKYERYELRRSRIHAHNPPCINAKVGDRVLIAETRPLSKTKHFVVVAVLERAEERR

SEQ ID NO: 32582 - protein, 281 aa, Saccharomyces cerevisiae
MSNHSEILERPETPYDITYRVGVAENKNSKFRRTMEDVHTYVKNFASRLDWGYFAVFDGHAGIQASKWCGKHLHTIIEQNILADETRDVRDVLNDSFLAIDEEINTKLVGNSGCTAAVCVLRWELPDSVSDDSMDLAQHQRKLYTANVGDSRIVLFRNGNSIRLTYDHKASDTLEMQRVEQAGGLIMKSRVNGMLAVTRSLGDKFFDSLVVGSPFTTSVEITSEDKFLILACDGLWDVIDDQDACELIKDITEPNEAAKVLVRYALENGTTDNVTVMVVFL

SEQ ID NO: 32583 - protein, 278 aa, Corynebacterium glutamicum ATCC 13032
MSNAVPHNVSFNFVPRAYRPEKPRTFGMTEIRAPYYSTFGTRHLQDVFDVAGQWVDGIKWAGGSFSLVPTEQVRAFSDIAHENNAYVSSGGWIETVLRYGDDAVDHYLKEAKEVGFDVIEISTGFIMLNTSGLQRLVEKVVKAGLKAKPELGLQIGSGGDSGEAELAAEGKKDIGDLVDRGKKALDAGASIIMIESEGITENVTEWDTGAAASIINGLGLENVMFEAADGPVFEWYVKNYGNECNLFVDHSQILQLEGLRQNIWGNKSTWGRVINPAP

SEQ ID NO: 32584 - protein, 515 aa, Arabidopsis thaliana
FLRMDGSGTGSRSGVESILPNYKLGRTLGIGSFGRVKIAEHALTGHKVAIKILNRRKIKNMEMEEKVRREIKILRLFMHPHIIRLYEVIETPTDIYLVMEYVNSGELFDYIVEKGRLQEDEARNFFQQIISGVEYCHRNMVVHRDLKPENLLLDSKCNVKIADFGLSNIMRDGHFLKTSCGSPNYAAPEVISGKLYAGPEVDVWSCGVILYALLCGTLPFDDENIPNLFKKIKGGIYTLPSHLSPGARDLIPRMLVVDPMKRVTIPEIRQHPWFQAHLPRYLAVPPPDTVQQAKKIDEEILQEVINMGFDRNHLIESLRNRTQNDGTVTYYLILDNRFRASSGYLGAEFQETMEGTPRMHPAESVASPVSHRLPGLMEYQGVGLRSQYPVERKWALGLQSRAHPREIMTEVLKALQDLNVCWKKIGHYNMKCRWVPNSSADGMLSNSMHDNNYFGDESSIIENEAAVKSPNVVKFEIQLYKTRDDKYLLDLQRVQGPQFLFLDLCAAFLAQLRVL

SEQ ID NO: 32585 - protein, 354 aa, Comamonas testosteroni
MKNYPTVKVAAVQAAPVFMNLEATVDKTCKLIAEAASMGAKVIGFPEAFIPGYPYWIWTSNMDFTGMMWAVLFKNAIEIPSKEVQQISDAAKKNGVYVCVSVSEKDNASLYLTQLWFDPNGNLIGKHRKFKPTSSERAVWGDGDGSMAPVFKTEYGNLGGLQCWEHALPLNIAAMGSLNEQVHVASWPAFVPKGAVSSRVSSSVCASTNAMHQIISQFYAISNQVYVIMSTNLVGQDMIDMIGKDEFSKNFLPLGSGNTAIISNTGEILASIPQDAEGIAVAEIDLNQIIYGKWLLDPAGHYSTPGFLSLTFDQSEHVPVKKIGEQTNHFISYEDLHEDKMDMLTIPPRRVATA

SEQ ID NO: 32586 - protein, 370 aa, Pseudoalteromonas tunicata
MIPNQWYAILRTQDVKKKPVGIKRLEKLLVLYRDTAGELVCLDDRCPHKGVKLSLGQQHGDLIACPYHGFQYDQQGDCVHMPVLGQKGNVPKGMCVKSYKVKEELGLIWFWFGDVRQEHEYPDIPMFKQLKEYKGHYSYYGWDAPINYTRYVESVCEIYHIPFVHKGSAINIWDPKGGRVDNFECKVEDTLITSDFILRPDDDRTAEETLVARKPWTRGWRFGIDVQMPNLILIRSDVFDVIFIPTPIDENTCWVCVCYQEPKRDLLLPLIKPLPIPFWGPVRPWYMCRIERFVQQAKDMAVIAHQEPKVSHPKANRLIPLDKVNAHYIRFREKLIREAKEQQQVKELAKSNPEFAAPTLEQIIGIEEVH

SEQ ID NO: 32587 - protein, 226 aa, Thalictrum dioicum
MGRGKIEIKRIENTTNRQVTFCKRRNGLLKKAYELSVLCEAEVALIVFSSRGRLYEYSNNSVKKTIERYKKASTDSPNSGSVSEANVQFYQQEASKLHNQIASLQNHNRNLLGESLSNLNIKELRQIEKKIEGGISKIRAKKNELLFAEVEYMQKREIDLQTDNKYLRAMIAANERAPPEHMNLMPANEYHIMSSAPFDSRNFLPANLLDHNNNYSRSDQTTLQLG

SEQ ID NO: 32588 - protein, 298 aa, Pseudoalteromonas tunicata
MTDNKNTAIEQIHALVIDVVTEQTCYAESDLILDAPMEEGLGIDSIILASIVSEIQKLFMFETRLNTGSFNTIQALLDICHNAMLSDAGVQKLAQLGLAAAPQAVCVSSQPEPEQRSTQAQTMRDFVADGSPDLFSKVRKFDQFYKNQAEQGNFWYGMPLSSRCENRATIYDGYQKKEREFLMFASNNYLGLANDPRVIKAICDATQKYGATNTGCRLIGGTNHLHLELEARLAAFKGREACIVFPSGYSANLGTISALTGPKDTVISDVYNHMSIQDGCKLSGAKRRIYKHNDMDSL

SEQ ID NO: 32589 - protein, 623 aa, Xylella fastidiosa
MQSVIADLKQQEIKPLLRFITCGSVDDGKSTLIGHLLYDSQCLAEDQLADLMVDSQRYGTQGEHIDYALLLDGLAAEREQGITIDVAYRYFDTEKRKFIVADCPGHAQYTRNMATGASTADAAVVLVDARKGLLTQTRRHSYIVALLGIRHVVLAVNKMDLVGYDQETFEAIASDYLALAAKLGINQVQCIPLSALEGDNLSKRSARMPWYVGPSLLEYLEALEPADVDLAAAMCLPVQWVNRPDSQFRGFTGTLAAGRVRPGDAVVVLPSGCVSRVVRVFNGDTEVHEAVAGQAVTLTLADEIDISRGDVIAALDDPPEVADQVTAYVLWMDDTALLPGRRYWLKLGARMVAASVSDIKHRVDVNTQEQRVAQRLQLNEVGYCQLSLDAPVAFVPYARNRVLGSFILIDRHSNATVGAGTLDSGVHRASNVHWQPLDIDHVARARIKGQTPKVLWFTGLSGAGKSAIANIVDKRLHALGYHTFILDGDNVRHGLNRDLSFTVEDRVENIRRVAEVARLMVDAGLVVLVSFISPFRDERQLARERFAANEFVEVFVDVPLAVAEARDVKGLYAKARAGLITDFTGIDSPYEPPPHPELHLRADQGTPEQLASQVLSFLGVEAN

SEQ ID NO: 32590 - protein, 410 aa, Arabidopsis thaliana
  misc_feature (158)..(158): Xaa can be any naturally occurring amino acid
  unsure (1)..(410): unsure at all Xaa locations
MAAEMALVKPISKISSPKLSNPSKFLSGRRFSTVIRMSASSSPPPPTTATSKSKKGTKKEIQESLLTPRFYTTDFEEMEQLFNTEINKNLNEAEFEALLQEFKTDYNQTHFVRNKEFKEAADKLQGPLRQIFVEFLERSCTAEFSGFLLYKELGRRLXKKTNPVVAEIFSLMSRDEARHAGFLNKGLSDFNLALDLGFLTKARKYTFFKPKFIFYATYLSEKIGYWRYITIYRHLKENPEFQCYPIFKYFENWCQDENRHGDFFSALMKAQPQFLNDWQAKLWSRFFCLSVYVTMYLNDCQRTNFYEGIGLNTKEFDMHVIIETNRTTARIFPAVLDVENPEFKRKLDRMVVSYEKLLAIGETDDASFIKTLKRIPLVTSLASEILAAYLMPPVESGSVDFAEFEPNLVY

SEQ ID NO: 32591 - protein, 273 aa, Streptococcus pyogenes SSI-1
MMKRQFEDVTRIVIKIGTSSLVLPTGKINLEKIDQLAFVISSLMNKGKEVILVSSGAMGFGLDILKMEKRPTNLAKQQAVSSVGQVAMMSLYSQIFAHYQTNVSQILLTRDVVVFPESLANVTNAFESLISFGIVPIVNENDAVSVDEMDHATKFGDNDRLSAVVAGITKADLLIMLSDIDGLFDKNPTIYEDAQLRSHVAVITQEIIASAGGAGSKFGTGGMLSKIQSAQMVFENKGQMVLMNGANPRDILRVLEGQPLGTWFKQIEEVRHD

SEQ ID NO: 32592 - protein, 175 aa, Bradyrhizobium japonicum USDA 110
MANETKLPVTKKTNEPAFGGETWRPFEALRKEVDRLFEDFGTDDFWRRPFRSLAGFERNLAQKLVSTPAVDVTESDKAYEITAELPGMDEKDIEVNVANDGLTIKGEKKFEREEKQKDYYVSERRYGSFERHFGLPKDVEADKIEASFRNGVLKVTLPKTAEAQKPAKKIEVKAA

SEQ ID NO: 32593 - protein, 255 aa, Myxococcus xanthus
MMEDVAVAPARILLVDDEESLRITLAANLELEGHTVLEAANGEEALRLLEKQSVDVVLTDIRMPGLHGVELLRRIKQERPDMPVVLMTAFTAEELVDDALAEGAFTVLPKPFDVTHALDTVLRAAAAPQVLVVDDTEQVARGMVRALSTVGLRARAVYSGEEALASLRSGEYDVCVLDLVMPEMSGPELVSKVRAANLSVAIIAVSGHVVPEMLRRVAAQGAVVCMTKPVPLRELVQAIARVRGRPQQGLQGARI

SEQ ID NO: 32594 - protein, 182 aa, Brassica napus
MASIAATGVLKVPPPAAASCEAVPTMTLSFSSSVSLRATVSHRRGSVLSRNRVRNPMIVSPKAVSDSQNSQTCLDPDASRSVLGIILGGGAGTRLYPLTKKRAKPAVPLGANYRLIDIPVSNCLNSNINKIYVLTQFNSASLNRHLSRAYATNMGGYKNEGFVEVPPAQQSPENPHWFQGDG

SEQ ID NO: 32595 - protein, 394 aa, Schizosaccharomyces pombe
MKTHLLANKLYQKGLRRQNYLQICKLICHARTVLSDVSNVGKNNADEKDTKKAKRSFDESNLSTNEEADKPVESKFVKKLKVYSKNADPSVETLQKDRALMLMNHLSSNPLMAEEYAPEIFEYIRKLDLKCLPNPKYMDQQKELTWKMREILNEWLVEIHSNFCLMPETLYLAVNIIDRFLSRRSCSLSKFQLTGITALLIASKYEEVMCPSIQNFVYMTDGAFTVEDVCVAERYMLNVLNFDLSYPSPLNFLRKISQAEGYDAQTRTLGKYLTEIYLFDHDLLRYPMSKIAAAMYLSRRLLRRGPWTAKLVESSGGYEEHELKEIAYIMLHYHNKPLEHKAFFQKYSSKRFLKASIFVHQLVRQRYSVNRTDDDDLQSEPSSSLTNDGQRTLL

SEQ ID NO: 32596 - protein, 437 aa, Zea mays
  misc_feature (325)..(325): Xaa can be any naturally occurring amino acid
  unsure (1)..(437): unsure at all Xaa locations
MNALAATSRNFKQAAKLLGLDSKLEKSLLIPFREIKVECTIPKDDGTLASYVGFRVQHDNARGPMKGGIRYHHEVDPDEVNALAQLMTWKTAVANIPYGGAKGGIGCSPGDLSISELERLTRVFTQKIHDLIGIHTDVPAPDMGTNSQTMAWILDEYSKFHGYSPAVVTGKPVDLGGSLGRDAATGRGVLFATEALLAEHGKGIAGQRFVIQGFGNVGSWAAQLISEAGGKVIAISDVTGAVKNVDGLDIVQLVKHSAENKGIKGFKGGDAIAPDSLLTEECDVLIPAALGGVINKDNANDIKAKYIIEAANHPTDPEADEASPXLKTNRLLSAMFSDPLCIPFHPQILSKKGVLILPDILANSGGVTVSYFEWVQNIQGFMWDEEKVNAELRTYMTRAFGDVKQMCRSHSCDLRMGAFTLGVNRVARATVLRGWEA

SEQ ID NO: 32597 - protein, 202 aa, Arabidopsis thaliana
MASSTRLTIIQSSFVSARTRLNYVSKTNHSGFACRSLSKPRNLSLSVYSMGSSSSSPKPDNVQEAEKNEFASLSENEWKKRLTPEQYYITRQKGTERAFTGEYWNSKTPGVYNCVCCDTPLFDSSTKFDSGTGWPSYYQPIGNNVKTKLDLSIIFMPRQEVVCAVCNAHLGHVFDDGPRPTGKRYCLNSAALKLNALEKTRD

SEQ ID NO: 32598 - protein, 149 aa, Triticum aestivum
ADQLTDEQNIAEFKEAFSLFDKDGDGCITTKELGTVMRSLGQNPTEAELQDMINEVDADGNGTIDFPEFLNLMARKMKDTDSEEELKEAFRVFDKDQDGFISAAELRHVMTNLGEKLTDEEVDEMIREADVDGDGQINYEEFVKVMMAK

SEQ ID NO: 32599 - protein, 369 aa, Psychrobacter arcticus 273-4
MGAGKTTLINQLIMSKPANERWALLINEFGRIGIDAVLVTSSQDSRTTNDIAVREVSGGCICCTSQLPLQIAIGRLLSEHHPQRLLIEPTGLAHPRELIRQLSAAHWQTALKMQAVITVLSAVQWQQDKYRSHEGFQAHVRDADVLVINRYVQLNADEKQMLQAWIAKLNAQVFIIWADCDYQTTSNDIGTINTYLATLSEQLAKPSQTILQQRIVNIAQPKKSVISLQPLSNSLANKPLFNPSTNDNATQADKEIELPYRYHEKQQDIVLAGWRLPAHYVLNADKLQDWLLTLPNWQRIKGVVHTSNGWLQINFTPDSLTTKTVSTQVDSRLEIILQASTGQEDVIEIKVDWEAYDRELMAIVIFIYS

SEQ ID NO: 32600 - protein, 669 aa, Psilotum nudum
  misc_feature (107)..(107): Xaa can be any naturally occurring amino acid
  misc_feature (109)..(109): Xaa can be any naturally occurring amino acid
  misc_feature (112)..(112): Xaa can be any naturally occurring amino acid
  misc_feature (216)..(216): Xaa can be any naturally occurring amino acid
  misc_feature (219)..(219): Xaa can be any naturally occurring amino acid
  misc_feature (623)..(623): Xaa can be any naturally occurring amino acid
  unsure (1)..(669): unsure at all Xaa locations
WMGGDRDGNPRVTPEVTRDVCLLARLIASNLYFSRIEDLMFELSMWRCSDELRARVNELVFSSRKDAKYYMEFWKQIPPNEPFRVVLGHVRDRLYNTYELSRQLLAXGXSEXPEETFTSVDEILEPLELCYASLCSTGDKAIADGSLLDFMRQVSCFGLSLVKLDIRQESDRHSDVMDAITNYLGIGSYREWSEEQRQKWLLSELRGNRPLYGPGXPRXEEIRDCLETIHVISELPPDSFGAYIISMATAPSDVLAVELLQRECRVTHPLRVVPLFEKLADLESAPAALARLFSIDWYRNRINGKQEVMIGYSDSGKDAGRLSAAWQLFKAQEELINVAKQYGIKLNMFHGRGGTVGRGGGPTHLAILSQPPDTIHGSLRVTVQGEVIEQLFGEEHLSFQTLQRFTAATLEHGMHPPISPKPEWRALMDEMASIATEEYRSLVFKESRFMEYFHAATPVLEYGRMNIGSRPSKRKPNSGIESLRAIPWIFAWTQTRFHLPVWLGFGAAFKSVMERDPNNLIVLQEMYKEWPFFRVTIDLVEMVFAKGDPRITALYDKLLVNDDLQYFGDILRAKYEETKKLLLKVAGHKEILEGNPTLKQRLLLREPCITTLNVQQAFTLKRXREGNKDLPVHSKSRNSAAELITLNTTSEYAPGLEDTLILTMKGIAA

SEQ ID NO: 32601 - protein, 273 aa, Oryza sativa
MEGGGGGGGGGGGGGGGGGGGGAPYATRTAEEVFRDLRGRRAGMIKALTTDVEKFYKLCDPWKRENLCLYGYPNETWEVTLPAEEVPPEIPEPALGINFARDGMNEKDWLALVAVHSDSWLLSVAFYFGARFGFDREARRRLFNMINNLPTIFEVVTGAAKKQAKEKTPNSSSKSNKPSSKVQSKAESRSKSKLSAPKDEEGSGDDEGEEEEDDHDNTLCGTCGTNDGKDEFWICCDNCEKWYHGKCVKITPARAEHIKQYKCPDCTNKRTRA

SEQ ID NO: 32602 - protein, 507 aa, Cryptococcus neoformans var. neoformans JEC21
MASTQPPVAAPDQSKIRPQDVGWQFVPQYYNFVNSQPHRLHCFYNKRSTFIHGEEGEDVTPAFGQQEIHDRILQIGYNQCKVYIHSMDSQSSADGGIIILVLGELSNNHQSWRKFSQTFFLAEQPGGYFVLNDIFRYLREDVDEDESAPQETVQPQEEPAQPEVAAEKLPEATTVTQEPAEDPVPEPAPVSAPAEVVVDAVPEEAEIAAVPDKDVAPEQEPPVVKEPEAAPEPVEETPKPAASVTESIASPAPAAPIPAAKAASPSPAAPKAAAPTTNGSSPASTTPAAPSKPMTWASMAASNVWGKTASPSATAPAPAPAPAPAAAPAPGPAQPKKDEKPAPAAGTGQGQRRQQTIDPSKVQTAHCFVKLPNWSPDSQSSSDFLTDAELSKIASRFGEVKSTEIVKSKACAFVEFARVESARKAIQHSLPVEQGGEGGTKFPNGTLYFEPRKEKDDRPKAKGQRTGGQQGQGQGQRQVNGGAGGRGGRGPRGRGGQGNQGDRQPQK

SEQ ID NO: 32603 - protein, 621 aa, Bifidobacterium longum NCC2705
MGSMTENIADKAINDTRIVKQFTNPVKEPIDSDINLFDLLDNRAKRDPEGAMIEYKGDDGTWHPYSAQVFRDMVIDLAKGLVGLGVNKGDSVAIVSRTRWEWTALDMAIMSIGALTVPVYETNSASQVSWIFNDSKVTLAIAEDDGQRDKIESVRDEVPTLRNVFVIEAGGLNAIKTYGESVTDAEFWEYKEASHGDDRATIVYTSGSTGTPKGVELTHRNFAFLVLSALQYMPRAGAWPNRRLLLFLPLSHVFARFLEFFSFGGTISLALSSNMKTMVKDFETFGPTLLLAVPRVYEKVYNAASQRAGTGFAGKMFMRAAENAREWSKAEQKGEQLPIAGRIAHAFYEQVVYKKIRTIFGPNADFAITGGAPMDSELSHFFNGIGMPVLEGYGMTETCGPVCVSLPEDNRIGTIGMPMCGITAGIAEDGELVVKGPLVCRGYHNNPEVTTQQITDGWLHTGDLGDISEDGFISITGRKKDLIITAGGKNVSPGLLEASVMTSPVVNQCLVIGDKKPFVAALVTLDLADANKWLESQGAKPEPDLASLAKNAIVHAEVERAVNAANEGVSRAESIRKFEILPDEFTEANGMLTPSLKTRRAQIVEHYRELIDNVIYVPLKK

SEQ ID NO: 32604 - protein, 159 aa, Triticum aestivum
MATPTPTPTSPASIRASGGPGAGDRWVVRAQPAAAELVERSVTTIRFLAVDAVEKAKSGHPGLPMGCAPLGHVLFDEFLRFNPANHAWFDRDRFVLSAGHGCMLHYALLHLAGYQGVTIDDLKAFRQWGSRTPGHPENFETEILRSTRRGPTKRCYFQD

SEQ ID NO: 32605 - protein, 336 aa, Triticum aestivum
MAPLGDAVAPASAAAPGLVVSFGEMLIDFVPDVAGVSLAESGGFVKAPGGAPANVACAISKLGGSSAFIGKFGDDEFGHMLVEILKQNGVNAEGCLFDQHARTALAFVTLKSNGEREFMFYRNPSADMLLTEAELNLDLIRRARIFHYGSISLITEPCRSAHVAAMRAAKSAGILCSYDPNVRLPLWPSAQAARDGIMSIWKEADFIKVSDDEVAFLTQGDATDEKNVLSLWFEGLKLLIVTDGEKGCRYFTKDFKGSVPGYSVNTVDTTGAGDAFVGSLLVSVSKDDSIFYNEAKLREVLQFSNACGAICTTKKGAIPALPTTATALELISKGSN

SEQ ID NO: 32606 - protein, 416 aa, Streptococcus pyogenes SSI-1 [sequence omitted]

SEQ ID NO: 32607 - protein, 421 aa, Rauvolfia serpentina
MAPQMEKVSEELILPSSPTPQSLKCYKISHLDQLLLTCHIPFILFYPNPLDSNLDPAQTSQHLKQSLSKVLTHFYPLAGRINVNSSVDCNDSGVPFVEARVQAQLSQAIQNVVELEKLDQYLPSAAYPGGKIEVNEDVPLAVKISFFECGGTAIGVNLSHKIADVLSLATFLNAWTATCRGETEIVLPNFDLAARHFPPVDNTPSPELVPDENVVMKRFVFDKEKIGALRAQASSASEEKNFSRVQLVVAYIWKHVIDVTRAKYGAKNKFVVVQAVNLRSRMNPPLPHYAMGNIATLLFAAVDAEWDKDFPDLIGPLRTSLEKTEDDHNHELLKGMTCLYELEPQELLSFTSWCRLGFYDLDFGWGKPLSACTTTFPKRNAALLMDTRSGDGVEAWLPMAEDEMAMLPVELLSLVDSDFSK

SEQ ID NO: 32608 - protein, 188 aa, Triticum aestivum
  misc_feature (39)..(39): Xaa can be any naturally occurring amino acid
  misc_feature (64)..(64): Xaa can be any naturally occurring amino acid
  misc_feature (66)..(66): Xaa can be any naturally occurring amino acid
  misc_feature (78)..(78): Xaa can be any naturally occurring amino acid
  misc_feature (82)..(82): Xaa can be any naturally occurring amino acid
  misc_feature (84)..(84): Xaa can be any naturally occurring amino acid
  misc_feature (93)..(93): Xaa can be any naturally occurring amino acid
  misc_feature (104)..(104): Xaa can be any naturally occurring amino acid
  misc_feature (117)..(117): Xaa can be any naturally occurring amino acid
  misc_feature (119)..(119): Xaa can be any naturally occurring amino acid
  misc_feature (123)..(125): Xaa can be any naturally occurring amino acid
  misc_feature (128)..(128): Xaa can be any naturally occurring amino acid
  misc_feature (142)..(142): Xaa can be any naturally occurring amino acid
  misc_feature (146)..(147): Xaa can be any naturally occurring amino acid
  unsure (1)..(188): unsure at all Xaa locations
VLDSITTHLGIGSYAEWSEEKRQDWLLSELRGKRPLFGXDLPQTEETADVLGTFHVLAELPADXLXAYIISMATAPSXDVLXVXLLQALSAMXKHPLESVPLFXKLADLLSNSNNCXTXFSIXXXMDXINGNRRHDWYSNPXKNPXXLCMMFKHKPPKWQTYFTSSGVDNCKVATTGKYAQHIMVIRN

SEQ ID NO: 32609 - protein, 203 aa, Thalictrum thalictroides
KRRNGLLKKAYELSVLCEAEVALIVFSSRGRLYEYSNNSVKKTIERYKKASTDSPNSGSVSEANVQFYQQEASKLRNQIASLQNHNRNLLGESLSNLNIRELKQIEKKIEGGISKIRAKKNELLFAEIEYMQKREIDLQTDNKYLRAMIAANERAPEHMNLMPANEYHVMSSAPFDSRNFMPANLLDHNNNYCRSDQTTLQLG

SEQ ID NO: 32610 - protein, 358 aa, Clostridium perfringens str. 13
MHKKLFIPGPVEVREEVLEKMATPMIGHRSKEASQLQRRISDNLRKLFFTNNEILLSTTSGSGLMEGAIRSCTLKKAAVFSVGAFGDRWYEMGISNNVPVDKFEVPWGKSINIDLIDSVLKTGQYDLITVTHNETSTGVMNDLEAISKVIRKYPEVIFCVDAVSSAGGSKIEVDKLNIDICITSSQKALGLPPGIAICTFSERARERSEKVKFRGTYLDLLALYKYIKKKDYQYPSTPSISHMYALDYQLDYILNVEGLENRFNRHIEMSKIVREWAEKYFEIYPENGYYSNTLTTIKNNKNIDIGALNKELGKRGFQISNGYGKLKDKTFRIAHMADCQVKDIKELLSNINEILELE

SEQ ID NO: 32611 - protein, 222 aa, Glycine max
GGYGDANQRIDYVFKVVLIGDSAVGKSQILARFARNEFSLDSKSTIGVEFQTRTLVIDHKTVKAQIWDTAGQERYRAVTSAYYRGAVGAMLVYDITKRQTFDHIPRWLEELRNHADKNIVIILTGNKCDLENQRDVPTEDAKEFAEKEGLFFLETSALEATNVETAFITVLTEIYNIVNKKNLTADENQGNGNSASLSGQKIIVPGPAQEIPAKRNMCCQSS

SEQ ID NO: 32612 - protein, 235 aa, Lycopersicon esculentum
MRVIRSRAILIVLFLVSAFGLSEQGKSGGFCSEEMATLGGVHDSHGSSQNSDEIHSLAKFAVDEHNKKENAMIELARVVKAQEQTVAGKLHHLTLEVMDAGKKKLYEAKVWVKPWLNFKELQEFKHVEDVPTFTSSDLGVKQVEQNSGLKSVPVHDPVVEEAAEHAIKTIQQRSNSIHPYKLQEIVHANAEMADDSTKLHLVIKTSRGGKEEKFKVQVQHNNEGAFHLNRMEPDN

SEQ ID NO: 32613 - protein, 610 aa, Symbiobacterium thermophilum IAM 14863
MLAAFFGTGVLGGFRAHAGRWPWSPPDPAAASPAGPDSAPDETDPGEPEDRPPAVPPERLLRPIVTIQVRGAQGSRVGTGFLIDTGGHIVTNAHVVDGYRECVTVIDDNGTTHQGSVAGLDRNRDVALITVPTLARWPDVLSLSDRSVAAGDAVYAWGRAKGSAGKVAVPAVVTETGHSRRIEGRYYADLIVFRGAEVTHGSSGSPLLDPDTGEVVGIITAGADNGLGFAVPVAEAVERLIQRWVAQPAPSGCAAAPEGDATPLVLAAVVPLSGAHGAWGLDLANGVELALRDMEADLLRVGYQVSLARYDDQGRPEEAAAHAQSVAYDQGVIGVVGSFTGEATLALAEGLRDSGLVLVAPTARSEDLVQEGWPHVNRLVAHQARLESAAAAFAKARLGVRSVLLLLDGSEEAERRAATFSTAAEIMGLPIAGRIVVPAEVSGSALAAAVRAYAPEAIFYAGSGQTGFAAVKALREAGVDLPVVGGVELYNPAFETIAGTGWRNIYFTHFTQGNDARFMRHFEAILGKPTRGYGMFGYDAARVILEALVSYGEEHPGQVPDRVELAARVRATRGLKGWSTQVSFDPATGENQAARVYFFEWVDGRYELQH

SEQ ID NO: 32614 - protein, 486 aa, Agrobacterium tumefaciens str. C58
MMQGLKDKELFRQTGLIGGAWKAAASGKVVDVIDPATQAVIGTVPDMGGAETRAAIEAANAAFGPWKKKTHAERAALLEKWFALMIENIDDLRLILTIEQGKPLDEAKGEIRYGASFVKWFAEEARRIGGGTIPSPTPDRRIVVLKEPVGVCGIITPWNFPNAMITRKVAPALATGCTVVIKPSEFTPYSALALGVLAERAGIPAGVINIVTGMPTEIGNEIMANETVRKISFTGSTRVGSLLMRGAADSVKRLSLELGGNAPFIVFDDADLDLAIEGAIVSKFRNGGQTCVCANRILVQSSVYDAFAKKLADRVDAMRVGPGTEAGVSIGPMINKPAIAKIRAHIDDAVAKGATIITRPRDLPEGPQYTAPVVLTGATTAMQLASEETFGPVAPLFRFETEEEALAIANGTPFGLAAYFYTESLKRAWRVGEALEFGMVGLNTGAISTEVAPFGGVKQSGLGREGAQVGIEEYLETKTFHIGGLA

SEQ ID NO: 32615 - protein, 94 aa, Lycopersicon esculentum
GGIREAGGSENSLEINDLARFAVDEHNKKQNALLEFGKVVNVKEQVVAGTMYYITLEATEGGKKKAYEAKVWVKPWQNFKQVEDFKLIGDAATA

SEQ ID NO: 32616 - protein, 518 aa, Debaryomyces hansenii CBS767
MSAYSRRYTDGPLNYGQDVRGRSEKKVEASHTTKWSGTPSRHKKIGKEDFDTIVTGHLTQEQMDAYQQYFRIEEISDILRMALELQSEVLSLLPSGNIANNPNYEREPSPPPKYDAAGNRSNTREARTKLALEKERHYLVEVAAGSIKNYMSPIDYRKPVKTYEKIYIPVKDYPDINFVGLLLGPRGNTLRQLQEDSGATLAIRGKGSVKDGKSTSSNNDDDDSNSSLSFSNPNLNSSGNDDLHVVITSDSQLKIAKAIKLTNQVIEKAISSPVGQNDLKRGQLRELAILNGTLRETKPYNPETQQSRRLRPGLDVSQLVCKLCGKVGHFARDCKFRGTSDGNNNPIVQDQADSYQQTAPYSDSRRQREEEDPRNNGREEILPPWKKKKPNVPLPPWQKPQQPLPSTDAPPPPVGLAPPPSSLAPPPPPPSSLAPPPPPPPSSLAPPPPPSSDIAPPPPSSDRAPPPPPSGIAPPPPPSGIAPPPPKSPNGVAPPPPPANDAPPAPLSTKNPPPPPPA

SEQ ID NO: 32617 - protein, 457 aa, Agrobacterium tumefaciens str. C58
MLSNSLIELDRAHLVHPVSSFRGHEKLGVRVLKSASGATVTDMTGHQLIDGFAGLWCVNAGYGHDSIVEAAAKQMRELPYATAYFDIGSEPAIRLASELADRAPGDLNHVYFTLGGSDAVDSTIRFIRYYWHAKGQPQRDQFISIEQGYHGSTTAGSGLTALPAFHAGFGVPYDWQHKIPSHYAYRNPAGSDPAAIIASSLQILKDKIEAIGPDRVAAFYAEPIQGSGGVLVPPPGWIKAMRELCSSYGILFVADEVITGFGRTGPLFACADEDIVPDFITAAKGLTSGYVPMGAVFMADHVYDTIADFAGEAAIGHGYTYSAHPVSAAVGLEVLKLYEGGLLENGRRAGQRLMAGLEGLRNHPLVGDVRGRGMLAAIELVTDKDKKTPLPAAAAPARKVFDRAWENGLIVRAFANGILGYAPPLCCTDGEIDAIVERTLKTLDQTLEDPAVRAAMA

SEQ ID NO: 32618 - protein, 534 aa, Streptococcus suis 89/1591
MTKYIFVTGGVVSSIGKGIVAASLGRLLKNRGLKVTIQKFDPYINIDPGTMSPYQHGEVFVTDDGAETDLDLGHYERFIDINLNKYSNVTTGKIYSEVLRKERKGEYLGATVQVIPHITDALKDKIKRAARTTDADVIITEVGGTVGDIESLPFLEALRQMKADVGSDNVMYIHTTLLPYLKAAGEMKTKPTQHSVKELRGLGIQPNMLVIRTEQPAGQGIKNKLAQFCDVAPEAVIESLDVEHLYQIPLNMQAQNMDQIVCDHLKLDVPPADMTEWTAMVNKVLNLQKKVKIALVGKYVELQDAYISVVEALKHSGYANDAAIELDWVNANDLTAENVAERLGQAQGIIVPGGFGQRGTEGKIQAIRYARENDVPMLGVCLGMQLTCVEFARHVLGLEGANSFELDPETKYPIIDIMRDQIGVEDLGGTLRLGLYPSKLKRGSKAAAAYDNQEVVQRRHRHRYEFNNDFREQFEKAGFVFSGVSPDNRLVEIVEIPENKFFVACQYHPELQSRPNRPEGLYTAFVSAAIENEK

SEQ ID NO: 32619 - protein, 357 aa, Solenangis aphylla
SDSGKDAGRLSAAWQLYKTQEDLVKVAKEYGVKLTMFHGRGGTVGRGGGPSHLAILSQPPDTILGSLRVTVQGEVIEQSFGEEQLCFKALQRFTAATLEHGMQVPITPKPEWRALMDEMAIIATNEYRSSVFKEPRFVEYFRLATPELEYGRMNIGSRPLKRKPCGGIESLRANPWIFAWTQTRFHLPVWLGFGAAFKHVIQKDPKNLQMLREMHNEWPFFRVTIDLLEMVFTKGNPGIAALYDKLLVSPALLPFGEQLIANYEETQNLLLQVAGHKVLLESDPYLKQRLRLRYPYITTLNVFQAYTLKRMRDPSYAEPHLSNAQKPADELVKLNPTSEYGPGLEDTLILTMKGIAA

SEQ ID NO: 32620 - protein, 595 aa, Zea mays
MAAMNGEVLGECGRNINSLKRKRESPAAYAAGVFCTSELHQHTVNDSAVRFHLDKDRKAKIVCHFNKQVLQSYKKFMSSAPPKRILLRQGAVWKDFPEKIVKLAQADFRAKKMITETGYQNQLFLLDFAHMTFIDTKTGFQRPIAWIDENEKCYFPESFIQDQKLFMKKDFGNGNHEYISEERNGTRETNHQFGASESSAESSNFESSIGDVSSPKRARAEKNFIVKKYCDMGEAIGENEPCTLLPTACNLLPHQANLGEVSRAQRTIEAVEKLLLQGMGSVIESKDIIGIYRTPLLDDHGQVRYHIHQKQVQVTGCHRGNANVRYAWLPCSKSTVHVMMLNGVLQVDKPPNKCAAYGEGTLLTPANRSDACVKYSDVDENGIVRMMLCRVIMGNVEIVHPGSKQCQPSNKYFDSGVDDLKNPRHYVVWDMNLNSHIYSEFVVTVKLPSKTKDSFVSQENCQNSSDLSLVLNSSSPDCISQEMNLEAPPALGGGCAAPMLGDSMEKAPSSPWMPFSMLFAAISTKVSPENMDVIIGCYEEFKSKKISRGELVKKLRHVVGDRVLISTIMRLQDKLPPVDKREEPDTSASKVVAEP

SEQ ID NO: 32621 - protein, 105 aa, Citrus maxima
EPFDYYMFGQNYIRPLVDFRSSYVGNVSLFFEMEEKLDQGHNIVLISNHQTEADPAIIALLLESTNPHVAENLTYIAGDRVITDPLCKPFSMGRNLICVYTKKHM

SEQ ID NO: 32622 - protein, 417 aa, Shigella flexneri 2a str. 301
MADNKPELQRGLEARHIELIALGGTIGVGLFMGAASTLKWAGPSVLLAYIIAGLFVFFIMRSMGEMLFLEPVTGSFAVYAHRYMSPFFGYLTAWSYWFMWMTVGISEITAIGVYVQFWSPEMAQWIPALIAVALVALANLAAVRLYGEIEFWFAMIKVTTIIVMIVIGLGVIFFGFGNGGQSIGFSNLTEHGGFFAGGWKGFLTALCIVVASYQGVELIGITAGEAKNPQVTLRSAVGKVLWRILIFYVGAIFVIVTIFPWNEIGSNGSPFVLTFAKIGITAAAGIINFVVLTAALSGCNSGMYSCGRMLYALAKNRQLPAAMAKVSRHGVPVAGVAVSIAILLIGSCLNYIIPNPQRVFVYVYSASVLPGMVPWFVILISQLRFRRAHKAAIASHPFRSILFPWANYVTMAFLIAF

SEQ ID NO: 32623 - protein, 676 aa, Tillandsia usneoides
WMGGDRDGNPRVTPEVTRDVCLLARMMAANLYYSQIDDLMFELSMWRCSDELRARADALLQSTRKDEKHYIEFWKQVPANEPYRVILDDVRNKLYKTRERSRHMLSNGSSDIPEETTFTNVEQFLEPLELCYRSLFLCGDLTIADGSLLDFLRQVSTFGLSLVKLDIRQESERHTDAIDAITKHLGIGSYREWSEEKRQAWLLSELRGKRPLFGPDLPRTEEIVDVLDTFHVIAELPADNFGAYIISMATAASDVLAVELLQRACQVKKPLRVVPLFEKLADLQSAPASMDRLFSIDWYSNRINGKQEVMIGYSDSGKDAGALSAAWELYKAQEDLVKVAKKYGVKLTMFHGRGGTVGRGGGPTHVAILSQPPDTINGSLRVTVQGEVIEQSFGEERLCFRTLQRFTAATLEHGMNPPISPKPEWRGNLDEIAVVATEEYRSIVFKEPRFVEYFRLATPELEYGRMNIGSRPSKRKPGGGIESLRAIPWIFAWTQTRFHLPVWLGFGAAFKHILQKDIRNLHLLKEMYNEWPFFRVTLDLLEMVFAKGDPGIAALYDKLLVSDDLKPFGEQLRANYEETKQLLLQVTGHKDLLEGDPYLRQTYACVSPYITTLNVCQAYTPKRIRDPNFQVDMRAPLSKEISDSNKPAEQLKLNLTSEYAPGLEDTLILTMKGIAA

SEQ ID NO: 32624 - protein, 362 aa, Vanilla aphylla
SDSGKDAGRLSAAWPVYKTQEELVQVAKQFGVKLTMFHGRGGTVGRGGGPTHLGILSQPPDTILGSLRVTVQGEVIEQCFGEERLCFRTLQRFTVATLEHGMHHHISPKPEWRSLMDEMAVIATKEYRSIVFQEPRFVEYFRLATPELEYGRMNIKSRPAKRKPSGGIESLRAIPWIFAWTHTRFHLPVWLGFGAAFKHVITKDIRNLHILREMYNGWPFFRVTIDLIEMVFTKGNPGIASLYDELLVSNDLLSFGMELRANYEETKRLLLQVAGHKDLLEGDPHLKQRLRPRDPYITTLNVCQAYTLKAIRDQVTTQWRTHVSNETESRKSAAELVKLNPTSEYAPGLEDTLILTMKGIAA

SEQ ID NO: 32625 - protein, 203 aa, Thalictrum thalictroides
KRRNGLLKKAYELSVLCEAEVALVVFSNRGRLYEYANNSVRKTIDRYKKTCGEGSSTLTVSEANLLFYQQESSKMKQQIEILQNSNRHLMGEALSRLSIKELKQLESRLEKGLSRIRSKKNETLLAEIEYMQKREIELHNDNIYLREQITANERAQQHMNSLPGNVYEAITSAPHSSRDFFQVNLRDSKPNQYCSDATVLQLC

SEQ ID NO: 32626 - protein, 446 aa, Zea mays
  misc_feature (141)..(141): Xaa can be any naturally occurring amino acid
  unsure (1)..(446): unsure at all Xaa locations
MASAAAATQVGTYFLRNYYNLLQQTPDVVHQFYSEASTMVRVDDLTGTTAAANNMMVCRNLSDIHSLIMSLNFTQIEIKTANFVNSWGDGVLVMVSGLVQTKEYSHQRKFIQMFFLAPQEKGYFVLNDYFHFVDQEHVQPXAPVIAQEDYESNLAPNTVVETAPEYVHEEEAQQIAPEVHDVVENYTYSEPQQQVVSDNWGEEPLPEEPPSFSNEMAVAPEEPVQAPPVPLPHVDEPVCEPVKKTYASILKTAKAPPAFPVAQQVPVSKTSHPTTESNQTQHSVMASSMGTEKPRSDVFGEGASHDDEESKSVYVGNVPSSVSEADLENEFKKFGRLIPDGVAIRSRKETGGYYAFVEFEELSGVHNALKASPIEINGRQIYVEERKPNSGIRGGRRGGRGRFSGGGRGYSRGGGDEYNSNRGRSNGYGRAPHQERGILGSHTPRN

SEQ ID NO: 32627 - protein, 59 aa, Tuber borchii
VDPTRDQWAKIAEIIRKKRHFPFFDCAYQGFASGDLANDAWAVRYFIEQGFELCVAQSF

SEQ ID NO: 32628 - protein, 468 aa, Zea mays
MALSTTNTNAAESQLHCSTFASRYVRTALPRFKIPEQSIPKEAAYQIINDELMLDGNPRLNLASFVTTWMEPECDKLIQSSINKNYVDMDEYPVTTELQNRCVNMIAHLFNAPIGDDETAVGVGTVGSSEAIMLAGLAFKRKWQNKMKAAGKPYDKPNIVTGANVQVCWEKFARYFEVELKEVKLKEGYYVMDPEKAAEMVDENTICVAAILGSTLNGEFEDVKLLSDLLTAKNAETGWLEWDFRLPLVKSINVSGHKYGLVYAGVGWVIWRSKEDLPDELIFHINYLGADQPTFTLNFSKGSSQIIAQYYQLIRLGFEGYKDVMQNCRDNAAVLREGINKMGYFDVVSKDSGVPLVAFSLKDSSKYTVFEVAESLRRFGWIVPAYTMPADAEHVAVMRVVIREDFSRGLAERLIADLGKTMADMDAHAGRKQAPEQPKKSVHDIEKEVTTFWRRLVANSKKKSSMVC

SEQ ID NO: 32629 - protein, 231 aa, Hordeum vulgare subsp. spontaneum
YFRLATPETEYGRMNIGSRPSKRKPSGGIESLRAIPWIFAWTQTRFHLPVWLGFGGAFKHILKKDIRNFHMLQEMYNEWPFFRVTIDLVEMVFAKGNPGIAALYDRLLVSEGLQPLGEKLRANYEETQKLLLQVAGHKDLLEGDPYLKQRLRLRDAYITTMNVCQAYTLKRIRDPDYHVALRPHLSKEVMDTSKPAAELVTLNPASEYAPGLEDTLILTMKGIAAGLQNTG

SEQ ID NO: 32630 - protein, 387 aa, Arabidopsis thaliana
MGSSMEEKVVAVIMVGGPTKGTRFRPLSLNIPKPLFPIAGQPMVHHPISACKRIPNLAQIYLVGFYEEREFALYVSAISNELKVPVRYLREDKPHGSAGGLYHFRNLIMEDSPSHIFLLNCDVCCSFPLPKMLEAHRGYGGIGTLLVIKVSPESASQFGELVADPVTNELLHYTEKPETFVSDRINCGVYVFTPEIFNAIGDVSTQRKDRATLKRVSSFEALQPATRIPTDFVRLDQDILSPLAGKKRLYTYETMDFWEQIKSPGMSLRCSGLYLSQFRLTSPQLLASGDGTRSAIVIGDVYIHPSAKVHPTAKIGPNVSISANARVGPGVRLMSCIILDDVEIMENAVVTNAIVGWKSSIGRWSRVQAWSLQFETRSYNSRRLGCS

SEQ ID NO: 32631 - protein, 312 aa, Medicago sativa
MGSVEIPTKVLTNTSSQLKMPVVGMGSAPDFTCKKDTKDAIIEAIKQGYRHFDTAAAYGSEQALGEALKEAIELGLVTREELFVTSKLWVTENHPHLVIPALQKSLKTLQLDYLDLYLIHWPLSSQPGKFSFPIDVADLLPFDVKGVWESMEESLKLGLTKAIGVSNFSVKKLENLLSVATVLPAVNQVEMNLAWQQKKLREFCNANGIVLTAFSPLRKGASRGPNEVMENDMLKEIADAHGKSVAQISLRWLYEQGVTFVPKSYDKERMNQNLCIFDWSLTKEDHEKIDQIKQNRLIPGPTKPGLNDLYDD

SEQ ID NO: 32632 - protein, 482 aa, Clostridium perfringens str. 13
MEGFKLIKVLFATSEANPFIKTGGLGDVMGALPKELKRKGIDARVILPKYSAIKGELLDKLSFKKWFMVPVGWRNQYCGVYQCEYDEVIYYLLDSEFYFHRNGLYGEGDDGERFAFFDRAVLETLKEIDWCPDIIHCNDWQTGMIPVLHKLEYSKDPFYKNIKTVTSIHNLLFQGNFSADVLPELFGYDYEPVRNGSLEFYGGMSFMKGAINYSDRILTVSETYAKEIKTPYFGENLDGLLRERGYALKGIVNGIDYDEFNPSKDSLIAKNFSVKTIEDKVLNKLALQKELGLPINPDIPMISIVSRLTNQKGCDLIVNIANRLLQRNVQLVILGTGDYNYENHFKGLQELYPTKVSANIKFDNGLAHRIYASSDIFLMPSLFEPCGLGQLIALRYGAIPIVRETGGLKDTIHSYNKYTGIGNGFSFTNYNHNDLMHVIELALETYDDKEIWRSLIIQAMDSDNSWNKSAEKYKELYEELIK

SEQ ID NO: 32633 - protein, 606 aa, Clostridium perfringens str. 13
MGKAYIYHDSQDTFYREPFGAVSIGSKVSLRLECEECGEVFIEVIKFDGSRYSIPMTIEERRNECIIYKGIIDTTNSLGVINYYFKYIKDGFTKYYGNNDECLGGEGKIYYDFPNYYQITVYEDNKIPSWYKEGIIYQIFVDRFFNGNKNSVILNKKKNSFIYGNWYDEPMYIRDNNGSIKRWGFYGGNLRGVIEKLDYIKSLGVNIIYMNPIFDAVSCHKYDTGDYENIDKMYGTNSDFKELCQKAEEKGIRIILDGVFSHTGSDSRYFNKYGNYGELGAYESKYSKYYKWYRFYDYPNSYECWWGFENQPNVEELEKTYSDYIVNSENSIIAKWLRLGASGWRLDVADELPDEFIQMIKERMKNEKEDSVLIGEVWEDASNKVSYSKRRKYLLGDELDSVTNYPYRDIISNFLNEEISSKDFYKVIMSIKENYPRENFYANMNILGNHDTERILTVLKENLNKLKLALCLQMTLPGVPLIYYGDEAGLLGNKDPENRKTYPWGRENKEILSYYSFFGNFRKNEEVLRKGDFYIFKDTPEDVIAFKRVYKDKEMIIIVNRSNSRKTITLDSEKGRYKDKFSKEEFYGDGSITLEVERENYKILTN

SEQ ID NO: 32634 - protein, 310 aa, Pseudomonas aeruginosa UCBPP-PA14
MYLVCGEALFDVFSLESAARSNELGFTAIAGGSPFNVAVGLRRLGVEAALFGGLSSDYLGARLRRVLEEEGVDCGFLVPSDAPTTLAMVGLDASGSAQYQFRGEGCADRQVRLEHLPTLDGRIRGLHVGSYTLVVTPVADTLLALVRRESGRRLVSLDPNVRLDPQPDIDLWRRRVEAFASHAHLIKASEEDLALLYPDRDPGEVARGWLNPRCRLVFVTHGGAGASVHCTHGSWSRPADTALALRDTVGAGDTFQAATLAYLRRLDADSPAGLAALSREAIDAMLAFAIRAAAVTCSRVGPDLPFAHEL

SEQ ID NO: 32635 - protein, 125 aa, Triticum aestivum
  misc_feature (4)..(4): Xaa can be any naturally occurring amino acid
  unsure (1)..(125): unsure at all Xaa locations
GNQXIDAFAEELKPHQKALLPDKSTVLERAMIEHNLLSASKLYTNISFEELGTLLGIDPRKAEKIACRMICEDRMRGSIDQVEAVIHFEDDTEGLQQWDQQIAGLCQALNDILDSMSSKGIAIPV

SEQ ID NO: 32636 - protein, 393 aa, Clostridium perfringens str. 13
MEGRLVSKKEIVAMILAGGQGSRLGVLTKNLAKPAVPFGGKYRIIDFPLSNCSNSGIYTVGVLTQYKPLKLNEHIGIGDTWDLDRRDGGVSILPPYQKEKGGDWYKGTANAIYQNIEFIERYDPEYVLILSGDHIYKMDYDKMLEMHKQKEADATIAVINVPMHEASRFGIMNTNEDLSIYEFEEKPEHPKSTNASMGIYIFNWKILKKFLEEDELDQSSSNDFGKNIIPKMLNSGKKLIAYPFNGYWKDVGTIESLWEANMDLLKYEDELSLYDSEWKIYSANPVRPAQFIGKDAEIKSSLTVEGCIVHGKVENSVLFQGVYVGKGAIVKDAVIMPNTKIEDNVLIEKAIIGSEAIVCKGCKIGDGNKISVIASKEVVIGSKEVIEECAMVK

SEQ ID NO: 32637 - protein, 368 aa, Clostridium perfringens str. 13
MNNCIGIINLDENESKIGELAKNRPLAAVPIAGRYRIIDFILSNMTNAGIESLGILSKNKSRSLVDHLTNGRPWDLHRKRDGLRVFNFGERDPYYDDITNLYENLEFLTKSRREYVIMSPSYMICNIDLKEALEYHKKNDNDITVIYKKVKDADSNFIDCDVLNFDECGFIKSIGKNLGREEESNISLEMYILRTDLLIEIIYECIRRGSHRKFKSYLKEFLDEIKVGGFEFKGYLSCVNSLKSYYKANMDLLEEKVYKELFIDNNPIYTKSRDEGPTHYTKNSEVTNSIIANGSYIEGKVENSIIGRRVYVGPEAVIKNCIIMQETVIGENAHLDKIITDKAAVIRDDEKIVGLEYCPMVLSKPNII

SEQ ID NO: 32638 - protein, 105 aa, Citrus maxima
EPFDYYMFGQNYIRPLVDFRSSYVGNVSLFFEMEEKLNQGHNIVLISNHQTEADPAIIALLLESTNPHVAENLTYIAGDRVITDPLCKPFSMGRNLICVYTKKHM

SEQ ID NO: 32639 - protein, 255 aa, Gossypium barbadense
MLRSLALTTSSSSSLVAKPFFSFSQASLTLSAPISLPFPQTRRSISLHTRPMNILKSLGFGANNKPTASMDNCAIAQGPEDDVPPPGQQFAQFGAGCFWGVELAFQRVSGITKTEVGYSQGFMHNPSYEDVCSGTTNHSEVVRVQYDPNECSYDTLLHVFWARHDPTTLNRQGNDVGTQYRSGIYFYSPEQEKAAVESMEKQQKLLNRKIVTEILPARKFYRAEEYHQQYLAKGGRFGCKQSAEKGCNDPIRCYG

SEQ ID NO: 32640 - protein, 723 aa, Thermotoga naphthophila
MWLLFLIPLVALGFAAANFAAVVRKPEGTERMKEISSYIRSGADSFLTHETKAIFKVAIVIAILLMIFTTWQTGVAFLLGAVMSASAGIVGMKMATRANVRVAEAARTTKKIGPALKVAYQGGSVMGLSVGGFALLGLVLVYLIFGKWMGQLDNLNIHTNWLGINFVPFAMTVSGYALGCSIIAMFDRVGGGVYTKAADMAADLVGKTELNLPEDDPRNPATIADNVGDNVGDVAGLGADLLESFVGAIVSSIILASYMFPIYVQKMGENLVHQIPKETIQALISYPIFFALVGLGCSMLGILYVIVKKPSDNPQRELNISLWTSALLTVVLTAFLTYFYLKDLQGLDVAGFRFGAISPWFSAIIGIFSGILIGFWAEYYTSYHYKPTQFLSKSSVEGTGMVISNGLSLGMKSVLPPTLTLVLGILFADYFAGLYGVAIAALGMLSFVATSVSVDSYGPIADNAGGISEMCELDPEVRKITDHLDAVGNTTAAIGKGFAIGSAIFAALSLFASYMFSQISPSDIGKSPSLVLLLNMLDARVIAGALLGAAITYYFSGYLISAVTEAAMKMVDEIRRQAREIPGLLEGKAKPDYNKCIEITSDNALKQMGYPAFIAILTPLVTGFLLGAEFVGGVLIGTVLSGAMLAILTANSGGAWDNAKKYLEAGNLEGYGKGSEPHKALVIGDTVGDPLKDTVGPSLDILMKIMSVVSVIAVSIFKHVHLF

SEQ ID NO: 32641 - protein, 537 aa, Pyrococcus abyssi GE5
MTKFIFVTGGVVSGLGKGITSASIGLLMKARGYKTTNIKIDPYINYDAGTMNPYQHGEVFVLDDGGEVDLDLGNYERFLDTSLTFDHNITTGKVYSTVIEKERRGEYLGATVQVIPHITDEIKRRIREIARNYDIVVVEIGGTVGDIESMPFLEAARQMQLEEGRENVAFVHVTYVPKLRVVGEQKTKPTQHSVKELRSLGIQPDAIVARSEDPLEEGARKKISLFTNVPEEAVISAYDVEDTYEVPLLLEREGLGKYLVKRLGLEDREPDLREWEKMVAKYKALQDSVEIAIVGKYVKLTDSYLSIKEALKHASVSNEVKVKIRWIEAEDIEEHGTKLLEGVDGIIVPGGFGARGAEGKIMTIRYARENDIPFLGICFGFQLTVVEFARNVLGMKGAHSTEIDPQTPYPVVDLMPEQRNLDKLGGTMRLGAYPVKIKKGTLAYELYKKDLVYERHRHRWEVNPDYIEAFEKAGLVFSGIAGDDERRMEILELPDKRYFIATQFHPEFKSRPMKPAPVFHGLVKAAKEYKQEKDATH

SEQ ID NO: 32642 - protein, 105 aa, Citrus limon
EPFDYYMFGQNYIRPVIDFRSSYVGNVSLFFEMEEKLNQGHNIVLISNHQTEADPAIIALLLESTNPHVAENLTYIAGDRVITDPPCKPFSMGRNLICVYSKKHM

SEQ ID NO: 32643 - protein, 944 aa, Welwitschia mirabilis
  misc_feature (581)..(581): Xaa can be any naturally occurring amino acid
  unsure (1)..(944): unsure at all Xaa locations
SIDAQLRLLVPTKVSEDDKLIEYDALLMDRFLDILQDLHGEEIRETVQECYELSGEYEGKFDTAKLEELGGVLTSLDAGDSIVVAALSHMLNLANLAEEVQIAYRRRIKHKKKGDFADENSATTESDIEETFKRLVNQLGRSPQEVFDALKNQTIDLVLTAHPTHQSVSLLQKHGRIRNCLSQLYAKDITPDEKQELDEALQREIQAAFRTDEIRRTPPTPQDEMRAGMSYFHETIWKGVPKFLRRVDTALKSIGINERLPYNAPLIQFSSWMGGDRDGNPRVTPEVTRDVCLLARMMATNLYYSQIEDLMFELSMWRCSDELRQRALQLHNSAKRDAKHYIEFWKQVPPNEPFRVILGDVRDKLYNTRERTRQLLANGFSDVPEEALTSVDQLLEPLELCYRSLCSTGDQPIADGSLLDFMRQVSTFGLTLVKLDIRQESDRHTDVIDAITRHLGLGSYKEWPEDKRQEWLLAELRGKRPLFGPDLPTTDEIREVLDTFHVVAELPPDNFGAYIISMATAPSDVLVVELLQRECRVKKPLRVVPLFEKLADLENRPAALARLFSIDWYRNRIDGKQEVMXGYSDSGKDAGRLSAAWQLYKAQEELIKVAKQFGIKLTMFHGRGGTVGRGGGPTHLAILSQPPDTIHGSLRVTVQGEVIEQCFGEEHLCFRTLQRFTAATLEHGMHPPIAPKPEWRQLMDEMAVVATQEYRSYVFHNKRFVEYFRSATPELEYGRMNIGSRPSKRKPSGGIESLRAIPWIFAWTQTRFHLPVWLGFGAAFKSVIEKDIRNLHTLQQMYNEWPFFRVTIDLVEMVFAKHPEIAALYDKLLVSSVLWAFGEQLRKNYVETKTLLLQVAGHKEVLEGDPYLKQRLRLRDSYITTLNALQAYTLKRIRDPSYHVTLRPHLSKESSTKPAAELVKLNPTSEYAPGLEDTLILTMKGIAA

SEQ ID NO: 32644 - protein, 153 aa, Arabidopsis thaliana
MSMIPSFFNNNRRSNIFDPFSLDVWDPFKELTSSSLSRENSAIVNARVDWRETPEAHVFKADLPGLKKEEVKVEIEEDSVLKISGERHVEKEDKNDTWHRVERSSGQFTRRFRLPENVKMDQVKAAMENGVLTVTVPKAETKKADVKSIQISG

SEQ ID NO: 32645 - protein, 402 aa, Xanthomonas campestris pv. campestris str. 8004
MRRVVVTGMGINSCLGNDLDTVSSALRESRSGITALPDHAEAGLRSQVGGAVDIDLDGLIDRKLKRFMGDASAYAYLAMRDAIADAGLSPEQVSDLRTGVIAGSGGGSSQWQVETADLLRARGVRKVGPYMVPRTMCSAVSASLATAFKIRGLSYSLSAACATSAHCIGAAADLIRHGAQDVMFAGGGEELHWTMSVMFDAMGALSTGFNDRPAVASRPYDAQRDGFVIGSGGGMLVLEDYDHAIARGARIHAELLGYGVTSDGADMVAPSGEGAVRCMHMAMQGLDRPIDYLNTHGTSTPLGDATELGAVREVFGDNVPPLSSTKALSGHSLGAASVHEAIYSMLMLRDGFMAGSAHIDELDPRAEGFPILRATREATLNTVMSNSFGFGGTNGVLVFGRV

SEQ ID NO: 32646 - protein, 485 aa, Psychrobacter arcticus 273-4
MPIDMSKSKITTAIMQRLLQRSTLAIAVATTMVVGINLNTMPSAQAAVTTADFSGLVQQVTPAVARVNVTKTVSEAELAKAQTAELLRKFFGDRLRIPDQAATPAIEHAYGTGFFVTDDGYMLTNHHVVAGADKITVTLNDRTELDATLVGSDERSDVAVLKVTGKKFPALPIGDSNSLKVGEPVLAIGSPFGFDYSASAGIVSAKSRNFSRETSVSFIQTDVALNPGNSGGPLFNQRGEVIGINSRIFSGTGGYMGLSFSIPIDAAMDVYEQLKANGKVERAYLGIYPQDIDRNLAEAYNLARPQGALLTRVSPDSPAQKAGLKSGDIILRYNDVQIMEASDLLNLINRARPNDTFRMQIQRNGKQSLVTGKLSDASNDMQSQNRGQQNNEISLGLALRNLTPEEQVELASDNKTGVLVTAIEPTGLAARSGILAGDIITNLHQKSIKTVNDVSSAVSVLPKKGVVTIEVMRQGIPGIIGLRIE

SEQ ID NO: 32647 - protein, 105 aa, Citrus maxima
EPFDYYMFGQNYIRPLVDFRSSYVGNVSLFFEMEEKLNQGHNIVLISNHQTEADPAIIALLLESTNPHVAENLTYIAGDRVITDPLCKPFSMGRNLICVYCKKHM

SEQ ID NO: 32648 - protein, 484 aa, Yersinia pestis biovar Medievalis str. 91001
MYVGIDLGTSGVKAILLAENGRVIASQNAALVVSRPHPLWSEQNPADWWQATDQVMQALAAEHDMQQVKALGLTGQMHGATLLDKQHQVLRPAILWNDGRSFSQCQTLEQAVPASRQITGNLMMPGFTAPKLQWLAEHEPDMFQCIDKVLLPKDYLRFLMSGDFATDMSDAAGTMWLNIAQRDWSDEMLAACGLGRQHMPTLFEGNQITGHVSADIAKRWGINRIPIVAGGGDNAAGAVGVGLYQAGQAMLSLGTSGVYFAVSEGFLSNPASAVHSFCHALPNTWHLMSVMLSAASCLDWACQLTGAESVPALIAEVEKTPMAATPVWFLPYLSGERTPHNNPKAKGAFWGFTHEHRRPDLARAVLEGVGFALADGMDALHASGLQPKSVTLIGGGARSAYWRQMLADISGQTLEYRTGGDVGPALGAARLAQIAMNPDVSLADLLPALALEQTHLPDPQKHHYYTDRRVTFKKLYQQLLPLCE

SEQ ID NO: 32649 - protein, 54 aa, Arabidopsis thaliana
MYVKLVKALCADHNINLLTLVNGPLCKIDSEGNARKVVGCSCVVIKVYGDAPTP

SEQ ID NO: 32650 - protein, 84 aa, Triticum aestivum
NHCLQTLNRLFGYSQLMDQFGNVWHHSRVRKYLTADDWSPIEAKGRPWYGLLGLLRKYPEHFVINTKSKGRAISEFVSLVSLLS

SEQ ID NO: 32651 - protein, 423 aa, Desulfotalea psychrophila LSv54
MVCPKILTRQIIMNNRRIVITGVGLAAPNADNLKEFREKLLTGTSEIQEIDLRYFGKAPAGICSFPETKYRKKKENKRGTRAGCFGVYCAHEALNDAGLDHDHYDKARVGVYIGLTEHGTSETENEVFNISQYDYDVKYWTHHHNPRTVLNNPAGEITLSLGITGPHYVIGAACAAGNASLIQAVQMLRLGEVDMAIAGGISESTGSFGIFASFQAQGALGHAEDPKLASRPFDKSRNGIVVSEGACLYILEDLDKALARGAKIYGEIVGYGMNSDARDFVLPYAPRQVQCMELALKKAGLKPSDIDIVNTHATGTPSGDVEECKAIRALFSNCPSTYINNTKSIIGHAMGAAGVLELAGNLPSFDDNIVHPTINIEEIDPACVLENLVINEAKQVESVETILNNSFGMVGINSTIIVKKFKK

SEQ ID NO: 32652 - protein, 477 aa, Colwellia psychrerythraea 34H
MSNNIKTQVVVLGAGPGGYSAAFRAADLGLDVVLVESRETLGGVCLNVGCIPSKALLHVAKVIDDAAAMASHGVTFGKPEIDLDKIRGWKESVIAQLTGGLGSMSKARKVATVYGYGKFTSDKTIEVEGNDGEKTTITFDNAIIAAGSSVIDLPFIPNDDPRVIDSTGALELKDVPEELLVLGGGIIGLEMGTVYSALGSNVSVVEFADQLVPAADKDIVRVYNNYNKKKFNIMLSTKVVAVEAKDDGLYVTFEGKKAPKEQVRYDKILVAVGRKPNGHLVAADKAGVNVDERGFINVTNELRTNVPHIFAIGDVVGQPMLAHKAVHEAHCAAEVISGKKHTFEPRCIPSIAYTDPEMAWVGVTESEAKEQGLNIEIANFPWAASGRAIASARTEGKTKLIFEKETGRILGGAIVGINAGEMLGEICLAVEMGADAEDIGLTIHAHPTLNESIGLAAEIFEGSITDLPNAKAVKKKK

SEQ ID NO: 32653 - protein, 172 aa, Triticum aestivum
GYVERLGHGGFESSWRKDAMDWICKVHSYYNFGPLTLCLSVNYMDRFLSSFDLPHDKSWMQQLMSVACLSLAVKMEETVAPLPVDLQVCDEYYAFEPRNIKRMELIVMETLKWRMHSVTPFSFLCYFLDKFNEGKPPSYMLVSRCAELIVATVKDYRFLSFRPSEIAAAVVL

SEQ ID NO: 32654 - protein, 1035 aa, Oryza sativa
MTDTTDDIAEGISFQAFEDDCRLLGSLLHDVLLRELGPRFIHLLERITILAQSAVNMRSAGVEDTAVVVEKQLGAELAAMSLEDSLCLARAFSHHLNLMTIADTYHRVRKARNFADLSKSCDDTFAKLIQSGVSPEELYDTVCKQEVEIVLTAHPTQINRRTLQYKHLRIAHLLEFNERADLSLEDKEILIEDLVREITAIWQTDELRRHKPTPVDEARAGLHIVEQSLWKAIPHYLRRVSNALKKNTGKPLPLTCTPIKFGSWMGGDRDGNPNVTAKVTRDVSILSQWMAIDLYIRELDTLSFELSINRCSEKLANLANDILLKESASEDQKTNTWNQTGPQNNLKLQHSLALPAQLPSGADLPSCTECNDGESQIRMSKLPGNPKHKLALNITEKREDSPLPSPSHRPMGRTPSGGQLRKMFTESQIGRSSFRKLLEPSISERPGSTPYRVVLGDVKEKLMNTRRRLELLLEDLPCDRDTSEYYDTSDKLLEPLLLCYQSLQSCGSSVLADGRLADLIRRVATFGMVLMKLDVRQESGRHTETLDAITSYLDLGVYSEWDEQKKLDFLTRELKGKRPLVPPYIQVTADVQEVLDTFRVAAELGSDALGAYVISMASNASDVLAVELLQKDARLTVSGDLGRPCPGGTLRVVPLFETVNDLREAGPAIRKLLSIDWYRDHIIKNHNGHQEVMVGYSDSGKDAGRFTAAWELYKAQEDVVAACNAFGIKVTLFHGRGGSIGRGGGPTYLAIQSQPPGSVMGTLRSTEQGEMVQAKFGLPQTSVRQLEIYTTAVLLATLRPPQPPRDDKWRGVMEEISRVSCAQYRSTVYENPEFIKYFQEATPQAELGYLNIGSRPAKRRTTPGISNLRAIPWVFAWTQTRLVLPAWLGVGRGLQDACDKGHTHELRAMYEEWPFFQSTVDLIEMVVAKADAPMAKHYDDVLVHDAGRRTLGAELRQELARTENCVLAVSGHKKLSANNRSLRKLIDSRLTYLNPMNMLQVEVLRRLRQDDDNRKLRDALLITINGIAAGMRNTG

SEQ ID NO: 32655 - protein, 126 aa, Brassica napus
MAATQLTASPVTVSARSLASLRASSAKFGTLKPGTLKQSQFRSLVVRAASVVAPKYTSIKPLGDRVLVKIKEAEEKTMGGILLPSTAQSKPQGGEVVAVGEGRTIGKTKIDIDVPTGAQIIYSEYA

SEQ ID NO: 32656 - protein, 175 aa, Streptococcus thermophilus CNRZ1066
MVREDAMERAIFAGGCFWCMVQPFEEQEGILSVRSGYTGGHVPNPTYEEVCSKTTGHTEAVEIIFDPEIISFADLVEIYWAQTDPTDAFGQFEDRGDNYRPVIYYFDERQKKIAEQSKDNLQASGRFDRPIVTKIEPAETFYEAEAYHQGFYKTNPERYAQSSAIRHQFLEENWK

SEQ ID NO: 32657 - protein, 455 aa, Vibrio fischeri ES114
MKKPLLVLGALTLSISAILTPIQSQAALPIAVDSQQLPSLAPMLEKITPAVVSIAVEGTQVSKRHIPEQFRFFFGPDFPSEQVQEQPFRGLGSGVIVDAKKGYIVTNHHVINNAEKILVQLHDGREYTAELIGSDELSDIALLKLEEAKNLTEIKLADSDNLRVGDFSVAIGNPFGLGQTVTSGIISALGRSGLNLDNFENFIQTDAAINSGNSGGALVNLNGDLIGINTAILGPNGGNVGIGFAIPSNMVRNLSEQILEFGHVKRGILGVQGGELTPELAEAFDYETNHGAFVSQVVPDSAADKAGIQAGDILISINGKKIQTFGELRAKVATLGAGKKVTLGLIRDGKEKTVTATLKEAEQIKAQAENLHNGLKGAELQNTTQSDPVKGVKISNVEKTSMAQRYGLQKDDIIIGVNRKPVKNLQQFRKLLESKPPVLALNIQRGEHTLYLVIK

SEQ ID NO: 32658 - protein, 354 aa, Vibrio fischeri ES114
MLSFLLRSAMIGIATAAILLFAFPNLRSNITLDQGAIERTSQNSKQISFNYAVRRAAPAVVNIYSRKYNDNDRLRLDTEGLGSGVIVSDKGYIITNYHVVADADQVIVALQDGRLFNSQLIGKDKRTDLAVLQIKDANLPVIPLNPNYQADIGDVVLAIGNPYNLGQTTTFGIISATGRAALSADGTQGLIQTDAAINRGNSGGALVNTRGELVGINTASFQQATELETYGISFAIPYALADKIMRRLIADGQVIRGYIGIDGRDINPAMARLMNADNINGILVLGVSPNSPAEKAGIITQDIITSIDGKSVTNRQSVIDIVTELRPGTEVDVDVIRKGKTETIKVTIEEDPNN

SEQ ID NO: 32659 - protein, 404 aa, Streptococcus thermophilus CNRZ1066
MKTFDKSSKLEHVAYDIRGPVLDEANRMIAKGEKILRLNTGNPAEFGFTAPDEVIRDLIMNVRNSEGYSDSKGIFSARKAIMQYCQLKGFPNVDIDDIYIGNGVSEMIPMSMQALLDDGDEVLVPMPDYPLWTACVSLAGGNAVHYVCDEKSNWYPDIDDIKSKITSNTKAIVIINPNNPTGALYPKDVLEQIVDIARQNDLIIFADEIYDRLVMDGKKHIAIASLAPDVFCVSMNGLSKSHRICGFRVGWMVLSGPKKNVRGYIEGLDMLSNMRLCSNVLSQHVIQTSLGGYQSVDELLIPGGRIYEQREFITNTVNDIPGLTAVKPDAGLYIFPKIDRNMYDIDDDEEFCLRLLKKEKVLLVPGKGFNWNEPDHFRIVYLPRVEELADLGNKIERVLLYYKR

SEQ ID NO: 32660 - protein, 263 aa, Glycine max
MIPEHYSDSSLFHSSLLTLFLIAPPTFFSLTFLQAPYGKHHRPGWGPNLPPPLAWLLMESPTLWLTLLLFPLGLHSHNPKAQALITPFLIHYFNRTILYPLHLLLTPSKKTTPGFPLSVALMAFAFNVLNSYLQARTVSHYNNHYDDSGFFWFRFLCGLLVFLLGMGINVWADRVLLRLKSEGKGYVVPRGGLFELVACPNYFGEIVEWLGWAVMTWSWAGLGFFVYTFANLGPRARANRRWYLEKFGEDYPKERKAVIPYLY

SEQ ID NO: 32661 - protein, 535 aa, Oryza sativa
MAAASSAPFFGLGDTQMPPPQNPTNPALHHHPNPSPAPVAAAAPAPKKKRNQPGNPNPDAEVIALSPRTLMATNRFVCEVCNKGFQREQNLQLHRRGHNLPWKLKQKNPKEARRRVYLCPEPSCVHHDPSRALGDLTGIKKHYCRKHGEKKWRCDKCSKRYAVQSDWKAHSKTCGTREYRCDCGTLFSRRDSFITHRAFCDALAQENARMPPIGAGVYGGAGNMTLGLTGMAAPQLPAGFPDQAGQPSASAGDVLRLGGGSNGASQFDHLMASSSGSSMFRSQGSSSSSFYLANGAAHHAPAQDFGPEDGQSQAGQGSLLHGKPAAFHDLMQLPVQHQQSGNGNLLNLGFFSGSNGGVDQFNGGAGNGGQGSIVTSSGLAGNHGGGGGGFPSLYNSSEPAGTLPQMSATALLQKAAQMGATTSSYNAGGAGGASSLLRGASSHGISVGEGPANERSSYQNLIMGSMASGGGGAGFAGSFSGASGFGGAVDDGKLSTRDFLGVGVVQGISGSAAMGPPRHGAAGLHVGSLDPANMN

SEQ ID NO: 32662 - protein, 281 aa, Oryza sativa (japonica cultivar-group)
MSGLYSPGFSPARNLSPQIRSNPTDVDSQYLAELLAEHQKLGPFMQVLPICSKLLSQEIMRVSSIVHNHGFGDFDRHRFRSPSPMSSPNPRSNRSGNGFSPWNGLHQERLGFPQGTSMDWQGAPPSPSSHVVKKILRLDVPVDSYPNFNFVGRILGPRGNSLKRVEASTGCRVFIRGKGSIKDPGKEDKLRGKPGYEHLSDPLHILIEAEFPASIIDARLRHAQEVIEELLKPVDESQDFYKRQQLRELAMLNSTLREDSPHPGSVSPFSNGGMKRAKTGQ

SEQ ID NO: 32663 - protein, 155 aa, Triticum aestivum
  misc_feature (123)..(123): Xaa can be any naturally occurring amino acid
  misc_feature (128)..(128): Xaa can be any naturally occurring amino acid
  misc_feature (141)..(141): Xaa can be any naturally occurring amino acid
  misc_feature (154)..(154): Xaa can be any naturally occurring amino acid
  unsure (1)..(155): unsure at all Xaa locations
MAPTVMASSATSVAPFQGLKSTAGLPVSRRSNGASLGSVSNGGRIRCMQVWPIEGIKKFETLSYLPPLSTEALLKQVDYLIRSKWVPCLEFSKVGFIFREHNASPGYYDGRYWTMWKLPMFGXCTDAXQVINKVEESRRSXPDAYVRIIGSTNXK

SEQ ID NO: 32664 - protein, 566 aa, Candida albicans SC5314
MSISKSIYELAVIANSLGKVLEGSSKIVQNEAYQWYKSSFVSKTIQDSCDNSQPMYEEMQNISTTIRNQVSPNINQKENPFQSQSQKRSYSTKSYSPGDEVELETESTSSNTVPDIKPKLKKTFEMSQSEVPSSRLARIFHYGSLAAGIGLNAATQGLRHYASGNSDAITMKSLVLSPQNIERMARKFSKMRGAALKLGQMLSFQDASILPKEIQQILLRVQNSAHYMPPGQLERVMSKELGLNWRERLFTSFDDVPIAAASIGQVHTAVAEDLTPVVVKVQYPGVVDSIDSDLNNILMLLTASSLLPPGLFLDKTIANARVELKWECDYIREARNLVRMREFLKDDDAFEVPRVFHQLCGEHVLTMERMRGIEIVKGDWGQSTKDWIATNIMRLCLLEIKEFKFMQTDPNWANFLYNEKTHKIELLDFGAARDFGDHFIDNYVKLLRAAVKKDRKRVEEISKDLGYLTGLESPQMVKAHVDSVMCLGEAFSPVDNNGEPFNFKKQTISDRVRGNVGLMLNERLTPPPEETYSLHRKLSGVFLLCSRLNATVPCEDLFREIIGYED

SEQ ID NO: 32665 - protein, 380 aa, Oryza sativa
MAHDEAVAAQKIGKTTSPPKDQPTPCPFPDWSAVQAYYGPGVLPPTYFAPAIASGHAPPPYMWGPQPIMPPPFGTPYAAMYPHGGAYPHPLMPMMANPLSMEPAKSASSKEKGSNKKLKEVDGAAVSTGSGDSKKTMTSSGDYSAEGSSDVNDLKVGKTGRKRRLDDGAGAETSAAAKMENALPPSHILGSTAILPNHSFPAQVIRPSATNVANSRALGTPISPPPGVIVPSHTGVSTELLIKDERELKREKRKQSNRESARRSRLRKQAETEDLATQVESLTAENTSLRSEISRLSESSEKLRLENSALMGKLKDPAASTQAETSLQKTTTASSPRVVENFLSMIDNTNKTSVRHTEHAEPKLRQLLGSGPATDVVAAS

SEQ ID NO: 32666 - protein, 234 aa, Arabidopsis thaliana
ETSGKETVDGSREIADKEAVAKTKETLGSKEVTVGEAANMEVENQDEEDDDGDDDPEEDPEEDPEEDPEEDPEEDPEEDPEECEEMDVANTEQEEPAEEPQKKEENLEKTSGTVADPITEAATDNRKEERGPNDSKTEIKPKSETDKHGKQDGGTSDAAKREETVDKELLQAFRFFDRNQAGYVRVEDMRVTIHSLGKFLSHREVKELVQSALLESNTGRDDRILYNKLVRLSL

SEQ ID NO: 32667 - protein, 143 aa, Colwellia psychrerythraea 34H
MAIERTFSIVKPDAVAKNFIGQIYNRFETAGLKIVASKMIHLSQEKAEGFYAEHSERPFFGALVEFMTSGPVMVQVLEGENAVLKNREIMGATNPAEALAGTIRADLADSIDENAAHGSDALESAAREIAYFFSDDEICARTR

SEQ ID NO: 32668 - protein, 132 aa, Trichodesmium erythraeum IMS101
MVNKIKKSEKEWKEQLTPEQFNVTRKKGTERPFTGEYYNNKEKGIYKCVCCGIDLFSSEAKYDSGTGWPSYWKPINQENIKEETDWSLFMRRTEVLCNNCDAHLGHVFPDGPPPTGLRYCLNSAALKFSKGE

SEQ ID NO: 32669 - protein, 361 aa, Arabidopsis thaliana
MDYHLRVLFSVSLIFVFVSVSVCGDEDVLIRQVVDETEPKVLSSEDHFTLFKKKFGKVYGSIEEHYYRFSVFKANLLRAMRHQKMDPSARHGVTQFSDLTRSEFRRKHLGVKGGFKLPKDANQAPILPTQNLPEEFDWRDRGAVTPVKNQGSCGSCWSFSTTGALEGAHFLATGKLVSLSEQQLVDCDHECDPEEEGSCDSGCNGGLMNSAFEYTLKTGGLMREKDYPYTGTDGGSCKLDRSKIVASVSNFSVVSINEDQIAANLIKNGPLAVAINAAYMQTYIGGVSCPYICSRRLNHGVLLVGYGSAGFSQARLKEKPYWIIKNSWGESWGENGFYKICKGRNICGVDSLVSTVAATTS

SEQ ID NO: 32670 - protein, 329 aa, Ehrlichia ruminantium str. Welgevonden
MTTDHIHNLTKQQLINCYHDMLLIRRFEEKSGQLYGMGLIGGFCHLYIGQEAIAVGIQHSIIEGDSIITSYRDHGFMLSSGTDPKYVMAELMGKSTGCSGGKGGSMHMFNIEKQFFGGHGIVGAQVPIGTGIALANKYKKNNNVVFTCFGDGATNQGQVYEAFNMAALWKLPVVYVIENNEYAMGTSVSRSSYITDLYKKGESFGIPGYQIDGMDLFAVIKAATDAAAYCREQNGPILLEMKTYRYRGHSMSDPAKYRSKEEVEKVKEEKDPLINLKNYMISNKIISEEDCNKYDKEIRNIVKESVEFSQNSSEPAVNTLYTDVYKNTD

SEQ ID NO: 32671 - protein, 333 aa, Sulfolobus solfataricus P2
MDKTVLDANLDPLKGKTIGVIGYGNQGRVQATIMRENGLNVIVGNVKDKYYELAKKEGFEVYEIDEAVRRSDVALLLIPDEVMKEVYEKKIAPVLQGKKEFVLDFASGYNVAFGLIRPPKSVDTIMVAPRMVGEGIMDLHKQGKGYPVLLGVKQDASGKAWDYAKAIAKGIGAIPGGIAVISSFEEEALLDLMSEHTWVPILFGAIKACYDIAVKEYGVSPEAALLEFYASGELAEIARLIAEEGIFNQMVHHSTTSQYGTLTRMFKYYDVVRRIVENEAKYIWDGSFAKEWSLEQQAGYPVFYRLWELATQSEMAKAEKELYKLLGRKVKND

SEQ ID NO: 32672 - protein, 254 aa, Hordeum vulgare subsp. spontaneum
TGITGIVNGMDVSEWDPTKDKFLAVNYDITTALEAKALNKEALQAEVGLPVDRKVPLVAFIGRLEEQKGPDVMIAAIPEILKEEDVQIILLGTGKKKFEKLLKSMEEKFPGKVRAVVRFNAPLAHQMMAGADLLAVTSRFEPCGLIQLQGMRYGTPCVCASTGGLVDTIVEGKTGFHMGRLSVDCNVVEPADVKKVATTLKRAVKVVGTPAYQEMVKNCMIQDLSWKNWEDVLLELGVEGSEPGIVGKEIAPLA

SEQ ID NO: 32673 - protein, 379 aa, Haloferax volcanii
MSGELKRGLEGVLVAESKLSFIDGDAGQLVYCGYDIEDLARDASYEEVLYLLWHGALPTGEELDAFSDELAAHRDLDDGVLDVARELAEQDESPMAALRTLVSAMSAYDESADFEDVTDREVNLEKAKRITAKMPSVLAAYARFRRGDDYVEPDESLNHAANFLYMLNGEEPNEVLAETFDMALVLHADHGLNASTFSAMVTSSTLSDLYSAVTSAIGTLSGSLHGGANANVMRMLKDVDDSDMDPTEWVKDALDRGERVAGFVHRVYNVKDPRAKILGAKSEALGEAAGDMKWYEMSVAIEEYIGEEKGLAPNVDFYSASTYYQMGIPIDLYTPIFAVSRAGGWIAHVLEQYEDNRLIRPRARYTGEKDLDFTPVDER

SEQ ID NO: 32674 - protein, 532 aa, Zea mays
MQAAIDQSPHLRFRAGMDDKSCYVATGLSLAAILLVLHRLVVRAGGKGNAAARRLPPSPPAVPFLGHLHLLASECPLHSSLARLAARHGPVLSLRLGSRAAMVVSSPECAEACFTEHDVAFANRPRLTSQALASFGGAALAVSSYGPYWRNLRRVAAVRLLSTHRVACMCPVISAEVRAMLRRVGRAAEATGRVQLKASLFELSLSVLMETIAQTKTSRADDADDAVSPEAHEFRRIVDEILPYLGATNLWDYLPLLRRFDVLGVRNKIRDVVGRRDAFLQRLIDAERRRLDGDGDGDEKKSMIAVMLSLQKSEPDVYTDTMIMALCGNLFTAGTETTSSTIEWAMSLLLNHPEALKKAEAEIEAAVGASRLITMDDVPGLGYLQCVINETLRLYPVAPLLLPHESAADCTVGGYDVPRGTLLFVNAYAIHRDPAAWEEPDEFRPERFRDGKAEGRLMLPFGMGRRRCPGETLALRTAGLVLATLIQCFHWDRIDDAEIDMTESGGLTMPRAVPLEATCKPREAMRHVLQQL

SEQ ID NO: 32675 - protein, 215 aa, Solanum tuberosum
MKDKEVKTRMKRGFWKPEEDLILKNCVETHGEGNWATISEKSGLMRSGKSCRLRWKNYLRPNIKRGMMSEDEKDLIIRLHKLLGNRWSLIAGRLPGRTDNEVKNFWNTHLNNKRSCRGKKKHVKSKEANTQSTQGKMQEYPAETVSNQEVATKTVLDSWIEEMQDFNCSLLSPLTMNNMPFLEDEPFIPILDDIVLLEAFTSTGKEAWNEIQPFL

SEQ ID NO: 32676 - protein, 572 aa, Oryza sativa
MTAAPGSLPLVNSRPVSLSLAASRSSFSSLLSGGAGSSLNLMTPPSSLPPSSPSSYFGGVSSSGFLDSPILLTPSLFPSPTTTGALFSWITTATATAAIAPESQVQGGVKDEQQQYPDFTFLPTASTAPATTMAGATATTSNSFMQDSMLMAPLGGDPYNGEQQQPWSYQEPTMDADTRPAEFTSSAAAGDVAGNGSYSQVAAPAAAGGFRQQSRRSSDDGYNWRKYGQKQMKGSENPRSYYKCTFPGCPTKKKVEQSPDGQVTEIVYKGAHSHPKPPQNGRGRGGSGYALHGGAASDAYSSADALSGTPVATPENSSASFGDDEAVNGVSSSLRVASSVGGGEDLDDDEPDSKRWRRDGGDGEGVSLVAGNRTVREPRVVVQTMSDIDILDDGYRWRKYGQKMVKGNPNPRSYYKCTTAGCPVRKHVERASNDLRAVITTYEGKHNHDVPAARGSAAAALYRATPPPQASNAGMMPTTAQPSSYLQGGGGVLPAGGYGASYGGAPTTTQPANGGGFAALSGRFDDDATGASYSYTSQQQQQPNDAVYYASRAKDEPRDDGIMSFFEQPLLF

SEQ ID NO: 32677 - protein, 291 aa, Mesembryanthemum crystallinum
MAKDFETGGGEVRDVAKDYQDPPPSPLFDMEELTKWSFYRALIAEFIATLLFLYITVLTVIGYKHQSDPLVSGADAGCGGVGILGIAWAFGGMIFILVYCTAGISGGHINPAVTFGLFLARKLSLIRAIMYMVAQCLGAICGVGFVKAFQSAYYNKYGGGANELSVGYSKGTGLAAEIIGTFVLVYTVFSATDPKRSARDSHVPVLAPLPIGFAVFMVHLATIPITGTGINPARSLGAAVIYNNNKAWDDQWIFWVGPFIGAAIAAIYHQYILRAGFIKALGSFRSSTSNV

SEQ ID NO: 32678 - protein, 254 aa, Hordeum vulgare subsp. spontaneum
TGITGIVNGMDVSEWDPTKDKFLAVNYDITTALEAKALNKEALQAEVGLPVDRKVPLVAFIGRLEEQKGPDVMIAAIPEILKEEDVQIILLGTGKKKFEKLLKSMEEKFPGKVRAVVRFNAPLAHQMMAGADLLAVTSRFEPCGLIQLQGMRYGTPCVCASTGGLVDTIVEGKTGFHMGRLSVDCNVVEPADVKKVATTLKRAVKVVGTPAYQEMVKNCMIQDLSWKNWEDVLLELGVEGSKPGIVGEEIAPLA

SEQ ID NO: 32679 - protein, 145 aa, Listeria monocytogenes EGD-e
MDESKKNERLQQLTDIQYNVTQKAGTERPFQNEFYDNEVKGIYVDIVSGKPLFSSNDQYDAGCGWPSFTKPIDEAEVIEHRDLTHGMIRTEVKSADADSHLGHVFPDGPQDKGGLRYCINSAALRFIPVDKLEEEGYQAYKKIFE

SEQ ID NO: 32680 - protein, 155 aa, Arabidopsis thaliana
MGGGFRVLHLVRPFLAFLPEVQSADRKVPFREKVIYTVISLFIFLVCSQLPLYGIHSTTGADPFYWMRVILASNRGTVMELGITPIVTSGLVMQLLAGSKIIEVDNNVREDRALLNGAQKLLGILIAIGGAVAYVLSGMYGPVGQLGVGNAILII

SEQ ID NO: 32681 - protein, 349 aa, Debaryomyces hansenii CBS767
MRPIKLMGHERSLTQVKFNREGDLIFSVAKDSTASIWYSSNGERLGTLEGHIGTIWSIDVDADTILCATGSADLTIKLWKIETGECVQSWEMPTPVRRVAFSPDNKRLLAVTDQVMGQTGTISVFDINYEGDYTKQQSKPSLIIETRSDAKKVTVAGWSANGDFIIAGHEDGYVSKYNSSTGEFIETAQVHGIHNEEKIASITDIQFAPEDKSYIVTASKDKCSCLVDVDTLELMKVYKADAPMNTAAITPIKDFVILGGGQEARNVTTTAESQGKFEARFYHKIFIDEIGRVKGHFGPLNSIAVHPDGTGYASGGEDGFIRLHYFDKSYFDFEFDTERAERAMASSAA

SEQ ID NO: 32682 - protein, 338 aa, Clostridium perfringens str. 13
MRYIEFDEKRKFDIVPVGRVAIDFNPTDIHKPLSESRNFNKYLGGSPANIAVGLARLGKKVGFIGKVSDDRFGEFVVNYFKKEGIDVSEISKAKNGESLGLTFTEILSPTESSILMYRNGIADLQLDVDDIDEDYIKNTKAIVISGTALAMSPSREAALKALRLAKKNGTVVIFDVDYREYNWKNKDEIAIYYSIVGKESDIIMGSREEFDLMEGLIAKDSTDEETAKRWLDYGNKIVVIKHGKDGSTAYTRDGKAYRIKPFPVKLLKSFGGGDAYASAFIYGILEGWDMMDALEFGSASAAMLVASHSCSEDMPTVEAIKEFIKKEKEEYGEMVARS

SEQ ID NO: 32683 - protein, 272 aa, Mesorhizobium sp. BNC1
MKKITVVQINTRDDKAANLAKLESLVRAAHEADHSDYILTPEHSFCLTANKATMHAAAETLEDGEGLRRMASLARELGTTIHIGSILTTRNGRYYNTSVVIGPDGKQLATYDKIHRYDVDLPSGLSYRESDTNDAGNVAVTYDHNGTNVGLSVCYDVRFGSLYLELAARGAQVITIPAAFTFETGAAHWDTLVRARAIETQCYVAAAGQVGSFPASGGDRASFGNSQIVDPWGKVLARCSDVEGWASAAIDPSYQNRVRQNLPVARHRRAIA

SEQ ID NO: 32684 - protein, 433 aa, Psychrobacter arcticus 273-4
MSTKNEQLFAQACKHIPGGVNSPVRAFAGVGGTPIFMHRANGSKIYDTEDNAYIDYVGSWGPMILGHAHPKVIDAVKKAADDGLSFGTPTPFETTVADKICEIVPSVEMIRMTSSGTEATMSAIRLARGYTQRDKIVKFEGCYHGHSDSLLVKAGSGMLDIGEPTSKGVPADFAKHTITIPYNDSQAIKDCFEKWGEEIACVILEPIAGNMNMVIPSQEFHDTLREQCTANNSVLIFDEVMTGFRVGLGGAQAHFGIDPDLTCFGKIIGAGLPVGAFGGKKEVMSCIAPLGGVYQAGTLSGNPLAMRAGIAMFEDLTAEGFYDELAVKVDRLVDGFQAAADKHGINLRTNKLGGMFGMFFVTDGDTAVPQNFDEVTECDMEVFNTFFHGMLDRGIYLAPSAYEAGFMSIKHSDEDIDTSIKAADEIFAEMAKA

SEQ ID NO: 32685 - protein, 193 aa, Zea mays
MADQQQPQQQPQEMDVDRTGGLELPPGFRFHPSDFEIVSHYLKNKVHDRDYSCIAIADADLNKTEPWDLPKVAKMGEKEWYFFYQKDRKYPTGLRANRATEAGYWKATGKDKEVYDPLAAEGLLLVGMKKTLVFYKGRAPRGDKTNWVMHEYRLEGSGRLPASPASASGSATNIAAAMMKASASACKDEWVVC

SEQ ID NO: 32686 - protein, 302 aa, Rhizobium leguminosarum
MARNTLPSITAGEAGLNRYLDEIRKFPMLEPQQEYMLAKRYAEHGDRDAAHKLVTSHLRLVAKIAMGYRGYGLPIGEVVSEGNVGLMQAVKKFDAERGFRLATYAMWWIKASIQEYILRSWSLVKMGTTANQKRLFFNLRRLKGRIQAIDDGDLKPEHVSEIATKLNVSEEEVISMNRRLSGDASLNAPIKAAEGDSGQWQDWLVDDHDSQEDVLIEQDELDTRRRMLAKAMSVLNERERRIFEARRLAEDPVTLEDLSTEFDISRERVRQIEVRAFEKVQDAVRKEALERAKAVRVVEATA

SEQ ID NO: 32687 - protein, 723 aa, Thermotoga petrophila
MWLLFLIPLVALGFAAANFAAVVRKPEGTERMKEISSYIRSGADSFLAHETKAIFKVAIVIAILLMIFTTWQTGVAFLLGAVMSASAGIVGMKMATRANVRVAEAARTIKKIGPALKVAYQGGSVMGLSVGGFALLGLVLVYLIFGKWMGQLDNLNIYTNWLGINFVPFAMTVSGYALGCSIIAMFDRVGGGVYTKAADMAADLVGKTELNLPEDDPRNPATIADNVGDNVGDVAGLGADLLESFVGAIVSSIILASYMFPIYVQKIGENLVHQVPKETIQALISYPIFFALAGLGCSMLGILYVIVKKPSDNPQRELNISLWTSALLTVVLTAFLTYFYLKDLQGLDVVGFRFGAISPWFSAIIGIFSGIIIGFWAEYYTSYHYKPTQFLSKSSIEGTGMVISNGLSLGMKSVFLPTLTLVLGILFADYFAGLYGVAIAALGMLSFVATSVSVDSYGPIADNAGGISEMCELDPEVRKITDHLDAVGNTTAAIGKGFAIGSAIFAALSLFASYMFSQISPSDIGKPPSLVLLLNMLDARVIAGALLGAAITYYFSGYLISAVTKAAMKMVDEIRRQAREIPGLLEGKAKPDYNRCIEITSDNALKQMGYPAFIAILTPLVTGFLLGAEFVGGVLIGTVLSGAMLAILTANSGGAWDNAKKYLEAGNLEGYGKGSEPHKALVIGDTVGDPLKDTVGPSLDILMKIMSVVSVIAVSIFKHVHLF

SEQ ID NO: 32688 - protein, 345 aa, Glycine max
MASSSPSPPSYLTHLPLHPSHQGESEKRVEDDESRVPIHIVTAATQLPVEFLEPSPQSKLVIGFDCEGVDLCRKGTLCVMQLAFPDAVYLVDAIEGGEELIIACKPALESNYITKVIHDCKRDSEALYFQFGIKLNNVVDTQIAYSLIEEQEGRKRLRDDYISFVGLLADPRYCGISYDEKEEVRVLLRQDPKFWTHRPLSEQMIRAAADDVRFLLYIYRQMMEKLNERSLWYLAVHGALYCRCFCLNSNNFADWPSLPSIPVDNLNADGNDLEEEILSVLDIPQGKMGLVIGKRGATILSIKRSCNAEILTGGPKGPPDKVFIIGPVKEVRKAEAMIRGRILDI

SEQ ID NO: 32689 - protein, 449 aa, Oryza sativa
STMGKEKTHINIVVIGHVDSGKSTTTGHLIYKLGGIDKRVIERFEKEAAEMNKRSFKYAWVLDKLKAERERGITIDIALWKFETTKYYCTVIDAPGHRDFIKNMITGTSQADCAVLIIDSTTGGFEAGISKDGQTREHALLAFTLGVKQMICCCNKMDATTPKYSKARYDEIVKEVSSYLKKVGYNPDKIPFVPISGFEGDNMIERSTNLDWYKGPTLLEALDQINEPKRPSDKPLRLPLQDVYKIGGIGTVPVGRVETGVLKPGMVVTFGPSGLTTEVKSVEMHHEALQEALPGDNVGFNVKNVAVKDLKRGYVASNSKDDPAKEAASFTSQVIIMNHPGQIGNGYAPVLDCHTSHIAVKFAELVTKIDRRSGKELEKEPKFLKNGDAGMVKMIPTKPMVVETFSEYPPLGRFAVRDMRQTVAVGVIKNVEKKDPTGAKVTKAAAKKK

SEQ ID NO: 32690 - protein, 635 aa, Pisum sativum
MMESCECIDTPYPPDELLVKYQYISDVLIALAYFSIPVELIYFVQKSAFFPYRWVLMQFGAFIVLCGATHFINLWTFSAHSKAVAVVMTIAKVSCAIVSCATALMLVHIIPDLLSVKTRELFLKNKAEELDREMGLILTQEETGRHVRMLTHEIRSTLDRHTILKTTLVELGRTLGLEECALWMPSRSGLNLQLSHTLTYHVQVGSTVPTNLPIVNEVFNSPRATRIPHTCPLARIRPLVGRYVPPEVVAVRVPLLHLSNFQINDWPDLSAKSFAIMVLILPTDSARKWRDHELELVDVVADQVAVALSHAAILEESMRARDQLMEQNVALDLARREAEMAIHARNDFLAVMNHEMRTPMHAIIALSSLLLETELTPEQRVMIETVLKSSNVLAALINDVLDLSRLEDGSLELEMGKINFHGVLEEVIELIKPIASVKKLPITLILAPDLPDNAIGDEKRLMQTLLNVVGNAVKYTKEGYVSIRASVAKPESLQDWRPPEFYPASSDGHFYIRVQVKDSGCGILPQDIPHLFTKFTQSQSGAGRSSSGSGLGLAICKRFVNLMGGHIWMESEGPDKGSTATFVVKLGICGNPDSSDHQATTRGQAYSGSGGLARFKHLVNDGDIGFSNRRNQRSF

SEQ ID NO: 32691 - protein, 414 aa, Glycine max
MEAAATATATVLTPPSAPPRPSAFLGRPSALAFRSNLRFSTKLSTSVSFSKQGHARHRVGSKRGFVVRAASFTPESSEPTSKIAPLKLESPIGQFLSQILISHPHLVPAAVEQQLEQFQTDCDGDKQKKEPSASGTDLVLYRRIAEVKAKERRTALEEILYALVVQKFMDANISLIPSLTPNHSGQVDSWPSEDGKLEELHSPEAYEMIQNHLALILGNRLGDSTSVAQISKIRVGQVYAASIMYGYFLKRVVQRFQLEKTMKILPNGAEENSIQHTVVDDSRISGGDGRSHVMSHPEVSTLPGGGISSGGFGYGSKVSRLRTYVMSFDSETLQRYATIRSKEALSIIEKHTEALFGRPEIVVTPEGVIDSLTDQSIKISFGGLKRLVLEAITFGSFLWDVESYVDSRYHFVLN

SEQ ID NO: 32692 - protein, 58 aa, Passiflora seemannii
WEYQVGPSVGIDAGDHIWCSRYILERITEQAGVVLSLDPKPIEGDWNGAGCHTNYSTK

SEQ ID NO: 32693 - protein, 360 aa, Thermotoga maritima MSB8
MKLRIALVGCGRIGQKKHVPALIETQDLFETVAVCDLVEERANRAAEHFEKSGLRRPETMTNYRELLKREDVDVISIATESGKHYQITMEALEAGKHVLVEKPMALSTKHMNEMVELSKQKNLKLGVFFQNRFNPPVQEVRKKLDSGAFGKIFYASVAVRWNRNEDYYKQASWRGTWEMDGGVLMNQSTHAIDLLQWFLGGEIEEIYGHIANTNHPYIEAEDEGFAIVKFKGGKTGLIEATSNVFPRNLEETLAIFGEKGTVVIGGIAVNRILTWRFEGEEGHPFMNLPDPDTVYGDSHKYVYRDFYEAVTNDRKPYISGEDGKKAVEIVLGIYRSFLEGRPVKYPFDFSTEEMKGVKLR

SEQ ID NO: 32694 - protein, 547 aa, Colwellia psychrerythraea 34H
MEYLTPLQNLKNNISRHPNKIFLHQPVNRQWQEFSWADVDHQARCIAAALKSQGFESGAKIGILSKNCAQWVITDLAIMMAGMISVPIYPTAEQTNISHIIKHADLSAIFIGKLDNPEEVQSAINDDLLSIAFPYPTPATTVQFSDWLTEFEPLLNVHQNTINEIATIVYTSGSTGRPKGVVLSYKNMASVAQNLVELFKLSNNFRSISYLPLAHIVERSNGYVALYAGFEVFFVESLDTFIDDLQYAQPTGFISVPRLWTIFQGNVLNKISQNTIAVLLNIPLLKHLFAKKIRNALGLNNAQWFVSGTAPIALSLLHWYEKLNMPISEGWGMTETSGASCLNYPFTKRGLGTIGKPLPCVEMTLSAEGEILIRGDAVFTEYYLAPQATEASFSNGWFHTGDCAVVNGQGEYTIIGRIKDKFKTSKGKYVAPVPIESLLCTNLDIEQVCLIGSGMKQPVALIVLTAMKNKRDIELVNRLKNTLSNVNAELESHQKIDYLLVCDEAWSVENHLLTPSMKIKRNIIEKKYDALTTKEFSDLVIYEEDMF

SEQ ID NO: 32695 - protein, 159 aa, Corynebacterium glutamicum ATCC 13032
MTSIHDISVTLNDGTETTMADWAGHLLLIVNVASKCGLTPQYEGLQKLYEEYQDRGFFVIGVPCNQFNGQEPGTDAEVCAFAQNQYDVTFPLLSKTEVNGEGAHPLYKVLKEATDGSEIEWNFEKFLVDAEGNTIKRFAPRTEPSAAEVVEAIEENLPI

SEQ ID NO: 32696 - protein, 156 aa, Triticum aestivum
MSARYLPGARLRIVGLGVPSPIHGSIQDTHDCYNGCAAFLLERVRRGSASVMLATHNVESGQLAAARAQELGIGKGDRNLQFAQLMGMADGLSLGLRNAGFQVSKYLPYGPVEHIIPYLIRRAEENRGLLSASAFDRQLLRKELVRRFKNAVMGRE

SEQ ID NO: 32697 - protein, 75 aa, Passiflora serratodigitata
GTNGEVMPGQWEYQVGPSVGIDAGDHIWCSRYILERITEQAGVVLSLDPKPIEGDWNGAGCHTNYSTKSMREDGG

SEQ ID NO: 32698 - protein, 761 aa, Nitrosomonas europaea ATCC 19718
MQSNISDLPHTVPPDFPSHWQTWIGPILNEHEQIHAWLETDLDGQLNFSSGLVVITTHRIFSRMANDENWQVWPCRQDMKLTYQDHAGVCSIELSDTHARLACWHCTLGRHQAVDQLITHFSRLITAHDAATELTGSNVADNESASESSPASDQEATATPPSTWTLFRLWRFARPYKWQLLIGFILMLGSTAAALVPPYLTMPLMDNVLIPYQNGHPIDVDLVTFYLSGLLAAAILAWILGWLRTYTLARVSERIGADLRTTTYEHLLSLSQAYFGGKRTGDLMARIGAETDRINLFLSLNLLDFATDVLMITLTVIILVSINPWLALITLLPLPIIAWLIHLVRDRLRVGFEKTNRVWAEVNNVLADTLPGIRVVKAFAQEEREIERFRTVNQRNVEINDRVNKVWALFTPTVTLLTECGLLVVWIFGIWQVSQDHITVGVLTAFLAYIGRFYLRLDSMSRIVSATQKAAAGTKRIFDILDHVSSVPEPVKPVHLPVMKGHIELRNVSFRYGTRRVIQNLDFTIEPGEMIGLVGHSGSGKSTLINLICRFYDVTDGSILIDGVDIRALPIAEYRKHIGLVLQEPFLFFGTIAENIAYGKPGASRKEIIAAARAAHAHEFILRLPYGYDSLVGERGQALSGGERQRISIARALLIDPRILILDEATSSVDTQTEQEIQGALDNLVSGRTTIAIAHRLSTLQEASRLVVLDHGRIVETGNHEELMARQGHYYQLYQSQSRSSDDENRPDTSEKIMDIRGNRV

SEQ ID NO: 32699 - protein, 792 aa, Trichodesmium erythraeum IMS101
MVKNILDGRYKIIKIIESEGLAHTYLAQDIRRPGAAECFIKHLQPSISDQKFLEIIRRRFQQEAQILEKLSQNNQIPKLLAYFEENQEFYLVQSFIPGKSLDNEILPGRALSEIQIIRILIEVLEILVFVHRNNVIHRDIKPANLIRRKLDNKLVLIDFGAIKEINIAQPSRTARIGTMEYMPIEQFEYNPQLNSDIYALGMMGIQGITGLPSSELSKLKYQENGNKKEIFWRNRINCSTALADVLDKMVRYNYRERYQSATEVIEDLKEIRYNLNKTSKIKAYQEEVIRRASYRGDISPAGRGILEALRENLELSQEETEIIEDDILNPYRKYQEKGKKYEQRLRETIQQEYPFTNETLEELKYLQQVLGLTQEDVKLIEDRVVPKSLFLKLKKTFINNYQRASISWLLIVRFVTITISVIFVIYIYIKLQNDYKIQQEKILRKEQQEVAQLNLLRNLYRERNYEDCISKNTIITENSSVFSEAQDILQKCKQGKNWENYQVEDFSQYLAAVSSVVFSPDGKMLATGSRETTVKILEIPTGKVINTFPADDSIIWSVAFNSDATQLVAGTYYWRVMIWNVPTVAEEPFQIFEHRAPIWSVVMSPDDEIVASSSGDKRVKVWNLKTGSLIFSFPDHSDTIYSIDISSDGKKLVSGSADQTIKIEDLDTGDLINTLNGHTGAIRSVKITPDGKKIVSGSYDTTVKIWDLKTGKLIKTLSGHTAEVISVDISRDGRYIASGGKDNNIKVWDLEKGELLNTLTGHTDEVYTVAFSPDGNSIASGGKDRTIKLWQR

SEQ ID NO: 32700 - protein, 72 aa, Passiflora serratodigitata
GEVMPGQWEYQVGPSVGIDAGDHIWCSRYILERITEQAGVVLILDPKPIEGDWNGAGCHTNYSTKSMREDGG

SEQ ID NO: 32701 - protein, 180 aa, Oryza meyeriana
FGSVYRGRLKGKELAVKQLDRNGMQGTREFLVEVLMLSLLEHPNLVTLLGYCTDADHRILVYEYMPRGSLEDHLLDLPPGASSLDWTTRMRVAQGAARGLEHLHDAARPPVIYRDFKASNILLDRSFQARLSDFGLAKVGPVGDKTHVSTRVMGTYGYCAPEYALTGKLTTCSDVYSFGI

SEQ ID NO: 32702 - protein, 438 aa, Oryza sativa (japonica cultivar-group)
MIHQLLSLRDAARASLLTRKWLRVWRFYPNLEFTTKALGLKKRIHKVQRRAKFVSCVNTVIRHHAGTGVKSFIIKKNLNNQKYTHYLDRWMYFAVSSGAKELTLDLRPQRFIHYRNIQYNFPSSNFATPMPTSVEHLKLLFCYLRPSPTFFGLSNLKTLELSFVRITKEDLESLLSYTFSLQELKLSQCPNIDHLRIPDVPSKLNYLDIDLCWIRALEIHIQNLVIFNYHGSVRFRIIQGEGSLFKEARFQFSCGDAIEYAITEMAPALPNLETLFLIGFSKMVIPTRDPRHRFHCLKHLQLKMIMLSKKYNNLCLVSFLDAAPFLESLIVHVCNGSLYYPGKKTDLRRLEKREPHKNLKFAKMTGFDGERSSIELALHILESSTNLECLILDPRKYKSEWKYIYEENLRDVQWRVHNFTISEYIAEAVPSHVKLLFS

SEQ ID NO: 32703 - protein, 124 aa, Cucumis sativus
GRGQFGTTFLCTDKPTGFNYACKTIPKRKLLCKEEYEDVWREIQIMHHLSEHPNIVRIKGTYEDPGLCYLVMELCEGGELFDRIVQKGQYSEREAAKLIGVIVSVLESCHSLGVMHRDLKPENF

SEQ ID NO: 32704 - protein, 289 aa, Streptomyces coelicolor A3(2)
MSVAVHHRTATVDGLDVFYREAGDPRAPAVVLLHGFPTSSHMFRGLIPKLADTYHVIAPDMIGFGYSAMPTVDAFDYSFDSLTDVTVGLLDQLGVERFAVYVQDYGAPVAWRIATRTPHRVTAIVTQNGNGYTDGFVKDFWDGLFAYTDDPTPETEAPARAALSPGMVRWQYLNGVRDRSLVSPDTWSLDLALLDRPGNDAVQLTLFRDYPTNVGLYPRLQQYFRDTRVPLLAVWGANDEIFGPDGARAFRRDLPDAEIHLLDTGHFALETHLEEITGHMRDFLARAGK

SEQ ID NO: 32705 - protein, 406 aa, Deinococcus radiodurans R1
MWMNLLLAFLPVSLLLEYVFHAPPLWVFFTATIAIIPLADWLRQATEQIAERVGQTIGGLLNVTFGNLAELIIAIFVLLSGNAVVVKAQITGSIIGNALLGLGLAILIGSVGRQRQKFSWQNAGQLNSMLVLVTIALLIPALFDYTERLPGFAAGSDLARSDLDERLSLAVAVVLIAAYALNLVYTLVTHKDIFALDDGTEEGSAEGPAESTAEGAGHSHVAPWPVWKAVGVLVGATVLIAWMSEILSGALEATSQTLGLSPFFLGIIVLAVVGNFAEYISGSYFARQGKIGLAINIAVGATIQVALFTAPVLVLISYLIGKPMNLVFGSPLELVAIVAVAITVSTVTRDGEATWFEGVLLLTVYVLLALAFFFVTPRGEEGAPAALYAPAPALVQAAPERLALAS

SEQ ID NO: 32706 - protein, 57 aa, Passiflora serrulata
WEYQVGPSVGIDAGDHIWCSRYILERITEQAGVVLSLDPKPIEGDWNGAGCHTNYST

SEQ ID NO: 32707 - protein, 319 aa, Trichodesmium erythraeum IMS101
MKIGKTSDIDSVCTYLREIGRVPLLSHEEEILYGKQVQRLTALQEFNQTLAEALGREPTLLEWAEAKELSKSELQRIIREGERAKRKMVEANLRLVVSVAKKYIKRNVDLLDLIQEGTIGMQRGVEKFDPTKGYRFSTYAYWWIRQAITRAIAEKGRTIRLPIHITEKLNKIKKVQRQLTQQLGRSATTGEIAEELGLTPKQIRECLERARLPLSLDLRVGDNQDTELGDLLEDTGASPEDYALQSSMRTDLESIMVDLTPQQKQVLALRFGLEDGQTMTLSKIGAHLNISRERVRQIEREALSKLRKRKQDMNDYLAS

SEQ ID NO: 32708 - protein, 672 aa, Brucella suis 1330
MATKVKENEEAEVEREGAADGPLLDLSDDAVKKMIKLAKKRGYVTMDELNAVLPSEEVTSEQIEDTMSMLSDMGINVVEDDEQDNDREEGNDDEAEEGGDLVEAGGTAVATTTTKKEPTDRTDDPVRMYLREMGSVELLSREGEIAIAKRIEAGRETMIAGLCESPLSFQAIIIWRDQLNESNILLREIIDLETTYAGPEAKQAPVIERVEEEKPRDERPQRRSRDDDDITNVGGDMPVEDDDDDEDEANLSLAAMEAELRPQVMETLDFIADTYKKLRKLQDQQVEGRLAATGELSSSQERRYKELKDQLIKAVKSLSLNQNRIEQLVEQLYDINKRLVQNEGKLLRLAESFGVRREDFLKEYQGHELDPNWVERVATLPSRGWKEFAAKEADSIGRLRSEIQNLATETAISIGEFRRIVNQVQKGEREATIAKKEMVEANLRLVISIAKKYTNRGLQFLDLIQEGNIGLMKAVDKFEYRRGYKFSTYATWWIRQAITRSIADQARTIRIPVHMIETINKIVRTSRQMLHEIGREPTPEELAEKLAMPLEKVRKVLKIAKEPISLETPVGDEEDSHLGDFIEDKNALLPIDAAIQANLRDTTTRVLASLTPREERVLRMRFGIGMNTDHTLEEVGQQFSVTRERIRQIEAKALRKLKHPSRSRKLRSFLDS

SEQ ID NO: 32709 - protein, 187 aa, Fragaria x ananassa
MRKPCCEKTETTKGAWSIQEDQKLIDYIQKHGEGCWNSLPKAAGLRRCGKSCRLRWINYLRPDLKRGSFGEDEEDLIIRLHKLLGNRWSLIAGRLPGRTDNEVKNYWNSHLKKKILKTGTTLRPNKPHENNHAPNNKLVKLFNKMDDEVVDEVSSADSAAGCLVPELNLDLTLSIKTSTGMADPQVA

SEQ ID NO: 32710 - protein, 451 aa, Glycine max
MREIISIHIGQAGIQVGNSCWELYCLEHGINPDGTMPSDSSVGVAHDAFNTFFSETGSGKHVPRALFVDLEPSVIDEVRTGPYRQLFHPEQLISGKEDAANNFARGHYTVGREIVELCLDRIRKLADNCTGLQGFLVFNAVGGGTGSGLGSLLLERLSVDYGKKSKLGFTIYPSPQVSTAVVEPYNSVLSTHSLLEHTDVVVLLDNEAIYDICRRSLDIERPTYTNLNRLISQIISSLTTSLRFDGAINVDITEFQTNLVPYPRIHFMLSSYAPVISAAKAYHEQLSVPEITSAVFEPSSMMAKCDPRHGKYMACCLMYRGDVVPKDVNAAVSNIKAKRTVQFVDWCPTGFKCGINYQPPTVVPAGDLAKVQRAVCMISNNTAVAEVFSRIDYKFDLMYAKRAFVHWYVGEGMEEGEFSEAREDLAALEKDYEEVGAEGEEEEEEPDDYSK

SEQ ID NO: 32711 - protein, 610 aa, Wolinella succinogenes
MCGIAGTLNSSCFSSKKLLAALAHRGPSGHGEFSHQGVNLFHARLSIQDLSPAGAQPMHRHHLSIVFNGEIYNHLELRAKVADYPFSTRSDTETILALFERFGERSLEWMDGMFALAILDQRTHKLFLARDRMGKKPLFYYQEGEEFLFASELNALLTLKPLQIDHAKLSAFLRCGFFPHDGAPYQGVQSLPQGSYAFIDLHHPRPLSPQRYFDLLSLYQAPKIEGFEASKEAVELALKESVKNRLESSDLEVGSFLSGGIDSSLITALASFFTPKLKTFTVAFEGAYDESSLAELVAKRYKTDHTTLHLNPSKLKEEVKGILACYGRPFMDSSAIPSYYVSQEAKKHLTVILNGDGADELFGGYRRYVPMSHGWLKLARPLSLLLPLLPLPKEKKSLYNYLHRLLAMSRKRGLDFYLSATIDSFEDAYAFSPNPHTQTLDQEITQILEDSSLSSLSKMLYLDSQNLLLSDLLPKMDIATMAHSLEGRSPFLGKSLLEVAPRIKDEYKIFGKSTKFILRELAKKYLPHALLEQPKRGFEVPLRAWVEGELKELIFDSLSKNCLSRELIESRFVDALLDKPQDFAPEKRAKMLWSLFSLEVWHEHYQKACE

SEQ ID NO: 32712 - protein, 618 aa, Wolinella succinogenes
MCGIVGYSQNHPQAIQEMLQSIRHRGPDDLGIYCDEGFSLGHTRLSILDLSHAGHQPMEFEHLVIVFNGEVYNFRAIQKELLGLGYTFFSDSDTEVILKAMHCWGEKAVDKFIGMFAFALWDKRKEELLLYRDRVGVKPLYYYFEGGELLFASELRAITAIKPNLALSQAGLYEYFQFGYISSNLSIHQAIHKLPAGHYLRFKAGKIEVKPYWSIHTFLEMPPFEKSEEELIDELEELLVDAFKLRMVADVPVGVFLSGGIDSSLVAAILQKHHGHIHTFTIGFENPRYNEALYAKGVAEHLGTEHTERILSAEEAREILYRFPEVYDEPFGDSSGIPTLLVSKVAKESGVKVVLSADGGDEIFCGYERYPIAHSLSRKILSLPYPLRAFAGRAMESFGAKRAGYLFKVRNLEHKFNQLSEMLRAKDLEEFYELLVHNSKNYEIKELLGETFPPKSRAFKVGERIHPMQGMMSWDYERYMVDDILVKVDRATMFHSIEGREPLLDHRIAEFAARLPFNMKFREGKTKYILRKVLERYLPKEMIERPKMGFGIPMFEWFSQDLRSLFETHFTPERLKSSGVLNPSYVLRELGKLQRGEPVNVNKLWLILVFLMWQEKAR

SEQ ID NO: 32713 - protein, 425 aa, Mesorhizobium sp. BNC1
MDYQRFFSEAIDQLHAERRYRVFADLERIAGAFPRAIWRADGKAREITVWCSNDYLGMGQHPDVIAAMQEAVGRIGVGAGGTRNISGTNHPLVELEAELADLHGKEAALVFTSGFVSNEASISTIARLLPNCLVLSDELNHASMIEGVRRSGAEKKIFRHNDLEHLESLLRAAEPRRAKLIVFESVYSMDGDIAPIAEIADLADRYNAMTYIDEVHAVGMYGAHGGGITEREGLAHRIDVIEGTLAKAFGVIGGYIAGSASLVDAVRSYAPGFIFTTALPPAIAAAATASIRHLKKSNAEREAQQRQARRTTEVLRAAGLHVMPSETHIVPVLVGDPELCKKASDRLLEKHSIYIQPINYPTVPRGTERLRITPTPFHSDDLVEKLRDALLETWQALGISFNEANPTSAARTDRIIPLVVSKSGG

SEQ ID NO: 32714 - protein, 122 aa, Emericella nidulans
NDTTGTLIASSYTDPAMKIGCIFGTGVNAAYMENAGSIPKLAHMNLPPDMPVAINCEYGAFDNEHIVLPLTKYDHIIDRDSPRPGQQAFEKMTAGLYLGEIFRLALVDILDTQPGLIFKDQD

SEQ ID NO: 32715 - protein, 612 aa, Yersinia pseudotuberculosis IP 32953
MEQNPQSQLKLLVTRGKEQGYLTYAEVNDHLPEDIVDSDQIEDIIQMINDMGIQVLEEAPDADDLMLAENTTDTDDDAAEAAAQVLSSVESEIGRTTDPVRMYMREMGTVELLTREGEIDIAKRIEDGINQVQCSVAEYPEAITYLLEQYDRVEAGESRLSDLITGFVDPNAEEDIAPTATHVGSELSTEEMDDEDEDEDEDDDAEDDNSIDPELARQKFSDLREQYENARMEIKKNGRNHANAAAEILKLSEVFKQFRLVPKQFDYLVNNMRAMMDRVRTQERIIMKLCVEQCKMPKKNFVTLFSSNETSDTWFNAAVAMGKPWSEKLKDVSEDVQRSLQKLRQIEEETGLTIEQVKDINRRMSIGEAKARRAKKEMVEANLRLVISIAKKYTNRGLQFLDLIQEGNIGLMKAVDKFEYRRGYKFSTYATWWIRQAITRSIADQARTIRIPVHMIETINKLNRISRQMLQEMGREPTPEELAERMLMPEDKIRKVLKIAKEPISMETPIGDDEDSHLGDFIEDTTLELPLDSATSESLRSATHDVLAGLTAREAKVLRMRFGIDMNTDHTLEEVGKQFDVTRERIRQIEAKALRKLRHPSRSEVLRSFLDD

SEQ ID NO: 32716 - protein, 541 aa, Rhodobacter sphaeroides
MSAKEVRFGTDARGRMLKGINTLADTVKITLGPKGRNVILDTSYGAPRITKDGVTVAREIELSDRFENVGAQMVKEVASRTNEEAGDGTTTATVLAQAIAKEGMKAVAAGMNPMDLKRGIDRAVAIVIAEIRSMSRPVGDSAEIAKVGALSANGEAAIGRQIADAMAKVGTAGVIKVENKGLETETEVVEGMQFDRGYLSPYFITHAQKMVVELDDCAILLHEGKLTSLASMVPLLEAVVQAEKQLLVVAEDVEGEALTTLVVNKLRGGLKVAAAKAPGFGDGRAAMLEDLAVLTGAHLISAELGTKLETVTLDMLGFAKKVVLTKDSTILIDSAGDKAAIASRIGQIRNQIEDTTSAYNKEKLQERLARLAGGVAVIRVGGATEIEVKERRDRVEDTLNATRAAVQEGVVPGGGAALIHAGKALAGLKGDNPDQDAGIKIIRRAIQAPLRQIADNAGIDGSVVAGKVIENDSATFGFDAQLETYGDMLQAGIIDPTKVVRIALEDAASIAGLLITTEVIIAHKPERGERMSQMDEMGGMM

SEQ ID NO: 32717 - protein, 753 aa, Shigella flexneri 2a str. 301
MTILNHTLGFPRVGLRRELKKAQESYWAGNSTREELLTVGRELRARHWDQQKQAGIDLLPVGDFAWYDHVLTTSLLLGNVPPRHQNKDGSVDIDTLFRIGRGRAPTGEPAAAAEMTKWFNTNYHYMVPEFVKGQQFKLTWTQLLEEVDEALALSHNVKPVLLGPVTYLWLGKVKGEQFDRLSLLNDILPVYQQVLAELAKRGIEWVQIDEPALVLELPQAWLDAYKPAYDALQGQVKLLLTTYFEGVTPNLDTITALPVQGLHVDLVHGKDNVVELHKRLPSDWLLSAGLINGRNVWRADLTEKYAQIKDIVGKRDLWVASSCSLLHSPIDLSVETRLDAEVKSWFAFALQKCHELALLRDALNSGDTAALAEWSAPIQARRHSTRVHNPAVEKRLAAITAQDSQRANVYEVRAEAQRARFKLPAWPTTTIGSFPQTTEIRTLRLDFKKGNLDANNYRTGIAEHIKQAIVEQERLGLDVLVHGEAERNDMVEYFGEHLDGFVFTQNGWVQSYGSRCVKPPIVIGDISRPAPITVEWAKYAQSLTDKPVKGMLTGPVTILCWSFPREDVSRETIAKQIALALRDEVADLEAAGIGIIQIDEPALREGLPLRRSDWDAYLQWGVEAFRINAAVAKDDTQIHTHMCYCEFNDIMDSIAALDADVITIETSRSDMELLESFEEFDYPNEIGPGVYDIHSPNVPSVEWIEALLKKAAKRIPAERLWVNPDCGLKTRGWPETRAALANMVQAAQNLRRG

SEQ ID NO: 32718 - protein, 277 aa, Oryza sativa
MKRPGGAGGGGGSPSLVTMANSSDDGYGGVGMEAEGDVEEEMMACGGGGEKKRRLSVEQVRALERSFEVENKLEPERKARLARDLGLQPRQVAVWFQNRRARWKTKQLERDYAALRHSYDSLRLDHDALRRDKDALLAEIKELKAKLGDEEAAASFTSVKEEPAASDGPPAAGFGSSDSDSSAVLNDVDAAGAAPAATDALAPEACTFLGAPPAAGAGAGAAAAASHEEVFFHGNFLKVEEDETGFLDDDEPCGGFFADDQPPPLSSWWAEPTEHWN

SEQ ID NO: 32719 - protein, 592 aa, Arabidopsis thaliana
MAHSGNGESFHDPLRGFIQRNCFRWNNQKLILQCFMALAFVGITSSTTQPDIEGGALLQLRDSLNDSSNRLKWTRDFVSPCYSWSYVTCRGQSVVALNLASSGFTGTLSPAITKLKFLVTLELQNNSLSGALPDSLGNMVNLQTLNLSVNSFSGSIPASWSQLSNLKHFFSGTQLICGKSLNQPCSSSSRLPVTSSKKKLRDITLTASCVASIILFLGAMVMYHHHRVRRTKYDIFFDVAGEDDRKISFGQLKRFSLREIQLATDSFNESNLIGQGGFGKVYRGLLPDKTKVAVKRLADYFSPGGEAAFQREIQLISVAVHKNLLRLIGFCTTSSERILVYPYMENLSVAYRLRDLKAGEEGLDWPTRKRVAFGSAHGLEYLHEHCNPKIIHRDLKAANILLDNNFEPVLGDFGLAKLVDTSLTHVTTQVRGTMGHIAPEYLCTGKSSEKTDVFGYGITLLELVTGQRAIDFSRLEEEENILLLDHIKKLLREQRLRDIVDSNLTTYDSKEVETIVQVALLCTQGSPEDRPAMSEVVKMLQGTGGLAEKWTEWEQLEEVRNKEALLLPTLPATWDEEETTVDQESIRLSTAR

SEQ ID NO: 32720 - protein, 60 aa, Passiflora sexflora
VMPGQWEFQVGPSVGIDAGDHIWCSRYILERITEQAGVVLSLDPKPIEGDWNGAGCHTNY

SEQ ID NO: 32721 - protein, 84 aa, Kandelia candel
MDLRVMGLDSPLFSTLQHMIDAGNEEAEKSSHGPTRVYMRDAKAMAATPADVKELPNAYVFVIDMPGLKSGDIKVQVEEDNVLI

SEQ ID NO: 32722 - protein, 133 aa, Kandelia candel
DPLDGFFSSAVANVPFNSANEAAAFANARFDWKETPEAHVFKADLPGLKKEEVKVEVEEGRILQISGERRKEQEEKNDKWHRLERSSGKFLRRFRLPENAKMYQVKASMENGVLTITVPKEEEKKPEVEAIEI

SEQ ID NO: 32723 - protein, 71 aa, Passiflora sprucei
GTNGEVMPGQWEYQVGPSVGIEAGDHIWCSRYILERITEQAGVVLTLDPKPVEGDWNGAGCHTNYSTKSMR

SEQ ID NO: 32724 - protein, 363 aa, Nitrosomonas europaea ATCC 19718
MYLIYTKRTVFMKNSISLFSSYRFTHIILMLIVLALIPLTSQAEKREFDLSIEDTRIVLVGKRDFHTFAFNGQVPAPLIHVMEGDDVTVNVTNMTTLPHTIHWHGMLQRGTWQSDGVPHATQHAIEPGDTFTYKFKAEPAGTMWYHCHVNVNEHVTMRGMWGPLIVEPKNPLPIEKTVTKDYILMLSDWVSSWANKPGEGGIPGDVFDYYTINAKSFPETQPIRVKKGDVIRLRLIGAGDHVHAIHTHGHISQIAFKDGFPLDKPIKGDTVLIGPGERYDVILNMDNPGLWMIHDHVDTHTTNGDKPDGGIMTTIEYEEVGIDHPFYVWKDKKFVPDFYYEESLKKDLGMHNSKVFKGEPIEE

SEQ ID NO: 32725 - protein, 651 aa, Oryza sativa
MAGSERTVVWFRRDLRIDDNPALASAARDGAVLPVFIWCPADEGQFYPGRCSRWWLKQSLPHLSQSLESLGCPLVLIRAESTLEALLRCIDSVGATRLVYNHLYDPVSLVRDDKIKKELSALGISIQSFNGDLLYEPWEIYDDSGLAFTTFNMYWEKCMELPIDASPSLAPWKLVPVPGLESVRSCSVDDLGLESSKDEESSNALLMRAWSPGWRNAEKMLEEFVSHGLLEYSKHGMKVEGATTSLLSPYLHFGEVSVRKVYQLVRMQQIKWENEGTSEAEESIHFFMRSIGLREYSRYLCFNFPFTHEKSLLGNLKHYPWKVDEERFKSWRQGMTGYPLVDAGMRELWATGWTHNRIRVIISSFAVKFLLIPWTWGMKYFWDVLLDADLESDILGWQYISGSLPDGHELSRLDNPEVQGQKYDPDGVYVRTWIPELARMPTEWIHHPWDAPSCILEVAGVELGFNYPKPIVDLHIARECLDDSISTMWQLDTAEKLAELDGEVVEDNLSNIKTFDIPKVVLRETSPCALPIDQRVPHASSKDHNLKSKVLKASNRSSICVDMIRSSKMEATSSVANSPVSRKRSFCETAFHVPSYSSSAEVHSHIQDHGGSLVGPSRYLLQEAGRNCVDEVEDSSTADSGSSISRQRKAA

SEQ ID NO: 32726 - protein, 58 aa, Passiflora standleyi
WEYQVGPSVGIDAGDHIWCSRYILERITEQVGVVLTLDPKPIEGDWNGAGCHTNYSTK

SEQ ID NO: 32727 - protein, 57 aa, Passiflora tacsonioides
WEYQVGPSVGIDAGDHIWCSRYILERITEQVGVVLTLDPKPIEGDWNGAGCHTNYST

SEQ ID NO: 32728 - protein, 495 aa, Ricinus communis
RTALQSGIDKLADAVGLTLGPRGRNVVLDEFGSPKVVNEGVTIARAIELPDPMENAGAALIREVASKTNDSAGDGTTTASVLAREIIKLGLLSVTSGANPVSIKRGIDKTVQGLIEELEKKARPVKGRDDIKAVASISAGNDELIGTMIADAIDKVGPDGVLSIESSSSFETTVEVEEGMEIDRGYISPQFVTNPEKLICEFENARVLVTDQKITAIKDIIPLLEKTTQLRAPLLIIAEDVTGEALATLVVNKMRGILNVAAIKAPGFGERRKALLQDIAILTGAEFQASDLGLLVENTSVEQLGIARKVTITKDSTTLIADAASKDELQARIAQLKRELAETDSVYDSEKLAERIAKLSGGVAVIKVGAATETELEDRKLRIEDAKNATFAAIEEGIVPGGGAALVHLSTVVPAINGEDKDADERLGADILQKALVAPASLIAQNAGIEGEVVVEKVKAREWEIGYNAMTDKYENLVEAGVIDPAKVTRCALQN

SEQ ID NO: 32729 - protein, 95 aa, Bradyrhizobium sp. BTAi1
MSFRPLHDRVVIRRIEESAKTKGGIIIPDTAKEKPQEGEVIAVGSGARDEAGRLVPLDVKKGDRVLFGKWSGTEVKINGEDLLIVKEADILGVIG

SEQ ID NO: 32730 - protein, 55 aa, Passiflora talamancensis
WEYQVGPSVGIEAGDHIWCSRYILERITEQVGVVLTLDPKPIEGDWNGAGCHTNY

SEQ ID NO: 32731 - protein, 741 aa, Fragaria x ananassa
MEACNCIEPQWPADELLIKYQYISDFFIALAYFSIPLELIYFVKKSAVFPYRWVLVQFGAFIVLCGATHLINLWTFNMHSRTVAIVMTTAKVLTAVVSCATALMLVHIIPDLLSVKTRELFLKNKAAELDREMGLIRTQEETGRHVRMLTHEIRSTLDRHTILKTTLVELGRTLALEECALWMPTRTALELQLSYTLRQQNPVGHTVPIHLPVINQVFSSNRAVKISPNSPVARLRPLVGKHMPGEVVAVRVPLLHLSNFQINDWPELSTKRYALMVLMLPCDSARQWHVHELELVEVVADQVAVALSHAAILEESRRARDLLMEQNIALDLARREAETAIRARNDFLAVMNHEMRTPMHAIIALSSLLQETELTPEQRLMVETILKSSNLLATLINDVLDLSRLEDGSLQLDIATFNLHSVFIEVHNLVKPVASVKKLSVTLNLAADLPVYAIGDERRLLQIILNVVGNAVKFSKEGSISITAFVAKSESLRDFRAADFFPVQSDNHFYLRVQVKDSGSGINPQDLPKLFTKFAQNQSLATRNSGGSGLGLAICKRFVNLMEGHIWIESDGLGKGCTTTFIVKLGYPERSNESKLPFVPKMHTTHVQTNFPGLKVLVMDDNGVSRSVTKGLLEHLGCDVTTVSSSDEFLQVISQEHKVVFMDVCMPGIDGFELAVQIHEKFTKRHERPVLVALTGNINKMTKESCMRVGMEGVILKPVSVDKMRSVLSELLEHRVLFEAM

SEQ ID NO: 32732 - protein, 541 aa, Bradyrhizobium sp. BTAi1
MSAKDVKFAADARERLIRGVDILANAVKVTLGPKGRNVLIEKSFGAPRITKDGVTVAKEIELEDKYENLGAQLLRQVASKTNDLAGDGTTTATVLAQAIVREGAKAVAASLNPLDLKRGIDLAVAEAIKDIEKRARKVQSSEEVAQVGTISANSDAAVGKIIATAVKKVGNDGVITVEEAKSLETELDVVEGLQFDRGYLSPYFVTNSDKLLVEFEEPYILIHESKLTSLQPLLPVLEAVVQTGRPLLVIAEDVEGEALATLVVNKLRGGLKVAAVKAPGFGDRRKAQLEDIAILTGGQTISQDLGIKLENVTLSQLGRARRIRIDKENTTVVGGTGKKKDIDARIAQIRAQIEETTSDYDREKLQERLAKLSGGVAVIRVGGATEVEVKEKKDRVDDALNATRAAIAEGIVPGGGVALLRAKAAVSKLTNPNPDIQAGIQIVLKALEAPIRQIADNAGVEGSIVVGKILENRSPTFGFDAQKEEYVDLIEAGIVDPAKVVRTALQDAASVAALIVTTEALVVELPKEKAALPAAGAGADF

SEQ ID NO: 32733 - protein, 259 aa, Echinochloa crus-galli var. formosensis
AGPIFNDYSSVGYSFLLKKDKAIIVQPERVIVGNGPAFGCVMMKEFLSELAKRLKKNTTAYENYKRIFVPEGSPLESEPNEPLRVNVLFKHIQKMLTGDSAVIAETGDSWFNCQKLKLPEGCGYEFQMQYGSIGWSVGALLGYAQGANDKRVIACIGDGSFQVTAQDVSTMLRCAQNSIIFLINNGGYTIEVEIHDGPYNVIKNWNYTGLVDAIHNGEGKCWTSKVKCEEELTAAIETALGEKKDCLCFIEVIVHKDDT

SEQ ID NO: 32734 - protein, 613 aa, Vibrio fischeri ES114
MDQNPQSQLKLLVIKGKEQGYLTYAEVNDHLPEEIVDSEQVEDIIQMINDMGIKVVETAPDADDMSLNDDDAVTDEDAAEAAAAALSSVESEIGRTTDPVRMYMREMGTVELLTREGEIDIAKRIEEGINEVQCSVAEFPGAISYLLEQFDKVQTEEIRLTDIISGFVDPNDDGSSAPTATHIGSELSESELDDEDDEDAEGETEEEEDAGIDPELALEKFTELRTSYHNMQLAFEEFGRDDAKSREAIGELTDIFREFKLIPKQFDYLVKEMRDGMDRVRTQERLIMRMCVEYGKMPKKSFIALFTGNESSDEWFNEIMASDKPYVERLQRYEEDIRRSIAKLDSIEKETGLPVENIKDISRRMSIGEAKARRAKKEMVEANLRLVISIAKKYTNRGLQFLDLIQEGNIGLMKAVDKFEYRRGYKFSTYATWWIRQAITRSIADQARTIRIPVHMIETINKLNRISRQMLQEMGREPLPEELAERMQMPEDKIRKVLKIAKEPISMETPIGDDEDSHLGDFIEDNTLELPVDSATSTSLKFATNDVLAGLTPREAKVLRMRFGIDMNTDHTLEEVGKQFDVTRERIRQIEAKALRKLRHPSRSEVLRSFLDE

SEQ ID NO: 32735 - protein, 470 aa, Vibrio fischeri ES114
MKKTKIVCTIGPKTESVEKLTELANAGMNVMRLNFSHGDFAEHGQRIDNVRQVMKNTGKQLAILLDTKGPEIRTIKLENGDDVALVAGQDFTFTTDTSVVGNKDVVAVTYPGFANDLEVGNTILVDDGLIEMEVVATTETEVKCKVLNNGDLGENKGVNLPGVSVQLPALSEKDKADLKFGCEQGVDFVAASFIRKEEDVKEIRELLVANGGENIQIISKIENQEGVDNFDSILEASDGIMVARGDLGVEIPVEEVIFAQKMMIEKCNRARKVVITATQMLDSMIKNPRPTRAEAGDVANAIMDGTDAVMLSGESAKGKYPVEAVTIMAQICARTDAALKAELGSRLDSPRLRITEAVCKGAVDTAEKLNAPVIVVATEAGKSARSIRKYFPTAKIIAVTTNTKTAAQLCLSKGITPMIVDSIDSTDAFYLRGKELALESGIGAKGDIVVMVSGALVPSGTTNTASVHVL

SEQ ID NO: 32736 - protein, 177 aa, Echinochloa crus-galli var. formosensis
YYEAGARLAKWRAVLNIGPNEPSQLAIDQNAQGLARYAIICQENGLVPIVEPEILVDGPHDIERCAYVTEKVLAACYKALNEHHVLLEGSLLKPNMVTPGSDAKKVANEVIAEYTVRALQRTVPAAVPAIVFLSGGQSEEEATLNLNAMNKLNTKKPWSLSFSFGRALQASTLKAWS

SEQ ID NO: 32737 - protein, 236 aa, Brassica napus
  misc_feature (207)..(207): Xaa can be any naturally occurring amino acid
  unsure (1)..(236): unsure at all Xaa locations
STHASDGADLENVVLGSGFYKKGDRDMDQYVVSGWNLNNLPRLPGSVLSFEDCDISGVLVPWLYVGMCFSSFCWHVEDHHLYSLNYHHFGEPKVWYGVPGSNATALEKAMRKYLPDLFEEQPDLLHGLVTQFSPSILKDEGVQVYRVVQNAGEYVLTFPRAYHAGFNCGFNCAEAVNVAPVDWLAHGQNAVELYSKETRKTSLSHDXLLLGAAYEAVKALWELSASSVGNESTTNL

SEQ ID NO: 32738 - protein, 332 aa, Symbiobacterium thermophilum IAM 14863
MGVDPFSSALIAALDRVRPAVVHIYAATPKTGQVALGTGVILDHYHIISTAQIVAPEDEITIKTADGKRRRAECIGVDPLYFLTVLQVEERLPHDPPTFAPDGTTPVGLFVAAVGYALGQEHTAASGIISSSDRTVYRPKARGRGNLPVDGLLLTSAAIHPGNAGGPLIDLEGRVVGINGIPWQGGLSLAIQASVAARVASQIIDYGYAVHPWLGFSGEVDVIDDIWVEMLNLPTDRGLVVQHVASDGPGRRAGVQEMDMIMAVGDRQPVLSTGMIRKLLSARRYGDQVPMTVLRQGELIELRLPVEEIPGLDRFDPVSDDDESAAPDDDED

SEQ ID NO: 32739 - protein, 244 aa, Arabidopsis thaliana
  misc_feature (178)..(178): Xaa can be any naturally occurring amino acid
  unsure (1)..(244): unsure at all Xaa locations
RALCQAPFLLDDPNVGMIFPADAIARAKHYLSLTSGGLGAYSDSRGLPGVRKEVAEFIERRDGYPSDPELIFLTDGASKGVMQILNCVIRGQKDGILVPVPQYPLYSATISLLGGTLVPYYLEESENWGLDVNNLRQSVAQARSQGITVRAMVIINPGNPTGQCLSEANIREILRFCXMRRRARMMTDGFNSCKNVVCNFTEGAMYSFPQIKLPSKAIQAAKQAGKVPDVFYCLKLLEATGIST

SEQ ID NO: 32740 - protein, 287 aa, Streptococcus thermophilus CNRZ1066
MNDFLKEAFTSEWLLKYLTELFATAFLVALGNGAVANVELTGTKGNKSGWIVIAFGYGFGVMMPALMFGDVSGNHINPAFTLGLAASGLFSWVGVPGYLIAQLLGAFLGQAIVVWVHQPYYAQTENPNNILGTFSTISAVDDHDDTPENRNRACANGFVNEFAGSFLLFFGALALTNNYFGHKLAQQAVAAGYTKEMVDGQFHGSLETAHIGVGFLVAALVLSFGGPTGPALNPARDLMPRLLHHLLPTSVLGEHKGDSKWWYAWVPVVAPILAGLLAVYLFKALYL

SEQ ID NO: 32741 - protein, 452 aa, Pseudomonas fluorescens Pf-5
MSDSSKQCVPDAPAIQRLPFLQLILVGLQHVLLMYGGAIAVPLIIGQAAGLSREEIAFLINADLLVAGIATIVQSMGIGPMGIRMPVMMGASFAAVGSMVAMAGMPGIGMQGIFGATIAAGFFGMLIAPFMSKVVRFFPPLVTGTVITSIGLSLFPVAVNWAGGGSSAAQFGSPIYLTIAALVLGTILLIHRFMRGFWVNISVLIGMGLGYILCGLIGMVDLSGMAQAPWLQVVTPLHFGMPQFHLAPILSMCLVVVIIFVESTGMFLALGKITGQEVTPRMLRRGLLCDAGASFFAGFLNTFTHSSFAQNIGLVQMTGVRCRSVTMVAGGLLIVLSLLPKAAFLVASIPPAVLGGAAIAMFGMVAATGIKILQEADIADRRNQLLVAVSIGMGLIPVVRPEFFAHLPLWMSPITHSGIAMATLSALVLNLLFNILGGSERAASNAQHAHQH

SEQ ID NO: 32742 - protein, 448 aa, Psychrobacter sp. TAD1
MSISKAIEKVEARYAHQPEFIQAVKEVAITIKPLYDAHPEYDKLKVFERLVEPDRVFGFRVNWEDDNGEIQINRGWRVQFSNALGPYKGGLRFHPTVNQSVLKFLGFEQIFKNALTGLPIGGGKGGSDFDPKGKTDSEIRRFCYAFMRELHHYVNKDMDVPAGDIGVGGREVSYMFAMYKNLTRESTGVITGKGVGFGGSLMRTEATGYGAVYFLQNMLAAQNESIEGKKVLVSGAGNVSLHAAEKATLIGAIVLTVSDSKGTIYDAKGLNQEKIDWLKVQKDQHKPLADYVEVFGGEWMADQKPWSIKADIAIPSATQNEINEEDAKLLVDNGVKYIVEGANMPLTAEAIDYIRLHRVHYAPGKAANAGGVAVSALEMSQNSVRQYQTFEQVDERLQGIMKDIHDSSAQASEMYGQTDEGYIDYMSGANMVGFKRVADALVAFGILN

SEQ ID NO: 32743 - protein, 527 aa, Trametes villosa
MGKYHSFVNVVALSLSLSGRVFGAIGPVTDLTISNADVTPDGITRAAVLAGGVFPGPLITGNKGDEFQINVIDNLTNETMLKSTTIHWHGIFQAGTNWADGAAFVNQCPIATGNSFLYDFTVPDQAGTFWYHSHLSTQYCDGLRGPLVVYDPDDPNASLYDVDDDTTVITLADWYHTAAKLGPAFPAGPDSVLINGLGRFSGDGGGATNLTVITVTQGKRYRFRLVSISCDPNFTFSIDGHNMTIIEVDGVNHEALDVDSIQIFAGQRYSFILNANQSIDNYWIRAIPNTGTTDTTGGVNSAILRYDTAEDIEPTTNATTSVIPLTETDLVPLDNPAAPGDPQVGGVDLAMSLDFSFNGSNFFINNETFVPPTVPVLLQILSGAQDAASLLPNGSVYTLPSNSTIEISFPIITTDGVLNAPGAPHPFHLHGHTFSVVRSAGSSTFNYANPVRRDTVSTGNSGDNVTIRFTTDNPGPWFLHCHIDFHLEAGFAIVWGEDTADTASANPVPTAWSDLCPTYDALDSSDL

SEQ ID NO: 32744 - protein, 292 aa, Saccharomyces cerevisiae
TLVHVASVEKGRSYEDFQKVYNAIALKLREDDEYDNYIGYGPVLVRLAWHISGTWDKHDNTGGSYGGTYRFKKQFNDPSNAGLQNGFKFLEPIHKEFPWISSGDLFSLGGVTAVQEMQGPKIPWRCGRVDTPEDTTPDNGRLPDADKDAGYVRTFFQRLNMNDREVVALMGAGALGKTHLKNSGYEGPWGAANNVFTNEFYLNLLNEDWKLEKNDANNEQWDSKSGYMMLPTDYSLIQDPKYLSIVKEYANDQDKFFKDFSKAFEKLLENGITFPKDAPSPFIFKTLEEQGL

SEQ ID NO: 32745 - protein, 633 aa, Zea mays
MFSWSRKQSSSGSSSGRRRGGADASMDSSSRGGGGSGSRGRSPRLDRRNAVKRIEYEASAGASASWSSSSSAEQQRSPGLRPSRSLDLAPGADLRISGSVEGEVDELCRSLGLSGPEDFAVPVAAWEARKSRSNSDLLPRSRLDPSTPADETSPIARAVSAPGAQPTRSFPAPIPEESLHSSPASTATESAEEPTVAAPEESPNAAPASAVVAPVGGLPLPSPRRGGGEVGIRGARPPLLSPPPPIGALAPPPVRRSFVDNDMTGSAWDIVQSFAPRDQGSELGLGGSVDSRCNSDKEEENDVEDGDAAVEGELKELRIGETFEGFTGTSSLSTTNDDDASSTTTEAMFIISPNGKFKRNIKSWMRGALLGSGSFGMVYEGISDEGAFFAVKEVSLLDQGSNAQQSIVALEQEIALLSQFEHENIVQYYGTDKEESKLYIFIELVTQGSLSSLYQKYKLRESQVSAYTRQILNGLVYLHERNVVHRDIKCANILVHANGSVKLADFGLAKEMSKINMLRSCKGSVYWMAPEVINPKKMYGPSADIWSLGCTVLEMLTRQIPFPNVEWTNAFFMIGRGEQPTIPNYLSKEAQDFIGQCVRVDPESRPSASQLLEHPFVNRPLRASFESSSPPAI

SEQ ID NO: 32746 - protein, 55 aa, Passiflora telesiphe
WEYQVGPSVGIDAGDHIWCSRYILERITEQAGVVLTLDPKPIEGDWNGAGCHTNY

SEQ ID NO: 32747 - protein, 316 aa, Nostoc sp. PCC 7120
MPSLSSDLVRIYLQEIGQFPLLTSDQEITYARLVQQMIALQEQQHELTQKLEREPTTLELANFLNKTEAQVNQILELGQRAKQKMITANLRLVVSIAKKYQRRNLEFLDLVQEGAIGLQRGIEKFDPNRGYKLSTYAYWWVTQAITRAIAEKSRTVRLPIHVNEKLNQIKKVQREFFQTLGRRATVAEIAQKLELEPSQIREYLKVASGTISLDLKIGDNKETELSELLASEGVSPDENITHEMLRQDLSDLLASLKPMQREVLILRFGLLDNQEQSLAQIGEKLNLSRERVRQIQQKAMTALRRQQPSIGQYLTS

SEQ ID NO: 32748 - protein, 474 aa, Oryza sativa (japonica cultivar-group)
MAKRMNPCHGKLVPKNKRAILQFDDIPEDVVFLIIRLLSLTNAARVSMVSQKWLQSWRLYPNLEFTSKALGLNKRVHKQGRRAKFVRCVNTIIRHHAGTGINSFTLKRNLNNHKYAHYIDRWIYFAVRSGANELTIDLSPRWYAHPRDVKYSFPSSNVAAPEPTSIEHLKLCFMNLRPLPTFSGLRSLKTLDLALVCITTEDLESLLSYTPALQQLKLRQCPMLEYLKITDVLAKLVYIDIVPCLWLKILEIHAQNLVAINTYNICHLKIVLSEALVLKGAHIELVLSSDVIEYAFTDLAPLMPDLESLFLSGCTEMIISRRPPSNRFHCLKQLELKLQDISTKYDLLFLAKFVDAAPVLEALVFHLEDIEEPFCYMEKEAELRSLEKHCPHKNLKLVKMTGFSAGRSSLELALYFVENSPALELLILDHRLDRSVCRITFGGDLDAKCSKGYEHTISKYVSNAIPRRVRLSYS

SEQ ID NO: 32749 - protein, 58 aa, Passiflora tetrandra
WEYQVGPSVGIDAGDHIWGSRYILERITEQAGVVLSLDPKPIEGDWNGAGCHTNYCTK

SEQ ID NO: 32750 - protein, 436 aa, Oryza sativa (japonica cultivar-group)
MAKRMNPCHGKLVPKNKRAILQFDDIPEDVVFLIIRLLSLTNAARVSMVSQKWLQSWRLYPNLEFTSKALGLNKRVHKQGRRAKFVRCVNTIIRHHAGTGINSFTLKRNLNNHNFPSSNVAAPEPTSIEHLKLCFMNLRPLPTFSGLRSLKTLDLALVCITTEDLESLLSYTPALQQLKLRQCPMLEYLKITDVLAKLVYIDIVPCLWLKILEIHAQNLVAINTYNICHLKIVLSEALVLKGAHIELVLSSDVIEYAFTDLAPLMPDLESLFLSGCTEMIISRRPPSNRFHCLKQLELKLQDISTKYDLLFLAKFVDAAPVLEALVFHLEDIEEPFCYMEKEAELRSLEKHCPHKNLKLVKMTGFSAGRSSLELALYFVENSPALELLILDHRLDRSVCRITFGGDLDAKCSKGYEHTISKYVSNAIPRRVRLSYS

SEQ ID NO: 32751 - protein, 292 aa, Saccharomyces cerevisiae
TLVHVASVEKGRSYEDFQKVYNAIALKLREDDEYDNYIGYGPVLVRLAWHISGTWDKHDNTGGSYGGTYRFKKEFNDPSNAGLQNGFKFLEPIHKEFPWISSGDLFSLGGVTAVQEMQGPKIPWRCGRVDTPEDTTPDNGRLPDADKDAGYVRTFFQRLNMNDREVVALMGAGALGKTHLKNSGYEGPWGAANNVFTNEFYLNLLNEDWKLEKNDANNEQWDSKSGYMMLPTDYSLIQDPKYLSIVKEYANDQDKFFKDFSKAFEKLLENGITFPKDAPSPFIFKTLEEQGL

SEQ ID NO: 32752 - protein, 765 aa, Fragaria x ananassa
MLKALASGLSISLLLVCVSASDGGFPRCNCDDEGSFWSIDSILECQRVSDFLIAVAYFSIPIELLYFVSCSNVPFKWVLFEFIAFIVLCGMTHLLNGWTYGPHPFQLMLALTVFKILTALVSCATAITLITLIPLLLKVKVREFMLKKKTWDLGREVGIIMRQKEAGMHVRMLTQEIRKSLDRHTILSTTLFELSETLGLQYCAVWMPNEIKTEMILTHELKGKNYSNMYNFSIPIGDPDVVLIKGSDGVNILRPDSALVCGSSGDSGEPGPVAAIRMPMLRVSNFKGGTPELIQTCYAILVLVLPGGEPRSWSSQELEIIKVVADQVAVALSHAAILEESQLMREQLAEQNRALQQAKMNAMMASHARNSFQKVMSDGMRRPMHSVLGLLSMMQDESLNNDQRVIVDAMVRTSNVLSTLINDAMDNPAKDSGRFPLEMRPFRLQPMIKEAACLAKCLCVYRGFGFAIEVDKSIADHVIGDERRVFQVILHMVGSLLNGNQGGGLVVFRVSSENGSQGRNDQRWAAWRQNSSDSGDVYIRFEIGISNGGSQSDMTSPIMQLVGSRYNSEGVEENLSFNICKRLVQLMQGNIWPIPNPQGFPQSMALVLRFQTRPSIAIAISEPGGSSEHSHSNSIFRGLQVLLTDEDDVNRLVTRKLLEKLGCNVTAVSSGFECLSAIGPSGASVQVVFLDLQMTELDGLEVAMRIRKFRSRTWPLIIAVTASADDDIWDRCMQIGINGVIRKPVLLQGIASELRRVLVQANKIV

SEQ ID NO: 32753 - protein, 55 aa, Passiflora trialata
WEYQVGPSVGIDAGDHIWCSRYILERITEQAGVVLSLDPQPIEGDWNGAGCHTNY

SEQ ID NO: 32754 - protein, 55 aa, Passiflora trifasciata
WEYQVGPSVGIDAGDHIWCSRYILERITEQVGVVLTLDPKPIEGDWNGAGCPTNY

SEQ ID NO: 32755 - protein, 124 aa, Cucumis sativus
GRGQFGTTFLCLEKSTGKEYACKSIAKRKLATMEDVEDVRREIQIMHHLVGIPSIVSIKGAYEDAVAVHVVMELCEGGELFDRIVKLGHYTERQAAELARTVIGVIEACNSLGVMHSDLKPENF

SEQ ID NO: 32756 - protein, 68 aa, Passiflora tripartita var. mollissima
GTNGEVMPGQWEYQVGPSVGIDAGDDIWCSRYILERITEQAGVILSLDPKPIEGDWNGAGCHTNYSTK

SEQ ID NO: 32757 - protein, 172 aa, Zea mays
MGQAWGNLQDRLQGRRWKEHQVRKITDKVFDRLTEDAQKRDKEALRFEEVYIAVLCVYNDINKYLPGPHHDPPSKEKLRAMMEEYDVNLDGLLDREEFAEFIRKLTADSLCSISVKLLITLVAAPALAMATKRATEGVPGVGKVVRKVPNALYASAITLGVVLVQRSTEGVE

SEQ ID NO: 32758 - protein, 369 aa, Geobacillus stearothermophilus
MGVKTFQFPFAEQLEKVAEQFPTFQILNEEGEVVNEEAMPELSDEQLKELMRRMVYTRILDQRSISLNRQGRLGFYAPTAGQEASQIASHFALEKEDFILPGYRDVPQIIWHGLPLYQAFLFSRGHFHGNQIPEGVNVLPPQIIIGAQYIQAAGVALGLKMRGKKAVAITYTGDGGTSQGDFYEGINFAGAFKAPAIFVVQNNRFAISTPVEKQTVAKTLAQKAVAAGIPGIQVDGMDPLAVYAAVKAARERAINGEGPTLIETLCFRYGPHTMSGDDPTRYRSKELENEWAKKDPLVRFRKFLEAKGLWSEEEENNVIEQAKEEIKEAIKKADETPKQKVTDLISIMFEELPFNLKEQYEIYKEKESK

SEQ ID NO: 32759 - protein, 255 aa, Hordeum vulgare subsp. spontaneum
TGITGIVNGMDVSEWDPTKDKFLAVNYDITTALEAKALNKEALQAEVGLPVDRKVPLVAFIGRLEEQKGPDVMIAAIPEILKEEDVQIILLGTGKKKFEKLLKSMEEKFPGKVRAVVRFNAPLAHQMMAGADLLAVTSRFEPCGLIQLQGMRYGTPCVCASTGGLVDTIVEGKTGFHMGRLSVDCNVVEPADVKKVATTLKRAVKVVGTPAYQEMVKNCMIQDLSWKNWEDVLLELGVEGSEPGIVGEEIAPLAT

SEQ ID NO: 32760 - protein, 612 aa, Vibrio fischeri ES114
MTIQNLHIVKEIRQHIANKPNDTAMRERQCSILIDTQCSAWSDITWGEFGEQMDKLSLALLAHGLKVQEKVGIFSNNMPRWTVADFASMQLRSVPVPIYPTNTPTQAAYIINDADIRILFVGEQAQYNAAVVIFEQCPQLTHIVALSDDIDLNDHEAGISWNDFIAKADEAHQSELLTRLDEAKMDDLITLIYTSGTTGEPKGVMLDYENIASQLEGHNTRLALTEQDVSLCFLPLSHVFERAWTFYVLYKGATNCYLPNTNLIKEALTEVKPTVMCAVPRFYEKIFSTVHEKVSRAPAHRKVMFTWAVNMGAKMSACQQEGREPSWILKQSYKVADKLVLSKLRMILGGNINFMPCGGAKLDVTIGRFFHALGVNVKLGYGMTETTATISCWEDGKFHPDSIGTLMPGAEVKIGENSEILVRGPMVMKGYYNKPEETESNFTEDGFLKTGDAGEFDADGNLYITDRIKELMKTSGGKYIAPQVIEGAIGKDHFIEQIAVIADTRKFVSALIVPCYDALEEYAKELNIAYHDRMELIKHSEIVEMLEKRVANLQKELARFEQVKKFTLLSKEFSMDKGELTPTQKLRRKVINERYQDEIEEMYDEKKEKKDK

SEQ ID NO: 32761 - protein, 470 aa, Geobacillus stearothermophilus
MVVGDFAIETETLVVGAGPGGYVAAIRAAQLGQKVTIVEKGNLGGVCLNVGCIPSKALISASHRYEQAKHSEEMGIKAENVTIDFAKVQEWKASVVKKLTGGVEGLLKGNKVEIVKGEAYFVDANTVRVVNGDSAQTYTFKNAIIATGSRPIELPNFKFSNRILDSTGALNLGEVPKSLVVIGGGYIGIELGTAYANFGTKVTILEGAGEILSGFEKQMAAIIKKRLKKKGVEVVTNALAKGAEEREDGVTVTYEANGETKTIDADYVLVTVGRRPNTDELGLEQIGIKMTNRGLIEVDQQCRTSVPNIFAIGDIVPGPALAHKASYEGKVAAEAIAGHPSAVDYVAIPAVVFSDPECASVGYFEQQAKDEGIDVIAAKFPFAANGRALALNDTDGFLKLVVRKEDGVIIGAQIIGPNASDMIAELGLAIEAGMTAEDIALTIHAHPTLGEIAMEAAEVALGTPIHIITK

SEQ ID NO: 32762 - protein, 410 aa, Symbiobacterium thermophilum IAM 14863
MAGSTGTLSPTKRFVLGLQHVAAMFGATVLVPIQTGLNPSVALLTAGLGTLLFHLVTKGRVPVFLGSSFAFIAAIQLVGQTEGLEYAAGGIVAAGLVYLVLSGLIYLFGVDRIRSFFPPIVAGPMIMVIGLTLAPVAVDMASSHWLVALITLLTVVLVSVYARGFLKLLPIICGLLVGFAASAAFGLVDWAAVAQASWVAVPPVTAPKFSLSAILAIAPLALVTMVEHIGDITTNGAVIGKDLIRDPGLHRTLMGDGLATALAGLLGGPANTTYSENTGVLAVTRVYDPGILRIAAVVAIALSFVGKLGALLQAIPTPVMGGISIVLFGMITSIGIRQVVDARVDLTNGRNLVIAAVVLVLGIGGAALPLPGGLQLGGMALAALVGVVLNKLLPEQVVRETEPALTGGDD

SEQ ID NO: 32763 - protein, 97 aa, Pseudomonas stutzeri
MKLRPLHDRVVIRRSEEETKTAGGIVLPGSAAEKPNRGEVVAVGTGRVLDNGEVRALAVKVGDKVVFGPYSGSNTVKVDGEDLLVMSENEILAVVEA

SEQ ID NO: 32764 - protein, 634 aa, Vibrio fischeri ES114
MTAQSDNLRIYQIMVESFVDGDNTIGHGTGYGPSHHNGDLQGIIDSLDYIQSLGMNAIWMTPVFESAPLDNQDHWADKLDATGYFATDFFKIDPRFGTLEKAKELVEEAHKRGIYVLFDGVFGHHKKGLIKPSPTGLLPAGEHNPVSYPESEAFYKEVATYWIKELKIDGWRLDQAYQVPTQSWTNIRKAVDAASKETFYTNNKGEQVNPLGYMVAEIWNNENYITETGYGSEQNPALCSAFDFPLRFRVAETFAVNESGVGHKGGDWLNQGMQMHELYPPHAVPNLMLGNHDVVRFGDLLQRGDIANPNDKNYWTRHKAALSFQAAYTGPITLYYGDEIGDQVDGFSKKENKDTCAIKGLCDDHIARSSAKIDGLTAKLTPEQTDLKNYATTLMQLRIKHPALSKGKRVNLVANKAVYIDHKQSENDAIVYMVSTQEADQTLSLDAEQIGSKGNLIDLITGQIFTPMNGIYTIPLSNFESRFLTIEEPNSTGPIIEQKEIALYGSGFMAQCDNPTITDTNAPLQDTLYLVGDFSDSPWSHKETRAYQYKGNNIYQVVINEKRGPYKMQYATKGWSAQYTAEGLSPKLGQSNKLITSGYGQDTAIYLPEDGNYVWSLEFNSQGEPKSMMVSKCK

SEQ ID NO: 32765 - protein, 552 aa, Pseudomonas stutzeri
MAAKEVKFGDSARKKMLVGVNVLADAVKATLGPKGRNVVLEKSFGAPTITKDGVSVAKEIELKDRFENMGAQLVKDVASKANDEAGDGTTTATVLAQAIVNEGLKAVAAGMNPMDLKRGIDKATIAIVAELKNLAKPCTDSKAIAQVGTISANSDSSIGDIIAEAMERVGKEGVITVEEGSGLENELSVVEGMQFDRGYLSPYFINKPDTMVAELDSPLLLLVDKKISNIRELLPVLEAVAKAGRPLLIVAEDVEGEALATLVVNNMRGIVKVAAVKAPGFGDRRKAMLQDIAILTGGTVISEEVGLSLETATLEHLGNAKRVVLNKENTTIIDGAGQQADIEARVAQIRKQVEDTTSDYDKEKLQERLAKLAGGVAVIKVGAGTEVEMKEKKARVEDALHATRAAVEEGVVPGGGVAWVRALQAISELKGENEDQNVGIALLRRAVEAPLRQIVTNAGGEPSVVVDKVKQGEGNYGFNAASDTYGDMIEMGILDPAKVTRSALQAAASIGSLMITTEAMIAEVAEDKAAGGMPDMGGMGGMGGMGGMGGMM

SEQ ID NO: 32766 - protein, 419 aa, Symbiobacterium thermophilum IAM 14863
MNLDGWTVGIDSAWTMVAASLVFFMQAGFAMVEAGFTRSKNAVNIVLKNLMDFVVASIAFWAVGFGLMFGADAGGLVGLGGFGSPESRFLHLGLAIPFFVFLWFQTTFAGTAATIVSGAMAERTKFSAYLLFSAAITLLVYPVGGHWIWGGGWLAQLGFVDFAGSTVVHSVGAWAALAGLLLLGPRIDRYDKQGRPRKIVGHNLVLAALGVFILWFGWFGFNPGSTLSATDPNIGRIAVTTNLGAAAGALAALLSAYLRTRTWEAEAALNGALAGLVGITAGCAFVSPAASILIGAVAGMLLAPGTALLERFRIDDAVGAIPVHGFAGLWGTLAVGLFHETQGLLVGGGPQLLAIQALGAAAVFAYAFAVCLLIFATIKATVGLRVSQEEELSGLDTEHGARAYPDFQPAAAHGYTGDD

SEQ ID NO: 32767 - protein, 321 aa, Sinorhizobium meliloti
MSETHSPAPAGHDHVFLGDNHQRNERRTWFVIALTAGMMVAEIAAGTFYGSMALVADGWHMSTHAAALLIAALAYLYARRNARNPRFTFGTGKLGDLAGFSSAIVLALIALLIGWESLLRLANPVAISFPQAISVAVLGLAVNLACAWLLREDHSHHHHGHHHHGHHHHHEHHHSVSAHGRDNNLRAAYLHVLADALTSVLAIVALAAGSVYGWIWLDPMMGIVGALVIARWSWGLIRDSGSVLLDYIPPGEDLPDEIRAAIERDGDRITDLHVWQLGPGHHGAIVSLVTKNPQSPSTYRRKLEHIHELSHVTVEVEPLAA

SEQ ID NO: 32768 - protein, 614 aa, Symbiobacterium thermophilum IAM 14863
MCGIAGWADWKRDLSREGPVLETMIAPLADRGPDAGGIWCSGHCAFGHRRLAVVDLVGGAQPMVRSRGDRTYVLVYNGQLYNTQELKEELTARGHAFSTQSDTEVLLVAYMEWGPECTRRLNGIYAFAVWDEAGQQLFLARDRFGVKPLFYKTMGSAILFGSELKALLAHPLVQPEVDAEGLAEVLYLGPSRTPGHGVFRGVREVLPGHWLLFDRAGVRTQPYWQLESRPHTDGPAETAERVRELLREAVRRQLVADVPVATLLSGGLDSSAITAFAAEAFRAQGRGPLHTWSIDYAENDRHFRAHAFQPDPDSAYAGTMAESLGTVHHEVVIDTPQLVDALEKAALIRDLPGMADVDAALFLFCREIKKGATVVLSGECADEVFGGYPWFHRPGPETGRTFPWIRSLEARTALLQPGVTGPIRAEDYVAQRYSNTVARVPRLPGEEPEEARIRELFYLNLAWFMATLLDRNDRMSMAVGLEARVPFCDHLLVEYVWNIPWRLKTYGGREKGILREALRGVLPEAVRTRRKSPFPKTHHPEYFRAVRDRVLALLDDPACRLHKIVRADRVRALARQDHEATDLPWFGQLMSGPQYFAWLIQLEAWLRHYKVVLV

SEQ ID NO: 32769 - protein, 153 aa, Zea mays
MDPMFSSEWSVSEIKMAKSLIASRNTSSNLASDDDASNKKHSDIVDELQARFPWKGKHEVIGLYVDLTMEMINTPPEVGDDGLVLDDDNFGMPVEEQPQMKYTGRFWTREEHRNFLRGLNMYGRGNWMYISRDFVPTKTPMQIYSHAQKFFRR

SEQ ID NO: 32770 - protein, 380 aa, Actinidia deliciosa
MGLPKSFVSMSLLFFSTLLILSLAFNAKNLTQRTNDEVKAMYESWLIKYGKSYNSLGEWERRFEIFKETLRFIDEHNADTNRSYKVGLNQFADLTDEEFRSTYLGFTSGSNKTKVSNRYEPRFGQVLPSYVDWRSAGAVVDIKSQGECGGCWAFSAIATVEGINKIVTGVLISLSEQELIDCGRTQNTRGCNGGYITDGFQFIINNGGINTEENYPYTAQDGECNLDLQNEKYVTIDTYENVPYNNEWALQTAVTYQPVSVALDAAGDAFKHYSSGIFTGPCGTAIDHAVTIVGYGTEGGIDYWIVKNSWDTTWGEEGYMRILRNVGGAGTCGIATMPSYPVKYNNQNHPKPYSSLINPPAFSMSKDGPVGVDDGQRYSA

SEQ ID NO: 32771 - protein, 410 aa, Candida albicans SC5314
MSSKQQYLKKNPDDVVVVAAYRTALTKGGRGGFKDVGSDFLLKKLTEEFVKKTGVDPKIIQDAAIGNVLNRRAGDFEHRGALLSAGLPYSVPFVALNRQCSSGLMAISQVANKIKTGEIECGLAGGVESMTKNYGPEALIAIDPAYEKDPEFVKNGIPMGITNENVCAKFNISRDVQDQFAAESYQKAEKAQKEGKFDDEILPIEVFQEDEDAEDEDEDEDEDAEPKEKLVVISKDEGIRPGVTKEKLAKIKPAFKSDGVSSAGNSSQVSDGAALVLLMKRSFAEKNGFKPLAKYISCGVAGVPPEIMGIGPAVAIPKVLKQTGLSVSDIDIYEINEAFAGQCLYSIESCNIPREKVNLNGGAIALGHPLGCTGARQYATILRLLKPGEFGVTSMCIGTGMGAASVLVRE

SEQ ID NO: 32772 - protein, 395 aa, Brassica napus
MAMAMAMNRIVVLPSSYAYRPHQARGSRSPIASSIRSATTEVTNGRKLYIPPREVHVQVKHSMPPQKLEIFKSLEGWADETLLTYLKPVEKSWQPTDFLPEAESEGFYDQVKELRERCKELPDEYFVVLVGDMITEEALPTYQTMLNTLDGVRDETGASPTPWAVWTRAWTAEENRHGDLLNKYLYLSGRVDMRQIEKTIQYLIGSGMDPKTENNPYLGFIYTSFQERATFISHGNTARHAKDLGDLKLAQICGTIAADEKRHETAYTKIVEKLFEIDADGTILGLADMMKKKISMPAHLMYDGQDDNLFEHFSTVAQRLGVYTAKDYADILEFLVEPWNVETLSGLSSEGHMAQDFVCGLPARIRRIEERAQGRAKEAAKNVPFSWIFGREIRA

SEQ ID NO: 32773 - protein, 116 aa, Triticum aestivum
ARKVLELERIPRFETNFVLEGGSIHVDGEGTCITTEQCLCHGNRNPHMSKDEIENQLKTHLGVSKVIWLPKGLYGDEMISGHVDNICCFTGPSTVLLSWIDDKSDPQYEHSGAAFD

SEQ ID NO: 32774 - protein, 124 aa, Cucumis sativus
GRGQFGTTYLCTYRPTGDLYACKSIPKRKLLCKEDYEDVWREIQIMHHLSEHPNVVQIKGTYEDSVFVHLVMELCAGGELFDRILLKGHYSEREAAQLIKTIVGVVETCHSLGVMHRDLKPENF

SEQ ID NO: 32775 - protein, 459 aa, Pasteurella multocida subsp. multocida str. Pm70
MRKRRFLLTSIALGLSILSTPMISQASLPTQVDGQQVPSLAPMLEKVLPAVVSISVEGKAKNHGSTPFQGIPEEFRFFFGPDLFNDRAPRNFRGIGSGVIINAEKGYVLTNNHVIDSADKITVQLQDGRELSAKVIGTDELSDVALIQIEKPKNLTALTIADSDKLRVGDFTVAIGNPFGLGQTVTSGIVSALGRSTGSDNGTYENYIQTDAAVNRGNSGGPLINLQGELIGINTAIISPSGGNAGIAFAIPSNMANNLVQQILEFGEVRRGMLGIKGGELNADLAKAFDIEAQQGAFVSEVLPNSAAEKAGLKAGDVIVAMNGQKISSFAEMRAKIATSGAGKEIALTYLRDGKTHQTKVTLQSDDQTQADASHLLPALAGAEMSNHDDKGVKGVLITSVTPKSLAEQRGLKKGDVIIGVNRQKVENLGQLRKILDAKPSAIALNIVRGNTNFYLLIQ

SEQ ID NO: 32776 - protein, 59 aa, Passiflora tripartita var. mollissima
MPGQWEYQVGPSVGIDAGDDIWCSRYILERITEQAGVILSLDPKPIEGDWNGAGCHTNY

SEQ ID NO: 32777 - protein, 124 aa, Cucumis sativus
GRGQFGTTYLCTEITTGIEYACKSISKRKLIAKEDVEDVRREIQIMHHLAGHKNIVTIKGAYEDSLYVHIVMELCSGGELFDRIIQRGHYSERKAAELTRIIVGVVETCHSLGVMHRDLKPENF

SEQ ID NO: 32778 - protein, 59 aa, Passiflora tripartita var. mollissima
WEYQVGPSVGIDAGDDIWCSRYILERITEQAGVILSLDPKPIEGDWNGAGCHTNYSTKS

SEQ ID NO: 32779 - protein, 254 aa, Hordeum vulgare subsp. spontaneum
TGITGIVNGMDVSEWDPTKDKFLAVNYDITTALEAKALNKEALQAEVGLPVDRKVPLVAFIGRLEEQKGPDVMIAAIPEILKEEDVQIILLGTGKKKFEKLLKSMEEKFPGKVRAVVRFNAPLAHQMMAGADLLAVTSRFEPCGLIQLQGMRYGTPCVCASTGGLVDTIVEGKTGFHMGRLSVDCNVVEPADVKKVATTLKRAVKVVGTPAYQEMVKNCMIQDLSWKNWEDVLLELGVEGSEPGIVGEEIAPLA

SEQ ID NO: 32780 - protein, 58 aa, Passiflora tripartita var. mollissima
WEYQVGPSVGIDAGDDIWCSRYILERITEQAGVILSLDPKPIEGDWNGAGCHTNYSTK

SEQ ID NO: 32781 - protein, 65 aa, Passiflora trisecta
GTNGEVMPGQWEYQVGPSVGIDAGDDIWCSRYILERITEQAGVVLSLDPKPIEGDWNGAGCHTNY

SEQ ID NO: 32782 - protein, 873 aa, Ginkgo biloba
MAGVLFANLPCSLQLSPKVPFRQSTNILIPFHKRSSFGFNAQHCVRSHLRLRWNCVGIHASAAETRPDQLPQEERFVSRLNADYHPAVWKDDFIDSLTSPNSHATSKSSVDETINKRIQTLVKEIQCMFQSMGDGETNPSAYDTAWVARIPSIDGSGAPQFPQTLQWILNNQLPDGSWGEECIFLAYDRVLNTLACLLTLKIWNKGDIQVQKGVEFVRKHMEEMKDEADNHRPSGFEVVFPAMLDEAKSLGLDLPYHLPFISQIHQKRQKKLQKIPLNVLHNHQTALLYSLEGLQDVVDWQEITNLQSRDGSFLSSPASTACVFMHTQNKRCLHFLNFVLSKFGDYVPCHYPLDLFERLWAVDTVERLGIDRYFKKEIKESLDYVYRYWDAERGVGWARCNPIPDVDDTAMGLRILRLHGYNVSSDVLENFRDEKGDFFCFAGQTQIGVTDNLNLYRCSQVCFPGEKIMEEAKTFTTNHLQNALAKNNAFDKWAVKKDLPGEVEYAIKYPWHRSMPRLEARSYIEQFGSNDVWLGKTVYKMLYVSNEKYLELAKLDFNMVQALHQKETQHIVSWWRESGFNDLTFTRQRPVEMYFSVAVSMFEPEFAACRIAYAKTSCLAVILDDLYDTHGSLDDLKLFSEAVRRWDISVLDSVRDNQLKVCFLGLYNTVNGFGKDGLKEQGRDVLGYLRKVWEGLLASYTKEAEWSAAKYVPTFNEYVENAKVSIALATVVLNSIFFTGELLPDYILQQVDLRSKFLHLVSLTGRLINDTKTYQAERNRGELVSSVQCYMRENPECTEEEALSHVYGIIDNALKELNWELANPASNAPLCVRRLLFNTARVMQLFYMYRDGFGISDKEMKDHVSRTLFDPVA

SEQ ID NO: 32783 - protein, 456 aa, Magnetospirillum magnetotacticum MS-1
GHCAGEAGYGRPRGNGASSSRKGTMNTTQQAKVRLLVDDQAQDLPVVAATEGNDGIVVSSLLKSTGLVTVDPGFMNTASCESSITYIDGEAGILRYRGYPIEQLAERSSFLEVAYLLIHGELPDAATLDAFVERVNRHTLVHEDFRTFMGTFPRNAHPMAVLSSAINALSTFYPESLDPFDDETVELATVLLLAKSRTITSYLHRRRVGEPLLYPDYSRGYVDDFLRMTFATPYQQYEADPVVVDALDKLLILHADHEQNCSTSTVRVVGSSHANLYASVAAGVNALSGPLHGGANESVLTMLDKIAGAEYDVDTFMKKVKNKEDGVRLMGFGHRVYKNYDPRAAIVKKSADAVLSTLGKKDQLLDIAMGLEEIALNDDYFIERKLYPNVDFYTGLIYKAMGFSPAMFTPLFALGRMPGWIAQWREMMKDPQTKIGRPRQVYVGETERDYVAVSDR

SEQ ID NO: 32784 - protein, 547 aa, Glycine max
METTRRWFSKFKSNDKMNSAKDKETTGMTKEGSKPPTSEEAPSNVTKQRVEAAKQYIENHYKKQMQSLQERKERRNMLEKKLADAEVSEEEQHNLLQHLEKKEREIMRLQRHKMGADDFEPLTMIGKGAFGEVRVCREKATGHVYAMKKLKKSEMLRRGQVEHVKAERNLLAEVDSNCIVKLYYSFQDEEYLYLIMEYLPGGDMMTLLMRKDILTENEARFYVGETVLAIESIHKHNYIHRDIKPDNLLLDRNGHMKLSDFGLCKPLDCSNLQEKDFSIGSNRSGALQSDGRPVAPKRSQQEQLQHWQKNRRMLAYSTVGTPDYIAPEVLLKKGYGMECDWWSLGAIMYEMLVGYPPFYSDEPMLTCRKIVNWRNYLKFPEEVKISAEAKDLISRLLCNVDQRLGTKGADEIKAHPWFKGIEWDKLYQIKAAFIPEVNDELDTQNFEKFEEADNQTQPSSKSGPWRKMLSSKDVNFVGYTYKNYEIVNDDQLPEIAELKKKSTKPKRPSIKTLFDDESATAANQPTQGSFLKLLPTQPEVPEKSESQ

SEQ ID NO: 32785 - protein, 393 aa, Sulfolobus solfataricus P2
MDLVEKLKNDVREIEDWIIQIRRKIHEYPELSYKEYNTSKLVAETLRKLGVEVEEGVGLPTAVVGKIRGSKPGKTVALRADMDALPVEENTDLEFKSKVKGVMHACGHDTHVAMLLGGAYLLVKNKDLISGEIRLIFQPAEEDGGLGGAKPMIEAGVMNGVDYVFGIHISSSYPSGVFATRKGPIMATPDAFKIIVHGKGGHGSAPHETIDPIFISLQIANAIYGITARQIDPVQPFIISITTIHSGTKDNIIPDDAEMQGTIRSLDENVRSKAKDYMRRIVSSICGIYGATCEVKFMEDVYPTTVNNPEVTDEVMKILSSISTVVETEPVLGAEDFSRFLQKAPGTYFFLGTRNEKKGCIYPNHSSKFCVDEDVLKLGALAHALLAVKFSNK

SEQ ID NO: 32786 - protein, 1116 aa, Schizosaccharomyces pombe
MAADIGSQSSGSLEERFEQSLHLQNVDKQDWSLNSVLQFLKLYKFNKEWEDVFIKSRIEMDLFINLADQSKAEEFAFKNKLSKESAIQLSSCIRKTLLAPSSTRVPSKNSSYETLTYSAKDSSDDVFTETNSGFRSSNQNSSLKSFQSVPDSNVNVFGGFGGSVVDNNELLSTGKNSHQTTSLNLEGSPINLHAYKGTVTSIINDDSRNINKKTLSKQPVSEHKEKQTSFLRRFRVPGFSRDKDKTKDCPSSNSNPFHLASSNVKTLDASLDQGEWVPRIHRLESQIGLISKKKSFVLATMDDMKFTVVDITNVQNATQLRKLIAKSMYLDISIDQFDLFLTEVGGAQYIEILDDRKLDIARLYSDEFGTIKFFVKPSQNEESGMDSDTYLSFGTKSSSTYKADDDSIYHRKEDFKKQPSYPVLTSDFEITDAGPNLSLSGHQPDNKYYKGFSSAPNLAVVPELPSRRFRGFEKIRGAKGEMATKILDATEAQSEKNKFTVCRPHKKVTLKMPLNSGSSAPQSPSSNTSASVLTRNFVAHRDPPPPPTETSSLRRKNTLTRRPSIRHARSSPYIDTGHNEASKFSHTSFDPKASSKSSNSLKESVEALSEIPFEDAPALDESDLSGDPFWAIQPKQSSSQVPKENHHNIQSKLSINTEAATDLKANELSSPKTPEYCRGDDRSISLSPLSYRLRKSKHIRESPPSSKVINSGNWEVRPSADDLYEDVDRFFPRYDLDKVLVVDQSRMVSSPSKVSIRPKMKSVRLLAREASEARKEIRHNARRNKSGNLLRRSSTKLWGSRIVELKPDTTITSGSVVSQNATFKWMKGELIGNGTYGKVFLAMNINTGELIAVKQVEIPQTINGRHDQLRKDIVDSINAEISMIADLDHLNIVQYLGFEKTETDISIFLEYVSGGSIGRCLRNYGPFEEQLVRFVSRQVLYGLSYLHSKGIIHRDLKADNLLIDFDGVCKISDFGISKHSDNVYDNDANLSMQGSIFWMAPEVIHNDHQGYSAKVDVWSLGCVVLEMLAGRRPWSTDEAIQAMFKLGTEKKAPPIPSELVSQVSPEAIQFLNACFTVNADVRPTAEELLNHPFMKCDEEFNFKDTNLYDMLCKRKS

SEQ ID NO: 32787 - protein, 510 aa, Schizosaccharomyces pombe
MRSSQTLSKYIDKATDQFNLEPNLALNIEIADLINEKKGNTPREAALLILKRVNSANPTVSYLALHLLDICVKNCGYPFHFQIASEEFLNGFVSRFPNHPISRMNKIQSKMLEMLEEWNYMLCKNNRHREDFSRIHDIRELMAFRGYKFPAVDEDSIAVMKPNNSLRSAQELAREDLEAHKAKLQELLRRGTPMDLAEANALMKVIAGYDEENTEDYSALAAADLESIRSKALRVKQFLVNQTVSLEEGTLADAVESLKVYQTKIARILREENEDEYYVQKLLSLNDLLINVIEECSNSDLIHSGTNVVSSQPNVVESHVPPSSNDTKQESSLIDLMKLTEEPAVPSPSLPTNVPANQSLSMLSSLSNSMSSTSNGALNSPSYSQAAIPNTNSSLTSILQSDSLMISTQLTSVQKSSGFASYSVQFSNCSLTWPVSEVVFQVAVVKSLKLQLLPHTGDAIIAPGKQNAAHEIMNITNIPADASDLRIRWRVQWIIGTDHRVEQGESHLPL

SEQ ID NO: 32788 - protein, 446 aa, Mycobacterium leprae TN
MGSTDQATAPAGPAVSISAKLFEDACAVIPGGVNSPVRAFSAVGGTPLFITEARGCWLTDADGRRYVDLVCSWGPMILGHAHPAVVDAVATVAASGLSFGAPTPAETQLAAEIIGRMAPVERIRLVNSGTEATMSAVRLARGFTGRTKIIKFSGCYHGHVDALLADAGSGVATLSLPSSPGVTGAAAADTIVLPYNDIEAVRQTFARLGDQIAAVITEASPGNMGVVPPAPGYNAALRAITAEHGALLIIDEVMTGFRVSRSGWYGLDPVAADLFIFGKVMSGGMPAAAFGGRAEVMERLAPLGPVYQAGTLSGNPVAMAAGLATLRAAADAVYATLDRNADRLVAMLSEALTDAGVPHQIPRAGNMFSVFFSEAPVTDFASACNSQVWRYPAFFHALLDAGVYPPCSTFEAWFVSAALDDAAFGRIVDALPGAAAAAVAARHRES

SEQ ID NO: 32789 - protein, 428 aa, Agrobacterium tumefaciens str. C58
MRIVSWSGGDHDGRSRMDISETPHLSLHVPEPAVRPGGEPDFSNVKIPKAGTVPRPEVDAAPESMRDLAYSIIRVLNHQGEAVGPWAGLLSDEDLLVGLKNMMRLRAFDARMLMAQRQGKTSFYMQHLGEEAVSCAFRKALSKGDMNFPTYRQAGLLIADDYPLVTMMNQIYSNELDPLHGRQLPVLYSSKEHGFFTVSGNLATQYVQAVGWAMASAIKGDTKIAAAWIGDGSTAESDFHSALVFASTYKAPVILNIVNNQWAISTFQGIARGGSGTFAARGLGFGIPALRVDGNDYLAVYAVARWAVERARRNLGPTLIEYVTYRVGAHSTSDDPSAYRPKTESEAWPLGDPVLRLKKHLILRGVWSEERHRQAEAEIADEVLEAQREAESHGTLHEGKKPPKKDIFEGVYAEMPPHLARQRQKAGW

SEQ ID NO: 32790 - protein, 367 aa, Glycine max
MARYSFLLALLLLLFAAVSSAADDILIRQVVPDAVGEAAEKEEDHLLNAEHHFASFKAKFGKKYATKEEHDRRFGVFKSNLRRARLHAKLDPSAVHGVTKFSDLTPAEFRRQFLGFKPLRLPANAQKAPILPTKDLPKDFDWRDKGAVTNVKDQGACGSCWSFSTTGALEGAHYLATGELVSLSEQQLVDCDHVCDPEEYGACDSGCNGGLMNNAFEYILQSGGVQKEKDYPYTGRDGTCKFDKTKVAATVSNYSVVSLDEDQIAANLVKNGPLAVGINAVFMQTYIGGVSCPYICGKHLDHGVLIVGYGEGAYAPIRFKNKPYWIIKNSWGESWGENGYYKICRGRNVCGVDSMVSTVAAIYPSSH

SEQ ID NO: 32791 - protein, 108 aa, Brassica napus
  misc_feature (9)..(10): Xaa can be any naturally occurring amino acid
  misc_feature (74)..(74): Xaa can be any naturally occurring amino acid
  unsure (1)..(108): unsure at all Xaa locations
MDKRWSLEXXTALVTGGASGIGHAIVEELASFGARIHVCDISETLLNQSLSEWEKKGFQVSGSTCDVSSRPERXILMQTISGIFDGKLNILVNNVGVVHTKPTTEYEA

SEQ ID NO: 32792 - protein, 330 aa, Mycoplasma mobile 163K
MTYLVIGGAGYIGSHTVYELIENNNKVVILDNLTTGSNSSIHPEAKFYEGDFKDKKILNKIFDENKEIEIVINFAASIVVSESVYEPLKYYLNNTYGVMILLESMKENNKKFLIFSSTAAVYGQKSNLPIREDEDLNPINPYGSSKQMSEKIIQDYAHVNDFKFAILRYFNVAGAHQNNSIGLVPKKGHKVSHLIPSISSFVFNELDSLKIFGNNYDTKDGTCIRDYIHVQDLAHAHFLAAKYIFENKTNLIVNVGSEKGFSVLEVVKTFEKQLNKKLNYEINPKRDGDPAFLVASTTKIAKILNFKPKFSLEEIVKTELAWRKKILKDK

SEQ ID NO: 32793 - protein, 241 aa, Glycine max
  misc_feature (209)..(209): Xaa can be any naturally occurring amino acid
  misc_feature (226)..(226): Xaa can be any naturally occurring amino acid
  unsure (1)..(241): unsure at all Xaa locations
MPLLSHTIITPILSRNNRRCFSLMAASAAFDDAKHGFSRPEMYKENLAGTLDAYDRHVFLCYKNHLAWPPRLEASDADPLPKRVATVWRARKNDIAVKQTKITVCEAREEAGFSDGDALIFPDMIKYRGVEESNVDVFFNDVIVSGKEWSGGKQGKGVLKGSHIFVCAHGSRDVRCGVCGPVLMDKFNEEIQLRGLKDQISVLACSISXHKYAGNVIIFSPGSDGXIMGHWYGYGTPDDVA

SEQ ID NO: 32794 - protein, 298 aa, Psychrobacter arcticus 273-4
MSNPINNTQLTVAAIQMNSQQNIEDNLADIKAAIIEAAAQGAQLAVLPENCCSMGRQFATAEHFDALSAMIAEYARTYGMYVLAGSLPCPYRPDGVIVPDGRLRQASLLFAPDGTRIARYDKIHLFTATVADKQGSYNEAATFEPGAQTVVAALDVEGAVYQLGMMVCFDLRFPALSQRLRQAGAELLSAPSAFTYLTGQAHWSLLLQARALDSQCMVIGAAQGGEHAYKDGHTRQTWGHTTMSAYDGTVISSYDASELNQSLNEDNKNYAIVLATLDRQAQNQGRQKMPIFDCHRLA

SEQ ID NO: 32795 - protein, 300 aa, Arabidopsis thaliana
MTQHWPDFSSQKLSPFSTPTATAVATATTTVQNPSWVDEFLDFSASRRGNHRRSISDSIAFLEAPTVSIEDHQFDRFDDEQFMSMFTDDDNLHSNPSHINNKNNNVGPTGSSSNTSTPSNSFNDDNKELPPSDHNMNNNINNNYNDEVQSQCKMEPEDGTASNNNSGDSSGNRILDPKRVKRILANRQSAQRSRVRKLQYISELELLSPRVAFLDHQRLLLNVDNSALKQRIAALSQDKLFKDAHQEALKREIERLRQVYNQQSLTNVENANHLSATGAGATPAVDIKSSVETEQLLNVS

SEQ ID NO: 32796 - protein, 311 aa, Triticum aestivum
MAPGSSIVSVTEVPESDCGDRGLSEALSSIRLDGDSTSKPSWAASLVNVGLSSLTGLNDLLECPVCTNSMRPPILQCPNGHTICSSCKHRVDNHCPTCRQELGNIRCLALEKVAESIQLPCKYQSLGCTEIHPYQNKLKHEELCRFRPYSCPYAGSECLIAGDVPMLVSHLINDHKVDLHEGCTFNHRYVKSNPYEVENATWMLTVFKCFGQHFCLHFEAFLLGMSPVYMAFLRFMGEESEARGFCYSLEVGGNGRKLTWQGTPRSIRDGHKKVRDSFDGLIIHRNMALFFSSGTRQELKLRVTGRIWKEQ

SEQ ID NO: 32797 - protein, 331 aa, Lactobacillus casei
MTIAVLGGAGYIGSHTVKQLLAAGEDVVVLDNLITGHRKAVDPRARFYQGDIRDYHFLSQVFSQEKIDGIVHFAAFSIVPESMKDPLKYFDNNTGGMITLLEAMNQFGIKKIVFSSTAATYGEPKQVPIKETDPQVPTNPYGESKLAMEKIMHWADVAYGLKFVALRYFNVAGAMPDGSIGEDHHPETHIVPIILQVAAGTRTGLQIYGDDYPTKDGTNVRDYVHVVDLADAHILALKYLDAGNKSSAFNIGSAHGFSNLEILNAARKVTGQEIPATMGPRRAGDPSTLIASSEKARDILGWKPNYDDIDKIIETAWNWHENHPEGFGDRN

SEQ ID NO: 32798 - protein, 469 aa, Brassica napus
MQALQSSSLRASPPNPLRTPSNRQSHQITNARPTTRRSFISASASVSAPKRETDPKKRVVITGMGLVSVFGNDVDAYYEKLLSGESGISLIDRFDASKFPTRFGGQIRGFSSEGYIDGKNERRLDDCLKYCIVAGKKALESANLGGDKLNTIDKQRAGVLVGTGMGGLTVFSDGVQALVEKGHSGRAPFFIPYAITNMGSALLAIDLGLMGPNYSISTACATSNYCFYAAANHIRRGEADMMVAGGTEAAIIPIGLGGFVACRALSQRNDDPQTASRPWDKQRDGFVMGEGAGVLVMESLEHAMKRGAPIVAEYLGGAVNCDAHHMTDPRADGLGVSSCIESCLEDAGVSPEEVNYINAHATSTLAGDLAEINAIKKVFKSTSGIKINATKSMIGHCLGAAGGLEAIATVKAINTGWLHPSINQFNPEPAVDFDTVANEKKQHEVNVAISNSFGFGGHNSVVAFSAFKP

SEQ ID NO: 32799 - protein, 388 aa, Thermotoga maritima MSB8
MIKVLHIIPSLAVGGAEKLVSDMVEFADRSRFDVAVMRITGTDSFLVEKLTSKGYQVYTIVLDYEAIAPSKVIRRLLRAIKNMRRTYNLLREIRPDIIHSHLSALRIALIPALLCRIPVKVHTIHTVAEKDAKGITRFFNRIAFKFFGFVPVSISQEVAESVKKLYGRKISTPVIYNGIDVQKFSIDQPKRVDRDKTILINVARLSREKNHALLVRAFSKAVQSCPNLELWLVGDGELRRDIEELVKQLGLEEKVKFFGVRSDVPELLSQADIFVLSSDYEGFGLVVAEAMAAGLPVIATAIGGIPEILEGGRAGILVPPKDVDALAKAIVELARDEKKRAELSDYGRKLVAERFDIRRTVREYEKLYLELLEKKKGSKKFRIKGNVL

SEQ ID NO: 32800 - protein, 148 aa, Zea mays
MAPKAEKKPAEKKPAAEEKAEKTTAGKKPKAEKRLPASKSSGKEGGEKKGKKKAKKSVETYKIYIFKVLKQVHPDIGISSKAMSIMNSFINDIFEKLAGEAAKLARYNKKPTITSREIQTSVRLVLPGELAKHAVSEGTKAVTKFTSN

SEQ ID NO: 32801 - protein, 55 aa, Passiflora tryphostemmatoides
  misc_feature (52)..(52): Xaa can be any naturally occurring amino acid
  unsure (1)..(55): unsure at all Xaa locations
WEYQVGPSVGIEAGDHIWGSRYILERITEQAGVVLTLDPKPIEGDWNGAGCXTNY

SEQ ID NO: 32802 - protein, 382 aa, Arabidopsis thaliana
MPFTYAPGNLIANQMDRLKLYFSVFVLSFFIVSVSSSDVNDGDDLVIRQVVGGAEPQVLTSEDHFSLFKRKFGKVYASNEEHDYRFSVFKANLRRARRHQKLDPSATHGVTQFSDLTRSEFRKKHLGVRSGFKLPKDANKAPILPTENLPEDFDWRDHGAVTPVKNQGSCGSCWSFSATGALEGANFLATGKLVSLSEQQLVDCDHECDPEEADSCDSGCNGGLMNSAFEYTLKTGGLMKEEDYPYTGKDGKTCKLDKSKIVASVSNFSVISIDEEQIAANLVKNGPLAVAINAGYMQTYIGGVSCPYICTRRLNHGVLLVGYGAAGYAPARFKEKPYWIIKNSWGETWGENGFYKICKGRNICGVDSMVSTVAATVSTTAH

SEQ ID NO: 32803 - protein, 58 aa, Passiflora tulae
WEYQVGPSVGIEAGDHIWCSRYILERITEQVGVVLTLDPKPIEGDWNGAGCHTNYSTK

SEQ ID NO: 32804 - protein, 574 aa, Acinetobacter sp. ADP1
MKQDFKVYVRLLSYLKPYWGIALLVLVGFGINAATEVSVAKLLKYIIDAIQEGSRADLDWFPLLIVLLVFFRGLGLFMGGYYTAVISRRLIFSIRQEIYAKLIRLPSQYYLDNSSGHISAKIMYNVEQLTAASSESLKIMVKDGLITLGLLGYLLYTNWRLTLCIFIFMPIIGVLVRKASKRMRKLSIQVQNTMGDVNHVVQESIGGQAVVKSFVGEEFEQKRFYKSSEDNLKRGLKMVIVQNLNSPLVQLVMAMAMSLIVWLALRPQILGETTAGEFVAYITAAGLLAKPIKNLTDVNEKLQRGIAAAYSVFELLDLPSEENHGTQTPKLQGDVRFDHVTLEYAGQVKAIKDFNLTIEPGETVAIVGRSGAGKTSLVNLLVRFQEVTSGSLYLDHIPIQDIELSCLRQQVAMVNQQVVLFNRSVRENIAYGQLEGAAEADIVAAAKAAYAHDFIMNLPQGYDTILGAQGLNLSGGQRQRIAIARAILKNAPILILDEATSALDNESEHFIQKAFDEAMQNRTTIVIAHRLSTIENADRIVVMDKGQIIEQGTHQELLLKQGAYFQLHQRNFEE

SEQ ID NO: 32805 - protein, 337 aa, Oryza sativa
  misc_feature (205)..(205): Xaa can be any naturally occurring amino acid
  unsure (1)..(337): unsure at all Xaa locations
MHFPPCVQCLQQNTMARCFVLNTGAKIPSVGLGTWQAEPGVVGNAVYAAVKAGYRHIDCAQAYFNEKEIGVALKKVFDEGIVKREDIFITSKLWCTNHAPEDVPVALDSTLQDLQTDYVDLYLIHWPVRMKKGAGFGGQNVLPTDIPATWAAMEKLHDSGKARAIGVSNFSSKKLEDLLAVARVPPAVDQVECHPVWQQTKLRNXCASNLLLCHASLQAYSPLGSPGTASVKAVGNVLAHPVVVSTAEKLGKTPAQVALRWGIQMGHSVLPKSTHEERIKENIDVYDWSIPEDLFIKLSGRPVRSVCNMQVRLFKYEFLTHPTSFYKSLEDFWDGEI

SEQ ID NO: 32806 - protein, 248 aa, Arabidopsis thaliana
MASTEPERENREDETEVNEDEDTGAQVAPIVRLEEVAVTTGEEDEDAVLDLKSKMYRFDKEGNQWKERGAGTVKLLKHKETGKVRLVMRQSKTLKICANHLISSGMSVQEHSGNEKSCLWHATDFSDGELKDELFCIRFASIENCKTFMEKFTEIAESQQVGKESTQGDEAAGLIENLSVEENISEEKAKEAEEKEPAKEDKETKKEKVEEEKKTEASTIIVFGIKLVSLLSSSIIRNGFVASRLHNL

SEQ ID NO: 32807 - protein, 65 aa, Passiflora umbilicata
GTNGEVMPGQWEYQVGPSVGIEAGDHIWCSRYILERITEQAGVVLTLDPKPIEGDWNGAGCHTNY

SEQ ID NO: 32808 - protein, 158 aa, Bradyrhizobium japonicum USDA 110
MSAIYDFKANSLLGEEVPMRRFEGQVLLIVNTASKCGFTPQYRGLEDLYRDLSPRGFAVLGFPCNQFGAQEPGQASEIQEFCSTNYDVTFPLFEKIDVNGANAHPLYEYLKRQQSGLLGASIKWNFTKFLVDRAGRVIARYAPTARPEGLRQQIETLL

SEQ ID NO: 32809 - protein, 59 aa, Passiflora variolata
WEYQVGPSVGIDAGDHIWCSRYILERITEQAGVVLSLDPKPIEGDWNGAGCHTNYSTKS

SEQ ID NO: 32810 - protein, 545 aa, Haemophilus ducreyi 35000HP
MATNYIFVTGGVVSSLGKGIAAASLASILEARGLNVTIMKLDPYINVDPGTMSPTQHGEVFVTQDGAETDLDLGHYERFIRSKMSKANNFTSGKIYSEVLRKERRGDYLGATIQVIPHITNEIKARVIEGGKGRDVVIVEVGGTVGDIESLPFLEALRQLAVDVGREKTLFMHLTLVPYIPTAGEVKTKPTQHSVKELLSIGIQPDVLICRSDRTIPANERKKIALFCNVPERAVISLKDVDSIYRIPELLKSQALDSFVCDRFRLECPEADLSEWEQVLYRQANPTGEVTIGMVGKYVELPDAYKSVNEALKHAGLTSRLSVNIKYIDSQDIETKGTELLDGLDAILVPGGFGYRGVEGKIRTAQYARENNIPYLGICLGMQIALIEYARNVAGLTEANSSEFDPACSQPVIGLITEWQDESGNVETRTDKSDLGGTMRLGAQQCHLIEGTKAREIYGAEAIVERHRHRYEVNNVLLPTIEAAGLKVSGVSADRKLVEIIEVPNHPWFIAAQFHPEFTSTPRDGHPLFAGFVAAAKAYQDSRKA

SEQ ID NO: 32811 - protein, 48 aa, Passiflora vespertilio
SVGIEAGDDIWWSRYIIERITEQVGVVVTLDPKPIEGDWNGAGCHTNY

SEQ ID NO: 32812 - protein, 640 aa, Frankia sp. EAN1pec
MAHAASDLVADDIEAYLNLHEHKSMLRFITCGSVDDGKSTLIGRLLYDSKLVFSDHLAALEADSKKVGTQGDGLDFALLVDGLAAEREQGITIDVAYRFFSTERRKFIVADTPGHEQYTRNMVTGASTADLAVILIDARKGVLTQTRRHSYLVSLLGIRHIVLAVNKLDLVDYSQDVFTRIEADYREFAARIGLSDIVAIPLSALAGDNITESSPNTPWYSGPTLVGHLETVAVDDDAHTGAFRLPVQWVNRPNLDFRGFSGQIAGGTVRPGDRVRALPSGQESTVERIVTADGDLDEAIAGQSITLTLADEIDVSRGDVLATAIDPPGVADQFECHLVWMADEPMLPGRPYLMKIGARTSSVTIAQPKYKVNVNTLEHTAARTLDLNEIGVCNINVDRQIPFDPYTTNRHTGGFILIDRFTRATVAAGLLHFALRRADNVHWQAVEVDKTARARAKGQRPAVLWFTGLSGAGKSTIANLVEKRLHEQGFHTYLLDGDNVRHGLNKDLGFTDADRVENIRRVTEVARLMVDAGVIVLASFISPFRAERQLARDLLEPGEFIEIHVDTPLDVAESRDRKGLYAKARAGQLVNFTGIDSPYEPPEHPELRIDASGTITPEASADLVVEHLRTNGILTPPDAP

SEQ ID NO: 32813 - protein, 449 aa, Streptococcus suis 89/1591
MINQLRYLMTTAEFWFVVILIGFLIALTVLLIENYRDNKQIKQLNQKVNALIEGNYADVLDMRGSPEITDMANSLNDLSEVIRLTHDNLEQEKTRLTSILSYMSDGVIATDRIGRIIMINDMAQKQLGLSSQKQEQYHLLEVLDLSDRYTLRDLLAQTPEIVIDHTNENEEFLTLRANFATIRSESGLISGLVVVLHDMTEQAKEERERRLFVSNVSHELRTPLTSVKSYLEALDEGALTESVAPSFVKVSLDETNRMMRMITDLLSLSRIDNQVGQIDVELINFTAFVTFILNRFDQMKNADSDKVYTIVRDYQISPIWVEIDTDKMTQVLDNILNNAIKYSPDGGTITFSMKTTDSQLIVSVSDEGLGIPKADLPRIFDRFYRVDKARSRAQGGTGLGLAIAKEIVKQHKGFIWAKSEYGHGSTFTIVLPYSKDIALDEWDDSDEEE

SEQ ID NO: 32814 - protein, 422 aa, Saccharopolyspora hirsuta
MTRRVVITGVGVRAPGGLGAKNFWELLTSGRTATRRISFFDPTPNRSQIAAECDFDPEHEGLSPREIRRMDRAAQFAVVCTRDAVADSGLEFEQVPPERIGVSLGSAVAAATSLEQEYLVLSDGGREWQVDPAYLSAHMFDYLSPGVMPAEVAWTVGAEGPVAMVSDGCTSGLDSLSHACSLIAEGTTDVMVAGAADTPITPIVVSCFDAIKATTPRNDDPEHASRPFDNSRNGFVLAEGAALFVLEELEHARARGAHVYAEISGCATRLNAYHMTGLKTDGREMAEAIRVALDLARIDPTDIDYINAHGSGTKQNDRHETAAFKRSLGEHAYRTPVSSIKSMVGHSLGAIGSIEVAACALAIEHGVVPPTANLHEPDPECDLDYVPLTAREQRVDTVLSVGSGFGGFQSAMVLRRLGGANS

SEQ ID NO: 32815 - protein, 403 aa, Saccharopolyspora hirsuta
MSTWVTGMGVVAPNGLGADDHWAATLKGRHGISRLSRFDPTGYPAELAGQVLDFDATEHLPKRLLPQTDVSTRFALAAAAWALADAEVDPAELPEYGTGVITSNATGGFEFTHREFRKLWAQGPEFVSVYESFAWFYAVNTGQISIRHGLRGPGSVLVAEQAGGLDAVGHGGAVRNGTPMVVTGGVDSSFDPWGWVSHVSSGRVSRATDPGRAYLPFDVAANGYVPGEGGAILLLEDAESAKARGATGYGEIAGYAATFDPAPGSERPPALRRAIELALADAELRPEQVDVVFADAAGVAELDAIEAAAIRELFGPSGVPVTAPKTMTGRLYSGGGPLDLVAALLAIRDGVIPPTVHTAEPVPEHQLDLVTGDPRHQQLGTALVLARGKWGFNSAVVVRGVTG

SEQ ID NO: 32816 - protein, 197 aa, Medicago truncatula
MSGSRFIKCVTVGDGAVGKTCLLISYTSNTFPTDYVPTVFDNFSANVVVDGSTINLGLWDTAGQEDYNRLRPLSYRGADVFLLAFSLISKASYENIAKKWIPELRHYAPGVPIILVGTKLDLRDDSQFFQDHPGAAPITTAQGEELRKLIGAPVYIECSSKTQKNVKAVFDSAIKVVLQPPKQKKTKRKGQKACSIL

SEQ ID NO: 32817 - protein, 197 aa, Medicago truncatula
MSASRFIKCVTVGDGAVGKTCLLISYTSNTFPTDYVPTVFDNFSANVVVNGSTVNLGLWDTAGQEDYNRLRPLSYRGADVFILAFSLISKASYENVSKKWIPELKHYAPGVPIILVGTKLDLRDDKQFFVDHPGAVPITTAQGEELRKLINAPAYIECSSKSQQNVKAVFDAAIRVVLQPPKQKKKKSKAPKACSIL

SEQ ID NO: 32818 - protein, 197 aa, Medicago truncatula
MSASRFIKCVTVGDGAVGKTCLLISYTSNTFPTDYVPTVFDNFSANVVVNGSIVNLGLWDTAGQEDYNRLRPLSYRGADVFILAFSLISKASYENVSKKWIPELKHYAPGVPIILVGTKLDLRDDKQFCIDHPGAVPITTAQGEELRKLINAPAYIECSSKSQENVKAVFDAAIRVVLQPPKQKKKKNKAQKACSIL

SEQ ID NO: 32819 - protein, 416 aa, Streptococcus thermophilus CNRZ1066
MTYIDTLGQQAKVASRQIAKLSTAAKNDLLNQVAKALVAESDYIITENAKDMANASENGISKIMQDRLLLTEDRIAGIAEGVRQVADLQDPIGQVVRGYTNLDGLKIVQKRVPMGVIAMIFESRPNVSIDAFSLAFKTNNAIILRGGRDAINSNKALVTVARKALKNAGITADAVQFVEDTSHEVAEELMVATKYVDLLIPRGGARLIQTVKEKAKVPVIETGVGNCHIYVDKYANLDMATQIVINAKTQRPSVCNAAESLVVHADIVEEFLPNLEKAILKIQSVEFRADERALKLMEKAVPASPEDFATEFLDYIMSVKVVDSLDEAINWINTYTTSHSEAIVTQDISRAEQFQDDVDAAAVYVNASTRFTDGFVFGLGAEIGISTQKMHARGPMGLEALTSTKFYINGQGQIRE

SEQ ID NO: 32820 - protein, 615 aa, Nitrosomonas europaea ATCC 19718
MIGKAGIGTILDLLRVRSAATPAATAFQVLVQNKSWQPTNWEQFVQAAGRVGARLTDFGVRKGDHVGIMAATSLDWEYAQMGALFAGAVVAGIDPEYPADQLNHVIENLGLSVLFVQNRSVFAKIPLELRQQISVFIFFEGESQQKNEFSMINLLVEQETDTSICLPDVLPQDEAVIVFSSGTTGMPKAIIFTHEQVIMAVEAIMRVFNDLSSQTILLCWLPLSNLFQRIVNFCAIKIGASSYILSDPRDLMRYVKQVNPDVLIGVPKVLERVHSGVVDHIEGRVWPLRMLARWAIRIGYKRAAARSDRGDSFGLMNKLLWKQAENMFLRRLRMVFGSRVRYLVSGSAAMPVWLLRWFDAIGLPVYEVYGISENVIPVAVNSSGSRKLGAVGKPLLPNEIKLTMDGEILVRGPGVFKGYQDRKEESNLRFSPDGYWHTGDLGELDTAGFLSIVGRKSDVFKTSAGKWIAPVRIEERLGRIAYVEQSVVFQYESGKIVAVIVVDLEKCAQKTSAVRYSEVSLHMENMAKNKLHQILETDINAELEDLPLYQRPVYVAVTDKFFTVSGGELTVNMKVRRSIVAQRFSAYFENTVCKSDQGRAENGHVVMSGPTIFFI

SEQ ID NO: 32821 - protein, 342 aa, Haemophilus influenzae Rd KW20
MKERIKAICLEKPNNVVVKEVPYPEKSDNDVLIQVESMGICGSDIGAYRGTNPLVTYPRILGHEIVGRVIESGIGMSDGVRVGDRVIVDPYVCCGQCYPCSIGRTNCCESLKVIGVHIDGGMQEVIRHPAHLLTKVPDNLPIHQLPLAEPLTIALHALHRTTLKSGEHIVIIGAGAIGLMAALAAVQYGAIPILVDILEQRLEYAKSLGIEHIVNPHKEDDIKRIKEITSGRMAEVVMEASGANISIKNTLHYASFAGRIALTGWPKTETPLPTNLITFKELNIYGSRTSKGEFEEALDMLATNKINASHIITKCIKFEEIPSFISDLSDHPENYLKINAVF

SEQ ID NO: 32822 - protein, 328 aa, Geobacter sulfurreducens PCA
MSDMNELDEKELDAPDEPGEDFIEPEPTTFELEAAEEEEEPEEPAEVGKNIEQEHFDDAIKLYLREIQRTRLLTADEEKELAGRIAKGDKAARDKMIESNLRLVVKIAKRYINRGLPFLDLIEEGNMGLIKAVERFKLSKECRFSTYATWWIRQSIERALVNQSRTIRLPVHVSDDINKMLKITRELVQRLNREPSVKEVATEMKVNSAYVRRLMVLLKKTYSIERPMGENSDYFLIDTIEDTSTVSPAVLLEDLNKYEIVSKWFASLSENEQTILTLRFGLEDKEPQTLDTIGRSFGVTRERIRQIEAKSLEKLRKYIEESDGNAID

SEQ ID NO: 32823 - protein, 316 aa, Zea mays
MASLTPPPAPPNPRQDAIDLHKAFKGFGCDSTTVINILTHRDSVQRGLIQQEYRAMYHEELSHRISSELSGNHKKAMSLWILDPAGRDATVLREALNGDTMDLRAATEIICSRTPSQLQIMKQTYYARFGTYLEHDIAHHTSGDHQKLLLAYMGIPRYEGPEVDPTIVTHDAKDLYKAGEKRLGTDEKIFIRVFTERSWAHLASVSSAYHHMYDRKLEKVIKSETSGNFEFALLTILRCAENPAKYFAKLLRKAMKGLGPYDMTLIRVVVTRTEIDMQYIKAEYLKKYKKPLAEAINSETSGNYRTFLLSLVGHGH

SEQ ID NO: 32824 - protein, 247 aa, Mycobacterium leprae TN
MQQGNTATLILLRHGESDWNARNLFTGWVDVGLTDKGRAEAVRSGELLAEHNLLPDVLYTSLLRRAITTAHLALDTADWLWIPVRRSWRLNERHYGALQGLDKAVTKARYGEERFMAWRRSYDTPPPPIEKGSEFSQDADPRYTDIGGGPLTECLADVVTRFLPYFTDVIVPDLRTGRTVLIVAHGNSLRALVKHLDEMSDDEVVGLNVPTGIPLRYDLDADLRPVVPGGTYLDPEAAAAVISQARP

SEQ ID NO: 32825 - protein, 342 aa, Pasteurella multocida subsp. multocida str. Pm70
MIKKLFHSVMIGLVCAAVILVFSHVNQFSLLKAPEPMSFKDAVRVASPAVVNVYNRSFSANSAEQLEVGNLGSGVIMSKDGYILTNKHVIQNADQIVVALQNGQLFDASLIGSDTLTDLAVLKIRADNLSTIPQNPQRQMHVGDVALAIGNPYNLGQSVSQGIISAIGRNAVGDSVGRQNFIQTDASINRGNSGGALINSVGELIGINTLSIGKTAGEIAEGLNFAIPIELANDVMKKIIRDGRVIRGYFGVQSDILFNNGQGAHLEKGILITNVNPEGPAGKAGVKAGDIILKVGDVDAISPAQMMQVISNTRPNTRLNVVISRLGKIIELPVIIEEYPLN

SEQ ID NO: 32826 - protein, 168 aa, Zea mays
MAASSTATSVHDFIVKDASGKDVDLSTYKGKVLLIVNVASQCGLTNSNYTELAQLYEKYKDQGFEILAFPCNQFGGQEPGTNEEIVQFACTRFKAEYPIFDKVDVNGSNAAPIYKFLKSSKGGLFGDSIKWNFSKFLVDKEGRVVDRYAPTTSPLSIEKDIKKLLGSS

SEQ ID NO: 32827 - protein, 469 aa, Escherichia coli CFT073
MNLFSYHSGTRAGIMKKQTQLLSALALSVGLTLSASFQAVASIPGQVADQAPLPSLAPMLEKVLPAVVSVRVEGTASQGQKIPEEFKKFFGDDLPDQPAQPFEGLGSGVIINANKGYVLTNNHVINQAQKISIQLNDGREFDAKLIGSDDQSDIALLQIQNPSKLTQIAIADSDKLRVGDFAVAVGNPFGLGQTATSGIISALGRSGLNLEGLENFIQTDASINRGNSGGALLNLNGELIGINTAILAPGGGSVGIGFAIPSNMARTLAQQLIDFGEIKRGLLGIKGTEMSADIAKAFNLDVQRGAFVSEVLPGSGSAKAGVKAGDIITSLNGKPLNSFAELRSRIATTEPGTKVKLGLLRNGKPLEVEVTLDTSTSSSASAEMITPALEGATLSDGQLKDGGKGIKIDEVVKGSPAAQAGLQKDDVIIGVNRDRVNSIAEMRKVLAAKPAIIALQIVRGNESLYLLMR

SEQ ID NO: 32828 - protein, 355 aa, Escherichia coli CFT073
MFVKLLRSVAIGLIVGAILLVAMPSLRSLNPLSTPQFDSTDETPASYNLAVRRAAPAVVNVYNRGLNTNSHNQLEIRTLGSGVIMDQRGYIITNKHVINDADQIIVALQDGRVFEALLVGSDSLTDLAVLKINATGGLPTIPINPRRVPHIGDVVLAIGNPYNLGQTITQGIISATGRIGLNPTGRQNFLQTDASINHGNSGGALVNSLGELMGINTLSFDKSNDGETPEGIGFAIPFQLATKIMDKLIRDGRVIRGYIGIGGREIAPLHAQSGGMDQLQGIVVNEVSPDGPAANAGIQVNDLIISVNNKPAISALETMDQVAEIRPGSVIPVVVMRDDKQLTLQVTIQEYPATN

SEQ ID NO: 32829 - protein, 35 aa, Passiflora vitifolia
WEYQVGPSVGIDAGDHIWCSRYILERITEQAGVVL

SEQ ID NO: 32830 - protein, 388 aa, Triticum aestivum
  misc_feature (207)..(207): Xaa can be any naturally occurring amino acid
  misc_feature (252)..(252): Xaa can be any naturally occurring amino acid
  misc_feature (274)..(274): Xaa can be any naturally occurring amino acid
  unsure (1)..(388): unsure at all Xaa locations
VTLYPTECVQKSRLLPVRNSRDIVDPRVRANHPRLIFESQPASARARVWWCGVRAAAMAASVAFSPACRRLPCNPLSASASTGALSLVRLAGSSRRLRRACAMAEPADVLPGSGAGELDGLVPAGLLKDLPEGLAFHGAAGGSGGGGGHTMLDRGINAAIVLGAITFALTKLLTVDHDYWHGWTILEILRYMPEHNWSAYEEALKAXPLLVKMMISGVVYSLGDWIAQCCEGKPIFEFDRTRMVRSGLIGFXLQGSLSHYYYNLCESVFPCKDXWWAGPVRAAFDQTAWSGLWNTIYFVALGFLRWESPSTIFSELKSTFFPMLTAGWKLWPFAHIITYGVVPVEHRLLWVDCVEIIWVTILSTYSPQKSEARILDDSSTTDTRDNSR

SEQ ID NO: 32831 - protein, 62 aa, Passiflora vitifolia
GEVMPGQWEYQVGPSVGIDAGDHIWCSRYILERITEQAGVVLSLDPKPIEGDWNGAGCHTNY

SEQ ID NO: 32832 - protein, 546 aa, Thiomicrospira crunogena XCL-2
MNIISKSFRQLTRIIKINRVLTHYQIDKLVLSDTKYAWLIVANLLLPWNWRFQSKGNRGERIRLALEELGPIFIKLGQALSTRKDLLPEDISVELRKLQDDCPPFDEQHSISIIEKGLKRPIEEAYASFDPTPMASASIAQVHAATLYDGSEVVVKVVRPDIKPVIEQDVSIMKSLAQLLEAAVKESKRLHPTEVVEEFEKTILDELDMMREASNASQLRRNFEHSDLLYVPDIYWSHTNDNVMTMERIYGIRISEIDKLKAANIDLTDLSAKGVTIFFTQVFKHNFFHADMHPGNIFVLPDGRYAAIDFGIMGTLNPEDQRYLAENFLAFFNRDYLRVSELHIESGWVPADTRVNELESAIRSVCEPIWDRPLKEISFGLFLMRLFQTARRFGMEVQPQLVLLQKTLLNIEGLGRQLDDELDLWDTAKPFLEDWMQERVGLKSLVKNTKANLPFWIEQAPSLPGLLHSSLQKLSHANFDQQSEQIARLEQQLAKQQKADRNRAIAVLLFVVAAIPELTHVPYLMQQIWLQGLIALLGLYFLFKKP

SEQ ID NO: 32833 - protein, 345 aa, Sulfolobus solfataricus P2
MIIKPEPSLKDLSYIIENAGLKASDLLNMYKRMLIIRYFEESIRKIYHEGKNPFNMASGRIRGEMHLSIGQEAVAVGTLYDIRDEDVVVSTHRPHHHAIAKGVDLKGLAAEILGKATGLCKGKGGHMHLFDKSKNFACSGIVGASFPQAAGAAFAFKYLGKDNVAISFAGEGAANHGTFAETLNIASAWELPLIIVIEDNKYADSTPKSFVMSTTFHYQRGLAYNVPSYLVDGMDVIDVYSTSKKAIERARKGFGPTLIEALTYRYVGHFEGDGEEYRTKEEVEFWSSLDPIRRLENRLLRLNYADSDILARLREEARKQVQEAIDFAINSKYPELTDAFGGVFA

SEQ ID NO: 32834 - protein, 181 aa, Yarrowia lipolytica CLIB122
MPAVSPTLKTTASSELLTVAAGCFWGVEHMYRKHFADKGLVDAKVGYSGGNTEDPSYRKVCSGTTGHAEALQVSFEPAKVSYEQLVDFFFKIHDPTQANGQGPDIGSQYRSAIFTHSSEQQKIAEGVKQKLQDTWFKDPIATDIEPIQNWWDAEDYHQEYLFKEPGGYQCPTHFYRNTPQK

SEQ ID NO: 32835 - protein, 606 aa, Delphinium 'MagicFountains dark blue'
MDSCACIETQWPADELLVKYQYISDFFIALAYFSIPLELIYFVQKSAFFPYRWVLMQFGAFIVLCGATHLINLWTFSMHSKTVAMVMTIAKISTAVVSCATALMLVHIIPDLLSVKTRELFLKNKAEELDREMGLIRTQEETGRHVRMLTHEIRSTLDRHTILKTTLVELGRTLGLEECALWMPSRTGMNLQLSHTLRHQIPVGSTVSTNLPIVTQVFNSNQAIKIPHTCPLARIGPTAGRYVPPEVVAVRVPLLHLSNFQINDWPELSAKSYAVMVLMLPTDSARKWHDHELDLIEVVADQVAVALSHAAILEESMRARDMLMEQNIALDMARREAEMAIRARNDFLAVMNHEMRTPMKAVIALSSLLLEIELTPEQRVMIETVLKNSNLLAALINDVLELSRLEDGSLELDIRTFNLHGIFREVLNMIKPITAVKKLSLTLMLSPDLPVVAVGDEKRLMQIMLNVVGNAVKFTKEGYVSVIASVAKAESLREWQAPEIFMVSSDSHFHLCVQVKDSGCGISPQEIPHLFTKFTQLRSGQNRSNDGAGLGLALCKRFLNLMEGHIWVDSDGTDKGCTVTIIVKLGICEGQPEPSNLQVVSRPRLS

SEQ ID NO: 32836 - protein, 417 aa, Triticum aestivum
  misc_feature (138)..(138): Xaa can be any naturally occurring amino acid
  unsure (1)..(417): unsure at all Xaa locations
MASAAAATQVGTYFLRNYYNLLQQNPDVVHQFYSEASTMVRVDDLNGTNTTANSMMDIHSLIMSLNFTQIEIKTANFANSWGDGVLVMVSGLVQTKEYSNQRKFIQMFFLAPQEKGYFVLNDYFHFVDQEQVQPAQVXEYIHEESQTMQAVPVTSEENDAVDSYTYSEPPQQVVSQSDNWGDESLQEEPLSSFSNGMAMAPEEPAHPPPVQPHVEEPVGEPVKKTYASILRTAKAPPPFPIAQSVPVSKPHPTTEANQATLVTSSVAADKPKSDFYTEGHDEEESKSVYVGNVPQNVTEADLENEFKKFGQLIPDGVAIRSRKETGGYYAFVEFEELSGVHNALRASPLEINGRQIYVEERKPNSGIRGGRRGGGRGRFGGSGRGYARGDEYSGSRGKSNGYQRVPHHERGILGARN

SEQ ID NO: 32837 - protein, 256 aa, Delphinium 'MagicFountains dark blue'
MNHEMRTPMKAVIALSSLLLEIELTPEQRVMIETVLKNSNLLAALINDVLELSRLEDGSLELDIRTFSLHGIFREVLNMIKPITAVKKLSLTLMLSPDLPVVAVGDEKRLVQIMLNVVGNAVKFTKEGYVSVIASVAKAESLRDWQAPEIFMVSSDSHFHLCVQVKDSGCGISPQEIPHLFTKFTQLRSGQNRSNDGAGLGLALCKRFLNLMEGHIWVNSDGTDKGCTVTIIVKLGICEGQPEPSNLQVVSRPRLS

SEQ ID NO: 32838 - protein, 267 aa, Streptococcus thermophilus CNRZ1066
MKRNFDSVKRLVIKIGTSSLVLPSGKINLEKIDQLAFVISSLHNKGIEVVLVSSGAMGFGLNVLDLETRPAEVGKQQAVSSVGQVAMMSLYSQVFSHYQTKVSQLLLTRDVVEYPESLANAINAFESLFELGVVPIVNENDAVSVDEMDHATKFGDNDRLSAIVAKVVGADLLIMLSDIDGLFDKNPNVYEDATLRSYVPEITEEILASAGAAGSKFGTGGMMSKIKSAQMVFENQSQMVLMNGENPRDILRVLEGAKIGTLFKQED

SEQ ID NO: 32839 - protein, 143 aa, Schizosaccharomyces pombe
DLVGERGCLMGGINGLFLAQYQVLRERGHSPAEAFNETVEEATQSLYPLIGKYGLDYMFAACSTTARRGAIDWTPRFLEANKKVLNELYDNVENGNEAKRSLEYNSAPNYRELYDKELEEIRNLEIWKAGEVVRSLRPEHNKH

SEQ ID NO: 32840 - protein, 82 aa, Oxalis peduncularis
GINISGTNGEVMPGQWEYQVGPSVGIEAGDHIWASRYILERITEQAGVVLTLDPKPIDGDWNGAGCHTNYSTKSMRDEGISL

SEQ ID NO: 32841 - protein, 256 aa, Delphinium 'MagicFountains dark blue'
MNHEMRTPMKAVIALSSLLLEIELTPEQRVMIETVLKNSNLLAALINDVLELSRLEDGSLELDIRTFNLHGIFREVLNMIKPITAVKKLSLTLMLSPDLPVVAVGDEKRLMQIMLNVVGNAVKFTKEGYVSVIASVAKAESLREWQAPEIFMVSSDSHFHLCVQVKDSGCGISPQEIPHLFTKFTQLRSGQNRSNDGAGLGLALCKRFLNLMEGHIWVDSDGTDKGCTVTIIVKLGICEGQPEPSNLQVVSRPRLS

SEQ ID NO: 32842 - protein, 301 aa, Gluconobacter oxydans 621H
MPVMSENRRYLGELLSEFFAVAIIILFGDGVAAMYSLYDPSPYKSAYWGVCIVWGLGVTVAIYATGAISGTHANPAVTLSLAMFRGFSWKKVIPYMSVQVLGGFAGAALVYSLYVPVIDHFNMAHNLTRAVDGGSAGVFFTHPGDYVTVAHAFWDELVLTAALVFGIFAITCQYNTQAPQANSSALIIGLLVAIIGASCGYLDAWAINPARDFGPRLFCFFAGWGQSALPAPGNYFWVPVVAPLVGGPIGAALYQFGLRPFMPRYLEQTVTVAPDGINPAEPVLVVSNPDDPAFPVVNRVS

SEQ ID NO: 32843 - protein, 92 aa, Oxalis andina
  misc_feature (41)..(41): Xaa can be any naturally occurring amino acid
  unsure (1)..(92): unsure at all Xaa locations
GINISGTNGEVMPGQWEYQVGPSVGIEAGDHVWASRYILEXITEQAGVVLTLDPKPIEGDWNGAGCHTNYSTKSMRDEGGFEVIKKAILNLS

SEQ ID NO: 32844 - protein, 159 aa, Zea mays
  misc_feature (137)..(137): Xaa can be any naturally occurring amino acid
  unsure (1)..(159): unsure at all Xaa locations
MRKRERENPCSLCGHYHKYEEGEVCGICGHRKPDSSDVAAPQVQLSAFPTEILPEFLYLGSYDNASRSEVLKTQGISRVLNTVPMCQNLYRNSFTYHCLSDEKVLQFDDAIQFLDQCEKDKARVLVHCMSGKSRSPXVVVAYLMKRKGVRLAESHQWVS

SEQ ID NO: 32845 - protein, 473 aa, Burkholderia vietnamiensis G4
MSRLIVVSNRVAAGEDTRPSAGGLAVGVMDALKQTGGVWFGWNGEIVGTPDAAPAVRRDGNVTYATLGLTRRDYDQYYRGFSNATLWPVFHYRSDLARFDRQEYAGYLRVNAMLARQLAALLRPDDLIWVHDYHLLPFAHCLRELGVKNPIGFFLHIPFPSPDMLRVVPPHDELVKFMCAYDIAGFQTDADKRAFSDYIERRGIGTASDDGMLHAHGRVVKVAAYPIGVYPDAIAEAAVQYGGRKPVKMLRDALGGRKLVMSVDRLDYSKGLVERFQSFERMLAGAPDWQGRVSFVQIAPPTRSDVQTYQRIRETLEREAGRINGRFAQLDWTPIQYLNRKYERNLLMAFFRMSQVGYVTPLRDGMNLVAKEYVASQDPADPGVLVLSEFAGAAAELGGALLVNPYDHAQMADALARALAMPLAERQARHEENLAQLRNNDLSVWRDTFVADLRSVAAAASVTQRAGRRTAHV

SEQ ID NO: 32846 - protein, 506 aa, Symbiobacterium thermophilum IAM 14863
MSGIAGILGKPDKARIVRMLEQQAHRGPDGRGIWTATAGFGLGHVRLATVDVAGGGQPLSNEDGSLWLAMTGAIYNHGALRRELEGRHAFRTQSDAEVVVHLFEEYGPACVERLDGMFAIAIWGEEVGLFLARDPLGIQPLYWGEDEEGNVLFASEIKALVGETRFVREFPPGHRWRAGEPLEPYERLPAHTGELADPDQIVLALDRLLHAAVRKQLAADVPVGCLLSGGLDSSLVTAIARQHAEGELHTFAVGLEGSADLEQARMVAGELGTIHHERVLTEKEVTAVLPRVVDALESCDPALVRSAVATYYVAELAAGHVKVVLSGEGADELFAGYDYLAEFERDAGALGAELYEITAAMHNCNLQRVDRMTQVHGVEARMPFADQAVVDFAFRIHPRLKRRDGESKWILRRVAEQYLPPAIVWREKQKFAIGSGIAPLLEHYAAKAVPDAAFRRARSPKGVPFASKEEFLYWSLFRERYGREDVLALMGRSRSLNQGQRWVGAL

SEQ ID NO: 32847 - protein, 587 aa, Haemophilus influenzae Rd KW20
MQEQKLQENDFSTLQTFKRLWPMIKPFKAGLIVSGVALVFNALADSGLIYLLKPLLDDGFGKANHSFLKMMAFVVVGMIILRGITNFISNYCLAWVSGKVVMTMRRRLFKHLMFMPVSFFDQNSTGRLLSRITYDSQMIASSSSGSLITIVREGAYIISLFAVMFYTSWELTIVLFIIGPIIAVLIRLVSKIFRRLSKNLQDSMGELTSATEQMLKGHKVVLSFGGQHVEEVHFNHVSNDMRRKSMKMVTANSISDPVVQVIASLALATVLYLATTPLIAEDNLSAGSFTVVFSSMLAMMRPLKSLTAVNAQFQSGMAACQTLFAILDLEPEKDDGAYKAEPAKGELEFKNVSFAYQGKDELALNNISFSVPAGKTVALVGRSGSGKSTIANLVTRFYDIEQGEILLDGVNIQDYRLSNLRENCAVVSQQVHLFNDTIANNIAYAAQDKYSREEIIAAAKAAYALEFIEKLPQVFDTVIGENGTSLSGGQRQRLAIARALLRNSPVLILDEATSALDTESERAIQSALEELKKDRTVVVIAHRLSTIENADEILVIDHGEIRERGNHKTLLEQNGAYKQLHSMQFTG

SEQ ID NO: 32848 - protein, 271 aa, Mycobacterium leprae TN
MRIALAQILSGTDPVANLRLVREYTGQATDAGATLVVFPEATMCRFGVPLGPVAEPIDGPWANGVRQIATEAGITIIAGIFTPADDGRVMNTLIAAGPGTPNQPDTHYHKIHLYDAFGFTESRTVTAGHEPVVITVDDVQVGLTICYDIRFPALYTELARRGAQLIVVCASWGSGAGKLEQWTLLARARALDSMSYVAAVGQADPGGALTDSGPSSAAPTGVGGSLVASPLGEVVASAGTESKLVVADIDVDNVTTARENIAVLRNRSHFA

SEQ ID NO: 32849 - protein, 175 aa, Zea mays
  misc_feature (139)..(139): Xaa can be any naturally occurring amino acid
  misc_feature (146)..(146): Xaa can be any naturally occurring amino acid
  unsure (1)..(175): unsure at all Xaa locations
WRALPDRKSHTNTVDLLSWSATGPDASDSPAEASRLKLKPAAEITPAMFGAPVTDDWVDDLIKRYRKFCSGSKFKEMGGMGIFAEKSENGDAEASNPANKTSLRMYQQTVTGIRQISFSAEGRVSPKNASSIPEAANYXELSGTLXEDTDAKIHKQLTEANTKELTGSDIFGPPP

SEQ ID NO: 32850 - protein, 317 aa, Oryza sativa
MATLTVPSAVPPVADDCDQLRKAFQGWGTNEALIISILAHRDAAQRRAIRRAYADTYGEELLRSITDEISGDFERAVILWTLDPAERDAVLANEVARKWYPGSGSRVLVEIACARGPAQLFAVRQAYHERFKRSLEEDVAAHATGDFRKLLVPLISAYRYEGPEVNTKLAHSEAKILHEKIQHKAYGDDEIIRILTTRSKAQLIATFNRYNDEYGHPINKDLKADPKDEFLSTLRAIIRCFCCPDRYFEKVIRLAIAGMGTDENSLTRIITTRAEVDLKLITEAYQKRNSVPLERAVAGDTSGDYERMLLALLGQEQ

SEQ ID NO: 32851 - protein, 281 aa, Candida albicans SC5314
MGRENILKYQLEHDHESDLVTEKDQSLLLDNNNNLNGMNNTIKTHPVRVSSGNHNNFPFTLSSESTLQDFLNNNKFFVDSIKHNHGNQIFDLNGQGQSPHTLWIGCSDSRAGDQCLATLPGEIFVHRNIANIVNANDISSQGVIQFAIDVLKVKKIIVCGHTDCGGIWASLSKKKIGGVLDLWLNPVRHIRAANLKLLEEYNQDPKLKAKKLAELNVISSVTALKRHPSASVALKKNEIEVWGMLYDVATGYLSQVEIPQDEFEDLFHVHDEHDEEEYNPH

SEQ ID NO: 32852 - protein, 183 aa, Pseudomonas fluorescens Pf-5
MAMRWFAVPALLATLAGSAWAADCPPLLQGSLPKLHAKESIDLCQRFAGKPLVVVNTASFCGFAPQFKGLEALYQRYKDQGLEVVGVPSNDFKQEAKDGAKTAKVCYVNYGVTFTMTEPQKVRGADAVHLFKVLAQQSSAPKWNFYKYVVDRQGNVIASFSSLTKPDNPEFIEAVEKALASKS

SEQ ID NO: 32853 - protein, 552 aa, Mesorhizobium loti
MAAKDVKFSRDARERMLRGVNILADAVKVTLGPKGRNVVIDKSFGAPRITKDGVTVAKEIELEDKFENMGAQMVREVASKTNDIAGDGTTTATVLAQSIVQEGHKAVAAGMNPMDLKRGIDLAVTDVVATLIKNAKKIKTSEEVAQVGTIAGNGDESVGKMIAEAMQKVGNEGVITVEEAKTAETELEVVEGMQFDRGYLSPYFVTNADKMVADLEDVYILLHEKKLSNLQTMLPVLEAVVQTSKPLLIISEDVEGEALATLVVNKLRGGLKIAAVKAPGFGDRRKAMLEDIAILTGGQVISEDLGIKLENVGLNMLGRAKKVSISKENTTIVDGAGKKEEIQGRVAQIKQQIEETTSDYDKEKLQERLAKLAGGVAVIRVGGATEVEVKEKKDRVDDALNATRAAVEEGIVPGGGVALLRASLSINAVGANSDQAAGINIVRRALQAPARQIAANAGAEASIVAGKILENKGATFGYNAQTGEYGDMIAMGIVDPVKVVRTALQDAASVAGLLVTTEAMIAEAPKKESAGGGGMPGGMGGGGMGGMGGMDF

SEQ ID NO: 32854 - protein, 497 aa, Mesorhizobium loti
MKGDDGLTVTQSLTRRLKNPELFDDLAGVPGRKAEQSTRRFSVFNPSTGELLAELPDMDVRDVSKAIDKAEAAQEHWAALTARERSDILWEWHQLILDHSEDLAAILTAEMGKPLAEAKSEIAHAAAYLQWYAEEANRIYGETISPPSNDRRMLVIKQPIGVVGAITPWNFPASMVARKISPALAAGCAIVLKPAEQTPLVAGAMFTLARMAGFPDGVLNLIYASEGDAVGRELCSNPKVRKISFTGSTEVGRLLMRECSDQIKRTSFELGGNAPFIVFDDADVDAAVDGALQAKFRNAGQTCVSANRLYVQSSVYNEFCDKFTKRVSALRVGDGFEPEVAIGPLIDKCALAKIEDHIRDAVRQGGKIRCGGNRIGESGTFFEPTVITDVERTMRVAQEETFGPLAPIIRFNDPDQVVREANDTIYGLAAYFYASNLKRVWRVAETLEYGMVGINTGRMSSEAAPFGGMKQSGIGREGSRHGLEDYLEMKYLCMGGL

SEQ ID NO: 32855 - protein, 423 aa, Pyrobaculum aerophilum str. IM2
MLFERAKSVFPGGVNSPARALKHLPSPLVAKAASGAYLYTDRGKLVDYCMAFGAIILGHAHPRVKKAVEEQLEKGWIYALLTEQEVEFAERIRRHMPSVEKMRIVNTGTEATMSAIRAARGYTKRDVIIKFEGNFHGSHDYVLVKAGSGAATWGIPTSAGIPQEVARLTVVVPYNDIDAFIKAVREVGDRLAAVIVEPVAGNYGLIIPDVEFLKALREETQRAGALLIFDEVITGFRVGLGGAQGLFGIRPDLTTLGKVVGGGFPIGIFGGRGEVMDLVAPSGPVYNAGTYNAHPVSIAAGLAVLKELETGEPYRIANEAAERLAKGVEDVAGRLGFDVVVKRMASMFQFYFKKGDVKTPQDVRESNEKMYLKLHEIALKHGVYLTPSQYEVNFTSAAHGREVVEETLAALEKSFQELQREIG

SEQ ID NO: 32856 - protein, 526 aa, Triticum aestivum
MSAIKPPPPDRPPQAARLPSPSSSSSAAAAAKQGGTGSRGLLMGRYELGRVLGKGTFAKVYHARHVQTGESVAIKVLDREKAVRSGLVSHIKREIAVLRRVRHPNIVHLFEVMATKTKIYFVMELLVRGGELFSRVSKGRLKEDIARRYFQHLISAVGFCHTRGVFHRDLKPENLLVDEAGNLKVSDFGLSAVAEPFQPEGLLHTFCGTPAYVAPEVLARRGYEGAKADIWSCGVILFVLMAGYLPFHDQNLMAMYRKVYKGEFRCPRWFSKDLTSLIMRFLDTNPSTRITLPEVMESRWFKKGFRPVKFYIEDDQLYNVIDAENDMLDLGLPDPLPQPLPPPPPSPSPQQVDGDDSGSESDASVVSCPATSSFEERHRLRGPLPRPASLNAFDIISFSRGFNLSGLFEEKGDEVRFISGEPMPDIITKLEEIANVKSFAVRKKDWRVSLEGTREGVKGPLTICAEIFELTPSLVVVEVKKKAGDKEEYDDFCNKELKPGMQHLVHQMVPVPNTPTISELAERPSR

SEQ ID NO: 32857 - protein, 464 aa, Yarrowia lipolytica CLIB122
MSMGDDDRAYHHQMSVIVTAANANLPGHGKGPLVSVSSELLTKESHLMYDFERYVARNPSRFNQKVLDNLRIHHTYTRSSLDTLVNEFLAEITPACANRDAPSMLPSKMGSLPNDSLTGSVLSIDIGGSTLRGSMVDLEKMTVTDSVQHLIPDTVKNYSGSDFFDWIVERIMPLVKDCTATIIPIGLSWSFPIFQPHISSGLIQTMGKGYGVADEIINQDLKELFETHFASHGKTVEVGAILNDSVASLVAANYISNAPLCLILGTGINVSALIPKDQLKKTEQDQDKYIVNCEASLFGQCVSKTCWDLELDQALERPGFQPLESLSSGRYLGEICRLILRDLSKTGFLSRPDVGPYELTTAEVADLETADSGELDYVQDIILATSDRSAALASAFITAIYKLTGSDCESPSIAYDGTMVQKYPNFRPRMQQRLREQGLNVTFVAVEEGTVYGSAIACASQLSQ

SEQ ID NO: 32858 - protein, 199 aa, Vibrio vulnificus CMCP6
MNTKPSTYSNGCLGRDILHILSSPCVQESVKEIGAMCGLIERINKGGVMLTWQDIITFTHQGNPQPDTVVRKSDAQWREQLGEAQYYVMRQHGTERPFSNQMCELFEPGLYRCAGCQNLLFDSGSKFDSRTGWPSFAQPMKSNAISYHLDETLARPRIEVRCNQCESHLGHVFPDGPAPSGLRYCVNAVSIEKVNQEAS

SEQ ID NO: 32859 - protein, 268 aa, Triticum aestivum
  misc_feature (176)..(176): Xaa can be any naturally occurring amino acid
  misc_feature (205)..(205): Xaa can be any naturally occurring amino acid
  misc_feature (211)..(211): Xaa can be any naturally occurring amino acid
  misc_feature (218)..(218): Xaa can be any naturally occurring amino acid
  misc_feature (225)..(225): Xaa can be any naturally occurring amino acid
  misc_feature (230)..(230): Xaa can be any naturally occurring amino acid
  misc_feature (242)..(242): Xaa can be any naturally occurring amino acid
  misc_feature (250)..(250): Xaa can be any naturally occurring amino acid
  misc_feature (257)..(257): Xaa can be any naturally occurring amino acid
  misc_feature (262)..(262): Xaa can be any naturally occurring amino acid
  misc_feature (265)..(266): Xaa can be any naturally occurring amino acid
  unsure (1)..(268): unsure at all Xaa locations
MQIFVKTLTGKTITLEVESSDTIDNVKAKIQDKEGIPPDQQRLIFAGKQLEDGRTLADYNIQKESTLHLVLRLRGGMQIFVKTLTGKTITLEVESSDTIDNVKAKIQDKEGIPPDQQRLIFAGKQLEDGRTLADYNIQKESTLHLVLRLRGGMQIFVKTLTGKTITLEVESSDTIXDNVKAKIQDKEGIPPDQQRLIFAGKQLEXDGRTLXADYNIQXESTLYLXAPPPXGDGKFFGKTLTXRTLPLEVXSSDPLEXVRAKXQDXXGI

SEQ ID NO: 32860 - protein, 175 aa, Vibrio vulnificus CMCP6
MTTQLATFGGGCFWCTEAMFSQLKGVLDVKSGYSGGHVKHPCYREVCSGKTGHAEVIQVSFDPDIIRYEALLLVHLTTHNPTTLNRQGADRGTQYRSIILAHDEEQKRIAQQVIAEVAPYFDEPIVTEVVDFEQFYQAETHHQNYYSDNPEKQYCAVVIEPKLRRLRERYADLLG

SEQ ID NO: 32861 - protein, 312 aa, Acinetobacter sp. ADP1
MSSTPPLLTVIGSINVDHILGLEHFPHPGQTLNGQSYQVAFGGKGANQAVAAGRSGANTSFIACVGSDAVGEQIRHQLIKDNIDTQAVRAVEGFTTGVALIFVNQHAENFIGIHAGANAALDIAYIDQHAELIQRSSAILLQLETPLATILHAAKLAKAAGVKVILNPAPACELPEELLRLVDIITPNETEALSLTNVIVHDDHDAAEAANVLHQKGIKTVVITMGSRGVWLSEYGQGKMIEGFKVSAIDTIAAGDTFNGAFVTALLEGKTAQDAARFANAAAAIAVTRSGAQPSVPWRQEIDLFLSAQTAL

SEQ ID NO: 32862 - protein, 223 aa, Gluconobacter oxydans 621H
MISQTAAAPLPRNCTFEAADWDLLSRCWHPVALVRELEEKPLGVTLLDAPLVLYRASGTIVIADDLCPHRDVPLSMGTGNGETIACAYHGFRFGNGGKCVRVPAHPDSAIPSKLNLRTYPAVERYGLIWTCLNSDGTVTIPPMPHWDEPEYQQINCPWIDIAGFAGRQVEGFIDVAHFAFVHTETFADPDNPVVPSYMPRMTKDGFEAEYRSTVSNFPVGHED

SEQ ID NO: 32863 - protein, 444 aa, Triticum aestivum
MAVIGTAGAEVLIPLAAVIGIAFAVFQWYVVAKVPVPSHDGEDGGGAAAQKGRSGHDESAEDGVDYRQVEARCAEIQHAISIGATSFLFTEYRYLAVFMAGFAVVIFMFLGSAQRFSTRPEPCTYDPARMCRPALANAAFSMIAFLLGALTSVMSGYLGMRVATFANARTALEARRGVGRAFVVAFRSGAAMGFLLASSALFVLYVAINLFGVYYGDDWGGLYESITGYGLGGSSMALFGRVGGGIYTKAADVGADLVGKVERNIPEDDPRNPAVIADNVGDNVGDIAGMGSDLFGSYAESSCAALFVASISSFGTEHNFAAMMYPLLISAMGIVVCLATTVVATDLAEVKTVEEIGPALKRQILISTVLMTVGIAIGSFLVLPHSFTLFDFRGRKLPRTWYLFIWVSAVLRAGLVIGYVTGYFTGHQVTALPGARATAGRMKL

SEQ ID NO: 32864 - protein, 547 aa, Phaseolus vulgaris
MMEEEQKLVKGGTNLEGSEAKLELTVDEVVEEYVGSLGFSQLVHVLLVSLAWIFDAQSTLVTIFSDAQPSAWRCKSGFCNNSSSSSSTGSVCELVPGTWEWVGGHTSSIIAEWNLICDRRFLAAVPASVYFLGSLIGSGVYGHLSDTWLGRKRSVQLSCILTSITAFATSLSPNIWTYAFFRFTNGFARSGIGICCLVLTTESVGRKWRGQVGQYGFFFFTIGFLTLPLVAYPTRTHWRSLYKLLSLLPLAYSVLILPLVSESPRWLLIRGRTKEALQVLDRFARLNGKQKLPTNLTLTNPSGSSNVAPCTTSEGGERTPNNKENLWTTKWAAIRMVTVMLAGFGVGFVYYGVQLNVENLNFNLYVSVALNALMEIPAVVIGTFLLGFTNRRLLLSVSSYIAAVSSILCTFFSHRGKTSKVHSNHGGSWAQLIIEAIGFMGASTTFDILYIYCVELFPTNVRNFAVSMLRQAIMLGASVAPLLVVLGRLSPSLSFFVFGAFSISSGVLSLWLPETRNAPLYETLKQQEEEEKHNWVSHNDCALELGQ

SEQ ID NO: 32865 - protein, 949 aa, Bradyrhizobium japonicum USDA 110
MNPVKELEKHGQAVWLDFLARGFIAKGDLKRLIDTDGVKGVTSNPSIFEKAIGSSDEYDAPIGKALKRGDRSVADLFEAVAVEDIQNAADVLRPVYDRLKGGDGYVSLEVSPYLAMDTTGTVAEARRLWKDVNRKNLMVKVPATPEGLPAIETLIGEGISINITLLFSRDVYLQVAEAYLAGLEKYVAGGGDPSHVASVASFFVSRIDSVVDKQLDEKIARANDPSEKERLAALKGKVAIANAKVAYQDYKRLFSGSRWDKLAARGAKPQRMLWASTGTKNKDYSDVLYVEELIGPDTINTVPPATLDAFRDHGKPRDSLEENIDDARRVLEELERSGVSLDAITEELVKDGVKLFADAADKLYGAVAHKRATVLGPALDRQQLSLGDGLGKAVAKSTEEWRASAKIRRLWQRDKSVWTGADEDKWLGWLDSAAKADVADYEDYASRVKGQKFSDAVVLGMGGSSLGPEVLAETFARKSGFPKLHVLDSTDPAQVRAMEAKIDIANTVFIVSSKSGGTTEPNAMKDYFHDRVAQAVGPKVKTGHRFIAVTDPGSSLEKSAKTLNYARIFHGEPSIGGRYSVLSPFGLVPAATAGIDVKTFVKHALAMARSCGPDVPPSENPGVQLGLAMGLAGLEGRDKVTILSSKKITDFGAWAEQLIAESTGKEGKGLIPIDGEPLGEAAAYGNDRFFIDIRTEGEADAAHDSKLAAIEAAGHPVVRIVMKSIDHLGQEFFRFEMATAVAGSILGINPFDQPDVEAAKIKTRELTASFEKTGALPAEQPVVSTDEADLYTDEANATALRAAGANGDLTSWLKAHLSRSGHGDYVALLGYIARDKATIDALQAMRLEVREKRHVATCAEFGPRFLHSTGQAYKGGPDSGVFLQITADDAKDLAVPGQKASFGVIKAAQARGDFDVLTERGRRALRVHLKGGLKKGLAALNAALNDALN

SEQ ID NO: 32866 - protein, 92 aa, Glycine max
MERKGRRRRRKRKGFLDKIKEKLPGHKKTEEATAITPPPPPPVASLEHGEGAHHEGEAKEKKGILEKIKEKLPGYHSKTEEEKEKEKESGAH

SEQ ID NO: 32867 - protein, 667 aa, Novosphingobium aromaticivorans DSM 12444
MASNDKTDSGDAPLIDLNDASIKKLIARAKRRGIITYDELNEALPQDQMSSEQIEDIMAAISEMGVNIVESDEDAVDPEERAQDDELDEAETVEDRPDVIKRKETVERTDDPVRMYLREMGAVELLSREGEIAIAKRIEAGRDTMIMGLCESPITFHAIIQWSEALNAGEMQLREILDLDAMLSKEPQPENLSEDGEEAEPEISEATAGPTFKEEEDIEEEETADDEDDELRERRARPAEEEEEDNTLSLAQMEAQLKPAALERFAEITSLFRQFEKIQAERLNALGMGNDFPAARETQYQKLREDLTAQVESVQFHASKIEYLVDNLYAFNRRLTTLGGQMLRLAERHKVPRKDFLDMYVGRELDDGWLQGLAGRDKRWAAFAANEATPVERIRAEISDIASATGMSLGEFRRIVNMVQKGEREARIAKKEMVEANLRLVISIAKKYTNRGLQFLDLIQEGNIGLMKAVDKFEYRRGYKFSTYATWWIRQAITRSIADQARTIRIPVHMIETINKLVRTSRQFLHEQGREPTPEEMAERLSMPLEKVRKVMKIAKEPISLETPIGDEEDSHLGDFIEDKNAIIPVDAAIQANLKETVTRVLASLTPREERVLRMRFGIGMNTDHTLEEVGQQFSVTRERIRQIEAKALRKLKHPSRSRKMRSFLDQ

SEQ ID NO: 32868 - protein, 238 aa, Glycine max; identical to SEQ ID NO: 1393

SEQ ID NO: 32869 - protein, 338 aa, Cryptococcus neoformans var. neoformans B-3501A
MPSFQIPKTMKAIQVDAPGGPEVNVLREIPVPTPNPDEVLIKVQYTGVNYIDTYYRSGLYPKKFPYTVGQDAVGTLVQGPSSPDVKFDIPLGTTVFTPAGSSFAEYLVAPSSRVGVVPEGVDPKDGVSWSTVGLTALALAKESYPVKKGDWVLIRAAAGGVGLVLTQIVKYLGGHVIGTVSSQDKAELVKSYGADLVLLSTDPSEDNVKKILEVTNGGVHGVYDGVGKDTWEEDFLVVRRKGTIVTFGNASGAVPAFAPLKLTPKALKVTRPTVWSIVTTPEEFKEYTTELVDIVKKAGLKFEVYKVYELTQEGVVQAQKDITSRGTTGKLLIHVADK

SEQ ID NO: 32870 - protein, 609 aa, ASPERGILLUS NIDULANS FGSC A4
MYLSTVLFPLLALNLGLSHARFVRETLELTWEYGSPNGGTPREMVFTNGEYPGPDLIFDEDDDVEVLVINNLPFNTTVHWHGLEMRETPEADGVPGLTQTPIEPGATFTYRFRAYPAGTFWYHSHYKGLMQDGQVGAMYIRRKPDALRPYAVITEDPRELAEIQYAEDNPYLMLATDWTYLTSAEYHNIEVESGYNVFCVDSLLINGRGSVYCPGYQYLEEVSDDGLTAVLEGTHLTEKGCLQPDLHNVQGDYGPWNLSAVPTEVVFNCTPSSVEPPVIYVDPEFNGWVSLNFIGGAAQKAITFSVDNHPMWVYEVDGQFVEPREVEMVGVYSGARYAVMIKLDQTPGDYAIRIAVNGGDQVMSVYAILSYVNQDWIHRENVPKAAIGPHTDTVGYMNYGGGNTSADVRQLLFTENLPAFGVPPPPPSSEVSTTLRTGMIRVNNSYSWSLGNNVLYEPEMTSSTPLLFEPDPLAVIAPKYALTTENNTWVDIVLEITADPRDLIHPPHPIHKHGNRAYIIGNGVGKFRWENVSAAEAEVPDLFYVNETAALRDTFVTDFFDSRLMDGAWIVIRYFVQDKFPSILHCHIASHQMGGMALALLDGVDVWDS

SEQ ID NO: 32871 - protein, 382 aa, Metarhizium anisopliae
MSFAGMLNRLHGQPESYDKKSKYKFGRTLGAGTYGVVREADGPSGKVAIKIILKKNVKGNEKMVYAELDMLQRLTHPHIVKFVDWFESRDKFYIVTQLATGGELFDRICDQGKFTEVDASQTIRQIMTAVDYLHDNDVVHRDLKPENLLYVTRDPDSDLVLADFGITKTLDIKEETLTTMAGSFGYAAPEVMEQKGHGKPVDMWSMGVITYTLLCGYSPFRSENLRDLLRECTAAPVPFHERYWKDVSQDAKDFILVLLVPEPEKRWTSKEALGHIWLSGKNATDHNLLPELEAYRRRARLRRVIEIVKLQNRIAKLKEHEEDPSESDMGDAQGASDNHKGDGSRLHALGLFAVREAKQKQESLQVEEELEKESRRRSFSNA

SEQ ID NO: 32872 - protein, 481 aa, Xanthomonas axonopodis pv. citri str. 306
MFPGEPMSSVSIDGAPDAGENTRFIILISCVATIGGFLFGFDSGVINGTVDGLKQTFQSTAAETGFEVASMLLGCAIGAFFAGRLADRWGRRAVLIISAALFLLSAIGAGASHSSAFFIFARVMGGFAVGAASVISPAYIAEVASARYRGRLATMQQIAIISGLFCAFLSNYLLANAAGASTEPLWAGQAAWRWMFWMQAVPSILFLLLLLVIPESPRYLVVKGRREQALVVLKRLYGNAAAQTKLGEISASMAADQHKPKFSDLINKATGKIRPIVWIGIGLAVFQQLVGINVVFYYGAVLWQAVGFSEQDALLINVLSGGLSIGACLVTVMLVDKIGRKPLLWIGSAGMAVSLALVTYAFATASLDPNGKLAMSDAMGMLALVAANVYVVFFNASWGPVMWVMLGEMFPNQIRGSGLAIAGAAQWTSNFAITVSFPILLGSIGLAGAYGIYTVAAFISVFFVLKYVYETKGKELEQMEG

SEQ ID NO: 32873 - protein, 391 aa, Candida albicans SC5314
MFLKNIFIALAIALLVDASPAKRSPGFVTLDFDVIKTPVNATGQEGKVKRQALPVTLNNEHVSYAADITIGSNKQKFNVIVDTGSSDLWVPDASVTCDKPRPGQSADFCKGKGIYTPKSSTTSQNLGTPFYIGYGDGSSSQGTLYKDTVGFGGASITKQVFADITKTSIPQGILGIGYKTNEAAGDYDNVPVTLKNQGVIAKNAYSLYLNSPNAATGQIIFGGVDKAKYSGSLIAVPVTSDRELRITLNSLKAVGKNINGNIDVLLDSGTTITYLQQDVAQDIIDAFQAELKSDGQGHTFYVTDCQTSGTVDFNFDNNAKISVPASEFTAPLSYANGQPYPKCQLLLGISDANILGDNFLRSAYLVYDLDDDKISLAQVKYTSASNIAALT

SEQ ID NO: 32874 - protein, 417 aa, Candida albicans SC5314
MFLQNILSVLAFALLIDAAPVKRSTGFVTLDFNVKRSLVDPKDPTVEVKRSPLFLDIEPTEIPVDDTGRNDVGKRGPVAVKLDNEIITYSADITIGSNNQKLSVIVDTGSSDLWVPDSNAVCIPKWPGDRGDFCKNNGSYSPAASSTSKNLNTPFEIKYADGSVAQGNLYQDTVGIGGVSVRDQLFANVRSTSAHKGILGIGFQSNEATRTPYDNLPITLKKQGIISKNAYSLFLNSPEASSGQIIFGGIDKAKYSGSLVDLPITSDRTLSVGLRSVNVMGQNVNVNAGVLLDSGTTISYFTPNIARSIIYALGGQVHYDSSGNEAYVADCKTSGTVDFQFDRNLKISVPASEFLYQLYYTNGEPYPKCEIRVRESEDNILGDNFMRSAYIVYDLDDRKISMAQVKYTSQSNIVAIN

SEQ ID NO: 32875 - protein, 218 aa, Thiomicrospira crunogena XCL-2
MCHQCDCDTSIEQLLQNNRDWVDEINAIRPDFFETLSHQQKPEYLWIGCSDSRVPANELVKMDPGTIFVHRNIANLVNSSDMNVLSVIQYAVEILKVKHIIINGHYGCGGVIASMEEHNPSLIDHWVRPIRKYYQRKQTELDALPYEERVNRLCEINVVEQVRNICHVPAVKNAWKKGQHLAIHGFIYNIKDGRLKNLNVSIDDIESAEKAVLRATDS

SEQ ID NO: 32876 - protein, 250 aa, Bradyrhizobium japonicum USDA 110
MMAAAGKPKLIVAADAEALAQAAAERVMARIGANPGRIAICLTGGSSPKKLYQLLGGDSWRGKIPWDRVHWFIGDERFVAENDPLNNMAVARATFLDRNAPSGHVHPIPTATENPDQGAAAYARELQAFYGSESLDPARPLFDLVLMGAGPDGHTASLFPGYPEIEESKRWVVGVPKANVAPFVPRVSLTLPVLASCREMLFEIAGHDKQPILTRLLNGETLPAVRARSNGETVWLVDQAALPEEIRGPR

SEQ ID NO: 32877 - protein, 399 aa, Bacillus cereus G9241
MSKVKEISKRKLLGIAGLGWLFDAMDVGMLSFVMVALQKDWGLSTQEMGWIGSINSIGMAVGALVFGILSDKIGRKSVFIITLLLFSIGSGLTALTTTLAMFLILRFLIGMGLGGELPVASTLVSESVEAHERGKIVVLLESFWAGGWLIAALISYFVIPKYGWEVAMILSAVPALYALYLRWNLPDSPRFQKVEKRPSVIENIKSVWSGEYRKATIMLWILWFSVVFSYYGMFLWLPSVMVLKGFSLIKSFQYVLIMTLAQLPGYFTAAWFIERLGRKFVLVTYLIGTACSAYLFGVAESLTVLIVAGMLLSFFNLGAWGALYAYTPEQYPTVIRGTGAGMAAAFGRIGGILGPLLVGYLVASQASLSLIFTIFCGSILIGVLAVIILGQETKQRELA

SEQ ID NO: 32878 - protein, 528 aa, Arabidopsis thaliana
MNENHIQSDHMNNTIHVTNKKLPNFLLSVRLKYVKLGYHYLISNAVYILILPVGLLAATSSSFSLTDLTLLYNHLLKFHFLSSTLFAALLIFLTTLYFTTRPRRIFLLDFACYKPDSSLICTRETFMDRSQRVGIFTEDNLAFQQKILERSGLGQKTYFPEALLRVPPNPCMSEARKEAETVMFGAIDAVLEKTGVNPKDIGILVVNCSLFNPTPSLSAMIVNKYKLRGNVLSYNLGGMGCSAGLISIDLAKQLLQVQPNSYALVVSTENITLNWYLGNDRSMLLSNCIFRMGGAAVLLSNRSSDRCRSKYQLIHTVRTHKGSDDNAFNCVYQREDNDDNKQIGVSLSKNLMAIAGEALKTNITTLGPLVLPMSEQLLFFATLVARKVFNVKKIKPYIPDFKLAFEHFCIHAGGRAVLDEIEKNLDLSEWHMEPSRMTLNRFGNTSSSSLWYGLAYSEAKGRIKRGDRTWQIAFGSGFKCNSAVWRALRTIDPSKEKKKKTNPWIDEIHEFPVPVPRTSPVTSSSESR

SEQ ID NO: 32879 - protein, 395 aa, Triticum aestivum
  misc_feature (236)..(236): Xaa can be any naturally occurring amino acid
  misc_feature (298)..(298): Xaa can be any naturally occurring amino acid
  misc_feature (313)..(313): Xaa can be any naturally occurring amino acid
  misc_feature (367)..(367): Xaa can be any naturally occurring amino acid
  misc_feature (370)..(370): Xaa can be any naturally occurring amino acid
  misc_feature (376)..(377): Xaa can be any naturally occurring amino acid
  misc_feature (384)..(384): Xaa can be any naturally occurring amino acid
  misc_feature (387)..(387): Xaa can be any naturally occurring amino acid
  unsure (1)..(395): unsure at all Xaa locations
GGPLPHLEATTGFPGPDPAGRGRGGAGVMSAEHGAAAADGAGAEPPPPAPMPGLVASADAAGQRSLPTPFLTKTYQLVEDPAVDDVISWGEDGSTFVVWRPAEFARDLLPKYFKHNNFSSFVRQLNTYGFRKIVPDRWEFANDCFRRGEKRLLCDIHRRKVVQSAGLAAAAAAAAAGAVTVATAAIPMALPVTRSGSPEPQLSSEEQVLSSNSGIPREPPRWPHRPAQAPAWGGGXAGSSSGDMSGEENDRLRRDNARLTRELGQMKKLCNNIVSLMSKFASSQQPDGGPGVAVVRGXNCSGESALAPPPPSXAGILDLMPSCSALATAAGSPSTAAGYRRRLVGVSTGLKRARDKKKRRTGGVSTXHTXGLKPRXXNGAQAGXRRXLAITASYG

SEQ ID NO: 32880 - protein, 315 aa, Silicibacter pomeroyi DSS-3
MSNAELVCVGEPLFELSNVGPGKWNAGVGGDVSNVAVAAARQGTRSTMLTQLGDDDFAAEIRNSWAAEGVNDAYVRTLVGAETGMYFITHDAGEHKFEYRRSGSAASQVRPEDLSEGVFDNAAIVHLSGISQAISASARATTDKAIAIAKKKGVKVSYDPNLRLKLWPLEEARKVILDTVRKVDIFLPGLDDARILTGIEEPVDIVRFFADLGAPIIALTMGDRGVLAANDGDMRFISSPKVDAVDATGAGDCFDGAFLSQLINEYSVFDAAAYAATAAAISIQGHGAAKSIPNREAVLALQEQCRGEIWTAPEI

SEQ ID NO: 32881 - protein, 96 aa, Vibrio parahaemolyticus RIMD 2210633
MKIRPLNDKLIVERQEVENKSEGGIVLTSQSVKKSNRGKVIAVGLGKRFENGERAAMEVKVGDQIIFNDGYGVKTEKIDGAEYLILSESDVLAIVE

SEQ ID NO: 32882 - protein, 137 aa, Triticum aestivum
MVSSMKHHRDEAGASSSLSLSLALGAVADRSKKMRRGGVDGEFVCKTCGRSFPSFQALGGHRTSHLRGRHGLALGLAAGSDKPATKKTTDQKQAHQCHICGLEFEMGQALGGHMRRHRDEAVATTAQAPPVLLQLFV

SEQ ID NO: 32883 - protein, 532 aa, Vibrio parahaemolyticus RIMD 2210633
MAAKDVLFANDARQKMLKGVNLLADAVKVTLGPKGRNVVLDKSYGAPTITKDGVSVAKEIELKDKFENMGAQMVKQVASKANDEAGDGTTTATVLAQSFINEGLKAVASGMNPMDLKRGIDKATEAAVEKLREMSKPCSDKESITQVGSISANSDRAIGEIIAEAMEKVGRNGVITVEEGQGLDNELSVVEGMQFDRGYLSPYFITNQENGSVELDNPYILLVDKKVSSIRELLPVLEEVAKSSRSLLIIAEDIEGEALATLVVNNMRGIVRATAVKAPGFGDNRKAMMEDIAVLTAGTVISEEIGLELEKATLEQLGSAKKVTITKDTTTIVGGAAEASAIADRVASIEKQIETTTSQYDKDKLQQRVAKLSGGVAVIKIGAATEVEMKEKKDRVDDALHATRAAVEEGIVAGGGVALTKIAKELADLKGDNDDQNVGIRVALRAMEEPLRQIATNAGDEASVVANAVKAGDADYGYNAATGEYGNMIEMGILDPAKVTRSALQFAASVAGLMITTEAMITNHVEDKELDI

SEQ ID NO: 32884 - protein, 1098 aa, Bradyrhizobium japonicum USDA 110
MNVLSSVDTKKIEAAEVVDELWYKDAIIYQLHVKAFADSNNDGIGDFAGLTEKLPYLQELGVTALWLLPFYPSPGRDDGYDIADYGSVNPDFGTMKDFKRFIQEAQKRGLRVITELVVNHTSDQHKWFKRARRSHPGSSARNWYVWSDTDQKYQGTRIIFTDTEKSNWTWDHEAGAFYWHRFFSHQPDLNFDNPRVVSALIQVMKRWLDAGVDGFRLDAIPYLCEREGTSNENLPETHAIIKRLRQELDSYSKGKLLLAEANQWPEDVQEYFGRGDECHMAYHFPLMPRIYMAIAQEDRFPITDILRQTPDIPASCQWALFLRNHDELTLEMVTDVERDYLWTTYANDPRARINVGIRRRLAPLMDNDRRKIELMNSLLLSFPGTPIIYYGDEIGMGDNIYLGDRNGVRTPMQWSPDRNGGFSRCDPARLYAPLIMDPVYGYESVNVEAQSRSLSSLLSATKRLISVRKSTLAFGRGTMTFIRPANRAVLAYVRQYHDEVILCVANLSRAAQATELDLSPWKDRIPQEMLGRTRFPPIGELPYMITLGPYGFYWFHLMERDKSEPVTPRAVPEFETLVVPVNSTWVSLARERGVFEHDVLPGFLSRTRWYPEHDPKHIKPTLTSAVPFCDIGDNRPWIAFFEAAQQDAVATRYVLPMQIEWVRFDRERFNPKALAAVRQGAREGTLLDVATDQIFIGLFLRNLSQNLVVEENNLRLEFKATSRFADYTIKEPGRIRAIEQSNSTALVDNQYVAKIYRQLEGGTNPEIEIGHYLTEVARFANTPALLGSVELVEGDQRSTLGVLHAYVENQGDGWAVTTGYLDRYIDEQRVLSAGEAPRETQEQSPYLHFVMQIGRRLAELHVALAAARPDDLAPEPIGSAHIRHWVSDLKARAGRVFERLADSRDGLREADRPLIDQLTALRTSLPDRLNALLPSDIDGLNIRHHGDFRLGQILIVKDDICIIDFDGDPRLPLADKRRKLPAARDVAGLIRSIDLSVNVALGRALSGGTDEQSRLVAALSEWRERATTTFLSAYREAMTDRRLWPEDPQSAEGLLRFFLLDQAFDEVEYELSHRPEGLHAPLTGLLRILSNAESEAHA

SEQ ID NO: 32885 - protein, 241 aa, Zea mays
RNGLLKKAYELSVLCDAEVALVVFSSRGRLYEYANNSVKATIERYKKAHAVGSSSGPPLLEHNAQQFYQQESAKLRNQIQMLQNTNRHLVGDSVGNLSLKELKQLESRLEKGISKIRARKSELLAAEINYMAKRETELQNDHMNLRTKIEEGEQQLQQVTVAQSVAAAAATDVELNPFLEMDTKCFFPGGPFATLDMKCFFPGSLQMLEAQQRQMLATELNLGYQLAPPDTDVANNNPQQF

SEQ ID NO: 32886 - protein, 129 aa, Arabidopsis thaliana
  misc_feature (119)..(119): Xaa can be any naturally occurring amino acid
  unsure (1)..(129): unsure at all Xaa locations
MGRLFLVNLEGKSYSCKHCKTNLALCDDVFSKSFQSRHGKAYLFSKVVNVYAGKKEDRMMMTGMHTVVDIYCVKCGSYVGWKYEFAFEKNQKYKEGKSVLERYKVWGPDGNNYWVAQEXEAGDSDTDDA

SEQ ID NO: 32887 - protein, 179 aa, Glycine max
VSSEFGSSLFWGFATPKVLFLWGCFPFQLGLNAIPTLTHLAPLSIFADFVDIVAKSVVMVDDVFVFMKNRPPLKAFGGWSVFLYGLGVAVYAFEGIGLVLPLEAEAKDKEKFGGVLGVRMFLISLLYASFAALGYLAFGEGTQEIITTNLGQGVVSALVQLGLCINLFFTFPLMMNPVY

SEQ ID NO: 32888 - protein, 273 aa, Zea mays
FPADREALPHHHHPMLNMMTDLSCGPSSKVKEQVAAAPTGSGDRQGQGRGKIEIKRIENTTNRQVTFCKRRNGLLKKAYELSVLCDAEVALVVFSSRGRLYEYANNSVKSTIERYKKANSDSSNSGTVAEVNAQYYQQESSKLRQMIHSLQNANTRNIVGDSIHTMGLRDLKQMEGKLEKAISKIRARKNELLYAEVDYMQKREMDLQTDNMYLTSKIAESNETGQPAMHMMGVPPPTSEYDHMAPFDSRNFLQVSMPQHYSHQLQPTTLQLG

SEQ ID NO: 32889 - protein, 500 aa, Synechococcus sp. PCC 7002
MKSSLVILYHREPYDEVRENGKTFYRDKTSPNGIMPTLKSFFANAEQSTWVAWKQISGKQQENFQAKMAFPGQENSVVHRIPLSADQVKNFYHITSKEAFWPILHSFPWQFTYDSSDWENFKQINEMFAEAACEDADDDALFWVHDYNLWLTPYFIRQKKPNAKIAFFHHTPFPSVDIFNILPWREAIVDSLLCCDLCGFHLPRYVQNFVAVARSLRKVEITRQVPVDEHAFTAVGTALAEPEITTQLKYKDHLVNLDAFPVGTNPTQIRAQVEKASTQERIRKIREELGSNKLILSAGRVDYVKGTKEMLVCYERLLERRPELQTKVNLVVAAAKAASGMRVYKNAQSEIERLVGRINGRFANLNWTPILLFTSALSYEELLGFFGAADIAWITPLRDGLNLVAKEYVVAHGCDDGVLILSEFAGSAVELPDAILTNPYAAKRMDESIDQALAMPVEEQQRRMKSMYQAIQRYDVQQWANHMFREAKATAVLGKEPTPV

SEQ ID NO: 32890 - protein, 339 aa, Agrobacterium tumefaciens str. C58
MRVYYDRDADLNLIKSKNVVIVGYGSQGRAHALNLKDSGAKNVVIALKAGSPTVKKAEADGFKVMTVAEAAKWGDLLMMATPDELQADIYKADIAGNIRDGAAIAFAHGLNVHFGLIEPKASLDVVMIAPKGPGHTVRGEYQKGGGVPCLVAVHHNASGNALELALSYACGVGGGRSGIIETNFKEECETDLFGEQVVLCGGLVELIRAGFETLTEAGYAPEMAYFECLHEVKLIVDLIYEGGIANMNYSISNTAEWGEYVTGPRIITAETKAEMKRVLHDIQTGKFTSDWMQEYRSGAARFKGIRRMNDTHQIEEVGAKLRGMMPWIGKNKLVDKAVN

SEQ ID NO: 32891 - protein, 131 aa, Brassica napus
RLLIPGLPDQSNGEASAARITPSHCEWKPNLSVHYEKSGCDNVEAPAVLFLPGFGVGSFHYEKQLTDLGRDYRVWAVDFVGQGLSLPTQDPTTTTMSEEAGALEDSEPFWGFGDEAQPWADQLVYSLDLWR

SEQ ID NO: 32892 - protein, 288 aa, Oryza sativa
MAKDIEASAPEGGEFSAKDYTDPPPAPLIDVEELTKWSLYRAVIAEFIATLLFLYITVATVIGYKHQSDATVNTTDAACSGVGILGIAWAFGGMIFILVYCTAGISGGHINPAVTFGLFLARKVSLIRAVLYIIAQCLGAICGVGLVKGFQSSYYARYGGGANELSDGYSKGTGLGAEIIGTFVLVYTVFSATDPKRNARDSHIPVLAPLPIGFAVFMVHLATIPITGTGINPARSLGTAVIYNKDKAWDDQWIFWVGPLIGAAIAAAYHQYVLRASAAKLGSYRSNA

SEQ ID NO: 32893 - protein, 141 aa, Saccharomyces cerevisiae
QPHIFNNPKVKTSKRTKRWYKNAGLGFKTPKTAIEGSYIDKKCPFTGLVSIRGKILTGTVVSTKMHRTIVIRRAYLHYIPKYNRYEKRHKNVPVHVSPAFRVQVGDIVTVGQCRPISKTVRFNVVKVSAAAGKANKQFAKF

SEQ ID NO: 32894 - protein, 358 aa, Lotus corniculatus var. japonicus
MATMMMSIFPPPPSVASLFILSHCTHTIRVQSTTQFTGFSIRTRTRDCSRILLTEEREMAVMEEKKLLQTGIAEFYDESSGLWEDMWGDHMHHGFYEQDVTVSVSDHRVAQIRMIEESLRFAALSEDPAKKPESIVDVGCGIGGSSRYLAKKFQAKSVGITLSPVQAQRANALAASQGLADKVSFQVADALEQPFPDGQFDLVWSMESGEHMPDKPKFVGELARVAAPGGTIIIVTWCHRDLGPAEESLQPWEQNLLKRICDAFYLPAWCSTADYVKLLESHSLQDIKSADWSPFVAPFWPAVIRSAFTWKGLTSLLRSGMKTIKGALAMPLMIEGFKKGVIKFAIVTCRKPENVEIE

SEQ ID NO: 32895 - protein, 640 aa, Xylella fastidiosa Temecula1
MDALPVPETVTYSDNKRMQSVIAYLKQQEIKPLLRFITCGSVDDGKSTLIGHLLYDSQCLAEDQLADLTVDSQRYGTQGEHIDYALLLDGLAAEREQGITIDVAYRYFDTEKRKFIVADCPGHAQYTRNMATGASSADAAVVLVDARKGLLTQTRRHSYIVALLGIRHVVLAVNKMDLVGYDQQTFEAIASDYLALAAKLGINQVQCIPLSALEGDNLCKRSARMLWYVGPSLLEYLEALEPADVDLAAAMCLPVQWVNRPDSQFRGFTGTLAAGRVRSGDGVVVLPSGCVSRVVRVFNGDTEVHEAVAGQAVTLTLADEIDISRGDVIAATDDPPEVADQVTAYVLWMDDTALLPGRRYWLKLGARMVAASVSDIKHRVDVNTQEQRVAQRLQLNELGYCQLSLDAPVAFVPYARNRVLGSFILIDRQSNATVGAGTLDSGVHCASNVHWQPLDIDHVARARIKGQTPKVLWFTGLSGAGKSAIANIVDKRLHALGYHTFILDGDNVRHGLNRDLSFTVEDRVENIRRVAEVARLMVDAGLVVLVSFISPFRDERQLARERFAADEFVEVFVDVPLAVAEARDVKGLYAKARAGLITDFTGIDSPYEPPQHPELHLRADQGTPEQLASQVLSLLGVEGK

SEQ ID NO: 32896 - protein, 219 aa, Arabidopsis thaliana
  misc_feature (160)..(160): Xaa can be any naturally occurring amino acid
  misc_feature (172)..(172): Xaa can be any naturally occurring amino acid
  misc_feature (200)..(200): Xaa can be any naturally occurring amino acid
  misc_feature (211)..(211): Xaa can be any naturally occurring amino acid
  unsure (1)..(219): unsure at all Xaa locations
RPPVCWNFERPPGQVSAPPPRNNQQDDVFSVVSQGFGRLSLVAASAAQSAASVVQTGTKEFTSKVKEGGYDHKVSETVNVVANKTTEIGHRTWGIMKGVMAMATQKVEEFTKEGSTSWNQQSENEGNGYYQNFGNGNKAANSSVGGGRPQSSSTSGHYNXPQNLNSWDSWGXENENKTTEAVAPKGSSASNDDDGWTGWXDDHDAKDDGFXGHYQSAGR

SEQ ID NO: 32897 - protein, 419 aa, ASPERGILLUS NIDULANS FGSC A4
MQLSASQLRYLKPVQIALRQYDEKLQDINHKIWSNPELAYNEHQAHNNICELFEALRSEGYSVRRHAYGLDTAFEIEYKHGDADNGRVLTFNAEYDALPGIGHACGHNLIATSSIAAFIATCEAMKIAAPAGLVYTVRLLGTPAEESGGGKIRLLDSGAYKGVNACLMVHPAALPPGQANLLSVAKPPEGGFLANDKVRVTFTGKPAHAAAAPWEGVNALDAVVAAYVNISLLRQQILPSQRVHGIIVNGGDRPNIIPWSASVDYYIRSPTLATLKPLTEKVVKCFEAAATATGCKVEFQWGPSYADVKSNEHICESYVSVMRAMGQHVLLNSPQGAGGSASTDMGNVSYAIPGFHGIFFISAKSGNHTPQFTDGAGSPNAYRRALDCAAGMAVTACYFLDDDDFARQVEEDFLRGGSL

SEQ ID NO: 32898 - protein, 392 aa, Nitrosomonas europaea ATCC 19718
MRNVVVLSGARTAIGDYGGALKDLAPATLAAITVREAITRASVDSDKIGHLVAGHVIPTEAQDMYLARVAALEAGLPQSVAALTLNRVCGSGLQAIISAAQAVMLGDTEVAIAAGAESMSRGGYLLPALRWGQRMQDSTAVDMMVGALTDPFDRVHMGITAENIAERWSITREQQDRFALESHRRAIHAVHNGYFREQIVPVEVSTREGVAMFDTDQHPRDNISMETLGKLRPVFREDGTVTAGNASGINDGAAALVLMEERAAERNHHQPMARLVAYGHAGVNPRYMGIGPVPAVKQALNRAGLDLAEMDVIESNEAFAVQACAVARELNFDPDKVNPNGGAVALGHPIGASGCILAIKAIYELQRINGRYALVTLCIGGGQGIAAIFEKL

SEQ ID NO: 32899 - protein, 242 aa, Mesorhizobium sp. BNC1
MAKAVWHEFAASEALAEALAEAVAQHLAAALEKRGMASIAVSGGSTPAPFFRALSRKKIDWARIIVTLVDERFVPPSSERSNAALASRYLLQNDAARASFVPLYQPVETVEEAAEKADEEIGRLPLPLDVVVLGMGLDGHTASFFPDAEDIALKLQVENRRVLPIHARSAGEPRLTLSMPLLCQARLMVLHIEGQEKRRLLEAALAEETGAKLPVRIAVEQAAAPVAIYWAPGAASASGKRP

SEQ ID NO: 32900 - protein, 496 aa, Zea mays
ITMDPTKFRPSSSHDTTVTTTNAGAPVWNDNEALTVGPRGPILLEDYHLIEKVAHFARERIPERVVHARGASAKGFFECTHDVTSLTCADFLRAPGVRTPVIVRFSTVIHERGSPETIRDPRGFAVKFYTREGNWDLLGNNFPVFFIRDGIKFPDVIHAFKPNPRSHVQEYWRVFDFLSHLPESLHTFFFLFDDVGVPSDYRHMEGFGVNTYTFVSAAGKAQYVKFHWKPTCGVRCILTDEEAALVGGRNHSHATQDLYDSIAAGSFPEWTLYVQVMEPDTEEQYDFDPLDDTKTWPEDLLPLRPVGRLVLDRNVDNFFNENEQLAFGPGLVVPGIYYSDDKMLQCRVFAYADTQRYRLGPNYLMLPVNAPRCAHHNNHYDGAMNFMHRDEEVDYYPSRHAPLRQAAPPTPLPPRPVAGRREKATIRKPNDFKQPGERYRSWDADRQDRFVRRFADSLGHPKVSQELRSIWIDLLAKCDASLGMKIATRLNMKANM

SEQ ID NO: 32901 - protein, 80 aa, Brassica napus
MSCCGGNCGCGSGCKCGSGCGGCKMYPDLGFSGEKATTEAFVFGVAPVMKNQYEASGEGNAENDACNCGSDCKCDPCTCK

SEQ ID NO: 32902 - protein, 222 aa, Arabidopsis thaliana; identical to SEQ ID NO: 1193

SEQ ID NO: 32903 - protein, 146 aa, Mycoplasma mobile 163K
MKKNIDKNELKKRLTDLQWKVTQENGTERPYNNEFDNHFEEGIYIDIVDGTPLFISKDKYNSGCGWPAFTKPIDPFVIEEKMDFTSGMTRVEIRSKNADSHLGHVFNDGPRDKGGLRFCINSASLKFIKKEDLEKEGYSTYLKLFK

SEQ ID NO: 32904 - protein, 220 aa, Pseudomonas fluorescens Pf-5
MTARTLNLDDALYHYLLDVSLRETPLLRRLRDETQALPTARWQVAPEQGQFLALLVKLTGARRVLEVGTFTGYSALCMAQALPEDGSLICCDIPGDYNATALRYWQEAGVGQRIELRLAPALDTLASLERAGQLGCFDLIFIDADKANYPAYLEAALGLLRVGGLLVFDNTLWSGRVLETDSLSEDTRAIQALNRALKDDSRIDLSLLPLGDGLTLCRKR

SEQ ID NO: 32905 - protein, 342 aa, Oryza sativa
MADLADEDPPVLLDRASRATRGKRITKLLEDEVEQDEVFWNQDALKEDEEDDNYEEEQDAGDEFDSDFGEDESEPDDEPEKEVRERLPIKKRLIFPGKTMKKINAKKKKKVVPKLEDDSKTDKYSDQQSPSKQTDIPDELETGEKTIRKSTRTSVIVRQAEREAIRAEKEATMKVPVIKKKKEGEEKRMTQEEMLLEAAETEIINLRNLERVLAREEEVKKKAVVHKAVYEGPTIRFCSRDDPEKSICAVTGLPAKYRDPKTGLPYATKEAFKIIRESFLKEEADRKRPNLANMGELFESITGEYSTPKKRRIEARSPSISSDQRHGGRFRRIPALDLLDED

SEQ ID NO: 32906 - protein, 197 aa, Triticum aestivum
VNYRTSLYKKAGWYRSGIPGISSTHASGTIEAFYNANLGITKKPIPDFSFYDRSAPIYTQPRHLPPSKVLDADVTDSVIGEGCVIKNCKIHHSVVGLRSCISEGAIIEDTLLMGADYYETEADKKLLAEKGGIPIGIGKNSHIKRAIIDKNARIGDNVMIINVDNVQEAARETDGYFIKSGIVTVIKDALLPSGTVI

SEQ ID NO: 32907 - protein, 328 aa, Yersinia pseudotuberculosis IP 32953
MGQLINGVWKDVWYDTQSTGGHFKRSTAQFRNWVTTDGQAGPQGKGGFNAEAHRYHLYVSLACPWAHRALLMRTLKGLESLISVSVVHPLMQENGWTFSSDFPAATGDALYHLDYLYQLYLRAAPDYSGRVTVPVLWDKQQQTVVSNESADIIRMFNNAFDDVGAKAGDYYPTALRNDIDDINGWVYDQVNNGVYKAGFATTQEAYDEAVGTLFSALDRLEQILGQHRYLTGNQLTEADLRLWTTLVRFDPVYVTHFKCDKRRISDYPNLYGFLRDIYQMPGIAETVDFAHIRTHYYRSHGTINPYGIISIGPQQNLLEPHDRANRFV

SEQ ID NO: 32908 - protein, 393 aa, Burkholderia vietnamiensis G4
MNPSDLHPPHWQLSERARKLTSSAIREILKVTERPEVISFAGGLPAPVTFPAERMRAAADLVLRDAPAAALQYSATEGYLPLREWIAERYGVRVSQVLITTGSQQALDLLGKALIDPDSPVLVETPTYLGALQSFSLYEPRYVQVPTDEQGLLPEGLTPALTQGARLLYAQPNFQNPTGRRLPVERRRALAAFAQSSPFPVLEDDPYGALNYQGEPLPTMLSMAPDHVVHLGTFSKVLAPGLRLGYIIAPEELHFKLVQAKQATDLHTPTLTQRIAHEVIKDGFLDEHIPTIRKLYSAQCDAMLASLARHMPEGVTWNRPEGGMFIWVNLPAQIDSMKLLEAAVADHVAFVPGAPFFANDAQRNTLRLSFVTVPPEKIEEGVARLGKLLRERL

SEQ ID NO: 32909 - protein, 130 aa, Brassica napus
MDSSNSWINCPSVFSSSSSASRRCQQSRSDLYIGGGYEDLEGEDDLKSEFICPFCAEVFDIVGLCCHIDEEHPVEAKNGVCPVCTKRVGLDIVGHITTQHANFFKVQRRRRLRKGGGYSSAYLTLKKELR

SEQ ID NO: 32910 - protein, 496 aa, Saccharomyces cerevisiae
MSAVNVAPELINADNTITYDAIVIGAGVIGPCVATGLARKGKKVLIVERDWAMPDRIVGELMQPGGVRALRSLGMIQSINNIEAYPVTGYTVFFNGEQVDIPYPYKADIPKVEKLKDLVKDGNDKVLEDSTIHIKDYEDDERERGVAFVHGRFLNNLRNITAQEPNVTRVQGNCIEILKDEKNEVVGAKVDIDGRGKVEFKAHLTFICDGIFSRFRKELHPDHVPTVGSSFVGMSLFNAKNPAPMHGHVIFGSDHMPILVYQISPEETRILCAYNSPKVPADIKSWMIKDVQPFIPKSLRPSFDEAVSQGKFRAMPNSYLPARQNDVTGMCVIGDALNMRHPLTGGGMTVGLHDVVLLIKKIGDLDFSDREKVLDELLDYHFERKSYDSVINVLSVALYSLFAADSDNLKALQKGCFKYFQRGGDCVNKPVEFLSGVLPKPLQLTRVFFAVAFYTIYLNMEERGFLGLPMALLEGIMILITAIRVFTPFLFGELIG

SEQ ID NO: 32911 - protein, 320 aa, Escherichia coli CFT073
MSKVFTIGEILVEIMASKIGQPFDQPGIWNGPYPSGAPAIFIDQVTRLGVPCGIISCVGNDGFGDINIHRLAADGVDIRGISVLPLEATGSAFVTYHNSGDRDFIFNIKNAACGKLSAQHVDENILKDCTHFHIMGSSLFSFHMVDAVKKAVTIVKANGGVISFDPNIRKEMLDIPEMRDALHFVLELTDIYMPSEGEVLLLSPHSTPERAIAGFLEEGVKEVIVKRGNQGASYYSANEQFHVESYPVEEVDPTGAGDCFGGAWIACRQLGFDAHRALQYANACGALAVTRRGPMEGTSRLMEIETFIQRHDMSIREAAQ

SEQ ID NO: 32912 - protein, 52 aa, Arabidopsis thaliana
MGSFLEVLCAIFIPPVGVFLRYGLGLEFWVCLLLTLFAFIPGLIYAIYVLTK

SEQ ID NO: 32913 - protein, 336 aa, Escherichia coli CFT073
MSALPGPIAKGFRNERGFVTTTICAMGELLAEFLSRNPHQKFTQPGEFIGPFPSGAPAIFAAQVAKLSHRAIFFGCVGNDDFARLIIERLRHEGVITDGIHVMNNAVTGTAFVSYQNPQQRDFVFNIPNSACGLFTAEHIDKDLLKQCNHLHIVGSSLFSFRMIDVMRKAITTIKSAGGTVSFDPNIRKEMLSIPEMAQALDYLIEYTDIFIPSESELPFFARHKNLSEEQIVSDLLHGGVKHVAIKRAQRGASYYKLKNGTLHAQHVAGHDIEIIDPTGAGDCFGATFITLFLSGFPAHKALQYANASGALAVMRQGPMEGISSLADIEDFLQQH

SEQ ID NO: 32914 - protein, 195 aa, Glycine max
MRKSAADRFRHLFNRSLILLRHRHHHHPFPSSSSLSPFSRSRFFSSTPFSMASDSPFPVTAQNINPKVLKCEYAVRGEVVTLAQNLQKDLQANPGSHPFDEILYCSLGQQPITFFREVLALCDHPAILDKSETQGLFSTDAIQRAWQIVDQIPGRATGAYSHSQGVKGLRDTIAAGIEERDGSPANPDDIFMTEG

SEQ ID NO: 32915 - protein, 215 aa, Alkaliphilus metalliredigenes QYMF
MSQITTSHVEDYIHQLLPEHSGLLKELEIYAEEHSVPIVHKEVAAFLKVTIKATKAQRILEVGTAIAYSAILFCHAMGEDGQVTTIERNEKMIEQANRNIIRSGLEKNIRIIQDDAQEALKFLDGQYDIIFLDGAKGQYKEFFNDCIRLLKVGGILISDNILFHGMIANDELVQRSKRTIVNRMRDYLQYICHHEQLETSIIPIGDGVTISYKKK

SEQ ID NO: 32916 - protein, 435 aa, Acinetobacter sp. ADP1
MNHMKKNILFDGLRSVARIGETAFVAARAGIKYATEKPSNAKLMRETFESLGSTYIKLGQFIASTPSLFPREYVEEFQGCLDQTPTLPFSYIQEVLAEEFEGRDLNQIFASIDETPLASASIAQVHAARLTTGEDVVIKVQKPGVETILYTDLNVVHWATKMLEKAIPKVKFASLSEIVEEIKIRMVREVDFIEEAQNLDDFVEYLKITNNQAATAPKVYHQFSTRRILTMERLYGVSLTDFDIVKKFAKDPSQVLITAMNTWFGSLMLCKSFHADLHAGNLMLLEDGRIGFIDFGIVGQLNPQVWTACLAFMDALQKTDYTAMAENMLKMGMTKTQIDTQVLAQDLERLFSGVLLADPQEILASKPSDLNDIMLDMVAVGERHGIKFPRDFALLFKQMLYFDRFMRVLAPYTDIYADQRLKMVQTIEPQSLLKH

SEQ ID NO: 32917 - protein, 261 aa, Candida tropicalis
MSLPASFDLTPEDAKLLLAGNVHLGSKNVQVHNKPYVYKTRPDGVNIINIGKTWEKIVLAARIIAAIPNANDVAVCSSRTFGQRAVLKFAAHTGATAIAGRFTPGNFTNYITRSFKEPRLVIVTDPRTDAQAIKESSYVNIPVIALTDMDSPSEYVDVAIPCNNKGKHSIGLIWWLLAREVLRSRGIIPDRTTEWSVMPDLYFYRDPEEIEQNAAEEAKAEETEEAPAAEAETEWTGETDDVDWADSGATPAAEDAAASNW

SEQ ID NO: 32918 - protein, 233 aa, Streptococcus pneumoniae
MMNELFGEFLGTLILILLGNGVVAGVVLPKTKSNSSGWIVITMVGIAVAVAVFVSGKLSPAHLNPAVTIGVALKGGLPWASVLPYILAQFAGAMLGQILVWLQFKPHYEAEENAGNILATFSTGPAIKDTVSNLISEILGTFVLVLTIFALGLYDFQAGIGTFAVGTLIVGIGLSLGGTTGYALNPARDLGPRIMHSILPIPNKGDGDWSYAWIPVVGPVIGAALAVLVFSLF

SEQ ID NO: 32919 - protein, 464 aa, Citrus junos
MAFFRSVTALSRLRSRVGQQSNLSNSVRWLQMQSSSDLDLHSQLKEMIPEQQERLKKVKSELGKAQLGNITVDMVIGGMRGMTGLLWETSLLDPDEGIRFRGLSIPECQKLLPAAKPDGEPLPEGLLWLLLTGKVPSKEQVDGLSKELRDRATVPDYVYKAIDALPVTAHPMTQFASGVMALQVQSEFQEAYEKGIHKSKYWEPTYEDSLNLIARVPVVAAYVYQRIYKDGKIIPKDDSLDYGGNFSHMLGFDDPKMLELMRLYVTIHSDHEGGNVSAHTGHLVASALSDPYLSFAAALNGLAGPLHGLANQEVLLWIKSVVDECGENVTTEQLKDYVWKTLNSGKVVPGFGHGVLRKTDPRYTCQREFALKHLPDDPLFQLVSKLFEVVPPILTKLGKVKNPWPNVDAHSGVLLNHFGLAEARYYTVLFGVSRSLGICSQLIWDRALGLPLERPKSVTLDWIE

SEQ ID NO: 32920 - protein, 159 aa, Vibrio parahaemolyticus RIMD 2210633
MMEKIYFAGGCLWGVQEFMRHLPGVISTEAGRANGKTDNTQSEYDGYAECVRTEFDPSQVSIETLMGYFFEIIDPYSINKQGDDVGEKYRTGVYSRDTKHLEIAKSFIATRYDADKIAVEVLPLKNYVPSDEEHQDRLTRFPNDYCHIPLDLLHKYKNK

SEQ ID NO: 32921 - protein, 290 aa, Rickettsia slovaca
AYLLIYGELPSGEQYNNFTKQVAHHSLVNERLHYLFQTFCSSSHPMAIMLAAVGSLSAFYPDLLNFKEADYELTAIRMIAKIPTIAAMSYKYSIGQPFIYPDNSLDFTENFLHMMFATPCTKYTVNPIIKNALNKIFILHADHEQNASTSTVRIAGSSGANPFACISTGIASLWGPAHGGANEAVINMLKEIGSSEYIPKYIAKAKDKNDPFRLMGFGHRVYKNYDPRAAVLKETCKEVLKELGQLDNNPLLQIAIELEAIALKDEYFIERKLYPNVDFYSGIIYKAMGI

SEQ ID NO: 32922 - protein, 339 aa, Novosphingobium aromaticivorans DSM 12444
MKVYYDADCDLNLITDKKIAILGYGSQGHAHAQNLRDSGVKDVAIALRPGSASAKKAEAAGFKVLANADAAAWADILMILAPDEHQAAIYADDLHANMKPGAALAFAHGLNIHFGLIEARADIDVIMIAPKGPGHTVRSEYQRGGGVPCLIAVHQNVTGNAHDVALAYASGVGGGRSGIIETNFREECETDLFGEQVVLCGGTTALIQAGFETLVEAGYAPEMAYFECLHELKLIVDLLYEGGIANMRYSISNTAEYGDIKTGPRIITEETKKEMKRVLADIQEGRFVKDFVLDNRAGQPELKAARGLAKRHQIEETGAKLRAMMPWIGANKLVDQTKN

SEQ ID NO: 32923 - protein, 332 aa, Sulfolobus tokodaii str. 7
MAKVYIDKDASLDPIKDKTIAVLGYGSQGRAWALNLRDSGLKVLVGLEREGNSWKVAESDGFNPMHTEDAVKKSDIVIFLVPDMVQRYVYRERVAPYLRDGMDLVFAHGFNIHYKLIEPPKTVDVYMIAPKGPGPIVREYFAKGGGVPALVAVHQNYSGKAFEKALAIAKALGATRAGVIETTFKEETETDLFGEQVDLVGGITQLMRTAFQVLVEAGYQPEIAYYETINEMKMIVDLIYEKGFTGMLKAVSETAKYGGFTAGKYVINEDVKKRMKEVLDRIRSGKFAEEWIEEYNKGAPTLVNGMKEVENSLEEQVGRQIREISLRGKPKS

SEQ ID NO: 32924 - protein, 988 aa, Schizosaccharomyces pombe
MVQLDDALQDAYKKVEREESLILGAKSNGGFDQESEVKRRLESNIAVSENNIKYLRERIDALKVESGSERESQSDKDSSKKYSDSAKSTNSDDHLLSYNRSAFDLFNSEKPLSPEKISTMLQHLQMRLSIEQQCVSGIEKIMSLYSKEQKDKTDVIIKLKEGKQKVNLLKRSLKRYNELHIPFDISTPSSEEKQQASGLNFRGLAKPISGTLKVTIHSLRNIEHTSFLQTHSFTMPSYAVLYVDDAQVAKSRISQTDTWDETFIFDVHRAKEFQIIIYEKKKDFDIPIALILIPTTIIAEELRRKRNIQEMSETSWKPSIAESASRSDEKGSKSDPINAPNSSSSISTNSPLAPTAYYKLLSKSWLSLEPVGQICISLSFSKRTTKRQFPETGLGRQGAIRQKKEDVVASQVGHQFVQRQFYQIMRCAVCAELFSYSPGLQCENCSFVCHKKCVTKVLASCIAQSNSEKSDFGGLRYRIPHRFEPFNSLGAQWCAHCGFFLPLRRKDCFKCVECGITCHGQCAHLIPDYCGMSNDLKHQLLTELEVSKRPKKPELPNQENKTTNEKVYRKPLSSQNTFDTLPTISQGLLAATQPVTSVLNTSPLPKTPEKDRSLNVTPSSSTPTPASVLAPPSSASLSSSKDANRSVPESPRREKKNRVTLDDFTFLAVLGKGNFGKVMLAEYKVNKKFYAIKVLKKEAILKNEELESLKTEKHVFEVANKEKHPFLLNLFASFQTSTRVYFVMEYILGGDLMVHIQRQQFSVKRARFYGAEVCLALKYFHENGIAYRDLKLDNILLCPDGHIRIADYGLCKENMLLGNTTSTFCGTPEFMAPEILLEQQYSKDVDWWAFGVLMYQMLLGQSPFKGEDEEEIFDAILSDEPLFPINMPADAVSLLRGLLTRDPNQRLGSGPKDANEVMAHPFFASIVWDDLYNKLYEPSYKPLINDPRDLNNFDEEFTSACPTLTPVNTVLTRQQQECFRGFSSFATE

SEQ ID NO: 32925 - protein, 277 aa, Magnetococcus sp. MC-1
MRAAIERPHFDTPVLDDRARHLRRLVLRALDKGGRGHPGSAMSLMELLRVLYDDVLNIDPHNPLWQDRDRCILSKGHGCLALYALLADKGFFPVAELDRFCQLESRLGGHPERHVLPGVEASTGALGHGLSLAAGMALAAKLKGASWRVFALMGDGEINEGSVWEAALFAAKHQLNNLVAVIDYNKLQSYGPISAVQGLEPLADKWRAFGFGVQEVDGHDVGALRHCFTQLTPDQPNLVIAHTVKGKGIPEAEDNPSWHHKSSLKPAEMESLYQALA

SEQ ID NO: 32926 - protein, 727 aa, Physcomitrella patens
MAACTIVWFRRDLRLEDNPALIAAARAGTVVPVFVWSPAEDGQFHPGRVSRWWLKQSLTHLELSLKKLGSPLILRKSPDMLSVLLEIAEATGATQVFYNHLYDPVSLVRDHRVKQGLSQRGIVVHTFNGDLLYEPWEVYDEEGQAFTVYEAFWKKCMSMPFEPEAPLLPPRRLTGPIGKIVGCNAEELGLEDEFEKSSNALLARAWCPGWGFANKSLDSFLRSPLIDYARDRQKADGASGTPTSLLSPHLHFGELSVRKIFHEVRKRQITWAREGNAGGEASVNMFLRALGFREYSRYLSFHFPFTHERSLLANLKSFPWRADEGYFKAWRQGRTGYPLVDAGMRELWATGWAHNRIRVVVASFSVKFLQLPWRWGMKYFWDVLLDADLECDVLGWQYISGSLPDGHELDRIENPEVEGYRFDPDGDYVRRWIPELARLPNEWVHHPWDAPPSALRAAGVELGTNYPRPIVEIGAARERLQASLAEMWERDAAMKAALANGLEEGLGETVEVAGTGGPEHERMDVPRVMVHMQRDADMSCNSSRRDQLVPEIVPNQFHIRAHESIMNRSAAMVEDGEEAGRAAVPMVFASVRRGMGGNYGGHHVEGNGGEVAQASAPIQWPTVTAVDYELDSTAESASVTGRGGSEGGTVPVWSQSVSARTPIQVREGLVPEVRRGPGLSRRQLQASVQRVNLEGMTSNKQAEEEDFYVPKLVKWTQPRKRRVKQDG

SEQ ID NO: 32927 - protein, 474 aa, Magnaporthe grisea 70-15
MVRAHFTSRALLALLVTAIPISACGEEEHFSTLPRRQSAGNSTGVVGGPTTSSPHLATVSEHIDSLAEELWPISTEIHENPELGYEEVRAHDLLTTYVASKPGWEVTRSAFGLDTSFVAVFDGGHGAGPVVSFNAEYDALQGLGHGCGHNLIATASVAGALAAAEVMRRESLPGKVVLFGTPAEESLGGKVRMLEAGAFAEHAIDISIMAHPGPGGDAGDAAYTFAMATDRFDVEYHGQPAHAAASPWLGVNAQDAIALAYAALGLMRQQSRPADRVHGRIATAPGAVNIIPDSAGAVFQIRSDTTENLAPLIERFEKAMEAGALGTGATMNLTMRPYGYSDMLNNDVLARHYREWFDGAIPTADEEKLSGPGGSTDQGNVSHDFPALHAFFGIFGDDGAPATASVHSEGFREAARTRKSFDKALKAAKALAGTAVDVLTVEGLLDEVKEDFEQNNKKDVAQRLARLRRRMIKK

SEQ ID NO: 32928 - protein, 822 aa, Magnaporthe grisea 70-15
MVTEAPGHGPESLGEQDQQLSPRQVVSRTIDDVLHSPSPGGSRLDMESFDMRADPDAQATVTDFLDFTEYLPADMTRSLTLIGELDEKYINASSNLFGLTKKWGELPGMSAEERPFPAQLRADISECLNHAISSRTYSHAEAVRMQENTTRHYLRAKTILAKLQTMLENYPTAEEQAKSSMTTNKTQTNRVPQISLRVGDGRKGRGRPIPRITVPGEVLPPYDLDYAACNSSDSSSESEAEEEEEPAGATPAPQPRIKIVKTPKQPKTPKPPKAPKDSKTPGTTRPVPPVPAIPKELLKPPPEGAVIGSADLPWLQLTPWELARLRKRMKKNAQWHPSDTMIARELKMLERGPEAYQKAKQLAEEQGKPFEPAVPTLVADANGVEHAPMGALSLDAALAAEDRQGNNRGLKLNVAKKLKRENLARLAAEEAEESARRMAETVNALLHPNAQQAQGRENAPEKPAAETPNNKTMRKYGGRKRKRDSATEADADKSNTVAEPPSATTKRTKMETPVPLPQQSSGVSQNGQPSSAQTITASSQTPVPPSQPAKEKQSVTPSAKPSPPDISQPTNTAGTTTTTVPVKPPAELSVPPPSPKKSTTPILPPVRETRKSQAAKKEAATAASTQQTTVPKPPASRSSTPGPVTSSRPTSRGKAASQEPPTLASDRTRRQSTARNTPAPVPEPQRQPGKRIKRPAPGVVSRTNSGGSSAVGRRKAAPKVTKAASKLKKERGQQMETDVEVEVDDEGNVIDPDEPRYCLCNGVSFGTMIACENENCQYEWFHLECVKLEATPARTTKWYCPSCRVLLNIGEKGEVSARGVKM

SEQ ID NO: 32929 - protein, 373 aa, Oryza sativa (japonica cultivar-group)
MDHRLLLLGLLLLSPAVAAASVPGEEEPLIRQVVGGGDDNELELNAERHFASFVQRFGKSYRDADEHAYRLSVFKANLRRARRHQLLDPSAEHGVTKFSDLTPAEFRRAYLGLRTSRRAFLRGLGGSAHEAPVLPTDGLPDDFDWRDHGAVGPVKNQGSCGSCWSFSASGALEGANYLATGKMDVLSEQQMVDCDHECDSSEPDSCDAGCNGGLMTNAFSYLLKSGGLESEKDYPYTGRDGTCKFDKSKIVTSVQNFSVVSVDEDQIAANLVKHGPLAIGINAAYMQTYIGGVSCPYICGRHLDHGVLLVGYGASGFAPIRLKDKAYWIIKNSWGENWGEHGYYKICRGSNVRNKCGVDSMVSTVSAIHTSKE

SEQ ID NO: 32930 - protein, 437 aa, Mycobacterium leprae TN
MTLYQQISVDGSGTMSDVTTHQLPMHTPGYHRQRAFAQSSKLQDVLYEIRGPVSQHATRLETEGHRILKLNIGNPALFGFDAPDVIMRDMIQALPYAQGYSDSQGILPARRAVVTRYELVDGFPRFDVDDVYLGNGVSELITMTLQALLDNGDQVLIPSPDYPLWTASTSLAGGTPVHYLCDETQGWQPDIADVESKITERTKALVVINPNNPTGAVYSNEILNQIVDLARKHQLLLLADEIYDKILYDDTKHISVASIAPDLLCLTFNGLSKAYRVAGYRSGWLAITGPKDHASSFIGGINLLANMRLCPNVPAQHAIQVALGGHQSIEDLVLPGGRLLEQRDVAWTKLNEIPGVSCVKPTGALYAFPRLDPEVYGIVDDEQLVLDLLLQEKILVTQGSGFNWPAPDHLRLVTLPWSRDLAAAIDRLGNFLVSYRQ

SEQ ID NO: 32931 - protein, 278 aa, Sulfolobus tokodaii str. 7
MSVKAYFELVRIHNVIGSAISVFMGYVVASEWKIVPIKLILAMIVVSVIAAGGYIINDVFDIEIDKINKPNRPLPSGRIKISRARSLSIVLFLVGIVLSVLLNIYAFIIALLTVLALYYYAKDLKKQGLVGNLIVALTSALSAFYGGLAFFEGSWVIRTLIPTLYIFFFTLTREFVKGIEDVKGDMTNGVKTLAVRVGIEKTWFISKIILVILIVTSFIPYFFGFNIIYLIGILFLDIILILVVLLRHDIESASKARAYMKVYALGTLILFALGTLPI

SEQ ID NO: 32932 - protein, 205 aa, Banksia ilicifolia
SSFDFMDGYDKPVEGRKINWMKAGILESDRVVTVSPYYAQELLSGIEKGVELDNIIRKTGITGIVNGMDVQEWNPSTDKYIDVKYDATTVFNAKPLLKEALQAEVGLPVDGNIPVIGFIGRLEEQKGSDILAEAISQFVGENVQIVILGTGKKPMEKQIEQLERKYPDKAIGIAKFNVSLAHMIIAGADFMLIPSRFEPCGLIQL

SEQ ID NO: 32933 - protein, 205 aa, Banksia cuneata
SSFDFMDGYDKPVEGRKINWMKAGILESDRVVTVSPYYAQELLSGIEKGVELDNIIRKTGITGIVNGMDVQEWNPSTDKYIGVKYDATTVFNAKPLLKEALQAEVGLPVDGNIPVIGFIGRLEEQKGSDILAEAISQFVGENVQIVILGTGKKPMEKQIEQLERKYPDKAIGIAKFNVSLAHMIIAGADFMLIPSRFEPCGLIQL

SEQ ID NO: 32934 - protein, 440 aa, Mesorhizobium sp. BNC1
MTYILHRQIHGQLPVAAGGRGVKLFDSAGKEYIDASGGAAVSCLGHNHPDVVAALKRQAEKLAYAHTSFFTNEPAEALAERLVKAAPEGISHAYLVSGGSEANEAALKMARQFFVEKGEAQRRHIIARRQSYHGNTLGALAAGGNEWRRAQFRPLLIETHHIDPCYAYRYRQQGESDEEYGLRAAQQLEDKILELGPDTVMAFIAEPVVGATAGAVPAVSGYFKRIRDICDRYGVLLILDEVMCGMGRTGTLFACEEDGVSPDLVSIAKGLGGGYQPVGAVLLSRQIFDAFAQGSGLFQHGHTYICHPMACAAALAVQEVIERDNLLANVREMGSYLRARLEARFGNHAHVGDIRGRGLFLGLELVADRATKEPFDPARKIHAGVKKEAMARGLMVYPAGGTIDGARGDHVLLAPPFILDKETADTIVDRLGEAIDAALG

SEQ ID NO: 32935 - protein, 917 aa, Pseudomonas fluorescens Pf-5
MLKKLGIKGRVLLLTLLPTSLMALVLGGYFTWMQLSDLQTQLLQRGEMIAEQLASLVAPAMGNHNTQMLERIATQALEQQDVRAVSLLAPDRSLLAHAGPSMLNPPPAGNSSHMMQRSGSDATRYQLPVFGRHRNLAGDLIPDESDRLLGWVELELSHSGMLLRGYRSLFASLLLIAAGLAGTALLAVRMGRTINNPLTQIKQAVAQLKDGNLETRLPPLGSQELDELASGINRMASTLQNAQEELQHSIDQATEDVRQNLETIEIQNIELDLARKEALEASRIKSEFLANMSHEIRTPLNGILGFTHLLQKSELTPRQLDYLGTIEKSADSLLGIINEILDFSKIEAGKLVLDSIPFNLRDLLQDTLTILAPAAHAKQLELVSLVYRDTPLSLVGDPLRLKQILTNLVSNAIKFTREGTIVARAMLEEEHEDSVQLRISIQDTGIGLSNQDVRALFQAFSQADNSLSRQPGGTGLGLVISKRLIEQMGGEIGVDSTPGEGSEFWISLNLPKTRDDAEDLPGPPLLGRRVAVLENHELARQALQHQLEDCGLEVTPFNTLEALTNGITGVHQSEQAIDLAVLGITTNDMSPERLSQHIWDLEHLGCKVLVLCPTTEQTLFHLSVPNPHSQLQAKPACTRKLRRALSDLVTPRRARSEPEETLSSRAPRVLCVDDNPANLLLIQTLLEDMGAKVLAVDNGYAALNAIQTEPFDLVMMDVQMPGMDGRQSTEAIRQWESERHGTPLPIVALTAHAMANEKRALLQSGMDDYLTKPISERQLAQVVLKWTGLALRNQGPERASERPELGLELQVLDQDEGLRLAAGKADLAADMLAMLLASLDADREAIKAARAANDQNALIERVHRLHGATRYCGVPQLRAACQRSETLLKQEDAKAFAALDELDHAIGRLAAEARTNA

SEQ ID NO: 32936 - protein, 205 aa, Banksia elegans
SSFDFMDGYDKPVEGRKINWMKAGILESDRVVTVSPYYAQELLSGIEKGVELDNIIRKTGITGIVNGMDVQEWNPSTDKYIDVKYDATTVFKAKPLLKEALQAEIGLPVDGNIPVIGFIGRLEEQKGSDILAEAISQFIGENVQIVILGTGKKQLEKQIEQLERKYPDKAIGIAKFNVSLAHMIIAGADFMLIPSRFEPCGLIQL

SEQ ID NO: 32937 - protein, 517 aa, Lolium rigidum
MDKAYIAILSSAFLFLVHYVLGKVSDGRRGKKGAVQLPPSPPAVPFLGHLHLVEKPIHATMCRLAARLGPVFSLRLGSRRAVVVSSSECARECFTEHDVTFANRPKFPSQLLVSFNGTALVTSSYGPHWRNLRRVATVQLLSAHRVTCMSGVIAAEVRAMARRLFHAAEASPDGAARVQLKRRLFELSLSVLMETIAQTKATRSEADADTDMSLEAQEFKEVVDKLIPHLGAANMWDYLPVMRWFDVFGVRSKILHAVSRRDAFLRRLINAERRRLADGGSDGDKKSMIAVLLTLQKTEPKVYTDTMITALCANLFGAGTETTSTTTEWAMSLLLNHPAALKKAQAEIDASVGTSRLVSVDDVPSLAYLQCIVSETLRLYPAAPLLLPHESSADCKVGGYNVPADTMLIVNAYAIHRDPAAWEDPLEFKPERFEDGKAEGLFMIPFGMGRRRCPGETLALRTIGMVLATLVQCFDWEPVDGVKVDMTEGGGFTIPKAVPLEAVCRPRVVMRDVLQNL

SEQ ID NO: 32938 - protein, 168 aa, Banksia elderiana
SSFDFMDGYDKPVEGRKINWMKAGILESDRVVTVSPYYAQELLSGIEKGVELDNIIRKTGITGIVNGMDVQEWNPSTDKYIDVKYDATTVFNAKPLLKEALQAAVGLPVDGNIPVIGFIGRLEEQKGSDILAEAISQFIGENVQIVILGTGKKPLEKQIEQLEIKYPD

SEQ ID NO: 32939 - protein, 517 aa, Lolium rigidum
MDKAYIAILSCAFLFLVHYVLGKVSDGRRGKKGAVQLPPSPPAVPFLGHLHLVDKPIHATMCRLAARLGPVFSLRLGSRRAVVVSSSECARECFTEHDVTFANRPKFPSQLLVSFNGTALVTSSYGPHWRNLRRVATVQLLSAHRVACMSGVIAAEVRAMARRLFHATEASPDGAARVQLKRRLFELSLSVLMETIAQTKATRSEADADTDMSVEAQEFKEVVDKLIPHLGAANMWDYLPVMRWFDVFGVRNKILHAVSRRDAFLRRLIDAERRRLADGGSDGDKKSMIAVLLTLQKTEPKVYTDTMITALCANLFGAGTETTSTTTEWAMSLLLNHPAALKKAQAEIDASVGTSRLVSVDDVPSLAYLQCIVSETLRLYPAAPLLLPHESSADCKVGGYNVPADTMLIVNAYAIHRDPAAWEDPLEFRPERFEDGKAEGLFMIPFGMGRRRCPGETLALRTIGMVLATLVQCFDWEPVDGVKVDMTEGGGFTIPKAVPLEAVCRPRAVMRDVLQNL

SEQ ID NO: 32940 - protein, 674 aa, Hordeum vulgare subsp. vulgare
MFPLGARQPPPSAMDNQQQQQPPRGEHAAQPRCWEEFLHRKTIRVLLVETDDSTRQVVAALLRHCMYQVIPVENGHQAWAYLQDMQSNIDLVLTEVFMHGGLSGIDLLGRIMNHEVCKDIPVIMMSSHDSMGTVLSCLSNGAADFLAKPIRKNELKNLWAHVWRRSHSSSGSGSGSAIQTQKCTKSKSGDDSNNNSNDRNDDASMGLNARDGSDNGSGTQSSWTKRAVEIDSPQDMSPDQSADPPEGTCAHVNHPKSEICSNRWLPGTNNKKCQKPKETTNGDGFKGKELEIGAPGNLNTDDQSSPNESSVKPTDGRCEYLPQNNSSDTVMENLEEPIVRAADLIGSMAKNMDAQQAAARAIDAPNCSLQASEGKDTDGENAMPYLELSLKRSRSTGEGAGPIQEEQRNVVRRSDLSAFTRYNMCAVSNQGGAGFVGSCSPNGDSSEAAKTVAAQMKQGSNGSSNNNDMGSTTKSVVTKPCGNNKVSPINGNTHTSAFHRVQPWTPATAAGKDKADEVSKKNVAAAAAAAKEMGCEAQSKHPCAAADDVNGGSAGGTAQSSVVNPSGPVEGHTANYGSNSFSNNNTNNGSTAATTAAAAAVHAETGGGVDKRSNMMNMKRERRVAAVNKFREKRKERNFGKKVRYQSRKRLAEQRPRVRWQFVRQPPAPATVER

SEQ ID NO: 32941 - protein, 400 aa, Hordeum vulgare subsp. vulgare
MDCCFPCPGARRKRKPPAPAEKPQIPPAPDKAKPGCSSSSAAARQDSLLEAKKEFVLSNGSEHRHIAAQTFTFRELAAATNGFRADCLLGEGGFGRVYKGYLESINQVVAIKQLDRNGLQGNREFLVEVLMLSLLHHPHLVNLIGYCADGDQRLLVYEYMPLGSLEDHLHDPSPDKPRLDWNTRMKIAAGAAKGLEHLHDKTNPPVIYRDLKCSNILLGEGYHPKLSDFGLAKLGPVGDKTHVSTRVMGTYGYCAPEYAMTGQLTLKSDVYSYGVVLLEIITGRRAIDNTRATGEQNLVAWARPLFKDRRKFPQMADPALEGRYPARGLYQALAVAAMCVQEQPTLRPLIGDVVTALSYLASQPYDPEVHGVHRPSRLTASGTPPRSRNHGADRQRGGSE

SEQ ID NO: 32942 - protein, 517 aa, Lolium rigidum
MDKAYIAILSCAFLFLVHYVLGKVSDGRRGKKGAVQLPPSPPAVPFLGHLHLVDKPIHATMCRLAARLGPVFSLRLGSRRAVVVSSSECARECFTEHDVTFANRPKFPSQLLVSFNGTALVTSSYGPHWRNLRRVATVQLLSAHRVACMSGVIAAEVRAMARRLFHAAEASPDGAARVQLKRRLFELSLSVLMETIAQTKATRSEADADTDMSVEAQEFKEVVDKLIPHLGAANMWDYLPVMRWFDVFGVRNKILHAVSRRDAFLRRLIDAERRRLADGGSDGDKKSMIAVLLTLQKTEPKVYTDTMITALCANLFGAGTETTSTTTEWAMSLLLNHPAALKKAQAEIDASVGTSRLVSVDDVPSLAYLQCIVNETLRLYPAAPLLLPHESSADCKVGGYNVPADTMLIVNAYAIHRDPAAWEHPLVFRPERFEDGKAEGLFMIPFGMGRRRCPGETLALRTIGMVLATLVQCFDWEPVDGVNVDMTEGGGFTIPKAVPLEAVCRPRAVMRDVLQSI

SEQ ID NO: 32943 - protein, 321 aa, Bacillus cereus G9241
MAVNEKVELATFAGGCFWCMVSPFEEMEGIIKVVSGYTGGHKENPTYKEVCSETTGHYEAVQITFDANKMPYEELLNIYWRQIDPTDVGGQFHDRGQSYETVIFYHNEEQHKKAEASKEELAKSGRFSKPIATKILPAATFYPAEEYHQGYHKKNEFRYELYRKGSGRDAFIKQHWPKDNAHLKEKLNEMQFYVTQENGTEPPFRNEYWNHKEEGLYVDIVSGEPLFTSIDKFDSGCGWPSFTKPVMSASVKEKMDVSHNMTRTEVRSKEGDSHLGHVFPDGPGPNGLRYCINSAALRFIPKEELEKEGYGDFLILFGNKK

SEQ ID NO: 32944 - protein, 213 aa, Zea mays
  misc_feature (165)..(165): Xaa can be any naturally occurring amino acid
  unsure (1)..(213): unsure at all Xaa locations
MVLSHAASAGSSDDSVRSTFASRYVRASLPRFRMPENSIPKEAAYQIINDELMLDGNPRLNLASFVTTWMEPECNKLMMDSINKNYVDMDEYPVTTELQNRCVNMIAHLFNAPLGETETAVGVGTVGSSEAIMLAGLAFKRRWQNKMKAAGKPCDKPNIVTGANXVRFAWEKFARYFEVELKEMKLSEGYYVMDPEEGVEMVDENTICVAAIL

SEQ ID NO: 32945 - protein, 404 aa, Bacillus halodurans C-125
MLEAVLKKVDAYFDELVDIRRTLHKHPELSFEEVKTPAFIADYLEKLGVNVRRGVGGRGVVGTIKGGKPGPTVALRADFDALPIQEETGLPYQSTVPGVMHACGHDGHTATLLIIAKILMEHRQQLEGSVVLIHQFAEELAPGGAIAMIEDGCLDGVDVIYGTHLWATMPAGEIGYRSGAFMAAADKFAVTIYGKGGHGAAPHETVDAVTVGASVVQQLQQIVSRNVDPLESAVVTVASFQAGGPFNVIADKANLVGTVRTFKEDIQDMIIERMERTIKGVCDAAGATYAFAYDKGYPAVINHPKETDDLKNAAVAVVGEEHVAEMAPVMGGEDFAYYLHHVPGAFFFTGAGNEDAGIIYPHHHPKFMIDERSLAIAAKTLLTATLSYSQKDASAHEPSATSDR

SEQ ID NO: 32946 - protein, 602 aa, Escherichia coli CFT073
MQTFQADLAIVGAGGAGLRAAIAAAQANPNAKIALISKVYPMRSHTVAAEGGSAAVAQDHDSFEYHFHDTVAGGDWLCEQDVVDYFVHHCPTEMTQLELWGCPWSRRPDGSVNVRRFGGMKIERTWFAADKTGFHMLHTLFQTSLQFPQIQRFDEHFVLDILVDDGHVRGLVAMNMMEGTLVQIRANAVVMATGGAGRVYRYNTNGGIVTGDGMGMALSHGVPLRDMEFVQYHPTGLPGSGILMTEGCRGEGGILVNKNGYRYLQDYGMGPETPLGEPKNKYMELGPRDKVSQAFWHEWRKGNTISTPRGDVVYLDLRHLGEKKLHERLPFICELAKAYVGVDPVKEPIPVRPTAHYTMGGIETDQNCETRIKGLFAVGECSSVGLHGANRLGSNSLAELVVFGRLAGEQATERAATAGNGNEAAIEAQAAGVEQRLKDLVNQDGGENWAKIRDEMGMAMEEGCGIYRTPELMQKTIDKLAELQERFKRVRITDTSSVFNTDLLYTIELGHGLNVAECMAHSAMARKESRGAHQRLDEGCTERDDVNFLKHTLAFRDADGTTRLEYSDVKITTLPPAKRVYGGEADAADKAEAANKKEKANG

SEQ ID NO: 32947 - protein, 513 aa, Vibrio parahaemolyticus RIMD 2210633
MVSTHWRATMQMSKSFLLITVGLASTSLQAQTLTRDNGAPVGDNQNSITAGENGSVLLQDVHLIQKLQRFARERIPERVVHARGTGAHGEFVASGDFSDLTVSAPFTEKGKVTPVFVRFSTVIHSKGSPETLRDPRGFATKFYTEQGNWDLVGNNLPVFFIRDSIKFPDMVHSLKPSPVTNVQDPNRFFDFFSHEPSATHMLTWVYSNLGTPASYRTMDGFGVHAYKWINQQGDVNYVKFQWKSQQGIKSLRPNKVTEMQGKDFNHLTNDLYAAIGRGNYPKWDLYVKVLSPEALSKLDYNGLDATKVWLNVPDRKVGTMTLNRLPENFFLETEQSAFAPSNLIPGIEPSEDRLLQGRLFAYADTQLYRLGANLFQLPVNRPLTSVNNHNQNGLSNNAQLSNGDVNYEPSRKLNLAEDNQFKAVETKLVGTVQQKAISKPRDFYQAGVLYRSMNEQDRSDLIANLAGDLNKVIDKDIKATMVSYFYRADKEYGSRLAEATDTNLSQVKNKAMM

SEQ ID NO: 32948 - protein, 451 aa, Silicibacter pomeroyi DSS-3
MKTANFIKENNARQFWQPMTHPADAQANPPKIITGAAGVRIRDIDGHETIDAVGGLWNVNLGYSNDAVKQAITGQLDSLPYYSTFRGTTNDAAIELAYDLCDFFAEEGIQRVFYTSGGSDSVETALRLARQYHKLRGQPQRTKFLSLKKGYHGTHFGGASVNGNNKFRTDYEPLLPGCFHIPAPYTYRNPFNETDPARLAQLCAQALEDEIAFQGAETIAAFIMEPILGAGGVIPPHESFMPMVREICDRNGILLIADEVITAFGRTGAWSGSRLWGVQPDMMCTAKAITNGYFPFGAVLIGTRMTEVFEGDTSGKGAISHGYTYSGHPVGAAAAVVCLKETVKANVAENAATRGEELFNGLQALAAKHEMIGDVRGGHGLMAALEVVADRASKAPAGAAMMNTVYETAYGAGVMLRVSGPNIILSPPLVLSAQDVADILSALDAGFAALG

SEQ ID NO: 32949 - protein, 658 aa, Schizosaccharomyces pombe
MERGTLQPRKKAPNGYGITPIVAHKTGEPVRYEVEDDLRKLKPSRTAPKPPAINTNLAEDTFSGFPLSQSRTTVSRVSLGSRQHSSSSIRKLQTNVSDVRSYDERNQKKSAFENFVSSMSSFLTGGGSSPTSSYGSGSASPRKSTVISSPFDPKHVTHVGFNYDTGEFTGMPTEWQALLKVSGITKSEQVQHPQAVLDAMAFYSQSKKYLEEGAKPPFPRESTEKPLLSVSALSSSSHLQPTSATSSSSRLYPSRPAPTPPASSSSSPLLSSQTVKTTTSNASRQPSPLVSSKSTDNIIRSHSPVLLTPQTLSTSETKHIRPNNSTPYQRRAETSTKPKAVATPQKVEAPSAPRLQKRAPRQQSNDSAVLAKLQSICNPKNPTLLYRNFVKIGQGASGDVYSARQVGTNLSVAIKKMNINQQPKKEFIVNEILVMKSHHHKNIVNFIDTFFYKSELWMVMEYMRGGSLTEVVTNNTLSEGQIAAICKETLELYSDLHENGIVHRDIKSDNILLSLQGDIKLTDFGFCAQIDSNMTKPTTMVGTPYWMAPEVVTRKEYGFKVDVWSLGIMAIEMVEGEPPYLNENPLRALYLIATIGTPKISRPELLSSVFHDFLSKSLTVNPKQRPSSGELLRHPFLKQAVPVSSLIPLIKSIHHSGK

SEQ ID NO: 32950 - protein, 381 aa, uncultured bacterium
DGRELVNFASNDYLGLALDPRVTAELKRSAGTLGAGAGASHLLGGHHEAHAALEAALAEWTGRERALLFSSGWSAALGAIPALIGAGDACVQDKLNHACLLDAALLSGAKLSRYPHLDVHGARRQLQLAGPEGGQRRARGEAPAARLIVTDVMFSMDGDVAPLPALADLATSFGAWLMVDEAHSLGVLGPGGAGLTVAAKLDATRVPVLMGTLGKALGGFGAFIAGDAELIEHLINTARPWLFTTALPPALAASTRVAVELARREDWRRERLKELGGRLASQLTRLGFSVGALPGPIYPLVVGDNARALALAAALKAEGFLVPAIRPPTVPQGAARLRVSLTADHAPQDVDRFCAALSRVMGQLPPPELPPPPLPGGAGAR

SEQ ID NO: 32951 - protein, 450 aa, Rhodospirillum rubrum
MALPEDQAGRAGGLAVALREALVSFGGIWFGWSGKVAAQTSDRPRFIEEGPVTYAVLDLGRKDHAQYYNGFANRTLWPLFHYRMGLAEFTRQDYEGYMRVNTVFAEQLQPLLTDDDLIWVHDYHLIPLGGELRRLGARQRMGIFLHTPFPAMEVLLALTHHRRLVGSLCAYDVVGFQTENDRRSFFDYVLHEAGGWIGENGHVTVWGRSLVARVYPIGIEKGAFAEAAQRAQRTVAYRRLRASLNGRKLMIGVERLDYSKGLPERFEAFSRLLEKHPEHRAKVSFMQVAPISRSEVPEYRRLREELESLSGQINGQFGDYDWVPIRYLTRNFARSVLAGFYRQGAVGVVTPMRDGMNLVAKEYVASQNPQDPGVLVLSRFAGAARELTTALQVNPFDREDMADAMDRALGMALDERKERWVEMMRMVDENSLEAWREKYLADLNAAPFNG

SEQ ID NO: 32952 - protein, 182 aa, Musa acuminata
FGVVYRGELKDTNEIVAVKQLDRNGFQGNREFLVEVLMLSLLHHPNLVKLLGYCADGDQRILVYEYMPLGSLEDHLLDVSADAKPLEWHTRMKIAAGAAKGLQCLHETANPPVIYRDFKASNILIDEDYNAKLSDFGLAKIGPVGDKNHVSTRVMGTYGYCAPEYALTGQLTKMSDVYSFGI

SEQ ID NO: 32953 - protein, 339 aa, Ralstonia eutropha JMP134
MSQTLLLTGATGYIASHTWVALLNAGYKVIGLDNLCNSSRVVVDRLATITGQTPHFVEGDVRDRALLDRLFAEHDITGAIHFAALKAVGESVSQPLEYYSNNLDGMLTLCAAMRDAGVKQLVFSSSATVYGNPHAVPILEDFPLSATNPYGQTKLMGEQILRDLEKSDPEWRIAYLRYFNPVGAHKSGLIGEDPRGIPNNLMPYVAQVAGGRREKLMVFGGDYPTPDGTGVRDYIHVCDLADGHLAALVCLRDRGQSMTVNLGTGSGYSVLEVVAAYQRASGRPVPYEIVARRPGDIASCYADPALAHQLLGWRARHGLDRMCEDSWRWQSTNPNGFDA

SEQ ID NO: 32954 - protein, 484 aa, Rhodospirillum rubrum
MTTRLTTTAGAPVADNQNSLTAGPRGPVLLQDYQLIEKLAHQNRERIPERVVHAKGWGAHGTLTITHDISRYTRAKLFSAVGKTTPVLARFSTVAGELGAADAERDVRGFSLKFYTEEGNWDLAGNNTPVFFVRDPLKFPDFIHTQKRHPRTHLRSPTAMWDFWSLSPESLHQVTILMSDRGLPLDPMHMNGYGSHTYSFWNDAGERFWVKFHFKTQQGHAHLTNAAAKVVVGESRESYQEALFGTIESGHFPRWTLFVQIMAEREAETTPYNPFDLTKVWPHGDFPLIEVGVLELNRNAENYFAEIEQAAFSPSNVVPGIGHSPDKMLQARVFAYADAHRYRLGTHYEALPVNAPLSPVNHYHKDGPMRFFPNNPNADAYYEPNSFGGPKEDPSVKEPPLRINGDADHYNHREGNDDYVQVGALFALFDEGERQRLFSNIAEAMAGVPEEIIRRQLVHFHRADPAYGEGVAKALGLAPVSQPA

SEQ ID NO: 32955 - protein, 141 aa, Brassica napus
EQMLNQHSNWRGRAVLVQIVNPARGKGIDIDEIRGEIEGSCKRINEDFGKPGYQPIVYIDTPVSVNEIIAYYHIAECVVVTAVRDGMNLTPYEYIVCRQGLLGSESDFNGPKKSMLVASEFIGCSPSLSGAIRVNPWNVEA

SEQ ID NO: 32956 - protein, 421 aa, Bacillus halodurans C-125
MEDKDKRSGKTTDVLASTQTVIKKALDKLGYPDEMYELMKEPIRMLTVRIPVRMDDGSTKIFTGYRAQHNDAVGPTKGGVRFHPNVTEKEVKALSIWMSLKAGIVDLPYGGGKGGIVCDPRDMSFRELERLSRGYVRAISQIVGPTKDIPAPDVFTNSQIMAWMLDEYSRIREFDSPGFITGKPIVLGGSHGRESATAKGVTICIREAAKKKGIDLQDARVVIQGFGNAGSFLAKFMHDAGAKVIGISDAYGALHDPDGLDIDYLLDRRDSFGTVTKLFKNTISNEELLELDCDILVPAAIENQITEKNAHNIKAQIVVEAANGPTTIEATEILTNRDILLVPDVLASAGGVTVSYFEWVQNNQGYYWTEEEVEGKLEAVMVHAFDNIYKLAKGRKVDMRLAAYMVGVRKMAEASRFRGWV

SEQ ID NO: 32957 - protein, 317 aa, Burkholderia vietnamiensis G4
MTTALDQLKQYTTVVADTGDFQQLAQYKPQDATTNPSLILKAVQKDAYKPILEKTVRDHRNESTDFIIDRLLIAFGTEILKLIPGRVSTEVDARLSFDTQRSIDKGRELIKLYEAAGIGRERILIKLASTWEGIRAAQVLQQEGIKCNMTLLFSLVQAAACAEAGAQLISPFVGRIYDWYKKQAGADWDEAKDGGANDPGVQSVRRIYTYYKTFGYHTEVMGASFRTTSQIIELAGCDLLTISPDLLQKLQDSNDPVERKLSPDALHDKPTERVAIDEASFRFQLNDDAMATEKLAEGIRVFAADAVKLEKLIAALR

SEQ ID NO: 32958 - protein, 514 aa, Agrobacterium tumefaciens str. C58
MAVTLLSPFRSSIAAVAGIALVAGSLSAPVAARAQSHGPESVADLAEPLLDAVVNISTSQNVKTEGKGPVPPKLPEGSPFQEFFKDYFDSQKPEGGEKVNSLGSGFVIDPAGYVVTNNHVIEGADAIEVIFPNGSKLKATLVGTDTKTDLSVLKVEPKTPLKAVKFGDSRSMRIGDWVMAVGNPFGLGGSLTVGVISARGRNINAGPYDNFIQTDAAINKGNSGGPLFNMKGEVIGINTAIISPSGGSIGIGFAVPTELAQNIVQQLIEFGETRRGWLGVRVQPVTDDVAASLGMDSAKGALISGVAKGGPVENGPIQAGDVVLKFDGKDINEMRDLLRIVAESPVGKEVDVVVYRDGKEETVKVKLGQLQDTTDEKASTDDPQGEDGDGSMVAPDDKDGGDDQAQDQTPEVREAPQTVLGMNLVVLSNELRTEKGIAESVEGVLVASVDPGSPAEQKGMKAGDVIVEVGQDFMEVPGDVLVRVNGLKSEGRKNAHMMVADAQGNLRVVALPLE

SEQ ID NO: 32959 - protein, 460 aa, ASPERGILLUS NIDULANS FGSC A4
MALPLRTARHASRLAQTIGRRGYATAEPDLKSALKAVIPAKRELLAEVKKQGDEVIGEVKVSNVIGGMRGLKSMLWEGSVLDADEGIRFHGKTIKDCQKELPKGPTGTEMLPEAMFWLLLTGEVPSTSQVRAFSKQLAEESHLPDHILDLAKSFPKHMHPMTQISIITAALNTESKFAKLYEKGINKADYWEPTFDDAISLLAKIPRVAALVFRPNEIDVVGRQKLDPAQDWSYNFAELLGKGGANNADFHDLLRLYLALHGDHEGGNVSAHATHLVGSALSDPFLSYSAGLLGLAGPLHGLAAQEVLRWILAMQEKIGTKFTDEDVRAYLWDTLKSGRVVPGYGHGVLRKPDPRFQALMDFAATRKDVLANPVFQLVKKNSEIAPGVLTEHGKTKNPHPNVDAASGVLFYHYGFQQPLYYTVTFGVSRALGPLVQLIWDRALGLPIERPKSINLLGLKK

SEQ ID NO: 32960 - protein, 183 aa, Chlamydia trachomatis
MSKLTQVFKQTKPCIGYLTAGDGGTSYTIEAAKALIQGGVDILELGFPFSDPVADDPEIQVSHDRALAENLTSETLLEIVEGIRAFNQEVPLILYSYYNPLLQRDLDYLRRLKDAGINGVCVIDLPAPLSHGEKSPFEDLLAVGLDPILLISAGTTPERMSLIQEHARGLLYYIPYKLREILK

SEQ ID NO: 32961 - protein, 462 aa, Zea mays
MDRLPESTRSMRKYASEAGGLRAARQGPHGRSLTARTAHSMSTTALRTKSKSAASLLRRVPFAPLRPVLANLQEVFLGTKLAVLFPAVPLAIAAQCAHFGQVWVFTLSLLGLIPLAERVSFLTEQIAIYTGPTVGGLLNATCGNATELIIALFALMGGQIEVVKCSLLGSVLSNLLLVLGTSLFCGGVVNLGSDQPYDRTQADVSTGLLILGVLCQSLPLMLRYAVGAGEHSVAAATTVLDLSRACSVVMLLAYVAYLFFQLKTHAQLFEPQEVDDGCEAEEDEQAVIGFASGFFWLAFNTVLIAILSEYVVGTIEPTSKSWGLSVSFISIILLPIVGNAAEHAGAIIFALKNKLDITLGVALGSATQISMFVVPLSVIVAWIAGIQMDLDFKLIETGSLFVSVIVTAFTLQDGSSHYLKGILLLLCYIVIGACFFVTRQPASNNNGAGLSLPTGTLSAQAA

SEQ ID NO: 32962 - protein, 599 aa, Magnaporthe grisea 70-15
MNCPSRTDEPPLTDHPTWNQNPPFLSGDLTTCQDLNGIANAREHRDGSGGAAVTDDERGGNGMQRDGWAVADRMPVEAEGRKGLAWGWGSFDASHSQAKGVTGGEGHSLSTAAGGGGFGAVAAATAAPPAPCSLFGWFSWVASVLVCAAIMSASRLPESLTGRLFGAPQPGLASAPNTSTIATNSRDADVIPLGKRSTCATGGFLSEEEYNTPLHVGALLIILGVSFGACAFPIVASRIPRLRLPARFFFAVRHFGTGVLLATAFVHLLPTAFTLLGNPCLSSFWVSEYPAMPGAIALAAVFFVTVIEMVLQPARHMTEAAGSSTGGGCMSAAAVLQQQQERPRRTAEPAQDTSSEDGNGAMAGRPMSLEMRPAGGNANSLGRQLSNLGRTDDQNASVGAPSSDGQAGERLSDKSVVVDEENRLAGGHLQLTAQQQHQKDVLQCMMLEVGILFHSVFIGMTLSVSIGHEFVILLIAIAFHQTFEGLALGSRIANIKWEKGSWQPWMMSMAYGCTTPLGQAIGIATHRLYNPESEFGLVLVGTMNAISSGLLVFASLVELLSEDFLSDESWRILRGRRRVYACFLVLSGAIGMSLVGAWA

SEQ ID NO: 32963 - protein, 205 aa, Banksia lindleyana
SSFDFMDGYDKPVEGRKINWMKAGILESDRVVTVSPFYAQELLSGIEKGVELDNIIRKTGITGIVNGMDVQEWNPSTDKYIDVKYDATTLFNAKPILKEALQAAVGLPVDGKIPVIGFIGRLEEQKGSDILAEAISQFIGENVQIVILGTGKKPLEEQIEQLEIKYPDKAIGIAKFNVSLAHTIIAGADFMLIPSRFEPCGLIQL

SEQ ID NO: 32964 - protein, 205 aa, Banksia serrata
SSFDFMDGYDKPVEGRKINWMKAGILESDRVVTVSPYYAQELLSGIEKGVELDNIIRKTGITGIVNGMDVQEWNPSTDKYIDVKYDTTTVFNAKPILKEALQAAVGLPVDGNIPVIGFIGRLEEQKGSDILAEAISQFIGENVQIVILGTGKKPLEKQIEQLEKKYPDKAIGIAKFNVSLAHMIIAGADFMLIPSRFEPCGLIQL

SEQ ID NO: 32965 - protein, 1154 aa, Neurospora crassa
MNNNYYGSPLSPEELQHQMHQHQQQQQQQQQQQQQQQQQQQQQQQQQQQQHQHQQQQKTNQHRNAGMMNTPPTTNQGNSTIHASDVTMSGGSDSLDEIIQQNLDEMHRRRSVPQPYGGQTRRLSMFDYANPNDGFSDYQLDNMSGNYGDMTGGMGMSGHSSPYAGQNIMAMSDHSGGYSHMSPNVMGNMMTYPNLNMYHSPPIENPYSSAGLDTIRTDFSMDMNMDSGSVSAASVHPTPGLNKQDDEMMTMEQGFGGGDDANASHQAQQNMGGLTPAMTPAMTPAMTPGVSNFAQGMATPVSQDAASTPATTFQSPSLSATTQTIRIGPPPPPSVTNAPTPAPFTSTPSGGGASQTKSIYSKSGFDMLRALWYVASRKDPKLKLGAVDMSCAFVVCDVTLNDCPIIYVSDNFQNLTGYSRHEIVGRNCRFLQAPDGNVEAGTKREFVENNAVYTLKKTIAEGQEIQQSLINYRKGGKPFLNLLTMIPIPWDTEEIRYFIGFQIDLVECPDAIIGQEGNGPMQVNYTHSDIGQYIWTPPTQKQLEPADGQTLGVDDVSTLLQQCNSKGVASDWHKQSWDKMLLENADDVVHVLSLKGLFLYLSPACKKVLEYDASDLVGTSLSSICHPSDIVPVTRELKEAQQHTPVNIVFRIRRKNSGYTWFESHGTLFNEQGKGRKCIILVGRKRPVFALHRKDLELNGGIGDSEIWTKVSTSGMFLFVSSNVRSLLDLLPENLQGTSMQDLMRKESRAEFGRTIEKARKGKIVVAASMRCKTSVARCSRPIQHSTPEMVVRVKGQTFLLAQTKLLKASSRTLRPATVTVKNMSPGGVPLSPMKGIQTDSDSNTLMGGMSKSGSSDSTGAMVSARSSAGPGQDAALDADNIFDELKTTRCTSWQYELRQMEKVNRMLAEELAPVLSNKKKRKRRKGGGNMVRDCANCHTRNTPEWRRGPSGNRDLCNSCGLRWAKQTGRVSPRTSSRGGNGDSMSKKSNSPSHSSPLHREVGNDSPSTTTATKNSPSLRGSSTTAPGTITTDSGPAVASSASGTGSTTIATSANSAASTVSPALLRQVPVAAHRLNIFRLISREHTLTPRPCSVYTSISSISSINSSINSSINSSINSSTNSFSSISSTLHKASHSWKARKRFPWKRNGDDLN

SEQ ID NO: 32966 - protein, 109 aa, Cryptococcus gattii
NHLDEGQGIHWHGMRQKNSPYMDGIPGITQCPIPPGGSYTYNFTISDQSGTYWWHSHYSNAMADGLWGPLIVHSVHEPIQRGRDYDEDRIVFVSDWMHDNSEIIIAALA

SEQ ID NO: 32967 - protein, 205 aa, Banksia aemula
SSFDFMDGYDKPVEGRKINWMKAGILESDRVVTVSPYYAQELLSGIEKGVELDNIIRKTGITGIVNGMDVQEWNPSTDKYIDVKYDATTVFNAKPILKEALQAAVGLPVDGNIPVIGFIGRLEEQKGSDILAEAISQFIGENVQIVILGTGKMPLEKQIEQLEIKYPDKAIGIAKFNVSLAHMIVAGADFMLIPSRFEPCGLIQL

SEQ ID NO: 32968 - protein, 109 aa, Cryptococcus gattii
NHLDEGQGIHWHGMRQKNTPYMDGIPGITQCPIPPGGSYTYNFTISDQSGTYWWHSHYSNAMADGLWGPLIVHSVHEPIQRGRDYDEDRIVFVSDWMHDNSEIIIAALA

SEQ ID NO: 32969 - protein, 189 aa, Banksia candolleana
YDKPVEGRKINWMKAGILESDRVVTVSPFYAQELLSGIEKGVELDNIIRKTGITGIVNGMDVQEWNPSTDKYIDVKYDATTVFNAKPILKEALQAAVGLPVDGNIPVIGFIGRLEEQKGSDILAEAISQFIGENVQIVILGTGKKPLEEQIEQLEIKYPDKAIGIAKFNVSLAHMIIAGADFMLIPSRF

SEQ ID NO: 32970 - protein, 325 aa, Vibrio vulnificus CMCP6
MKHIAIIGECMIELNGKPFGSMHQTFGGDTLNAAVYLSRGCEANSKPDEVKVSYVTALGNDPISTGMLTRWQDEGVSTDLVLRDETRTPGLYLIQLDDQGERTFLYWRNQSAARYLLQHPNFGMVKQALTQVDAVFLSGISLAILPEEDRISLLNLLVELKAQGVEIAFDSNFRPALWPQDNNLTVKNVYQAMYQLTDVALVTFDDEQLIWGDETPEQTIERLTSLGVGKCIVKLGADGCLVQDSTNQGAGAALAPQAVPTQPVAQVVDTTSAGDSFNGGFLSAYLAGADLATSCQRGNALAGAVIQHRGAIIPKAFTQPALGVV

SEQ ID NO: 32971 - protein, 167 aa, Synechococcus sp. CC9605
MSLSAAVLSRRSMLLAAMAGVFGSLWRPQPVLAASKAGDPSWDLNADQWRERLSPQAYDVLRNEGTERPFTSPLNGEKRSGTYHCAGCDAALFSSEAKFDSGTGWPSFWQPLDGAIATKVDFKLILPRTEYHCSRCGGHQGHVFNDGPRPTGKRYCNNGVALRFQPA

SEQ ID NO: 32972 - protein, 144 aa, Brassica napus
  misc_feature (20)..(20): Xaa can be any naturally occurring amino acid
  unsure (1)..(144): unsure at all Xaa locations
MDKRWCLQGMTALVTGGAAXIGCAIVEELASFGAKVHVCDISETLLNQSLSEWEKKGFQVSGSVCDVSSRPERETLMQTVSSLFDGKLNIFVNNVGVLRGKPTTEYGADDFAFHISTNLKPAYHFSQLSHPLLKASGYGSIVFM

SEQ ID NO: 32973 - protein, 205 aa, Banksia sceptrum
SSFDFMDGYDKPVEGRKINWMKAGILESDRVVTVSPFYAQELLSGIEKGVELDNIIRKTGITGIVNGMDVQEWNPSTDKYIDVKYDATTVFNAKPILKEALQAAVGLPVDGNIPVIGFIGRLEEQKGSDILAEAISQFIGENVQIVILGTGKKPLEEQIEQLEIKYPDKAIGIAKFNISLAHMIIAGADFMLIPSRFEPCGLIQL

SEQ ID NO: 32974 - protein, 385 aa, Xanthomonas axonopodis pv. citri str. 306
MSTPASTSSPFTEQALPPWRRAVLKVGSSLLAADGGGLSPRFALGLAQFVSANLAAGRELVIVSSGAVAAGRAILPKAMDVGAPIAARQALAALGQAQLIALWQRFFERPVAQVLLTHDDLRNRRRYLNARATLGELLRLGALPVINENDTVSVDELKLGDNDNLAAIVAALVDADALFIATDIDGLYSADPRSNPLARPLDDVPELTPEVLAMAGGSGSNVGTGGMRTKLEAAAKAGAAGIETYLFNGRSGEVVRALALDRLRGTRIHAARTRIAARKYWLRHAPVEAGAILIDDGAAAALTGKGASLLPGGVAGAQGDFRRGDMVEIRRRDTTGDGQCLARGVSQYSALDIRRIAGRHSREIENVLGYSYGENVVHRDDLVVL

SEQ ID NO: 32975 - protein, 432 aa, Bacillus cereus G9241
MNVTTDVQSTTEETKEKRYKTLFGSALGYAAEGLDMLLLSFVLVYILKEFHLSPVEGGNLTLATTIGMLIGSYLFGFIADLFGRIRTMAFTILLFSLATALIYFATDYWQLLILRFLVGMGVGGEFGIGMAIVTETWSKEMRAKATSVVALGWQFGVLVASLLPAFIVPHFGWRAVFLFGLIPALLAVYVRKSLSEPKIWEQKQRYKKELLQKEAEGSLTTTEAEQLKQMKKFPLRKLFANKKVTITTIGLIIMSFIQNFGYYGIFTWMPTILANKYNYTLAKASGWMFISTIGMLIGIAIFGILADKIGRRKTFTIYYVGGTIYCLIYFFLFTDSTLLLWGSALLGFFANGMMGGFGAILAENYPAEARSTAENFIFGTGRGLAGFGPVIIGLLAAGGNLMGALSLIFIIYPIGLVTMLLCVPETKDKVLE

SEQ ID NO: 32976 - protein, 476 aa, Silicibacter pomeroyi DSS-3
MAPDISEHQGKNMLSRRSFLWASGGVAAIAALPATAIRAQTAAPELVARVNPVQLLPSGYPETSVWGYGGQAPGAEIRVTQGARIARRFVNQLPQASSVHWHGLRAENAMDGVSGLTQDAVPPGESFDYDLVAEDAGTFWYHSHNRSAEQVARGLYGPLIVDEPTPPDVDRDVTLMLDDWRIDPETGQIEDDFGATHDLSHGGRLGNYISTNGEAAYQLPVKRHERLRLRIVNAANARLFTLGLQGLDGWLMAYDGMPIATPEAIPETFTLGPGQRVDLFVDVIADAGQEALLGRVDQRGGFVQAAFPVSGGASVNRRPAPAPLPPNRAPDLAGLDEAATLRLEMSGGAMGGMRDAIWKGSSRKAGDLMAEGQFWAFNGLVGMTDTPLASLSLGQVARMTVVNDTVFAHAMHLHGMHFRVLAEDGTPGPLRDTLLTMRGETHEIVFAADNPGRWAFHCHMLSHAASGMMTWIEVTA

SEQ ID NO: 32977 - protein, 577 aa, Magnaporthe grisea 70-15
MSNEGTNTVLKNPGSNQEEADPDSPSSLGDKSKLDELADSTSDGSQANSGRGIAFWAIFISLSVTGFLSSMEGGIMSTALPAVSRAVNAESDYVWIINVYFLTSAAFQPLYGQLADIWGRRWPMLSAVTIFAAGSAICGAANNSGTLIGGRAIQGLGAAGINTLVELILCDLLPLRERGQFMGLLFLFIVVGSVLGPMLGGIIVDKTSWRWIFFINLPICALCFGLLFFALNLKHRRDDNSTSLQKLKKIDFVGVLILCVAVTLLIYALTYGGGAKYAWSHPVIITTLVLGIFGHGLFIAFEASPWCSNPTTPLTLFQNRTSVAAYTLEAVQILVSWGALYFLPLYFQSVLALTPSRSGVLILAFSISYCLSAAIGGGLVTKLGKYRLVHIISFAIMTIMMGVFTILNRNSSLAVNVILGLIAGVGVGLPNASILTAVQASLPDSLNAASTALFAFIRSLATVFAVTIPAAIFNSRFDDLLSTSALDNDVKNSLDLGKAYQQASPDFLHSFPAPVQDQIVGLYELSLKLVWQVLIGIAAVGVIASLLEKDLECRTEQTTEEFGLKDRDEKAPKKSEV

SEQ ID NO: 32978 - protein, 284 aa, Vitis vinifera
MTKDVEVAEHGSFSAKDYHDPPPAPLFDSVELTKWSFYRALIAEFIATLLFLYITVLTVIGYKSQTAGGDPCGGVGILGIAWSFGGMIFILVYCTAGISGGHINPAVTFGLFLARKVSLIRAILYMVAQCLGAICGVGLVKAFQSAYYDRYGGGANELSTGYSKGTGLGAEIIGTFVLVYTVFSATDPKRSARDSHVPVLAPLPIGFAVFMVHLATIPITGTGINPARSLGAAVIYNNEKAWDDQWIFWVGPFIGAAIAAFYHQFILRAGAVKALGSFRSTTHV

SEQ ID NO: 32979 - protein, 203 aa, Rhizobium leguminosarum
MKLYHHPLSGHAHRAHLFLSLLGVPYELVEVDLAAGAHKAPDFLKLNPFGQVPVLDDNGTVIADSSAILVYLARKYGRTDWLPEEAVAAARIQKWLSVAAGEIAYGPCAARLVTVFGADFRTDEVIARAHRILALVEAELGARRFLLGDNATIADIALYSYIANAPEGNVDTSAYQAVRAWLARIEALPGFVGFRRTKIGLAA

SEQ ID NO: 32980 - protein, 479 aa, Haemophilus ducreyi 35000HP
MSRKLRRTKIVCTMGPATDRSNNLERIIAAGANMVRMNFSHGVPEDHIERANKVREIAARLGKHVAILGDLQGPKIRVSTFKEGKIFLNIGDKFTLDADLPRGEGDQQVVGLDYKNLPNDVVPGDILLLDDGNVQLKVISVEGAKVHTEVTLGGPLSNNKGINKLGGGLSAPALTEKDKEDIKLAARIGVDYLAVSFPQSSQDLHYARQLAEEAGLDAKIVAKVERAETVATEEAMDDIILGADVVMVARGDLGVEIGDAALVGVQKRLIRRARKLNRVVITATQMMESMIKKPMPTRAEVMDVANAVLDGTDAVMLSGETASGDYPVETVKSMAEVCLGAETMPSINISRHRMQGKFAAIDEAVAMSAMYTANHLESVSAIIALTHSGETAKLMSRISSGLPIYALSRNQQALNRTALYRGVTPVYYNEESRTIEGAKKGIALLKEKGYLMTGDLVLLTQGSESKDGGTNTCRILKVE

SEQ ID NO: 32981 - protein, 339 aa, Sinorhizobium meliloti
MRVYYDRDADLNLIKSKKVAIIGYGSQGRAHALNLKDSGAQNVAIALKSGSATAKKAEADGFKVMTVAEAAAWADLMMMATPDELQADIYKADIAGNIRDGAAIAFAHGLNVHFGLIEPKASVDVVMIAPKGPGHTVRGEYQKGGGVPCLVAVHQDASGNALDLALSYACGVGGGRSGIIETNFKEECETDLFGEQVVLCGGLVELIRAGFETLVEAGYAPEMAYFECLHEVKLIVDLIYEGGIANMNYSISNTAEWGEYVTGPRIITEDTKAEMKRVLKDIQTGKFTSEWMQEYRSGAARFKGIRRVNDSHQIEEVGAKLRAMMPWIGKNKLVDKAKN

SEQ ID NO: 32982 - protein, 557 aa, Kluyveromyces lactis NRRL Y-1140
MSRKGLYQAICLSESFCNVVKNSASIGRQSLDIWLKTSTLTRPVLSKFQWFYDKDWEHARKLSESVRKSTKGHSSKKAHLSKCSVKNKKNVRHFSSYHRCSNKAADAIPEDKLVNKQKANKLESSEVPSSRISRLFHYGHLAASVGISAASQSITQLSRGQSSSFKDLLLSDSNVERIANKFSQMRGAALKLGQLMSFQDEKVLPPQLYTILSRVQNSANYMPPRQLDRLLARELSSDWEKKFKSFDRTPIAAASIGQVHNAVLHNGEECVVKIQYPGVKDSIDSDLNNLLMLLTASSLLPKGLFLDKTIDNARKELKWECDYHREANALKHFASLLKDDPVFEVPFVYDELTTENIITMQRMKGTEITKLPVNTPQEVRDYICDNIMRLCLQEIAQFKYMQTDPNWANFLYNSKTKKIELLDFGASRGFPEPFIHNYRKLLTQATKGDRIGVAETSVELGYLTGLESTAMVDAHVESVMTLGEPFSGDPEKSFDFANQTVSDRVRSKITVMLNERLCPPPEETYSLHRKFSGVFLLCSKMRAKVSCSKLFKEYFAL

SEQ ID NO: 32983 - protein, 168 aa, Zea mays
  misc_feature (140)..(140): Xaa can be any naturally occurring amino acid
  unsure (1)..(168): unsure at all Xaa locations
MADRWLELPNLALQVVGILPEVQRPSSMVPRCQKVAYTAISLLIYLVGSQLPVYGYGVRSPSVADSQYWVDMPDCNSVMSAGIMPLVLSEAVLHFLLWCKVLRANNPEDRMLLSRVQKLVGIIFAADFSVCRVLISPILXKLTLGQSILIVLQHFFGSVIVIYLDDLL

SEQ ID NO: 32984 - protein, 502 aa, Arabidopsis thaliana
MVLSHAVSESDVSVHSTFASRYVRTSLPRFKMPENSIPKEAAYQIINDELMLDGNPRLNLASFVTTWMEPECDKLIMSSINKNYVDMDEYPVTTELQNRCVNMIAHLFNAPLEEAETAVGVGTVGSSEAIMLAGLAFKRKWQNKRKAEGKPVDKPNIVTGANVQVCWEKFARYFEVELKEVKLSEGYYVMDPQQAVDMVDENTICVAAILGSTLNGEFEDVKLLNDLLVEKNKETGWDTPIHVDAASGGFIAPFLYPELEWDFRLPLVKSINVSGHKYGLVYAGIGWVIWRNKEDLPEELIFHINYLGADQPTFTLNFSKGSSQVIAQYYQLIRLGHEGYRNVMENCRENMIVLREGLEKTERFNIVSKDEGVPLVAFSLKDSSCHTEFEISDMLRRYGWIVPAYTMPPNAQHITVLRVVIREDFSRTLAERLVIDIEKVMRELDELPSRVIHKISLGQEKSESNSDNLMVTVKKSDIDKQRDIITGWKKFVADRKKTSGIC

SEQ ID NO: 32985 - protein, 486 aa, Kluyveromyces lactis NRRL Y-1140
MGNLPSHSNRPHHKHPSTMSQNVKDVSMVDINEAMNERQDDTSNKVETPGASSNLTQSLSQMNIDDRNELTPQLSSRKSTLIFNDDFDDISNQHKHIEHQNNYDDGRIITDNEDEDEDVVNNIITGPSDGSASSLSADSPAASSHSEDGRHQNSAYTNNSQEQHANKVSGNHYDGNVQHPGPAINQQTQPVPERRPTMVPVEITWQQGGSKVYVTGSFTGWRKMIGLVPVTDKPGVFHIKLQLPPGTHRFRFIVDNELRFSDFLPTATDQMGNFVNYLEIVPPESMQMMNYELDAQQQTQQKQNMQNQQLSDNVSQSQKIRDQTIQSQVRRQPSQSKDGKLSARSQLALHIEEDPDDMGNGYTRFKEEQQLKTDYEYTQDIPAVFTDPSVMEQYYLTLDQQQNNQQNMSWLTPPQLPPQLENVILNNYNKNAEPGSENNSGALPIPNHVVLNHLATSSIKHNTLCVASIVRYKRKYATQILYAPLQ

SEQ ID NO: 32986 - protein, 216 aa, Medicago sativa
GSWLVMRLMEPGYMVRATVRDPENLKKVSPLLELPGAKSKLSIWKADLGEEGSFDEAIKGCTGVFHVATPMDFESKDPENEMIKPTIKGVLDIMKACLKAKTVRRLIYTSSAGTLNVTEDQKPLWDESCWSDVEFCRRVKMTGWMYFVSKTLAEQEAWKFAKEHKMDVITIIPPLVVGPFLIPTMPPSLITALSPITGNEAHYSIIKQGQYVHLDD

SEQ ID NO: 32987 - protein, 279 aa, ASPERGILLUS NIDULANS FGSC A4
MATPRGRLQGKNAIITGAAGGIGLETSILFAREGANVLMADISASALEKALAKVRELVPDAPRVETIKCDVSKESEVQAMVESQDSWGGTDVIFNNAGIMHADDADAIDTPEKIWDLTQNINVKGVWFGCKHAVLSMRRHKKSKGSIINTASVVALVGSATPQLAYTASKGAVLALTRELAIVHAREGIRFNALCPAPLNTPLLQDWLGDDQAKRHRREVHFPMGRFGEAIEQAHAVVFLASDESSFVNGADFVVDGGMSKAYVTPEGPAPPAPKNQAQ

SEQ ID NO: 32988 - protein, 186 aa, Brassica napus
VASGEIYGGEKTLRPLREVFPNFYTKEMLANDELKPMLPFSSRLAAIDYIVSDESDVFITNNNGNMAKILAGRVDPRVRKRTIRPNAKKLSALFMDREKMEWQTFAKKVKSCQRGFMGDPDEFKPGRGEFHEYPQACICQRPFSYDKTSTDDEEEEDIPGEVHNNTSSGHGHLSSADSERDEVFPD

SEQ ID NO: 32989 - protein, 429 aa, Xylella fastidiosa Temecula1
MSDLDKVTLNAGETSLVLPVLKPTLGNGCVDIAKLTKETGLFTYDSGFTATASCKSAITYIDGEKGVLLYRGYPIEQLAEHSSFLEVAYLLMNGELPRKDEFAKFDDEITHHTMMHESLKNFLGGFHYDAHPMAMLAASVASLSAFYHDTLDLNDLEQRRLAAIRLIAKVPTLAAAAHRYSIGWPIRYPRNNLGYVERFLHMMFEVPSEPLQLNPVVIKALDLLFILHADHEQNASTSTVRLVGSTGANPYASVAAGITALWGPAHGGANEAVLKMLEEIGDAKNVDLVIAKAKTKDKNSPFRLMGFGHRVYKHFDPRAKIIREMAHTVLGELGVNDPLLEVALKLEEAALKDDYFVQRKLYPNVDFYSGIIYKAINIPLEMFTVMFAIARTAGWVSHWLEQQVDPEMKISRPRQIYTGHRERDYKDAR

SEQ ID NO: 32990 - protein, 109 aa, Cryptococcus gattii
NHLDKGQSIHWHGMRQKDTPYMDGVPGITQCPIPPGGSYTYNFTISDQSGTYWWHSHYSNAMADGLWGPLIVHSVHEPIQRGRDYDEDRIVFVSDWLHDDSEIIIAALA

SEQ ID NO: 32991 - protein, 455 aa, Vibrio sp. Ex25
MKKPLLALTVLSLSLGSIIAPVQATAALPLNVDGQQLPSLAPMLEKVTPAVVSIAVEGKQVQTSRIPEQFQFFFGPDFPMEQRRERPFRGLGSGVIIDAKKGHIVTNYHVIKGADEIRVRLYDGREYDATLVGGDEMADVALLKLEKAKNLTQIKVADSDKLRVGDFTVAIGNPFGLGQTVTSGIVSALGRSGLNVENFENFIQTDAAINSGNSGGALVNLNGELIGINTAILGPNGGNVGIGFAIPSNMMKNLTEQILEFGEVKRGMLGVQGGEVTSELADALGYESSKGAFIGQVVPDSAADKAGLKAGDVIVSVNGKAINTFSELRAKVATLGAGKEITLGVVRDGKNKTFDVTLGESTNMKAKAETLHEGLKGAELSNTTPSDAIQGVKVSSVADNSPAAQYQLQQGDIIIGVNRQRVKNLAELRAIVDKHKGVLALNIQRGERTIYLVIR

SEQ ID NO: 32992 - protein, 371 aa, Vibrio sp. Ex25
MLFFIFYAILALMHGEDMLSFLLRSVFLGLATAAVVLLAVPSLRHNVIPAALDPQPVNIASVELTFNQAVRRAAPAVVNIYSRKYLENDRSKLSTQGLGSGVIVSEKGYIITNYHVVAQADQIVVALQDGRAAAAQLVGTDKRTDIAVLRVEGSNLPVIPLNSNYKPQVGDVVLAIGNPYNLGQTTTFGIISATGRSSISDGRQAFIQTDAAINEGNSGGALVNTQGELVGINTASFQQATDLETYGISFAIPAPLASKIMQKIIADGRVIRGYIGIDGQDINAVTARLLGNEHIGGIVVLGIDPNGPANAAGFQKQDIIISIDGNKVQGRQSVMDIVTDLRPGTTVDVGIIRKGKEMSLKVTIAEDKQEA

SEQ ID NO: 32993 - protein, 453 aa, Geobacter sulfurreducens PCA
MPDYDTQTLRDWDRRHIWHPFTQMKEWEESEPVVIVEGEGSWIIDSEGKRYLDGVAAIWTNVHGHCRREINEALKAQVDRLEHSTLLGLTNDRAVVLAKRLAEIAPPGLCKVFYSDNGSTAVEVGVKMAFQFWRHEGKPEKSRFISFTSAYHGDTLGAVSVGGIDLFHGVFRPLLFPTIQAPAPYCYRCPMGRDTPAACGMECLTELERIMESHAGEVAGLVIEPLVQGAGGMIVQPEGFLKGVRELCDRHDILMIADEVAVGFGRTGAMFACGREGITPDIMALSKGITAGYMPLAATLATQQVYDAFLGEYREMKTFFHGHTFTGNPLGCAVALASLDLFESDRLLGKLPNKIKLLQEKLKGLIELEHVGDVRQCGMIAAVELVRDRATKEPFDWEERVGVRVCLEARTHGVFLRPLGNVIVIFPPLAITAEEIDFLVDGLEKSIHTVTGG

SEQ ID NO: 32994 - protein, 338 aa, Arabidopsis thaliana
MVLKAAFELGVIDTIAAAGNDTWLSPCEIACSLPTKPTNPEAPVLLDRMLSLLVSHSILKCRMIETGENGRTGKIERVYAAEPVCKYFLRDSDGTGSLVPLFMLLHTQVFFKTWTNLKDVILEGRDAFNSAHGMKIFEYINSDQPFAELFNRAMSEPSTMIMKKVLDVYRGFEDVNTLVDVGGGNGTVLGLVTSKYPHIKGVNFDLAQVLTQAPFYPGVEHVSGDMFVEVPKGDAVFMKWILHDWGDEDCIKILKNCWKSLPEKGKIIIVEFVTPKEPKGGDLSSNTVFAMDLLMLTQCSGGKERSLSQFENLAFASGFLRCEIICLAYSYSVIEFHK

SEQ ID NO: 32995 - protein, 205 aa, Banksia baxteri
SSFDFMDGYDKPVEGRKINWMKAGILESDRVVTVSPFYAQELLSGIEKGVELDNIIRKTGITGIVNGMDVQEWNPSTDKYIDVKYDATTVSNAKPILKEELQAAVGLPVDGNIPVIGFIGRLEEQKGSDILAEAISQFIGENVQIVILGTGKKPLEEQIEQLEIKYPDKAIGIAKFNVSLAHMIIAGADFMLIPSRFEPCGLIQL

SEQ ID NO: 32996 - protein, 298 aa, Dechloromonas aromatica RCB
MWEYSDKVREHFFNPRNSGPLEEANGIGDVGSIQCGDALRLMLKVEPETEIILDAHFQTFGCGSAIASSSALTEMVKGMTLDQALEVSNQNIADYLDGLPPEKMHCSVMGREALQAAIANYRGEEWSDDHEEGALICKCFAIDAVMIEDVVKANNLNTVEEVTFYTKAGGGCAACHEGIEEILAQVKAERAGPGEVSPPPACPATPEAPKPPTKKLSIVEKIAKIQEVLESVRPMLLRDHGDVELADVQGKKIYVHLKGACSGCMMEAATLGGIQQKMIETLGELVQVLPSSHMPVEA

SEQ ID NO: 32997 - protein, 197 aa, Banksia speciosa
YDKPVEGRKINWMKAGILESDRVVTVSPFYAQELLSGIEKGVELDNIIRKTGITGIVNGMDVQEWNPSTDKYIDVKYDATTVCNAKPILKEALQAAVGLPVDGNIPVIGFIGRLEEQKGSDILAEAISQFIGENVQIVILGTGKKPLEEQIEQLEIKYPDKAIGIAKFNVSLAHMIIAGADFMLIPSRFEPCGLIQL

SEQ ID NO: 32998 - protein, 238 aa, Arabidopsis thaliana
MNLKATELCLGLPGGAEAVESPAKSAVGSKRGFSETVDLMLNLQSNKEGSVDLKNVSAVPKEKTTLKDPSKPPAKAQVVGWPPVRNYRKNMMTQQKTSSGAEEASSEKAGNFGGGAAGAGLVKVSMDGAPYLRKVDLKMYKSYQDLSDALAKMFSSFTMGNYGAQGMIDFMNESKLMNLLNSSEYVPSYEDKDGDWMLVGDVPWEMFVESCKRLRIMKGSEAIGLAPRAMEKYCKNRS

SEQ ID NO: 32999 - protein, 175 aa, Oryza sativa
MAPSVMASSATSVAPFQGLKSTAGLPVNRRSSSSSFGNVSNGGRIRCMQVWPIEGIKKFETLSYLPPLTVEDLLKQIEYLLRSKWVPCLEFSKVGFVYRENHRSPGYYDGRYWTMWKLPMFGCTDATQVLKELEEAKKAYPDAFVRIIGFDNVRQVQLISFIAYKPPGCEESGGN

SEQ ID NO: 33000 - protein, 205 aa, Banksia menziesii
SSFDFMDGYDKPVEGRKINWMKAGILESDRVVTVSPFYAQELLSGIERGVELDNIIRKTGITGIVNGMDVQEWNPSTDKYIDVKYDATTVFNAKPILKEALQAAVGLPVDGNIPVIGFIGRLEEQKGSDILAEAISQFIGENVQIVILGTGKKPLEEQIEQLEIKYPDKAIGIAKFNVSLAHMIIAGADFMLIPSRFEPCGLIQL

SEQ ID NO: 33001 - protein, 252 aa, Pinus taeda
MSCSVVGSMGMALEKSGGNAQHEKRDSLDFAETELKLGLPGVAADESRAHQKSCGKRSFSEAMESRSYTITDVDITRTGTPEDADKFHGPIVKEKQMALPANDPATTGSRPPPKAQIVGWPPVKDFRKVRTISTCDSLYVKVSMDGAPYLRKVNLKIYSTYHDLSSALENMFSCLLTMGKSRSHGLNESSLMDMPNGSGYVPTYEDKDGDWMLVGDVPWQMFVDSCQRMRIMKASEAIGLAPRTMEKCKKRN

SEQ ID NO: 33002 - protein, 205 aa, Banksia baueri
SSFDFMDGYEKPVEGRKINWMKAGILESDRVVTVSPYYAQELLSGIEKGVELDNIIRKTGITGIVNGMDVQEWNPSTDKYIDVKYDATTVFNAKPLLKEALQAAVGLPVDGNIPVIGFIGRLEEQKGSDILAEAISQFIGENVQIVILGTGKKPLEKQIEQLEIKYPDKAIGIAKFNVSLAHMIIAGADFMLIPSRFEPCGLIQL

SEQ ID NO: 33003 - protein, 491 aa, Arabidopsis thaliana
MLAMEKEFDSKLVLQGNSSNGANVSRSKSFSFKAPQENFTSHDFEFGKIYGVGSYSKVVRAKKKETGTVYALKIMDKKFITKENKTAYVKLERIVLDQLEHPGIIKLYFTFQDTSSLYMALESCEGGELFDQITRKGRLSEDEARFYTAEVVDALEYIHSMGLIHRDIKPENLLLTSDGHIKIADFGSVKPMQDSQITVLPNAASDDKACTFVGTAAYVPPEVLNSSPATFGNDLWALGCTLYQMLSGTSPFKDASEWLIFQRIIARDIKFPNHFSEAARDLIDRLLDTEPSRRPGAGSEGYVALKRHPFFNGVDWKNLRSQTPPKLAPDPTSQTASPERDDTHGSPWNLTHIGDSLATQNEGHSAPPTSSESSGSITRLASIDSFDSRWQQFLEPGESVLMISAVKKLQKITSKKVQLILTNKPKLIYVDPSKLVVKGNIIWSDNSNDLNVVVTSPSHFKICTPKKVLSFEDAKQRASVWKKAIETLQNR

SEQ ID NO: 33004 - protein, 525 aa, Lolium rigidum
MATRALQMLGEASPWNLACAAAAMALLWLAAWILEWAWWTPRRLGRALEAQGLKGTRYRLFTGDVPENARLNKEARSKPLPLGSHDIIPRVQPMISNAIKENGKLSFTWFGPEPRVTILDPESVREILSNKFGHYGKPRSSRFGKLLANGLVNHQGEKWAKHRRILNPAFHHEKIKRMLPVFSACSEEMITRWENSMSSQGVSEVDVWPEFQNLTGDVISRTAFGSSYQEGTKIFQLQGEQAERLMQAFQTLFIPGYWFLPTKNNRRMRAIDREICTILRGIIEKKDRAIKSGEASSDDLLGLLLESNRRESNGKANLGMSTEDIIEECKLFYFAGMETTSVLLTWTLIVLSMHPEWQEQARKEVLHHFGRTTPDFENLSRLKIVTMVLYEVLRLYPPAIFVTRRTYKAMELGGITYPAGVNLMLPILFIHHDPNIWGKDASEFNPQRFADGISNAVKNPAAFFPFGGGPRICIGQNFALLEAKMALSTILQRFSFELSPSYTHSPYTVLTLHPQHGAPIVLRKI

SEQ ID NO: 33005 - protein, 338 aa, Bacillus cereus G9241
MAILITGGAGYIGSHTCIELLNNNYKIIVVDNLSNSSIESLNRVKEITGKQFEFYKEDVLNREKMNEIFLENNIEAVIHFAGFKAVGESTTIPLTYYYNNIISTIVLCDVMQKHNVKNFIFSSSATVYGIPKTSPITEEFPLSVTNPYGQTKLMIEQIMRDVAKADDEWSIALLRYFNPFGAHQSGRIGEDPNGIPNNLMPYVTQVAVGKLKELNIFGNDYPTKDGTGVRDYIHVVDLAKGHVKALEKVLKTKGIEAYNLGTGKGYSVLEMVKAFEKVSGKKIPYKVIGRRPGDVAICFADVSKAKRELGWEAEYGLEEMCVDSWRWQVNNKNGYQMI

SEQ ID NO: 33006 - protein, 525 aa, Lolium rigidum
MATRALQMLREASPWSLAGAAAAMALLWLAAWIVEWAWWTPRRLRRALQAQGLRGTQYRLFTGDVPENARLNREARSKPLPLGSHDIIQRVQPMFSNVIKENGKFAFTWFGPTPRVMIPDPELVREVLSNKFGHYGKQKSSRLGKLLANGLANHQGEKWAKHRRILNPAFHNEKIKRMLPVFATCCEEMITRWDNSMSTQGSSEIDIWPEFQNLTGDVISRTAFGSNYQEGMKIFQLQGELAERLIMAFQTIFIPGYWFLPTKNNKRMRAIDCEIRTILRGIIGKKDKAIKNGEAISDDLLGLLLESNMRESNGKADLEMSTEEIIQECKLFYFAGMETTSVLLTWTLILLSMHPEWQEKARDEVLYHFGRTTPDFEHLSRLKIVTMILYEVLRLYPPITILTRRTYKAMELGGIKYPAGVNLMLPILFIHHDPNLWGKDASEFNPERFADGISNAAKHPGSFFPFGGGPRICIGQNFALLEAKMALSTILQHFSLELSPSYTHAPYTVITLHPQHGAQIRIKKI

SEQ ID NO: 33007 - protein, 356 aa, Brassica napus
  misc_feature (198)..(198): Xaa can be any naturally occurring amino acid
  unsure (1)..(356): unsure at all Xaa locations
QDQTNVHVYPDWAAMQAYYGPRVAIPPYYNSAMAAASGHPPPPYMWNPQHMMSPYGTPYAAVYPHGGGVYAHPGFPMPQSQKGAAPLSTPGTPLNIDTPSKSTGNTENGLMKKLKEFDGLAMSLGNGNNGDEGKRSRNSSETDGSSDGSDGNTTGADEPKLKRSREGTPAKDEEKHLVQSSSFRSVSQSSGDNNCCKXSVQGGGGAIVSAAGVSANSNPTFMSQSLAMVPPETWLQNERELKRERRKQSNRESARRSRLRKQAETEELARKVEALTAENMALRSELNQLNEKSNNLRGANATLLDKLKSSEPEKRVKSSGNGDDKNKKQGDNETNSTSKLHQLLDTKPRADGVAAR

SEQ ID NO: 33008 - protein, 647 aa, Silicibacter pomeroyi DSS-3
MPHISAWRAALAGATLLLSAATAAQAGTYDITVDKIRIDAGNFRKNGIGYNNSQTPTILRFKEGEKVTLNVTNNLREDTSIHWHGLILPFDQDGVPKISFDGIKPGETFTYNFPIVQAGTYWFHSHSGFQEPDGAYGAIVIEPKGGERIRANRDYVVQLTDTHPQRGKRIMRNLKMSADYYNRSQRTLQDLIKDSGDIGLKAALEDRKMWGRMRMMPTDVEDVQGFTPMINGESTEQNWTGLFKPGEKVRLRLINSSAMAYFDVRIPGLKMTVVQADGNDVKPVTVDELRISVAETYDVIVQPKENRVYSIVAESMGRTALVRGTLAPREGMAGPVPPLREKPRLTMADMSGMMGSMGMEGHVMQSAAKPLDDMSGMDHSQMNMQPKPQPMEGMDHSQMGHAAPAPKAEAAPMDHSAMTGTDQPMAGMDHSQMGHAAPAPQAKAAPMDHSTMTGADKPMAGMDHSRMTGSGNSMAGMDHSAMANAKGQGDPFYAPGSGLTPKAANGGKFLSYDDLTARKPLYKDRPATREIELRLTGNMERYIWSINGKKLSEAEPIVLKYGERVRFKFVNETMMSHPMHLHGMWSILDTGKGQYDPIKHTVSVAPGTTVYTETEVDVTGQWAFHCHLSYHADAGMFRKVVIQGGPA

SEQ ID NO: 33009 - protein, 462 aa, Yarrowia lipolytica CLIB122
MALGMPTLMKRSAPKALEMSFDVVKGISNKWSEPQTDAAGSPSPHHDTPLENMGYYYQVSVSIGSPPQPFALSLDTGSSDLWVPSPNNNECLSPLFTSRGGSCGQTNNVFNRMISSTFSLINEYFFISYGDSTSAYGLWGKDTLNFNGLTLTDYTFGVASGTTSTTNVFGIGLKGLQASNDAIPGHPEAPRFTYSNLPYRLAEEGYINTPSYSLYLDSLEATSGTIIFGGVDASKIQSPITLHPLINFHPENHPDPVSFFITLDSVDLVGGVPLNVLEVTSAALLDSGATLTFLPPSAYATLADRFQVKQDTKTGYRVASCSSGSVGEYLEYSFQGSKIRVPISSLLDPIKKQDGSAVISPDGIPMCRFLVAPNADDETGTSNIILGDSFLRSAYVVYDLENFQLGLAQAATYSNGASSLVSAIDQNGIPGSQQPPSSKTWQANSPMPTFHGYVPPQVDLLW

SEQ ID NO: 33010 - protein, 411 aa, Glycine max
MNALAATNRNFKLASRLLGLDSKLEKSLLIPFREIKVECTIPKDDGTLQSYVGFRVQHDNARGPMKGGIRYHPEVDPDEVNALAQLMTWKTAVANIPYGGAKGGIGCDPAELSISELERLTRVFTQKIHDLIGIHTDVPAPDMGTGPQTMAWILDEYSKFHGYSPAVVTGKPIDLGGSLGRDAATGRGVLFATEALLNEYGKSVSGQRFVIQGFGNVGSWAAQLISNKGGKVVAVSDITGAIKNSNGLDIPSLLEHSKVHRGVKGFNGSDPIDPNSILVEDCDVLVPAALGGVINRENANEIKAKFIVEAANHPTDPEADEILKKKGVVILPDIFANSGGVTVSYFEWVQNIQGFMWDEEKVNNELKTYMTKGFKDVKEMCKTHECDLRMGAFTLAVNRVARATVLRGWEA

SEQ ID NO: 33011 - protein, 347 aa, Alkalilimnicola ehrlichei MLHE-1
MTVTGGGPLIRTNLITGFLGVGKTTTIRGLLAGRPQGERWAVLVNEFGEIGVDGGLLEDTGVALEEIPGGCLCCVSARLFTVGLDRLIRHARPDRILIEPTGLGHPAEIIRTLTAPPYDQRLDLRATVTLMDARHLASIRHREHPNWNDQIHLADVLLANKADLYSEADHTALQNFVAGRPAPRPRVIETRQGRVAPPLLDRPRLDRGGALFPEVQAFQAQQATRTGGHHHHEHRHGASEAAPDDWVVIDRQADGFVGRSWLLPAGARLDHPTLVDLVDGLSAERVKGIVPTQAGWQHINRVAGEGGLSPGGPPAGGGRPRLEVIQPAETGTDLEALDRALRAGLLP

SEQ ID NO: 33012 - protein, 208 aa, Oryza sativa (japonica cultivar-group)
MAGHVLGGAHDAPSAANSVETDALARFAVDEHNKRENALLEFVRVVEAKEQVVAGTLHHLTLEALEAGRKKVYEAKVWVKPWLDFKELQEFRNTGDATTFTNADLGAKKGGHEPGWRDVPVHDPVVKDAADHAVKSIQQRSNSLFPYELLEIVRAKAEVVEDFAKFDILMKLKRGNKEEKFKAEVHKNLEGAFVLNQMQQEHDESSSQ

SEQ ID NO: 33013 - protein, 394 aa, Shewanella sp. MR-7
MKTTSSTEKPMQSTGLGHSVAQWQHSHGFSNQNTAGEKNTRYVLYLTVITMVAEIVAGTLYGSMALLADGWHMGTHAAAFMITLFAYSYARKHANDPAFAFGTGKVSVLGGYTSAIALGLVALVMLIESGMRLINPEDIHFNEAIFVALIGLSVNVLSVFLLKDHHSHDHGHSHGHSHGHSHSHSHDHDHDDDDHKEHQDNHCCHGHDHHAADHDHDHDHDHDHDHDHDDHSHSHAQGHSHGHSGHDHNLRAAYFHVLADALTSVLAIAALLFGKYMGLTWLDPIMGIVGAIIISRWSWGLIQQTSPILLDGGVKASLQRKVRETIEAVPDHQVADLHIWRVSADHHAIMVSIVSHSPKEASYFNQLLTKFPELSHITIELHTCRQRECVAKEA

SEQ ID NO: 33014 - protein, 669 aa, Alkalilimnicola ehrlichei MLHE-1
MTTDSEGKPRLSRTHLLALLRQMLRMRRFEERCVELYTQEKIRGFLHVYIGEEAVGAGAMFGLDPNDGVVATYREHGHALLNRIAMNPVMAEMYGKAAGCSLGRGGSMHLFDAEHRFYGGNAIVGGGLPLAVGLALADKLAGRQRVTACFFGDGAVAEGVFHESLNLAALWQLPVFFVCENNQYAMGTALHLAHAQTELYRKAEALGVPAERVDGMDVVAVEAASGRALASVRAGEGPRFLECETYRFRAHSMFDPQLYRDKAEVEAWQARDPIRRLSDWMSRSGALHEGELEAMDGEIGEEIDAAVAFAEQAEWESPDTLLDHVCAPVSEAPPPPPDVATEPERLSFREAFRRGLIEALTHEPRSFMMGEDIGHYGGCYAVSRGLLEQFGPERMRDTPLSENGFTGAGVGAALGGARPIVEIMTVNFSLLALDQIVNNAATLLHMSGGQFPVPLVIRMATGAGRQVAAQHSHSLENWYAHVPGLKVLAPGTLEDARHMLWAALHDPNPVVIFEHVLLYNQEGELTPCPQGVDIRQAAIRRPGQHLTLITYGGSLGKTLEAAEALAEEGIEAEVLDLRVLRPLDTEALVASVTRTQRAVIVDEGWKTGSLAAEISAILAEQALWYLDAPIARVCSAEIPIPYARHLETAALPQVEDIVGAARQVMEGAE

SEQ ID NO: 33015 - protein, 414 aa, Solanum tuberosum
MESRVLTGGATAIRGGLPLLRKPAAVMKFTTAAHAISRDFPAGAVTAKPVGPLIAGPNLIWGRQLRPAILLETSPKRESIKPCSAAASSSAGSSDSSGDAKVGFFNKATLTTGFFFFMWYFLNVIFNILNKKIYNYFPYPYFVSVIHLAVGVVYCLVSWTVGLPKRAPIDSTQLKLLTPVAFCHALGHVTSNASFAAVRVSFTHTVKALEPFFNAAASQFILGQQIPLALWLSLAPVVIGVSMASLTELSFNWLGFTRAMISNISFTYRSIYSKKAMTDMDSTNVYAYISIIALIFCLPPSIFIEGPQLLQHGFNDAIAQVGLTKFVTDLFWVGMFYHLYNQVATNTLERVAPLTHAVGNVLKRVFVIGFSIVIFGNKISTQTGIGTCIAIAGVAIYSFIKAKMEEEKRQKKAA

SEQ ID NO: 33016 - protein, 404 aa, Rhodospirillum rubrum
MDYEGYFAERLHSLKREGRYRVFADLERQVGRFPLARNYRDGEVHEVTIWCSNDYLGMGIHPVVLEATNEALYTCGAGAGGTRNISGTNHYHVLLERELADWYKKDEALLFTSGYVANITTLMTLGAQIPDLVIFSDSDNHNSMIEGIRHSRAPKEIFRHNDLAHLEELLRKYPKDRAKLIAFESVYSMDGDIAPIAEICDLADKYGAMTFLDEVHAVGMYGETGSGVAERDGVRERLTIIQATMGKAIGCVGGFICASASLIDFVRSFGAGFIFTTSLPPTIAAGALASVRYLKEHNELRVRHQERAATTKWRLREAGLPVMPSVSHIIPLAVGDASLCKQASDMLLSLHDIYVQPINFPTVPRGTERLRLTATPLHTDEHLDHLVHALSDVWRRLGIGRQAA

SEQ ID NO: 33017 - protein, 254 aa, Hyacinthus orientalis
MGEEADRSGYDRLASDGDGDGSGGDGDDGRVLEWEIGLPSADDLTPLSQPLVPPELASAFSITPDPARTILDVHRASHSTMSSLRRHNLASSSSAMKSFSPFPSGDPTVLESDDQKDESRVRRSEAENSEDDQSARSLKRPRLVWTPQLHTRLLTWVAHLGIKTAVPKTIMQLRMSRGLTRENVASHLQKYRLYFEEDAGRCRTNGHRPAIRCSHRRRCLIVCTKICCQLLLRRWPMPYAVPTMIPRARVWECR

SEQ ID NO: 33018 - protein, 491 aa, Cryptococcus neoformans var. neoformans B-3501A
MPSVAAVPVKLDYQSFLSQEAKGRVRSPLRDLRYFHAIPGMISFGGGLPHPSTWPVNAMTLSVPFAKKSIFIPGYESNDPTSLYPLAPYIPPTKLNSVTEPLIPDLARDLQYSSNFGLPYFVDWLTQHVKRIHDPPYPENQWQVLATAGNTDASDGVVRTLCSPGDSILLEEFAFPGSLTHYKSLGIKCAGVPMDGEGIVPSALEKILAEWDDEARGGPKPKVILIVPTCSNPSGITYPASRKREIYAVCRKWNLLIIEDDPYCYLQVRPNGADTPLIPSFLSLDLDGRVVRLDSFSKFIAPGSRCGWITGAKELVTTIMVKAEASSNGPSGFAVASISAVIKAWGGHEGLERDYLPHISDTYSKRSNLMVSLIRKYVPAEAAECPDGSGGMFLWVRLRVESHPQLSTLSPEEISDKVFHTLIGEKVMVAPSSYFKTPGGPVWSKDEESKRIFVRLSFSLSTADEMEEGVKRFARGLRKEWGIRNLDEAEH

SEQ ID NO: 33019 - protein, 161 aa, Novosphingobium aromaticivorans DSM 12444
MTVGQLIKSFTLWEFVKAHWLTLKYFFKPKATINYPFEKNPLSPRFRGEHALRRYPNGEERCIACKLCEAVCPAQAITIEAEPREDGSRRTTRYDIDMTKCIFCGFCQEACPVDAIVEGPNFEYATETREELLYDKAKLLSNGDKWERAIAANLEADAPYR

SEQ ID NO: 33020 - protein, 478 aa, Xylella fastidiosa Temecula1
MSEHYDVVVIGAGPAGYHAAIRAAQLGLKVACVDAALGKDGKPALGGTCLRVGCIPSKALLDSSRQYWNMGHLFNEHGISFKDAKMDIATMIARKDKIVKQFTGGIAMLFKANKITPYYGFAQLQPGNVVKVKQHEGKNIELKGANVILASGSDSVELPFATFDGETIVDNIGALDFTKVPKRLAVIGAGVIGLELGSVWKRLGAEVTILEAMPNFLAAVDADVAKTAAKEFKQQGLDIKLGAKVSRTEISSKNNKKEVIVTYTDASGKQTLTVDKLLVAVGRKAATKGLLADGTGVQLNERGQIVVDEHCHTGVDGVWAIGDCVRGPMLAHKGFEEGIAVAELIAGLPGHVNFETIPWVIYTEPEIAWVGKTEQELKADNIPYKAGSFPFAAVGRAVAMAEPSGFAKVLAHAETDRVLGLHLIGVNVSELVHEGVLAMEFSGSADDLARICHAHPTLSEAIHDAAMAVSKRSIHKAN

SEQ ID NO: 33021 - protein, 520 aa, Arabidopsis thaliana
MAEISHPPMEQLQDLEYCIDSNPPWPETVLLAFQNYILMLGTSAFIPALLVPAMGGSDGDRARVIQTLLFVAGIKTLLQALFGTRLPAVVGGSLAYVVPIAYIINDSSLQKISNDHERFIHTMRAIQGALIVASSIQIILGYSQVWGLFSRFFSPLGMAPVVGLVGLGMFQRGFPQLGNCIEIGLPMLLLVIGLTQYLKHVRPFKDVPIFERFPILICVTIVWIYAVILTASGAYRGKPSLTQHSCRTDKANLISTAPWFKFPYPLQWGPPTFSVGHSFAMMSAVLVSMVESTGAYIAASRLAIATPPPAYVLSRGIGWQGIGVLLDGLFGTGTGSTVLVENVGLLGLTRVGSRRVVQVSAGFMIVFSTLGKFGAVFASIPVPIYAALHCILFGLVAAVGLSFLQFTNMNSMRNLMITGLSLFLGISIPQFFAQYWDARHYGLVHTNAGWFNAFLNTLFMSPATVGLIIAVFMDNTMEVERSKKDRGMPWWVKFRTFRGDNRNEEFYTLPFNLNRFFPPT

SEQ ID NO: 33022 - protein, 67 aa, Brassica napus
MKCDLETIFDRCCYMMQPSHKSFMIKKKLAKKMRQNRPIPHWIRLRTDNTIRYNAKRRHWRRTKLGF

SEQ ID NO: 33023 - protein, 484 aa, Rhodobacter sphaeroides 2.4.1
MKDRDRMETARGRVLSVASECVPLLKTGGLADVVGALPGALAAEGWEMRVLMPCYRPLKWRLEEMEEVFAEEDLFGGPGRVMAGEVAGRKMLLLDAPHLYDREGGPYAGPDGDWGDNAQRFAALSWIGARIAREGLGDGWRPDVVHAHDWQAGFTPAYMNYWGSGGASSVLTVHNIAFQGWAPASLLSALRLPPQEFHPAALEYYGGLSSLKAGLVSADHITTVSPTYACELMRPEFGMGLQGVIAQRAGQVTGILNGVDTDIWSPEVEERPYDAESLKAKAENRAVLSGAFKLSVPGPLAILVSRLTYQKGIDLIPEVLPDFIAAGGGLAVLGTGDAPLEAAMRELEVRFPGRVGVRIGYDEGLSHLMFAGGDAVLVPSRFEPCGLTQMYGLRYGAIPVVALTGGLADTIINANPAAMAAGCATGLTFHPTEPPAFAEALRRLIHLYADPAAWETVQRNAMRHPVGWETSAAAYAALYRELVA

SEQ ID NO: 33024 - protein, 319 aa, Staphylococcus aureus subsp. aureus MSSA476
MVKIVVSRKIPDKFYQQLSKLGDVVMWQKSLVPMPKDQFVTALRDADACFITLSEQIDAEILAQSPNLKVIANMAVGYDNIDVESATANNVVVTNTPNVLTETTAELGFTLMLAIARRIVEAEKYVEADAWQSWGPYLLSGKDVFNSTIGIYGMGDIGKAFARRLQGFNTNILYHNQSRHKDAEADFNATYVSFETLLAESDFIICTAPLTKETHHKFNAEAFEQMKNDAIFINIGRGQIVDETALIDALDNKEILACGLDVLANEPIDHTHPLMGRDNVLITPHIGSASVTTRDNMIQLCINNIEAVMTNQVPHTPVN

SEQ ID NO: 33025 - protein, 182 aa, Banksia lullfitzii
SSFDFMDGYDKPVEGRKINWMKAGILESDRVVTVSPYYAQELLSGIEKGVELDNIIRKTGITGIVNGMDVQEWNPSTDKYIDVKYDATTVFNAKPLLKEALQAAVGLPVDGNIPVIGFIGRLEEQKGSDILAEAISQFIGENVQIVILGTGKKPLEKQIEQLEIKYPDKAIGIAKFNVSLAH

SEQ ID NO: 33026 - protein, 423 aa, Rhodobacter sphaeroides 2.4.1
MKAQPPLRLTAQAMAFVLAGGRGSRLKELTDRRAKPAVYFGGKARIIDFALSNAMNSGIRKMAIATQYKAHSLIRHIQRGWNFFREERNEYLDILPASQRVDENRWYLGTADAVTQNIDIVDSYDIKYVIILAGDHVYKMDYEIMLRQHCETGADVTIGCLTVPRAEATAFGVMHVDANLRITDFLEKPADPPGIPGDEANALASMGIYVFDWAFLRDLLIRDAEDPNSSHDFGHDLIPAIVKNGKAMAHRFSDSCVMTGLETEPYWRDVGTIDAFWQANIDLTDFTPKLDLYDREWPIWTYSQIVPPAKFIHDSENRRGTAISSLVSGDCIVSGSEIRSSLLFTGCRTHSYSSMSHVVALPHVTVNRKADLTNCVLDRGVVVPEGLVIGQDAEEDARWFRRSEGGIVLVTQDMLDARARALN

SEQ ID NO: 33027 - protein, 142 aa, Zea mays
DAEVGHKNTITSLTKSADDSHFITGSLDKTAKLWDMRTLTLLKTYVSGVPVNAVSMSPLLDHVVLGGGQDASAVTTTDHRAGKFEAKFYDKILQEEIGGVKGHFGPINALAFNPDGKSFSSGGEDGYVRLHHFDSDYFNIRI

SEQ ID NO: 33028 - protein, 205 aa, Banksia attenuata
SSFDFMDGYDKPVEGRKINWMKAGILESDRVVTVSPYYAQELLSGIEKGVELDNIIRKTGITGIVNGMDVQEWNPSTDKYIDVKYDATTVFNAKPLLKEALQAEVGLPVDGNIPVIGFIGRLEEQKGSDILAEAISQFIGENVQIVILGTGKQPLEKQIEQLERKYPDKAIGIAKFNVSLAHMIIAGADFMLIPSRFEPCGLIQL

SEQ ID NO: 33029 - protein, 525 aa, Lolium rigidum
MATRALQMLREASPWSLAGAAAAMALLWLAAWIVEWAWWTPRRLRRALQAQGLRGTQYRLFTGDVPENARLNREARSKPLPLGSHDIIQRVQPMFSNVIKENGKFSFTWFGPTPRVMIPDPELVREVLSNKFGHYGKQKSSRLGKLLANGLANHQGEKWAKHRRILNPAFHNEKIKRMLPVFATCCEEMITRWDNSMSTEGSSEIDIWPEFQNLTGDVISRTAFGSNYQEGMKIFQLQGELAERLIMAFQTIFIPGYWFLPTKNNKRMRAIDCEIRTILRVIIRKKDKAIKNGEAISDDLLGLLLESNMRESNGKADLGMSTEEIIQECKLFYFAGMETTSVLLTWTLILLSMHPEWQEKARDEVLYHFGRTTPDFEHLSRLKIVTMILYEVLRLYPPITILTRRTYKAMELGGIKYPAGVNLMLPILFIHHDPNLWGKDASEFNPERFADGISNAAKHPGSFFPFGGGPRICIGQNFALLEAKMALSTILQHFSLELSPSYTHAPYTVITLHPQHGAQIRMKKI

SEQ ID NO: 33030 - protein, 205 aa, Banksia ashbyi
SSFDFMDGYDKPVEGRKINWMKAGILESDRVVTVSPFYAQELLSGIEKGVELDNIIRKTGITGIVNGMDVQEWNPSTDKYIDVKYDATTVFNAKPILKEALQAAVGLPVDGNIPVIGFIGRLEEQKGSDILAEAISQFIGENVQIVILGTGKKPLEEQIEQLEIKYPDKAIGIAKFNVSLAHMIIAGADFMLIPSRFEPCGLIQL

SEQ ID NO: 33031 - protein, 224 aa, Glycine max
MFDLIVLRHSCLLLSCVLFPVFFLLEYVISLFLKVKQRAHSISTEKATVSATDEDSIADVMEQHDEFLSSMLARSAKLQMVFRCWERNDVKEVIGIMARMDDHAVIADVVSIIMEKIDIITLEICAGLLPLLTDLLQSEMERHLGISLEMLLKLVRIFGSVIYSTVSATQPVGVDIEAENRLERCNLCFTELEKVKRFLPSLSRRGGSIAKSAQELNLALQDVS

SEQ ID NO: 33032 - protein, 525 aa, Lolium rigidum
MATRALQMLGEASPWNLACAAAAMAVLWLAAWILEWAWWTPRRLGRALEAQGLKGTRYRLFTGDVPENARLNKEARSKPLPLGSHDIIPRVQPMISNAIKENGKLSFTWFGPEPRVTILDPESVREILSNKFGHYGKPRSSRFGKLLANGLVNHQGEKWAKHRRILNPAFHHEKIKRMLPVFSACSEEMITRWENSMSSQGVSEVDVWPEFQNLTGDVISRTAFGSSYQEGTKIFQLQGEQAERLMQAFQTLFIPGYWFLPTKNNRRMREIDREICTILRGIIEKKDRAIKSGEASSDDLLGLLLESNRRESNGKADLGMSTEDIIEECKLFYFAGMETTSVLLTWTLIVLSMHPEWQEQARKEVLHHFGRTTPDFENLSRLKIVTMVLYEVLRLYPPAIFVTRRTYKAMELGGITYPAGVNLMLPILFIHHDPNIWGKDASEFNPQRFADGISNAVKHPAAFFPFGGGPRICIGQNFALLEAKMALSTILQRFSFELSPSYTHAPYTVLTLHPQHGAPIVLRKI

SEQ ID NO: 33033 - protein, 205 aa, Banksia coccinea
SSFDFMDGYDKPVEGRKINWMKAGILESDRVVTVSPYYAQELLSGIEKGVELDNIIRKTGITGIVNGMDVQEWNPSTDKHIDVKYDAKTVFNAKPLLKEALQAAVGLPVDGNIPVIGFIGRLEEQKGSDILAEAISQFIGENVQIVILGTGKKPLEKQIEQLEIKYPDKAIGIAKFNVSLAHMIIAGADFMLIPSRFEPCGLIQL

SEQ ID NO: 33034 - protein, 525 aa, Lolium rigidum
MATRALQMLGEASPWNLACAAAAMAVLWLAAWILEWAWWTPRRLGRALEAQGLKGTRYRLFTGDVPENARLNKEARSKPLPLGSHDIIPRVQPMISNAIKENGKLSFTWFGPEPRVTILDPESVREILSNKFGHYGKPRSSRFGKLLANGLVNHQGEKWAKHRRILNPAFHHEKIKRMLPVFSACSEEMITRWENSMSSQGVSEVDVWPEFQNLTGDVISRTAFGSSYQEGTKIFQLQGEQAERLMQAFQTLFIPGYWFLPTKNNRRMRAIDREICTILRGIIEKKDRAIKSGEASSDDLLGLLLESNRRESNGKADLGMSTEDIIEECKLFYFAGMETTSVLLTWTLIVLSMHPEWQEQARKEVLHHFGRTKPDFENLSRLKIVTMVLYEVLRLYPPAIFVTRRTYKAMELGGITYPAGVNLMLPILFIHHDPNIWGKDASEFNPQRFADGISNAVKHPAAFFPFGGGPRICIGQNFALLEAKMALSTILQRFSFELSPSYTHAPYTVLTLHPQHGAPIVLRKI

SEQ ID NO: 33035 - protein, 205 aa, Banksia petiolaris
SSFDFMDGYDKPVEGRKINWMKAGILESDRVVTVSPYYAQELLSGIEKGVELDNIIRKTGITGIVNGMDVQEWNPSTDKYIDVKYDATTVFNAKPLLKEALQAAVGLPVDGNIPVIGFIGRLEEQKGSDILAEAISQFIGENVQIVILGTGKKLLEKQIEQLEIKYPGKAIGIAKFNVSLAHMIIAGADFMLIPSRFEPCGLIQL

SEQ ID NO: 33036 - protein, 453 aa, Bacillus cereus G9241
MIALGGVIGTGLFNGSGFIISQAGPGGSVLAFMAGGLLMYFVMLCLGELAVAMPVSGSFQEYATKFINPATGFTIGWLYWLSWANTTGLEFTTAGITMQRWFPDIPVWVWCLIFGVTIFTINALSARSYAETEFWFSSIKVSAIIAFIILGGAAMFGFIDLKGDEPAPLLSNFVNHGGLFPNGLAAILLTMVTVNYSFQGTELVGIAAGESEDPAKTLPRSIRNIIWRTMFFFVLAIFVLVALIPWEEAGLTKSPFVAVFDNIGIPYAADIMNFVILTAVLSVANSGLYAATRMLWSLSKNEMAPAFLKKLSSRGIPLNALIMTIAISAFSLLTSVVAAETVYLWLISISGVITIIVWMSICVSQFFFRKHYLADGGRLEDLKFKTPLYPLVPILGFGLYDIILISLIFIPEQRLGIYCTVPFIIFCYTYYHFKVKKRISTNTQSETKISETM

SEQ ID NO: 33037 - protein, 338 aa, Vibrio vulnificus CMCP6
MKVLVTGGCGYIGSHACVALVRAGHQPIVLDNFSNSHPNVVARIETLIGQPLVVYQGDIRDRLVLDAIFDQHEIGAVMHFAGLKAVGESVEKPLEYYDNNLAGTLNLLAAMRVAHVYRLIFSSSATVYGDPKTVPITEAAPTGATTNPYGTSKHMVERCLSDFSAANPDWSITLLRYFNPIGAHPSGLIGEDPSGIPNNLMPFITQVAIGRRERLSIFGDDYPTADGTGVRDYIHVQDLVEGHVAALEKRGNVRGLHTYNLGTGNGVSVLQMVAAMNRVLGRELPVRIEPRRAGDIAQCFAQADKAAQELGWKAQHDLTDMVEHSWHWQQRNPNGYQS

SEQ ID NO: 33038 - protein, 382 aa, Synechococcus sp. CC9605
MQDKLTLMIPGPTPVPETVLKAMGRHPIGHRSGEFQAIVRRTTEQLKWLHQTTSDVLVITGSGTAAMEAGIINTLSRGEKVLCGDNGKFGERWVKVARAYGLDVEVIKAEWGQPLDPEAFRSALEADSAKAIKAVILTHSETSTGVINDLESIARHVKTHGTALTLADCVTSLGATNVPMDAWGLDVVASGAQKGYMLPPGLSFVAMSARAWEAYERSDLPKFYLDLGPYRKTAAKDSNPFTPAVNLYFGLEAALDMMQKEGLEAIFARHARHRAAAQAGMKAMALPLFAAEGYGSPAITAVAPEGIDAEQLRKAVKEKFDILLAGGQDHLKGQVFRIGHLGYVCDRDVLTAVAAIEATLQSLGLHKGSMGAGVAAASAALG

SEQ ID NO: 33039 - protein, 370 aa, Mesoplasma florum L1
MKYIGKFDPQKDEIVRVMDKDGKIINPKLAPSISDEELIKAYSIMNLSRRQDDYQNKMQRQGRLLSFLSSTGQEACEVAYTMVIDPKNDFFVSGYRNNAAWLTMGQTVRNIMLYWAGNEAGAKAPEGVNSLPPNIIIGSQYSQATGIAFAEKYQGKKGVAVTTTGDGGMSEGETYEAMNFAKLHELPVVFVCENNKWAISTPTVQQTKSLNIAVKAIATGTPSIKVDGNDFLASYAVAKEAVEFARSGNGPVLIEFDTYRLGAHSSSDAPDVYRPKGEFEDRVPYEPLIRLKAYMIEKGIWSEEKQTALNEEQDKHIAAEFAWVEQNKNYPIEDIFNYQYAELTNDLKDQLAEAKEFFAKYPETKDGGHH

SEQ ID NO: 33040 - protein, 602 aa, Mesoplasma florum L1
MFKVKFADIGEGLTEGKVAEVLVKLGQEIKEGDALFFVETDKVNSEIPAPVGGKIAKVLISEGQEIKVGDVVIEIDDGSATVEAAPAAEEENASVVGSTPVSNDLIPSRGPAPTQNVAAQPTPAPVATKHTDIEESFDVIVVGAGIGGYVSAIKTAQLGLKTLIIEKQYYGGVCLNVGCIPTKSLLRTAKVFEDIVHKAANLGIDMKTKDEPSINWNKALERKDGVVNKLTGGVKVLLTKNGVKQIIGEASALDKNTISVNGKKYHCDNLIIASGSVPNELPLPGFAEGRESGFLIDSTKILSLPKIPKTLTVIGGGVIGIEFGCLFAALGTKVTVIEGAPKILPMLDQDVTALMTKTLKEKYKIEIFTNAKVKEVKGKSVVFEIDGKEQTVKSDYCLESIGRKTVTKGFDGIGLELSERKSIIANDYGETNLEGVYAIGDVTSKIMLAHVASHAGIVTANRIALKANKPDAHDIKMDYSKIPSCIYSHPEIAMIGKTEQQLKEEGVEYKTFKFPFAAIGKALADDDTTGFVKIICEPKYKTLLGAHIIGNRATDMISEFTTLIECEGTITELARAIHPHPTMSEAIGEAAEALESGKSLNL

SEQ ID NO: 33041 - protein, 102 aa, Thermus aquaticus
MAAEVKTVIKPLGDRVVVKRIEEEPKTKGGIVLPDTAKEKPQKGKVIAVGTGRVLENGQRVPLEVKEGDIVVFAKYGGTEIEIAPRRTYVILSERDLLAVLQ

SEQ ID NO: 33042 - protein, 448 aa, Pseudomonas aeruginosa UCBPP-PA14
MNSPSLPAVERLDVQAFINAQPLSPYQWRIVLLCFLIVFLDGLDTAAMGFIAPALTQDWGIDRASLGPVMSAALIGMVFGALGSGPLADRYGRKLVLVAAVFLFGLFSLASAYSTNVEQLLALRFLTGLGLGAAMPNATTLLSEYTPERLKSLLVTSMFCGFNLGMACGGFVSAKLIPLFGWHSLLLLGGLLPLVLAVVLLFRLPESARYLVVRNRGSERVRQVLAPIAPAQVALARSFHVPEQQTVQARNVFAVIFSGTYSAGTLLLWLTYFMGLVIVYLLTSWLPTLMRDSGASLEHAAFIGALFQFGGVLSAVAVGWAMDRFNPHKVIGLFYLLAGVFAWCVGQSLGQVTLLATLVLLAGMCINGAQSAMPSLAARFYPTQGRATGVSWMLGIGRFGAILGAWIGATLLGLGWNFEQVLTALVLPAALATAAVLLKGLVSHADAG

SEQ ID NO: 33043 - protein, 543 aa, Thermus aquaticus
MAKILVFDEAARRALERGVNAVANAVKVTLGPRGRNVVLEKKFGSPTITKDGVTVAKEVELEDHLENIGAQLLKEVASKTNDVAGDGTTTATVLAQAIVREGLKNVAAGANPLALKRGIEKAVEAAVEKIKALAIPVEDRKAIEEVATISANDPEVGKLIADAMEKVGKEGIITVEESKSLETELKFVEGYQFDKGYISPYFVTNPETMEAVLEDAFILIVEKKVSNVRELLPILEQVRQTGKPLLIIAEDVEGEALATLVVNKLRGTLSVAAVKAPGFGDRRKEMLKDIAAVTGGTVISEELGFKLENATLSMLGRAERVRITKDETTIVGGKGKKEDIEARINGIKKELETTDSEYAREKLQERLAKLAGGVAVIRVGAATETELKEKKHRFEDALNATRAAVEEGIVPGGGVTLLRAISAVEELIKKLEGDEARAPEIVRRALEEPARQIAENAGYEGSVIVQQILAETKNPRYGFNAATGEFVDMVEAGIVDPAKVTRSALQNAASIGALILTTEAVVAEKPEKKESTPASAGAGDMDF

SEQ ID NO: 33044 - protein, 374 aa, Alkalilimnicola ehrlichei MLHE-1
MSDKKLGGAGLRGQSAGQTALCTVGKGSGLTYRGYDVRELAEGATFEEVAYLLLKGDLPTKAELAAYTEKLKGMRDLPDALKAVLEQIPADAHPMDVMRTGASMLGNLETEQSFDEQQEATDRLLAVLPGIITYWYRYSHDGVRIDTATDDDSIGAHFLHLLRDEKPNSLHEKVMHASLILYAEHEFNASTFTARVCASTLSDIHSCVTGAIGSLRGPLHGGANEAAMAMIEQWNSPDEAERELKGMLERKEKVMGFGHAIYRVSDPRNEIIKAWSKKLADEVGDTVLYPVSERVEQVMWDEKKLFPNADFYHASAYHFMGIPTKLFTPIFVMSRVTGWCAHVFEQRANNRIIRPSADYTGPEERPFTPIDQRG

SEQ ID NO: 33045 - protein, 127 aa, Shewanella sp. MR-7
MAYSEKVIDHYENPRNVGSFDKNDPSVVTGMVGAPACGDVMKLQLKIGADGIIEDAKFKTYGCGSAIASSSLVTEWVKGKTIEQAAAIKNTDIAEELALPPVKIHCSILAEDAIKAAIDEYKSKQAK

SEQ ID NO: 33046 - protein, 306 aa, Ashbya gossypii ATCC 10895
MTAVNYTKEKKVGEGTYAVVYLGHRQTDGRQIAIKEIKTSQFKDGLDMSAIREVKYLQEIRHANVIELVDLFMAQENLNLVLEFLPADLEMLIKDSSLLFTQADIKSWLLMTLRGVHHCHRSFILHRDLKPNNLLLAPDGQLKIADFGLARTLAAPHEFMTSNVVTRWYRAPELLFGARHYTAAVDLWSVGVIFAELMLRIPYLPGRDDVDQIDVTFRALGTPTDKDWPEVSSFSAYNKIQVYPPPSRSELRSRFIAATENALDLMCGMLTMDPHKRWDTTRCLLSQYFVELPEATPPTELPKLNK

SEQ ID NO: 33047 - protein, 463 aa, Leuconostoc mesenteroides subsp. mesenteroides ATCC 8293
LFGYDTGVISGAMLFIGKELEIQTGSFEDGFITASVLLGAILGAAIIGPMSDKLGRKKLLLSAAIIFFVGALGSGIGFNYTLLVTSRVLLGIAVGAASALIPTYLAELSPADKRGGIGTLFQLMIMTGIFLAYVSNEWLSPSGWLGLNQNVGWHWMLGLAAVPAALLFIGGLSLPESPRFLVKQGKMSEAQKVLSTMNPNAKLVEEELYDIKLQANTPSGGFKELFGPMARPVLIMALGLAIFQQVMGCNTVLYYAPKIFISAGFSEHFALQSHIVIGLFNVIVTAIAVKIMDKIDRKKMLTYGAIGMGASLLTMSTAMLVLRAGNGNVGSWICVIALTLYIAFFSATWGPVMWVMIGEAFPLNIRGLGNSFGAVINWTANFAVSQSFPMLLIAFTPDHAINAEGQGIAKLFIIYGVLCFVAIWFIAKFTIETRNRSLESIESDLRSKAHAKGYLESDYVGIK

SEQ ID NO: 33048 - protein, 464 aa, Mycobacterium tuberculosis H37Rv
MAKLARVVGLVQEEQPSDMTNHPRYSPPPQQPGTPGYAQGQQQTYSQQFDWRYPPSPPPQPTQYRQPYEALGGTRPGLIPGVIPTMTPPPGMVRQRPRAGMLAIGAVTIAVVSAGIGGAAASLVGFNRAPAGPSGGPVAASAAPSIPAANMPPGSVEQVAAKVVPSVVMLETDLGRQSEEGSGIILSAEGLILTNNHVIAAAAKPPLGSPPPKTTVTFSDGRTAPFTVVGADPTSDIAVVRVQGVSGLTPISLGSSSDLRVGQPVLAIGSPLGLEGTVTTGIVSALNRPVSTTGEAGNQNTVLDAIQTDAAINPGNSGGALVNMNAQLVGVNSAIATLGADSADAQSGSIGLGFAIPVDQAKRIADELISTGKASHASLGVQVTNDKDTLGAKIVEVVAGGAAANAGVPKGVVVTKVDDRPINSADALVAAVRSKAPGATVALTFQDPSGGSRTVQVTLGKAEQ

SEQ ID NO: 33049 - protein, 243 aa, Colwellia psychrerythraea 34H
MRILLVEDDQGLAEALQQSLVREGFVVDHLSRGKLALTALAVPSHDMVILDLGLPDIDGLLVLKEIRAKKNDLPVIILTARDSIDSKVKGLDYGADDYLAKPFDMQELLARLRVIERRLGTASSSMITIDRVSLDTKSHKVYLLQCNQVNNEQNHEQEGEINAQNGASEVHFSKKEFMVLKALMENAGRIQSREQIESKLYQWGEEVLSNAVEVHIHKLRKNLPNKFIQNVRGVGYIINHPQD

SEQ ID NO: 33050 - protein, 474 aa, Alkalilimnicola ehrlichei MLHE-1
MANSYDVIVIGAGPAGYVAAIRCAQLGMTTAVIDEFRYKDGKPQPGGTCLNVGCIPSKALLDSSEHYHKAKDGGLSVHGITAKDVSIDVKKMIARKDKVVKDLTGGIHQLLKANKIDFKTGHGKLISNSTVEFTPHEGKAEELKGEYIILATGSKPIDIGAAPADEKDILTSNGALDMEAVPKRLGVIGAGVIGLEMGSVWNRLGSKVVLLEAQDEFLAPVDRQVARMAHKAFTDQGLDIRLGCRVTDTKVGKQVSVHYEDKDGKHTLQVDKLIVSVGRRPNTDGLAADDVDLLLDERGFVHVDDECRTNLPNVYAVGDVVRGPMLAHKGSEEGVMVAELIAGHPGHLNYDTIPWVIYTHPEIAWVGKTEAQLKSEGVPYKSGTFNFAANGRARAMEESTGMVKIISHAETDRILGVHMVGAATSELIAEAVVAMEFAGSAEDLARICHAHPTLSESVHEAALAVSKQAIHKAN

SEQ ID NO: 33051 - protein, 648 aa, Prochlorococcus marinus subsp. marinus str. CCMP1375
MTKSKPATKKNEWTVKDSCSLYGLDLWGEEYFSINDSGNVTVSPQGKEGNSLELTHLLEELKGRNLNTPLLLRFDDILEDRLKKLHQAFENAINQYGYNNDYQGVFPIKCNQQRHVVEEIVTIGRKWHFGLEAGSKAELLIALALVNDPKAFLICNGYKDNRYIETTILARQLGRQPIVVIEQSDEVGRIIKASQKLGAAPLIGIRAKLSNQSSGRWGNSVGEKSKFGLSIPEILKAVQELTAAGLLNELILLHFHVGSQINDIAILKNALQEASQIYVELNRLGAPMGHLDVGGGLGVDYDGSRTATSASTNYSLQNYANDVVATIQECCKAKKVKVPKLISESGRFLSSHFSILIFNVLGTSSVPTQIAIETSNECLSVKNLRETLMILHQICEEKKIDVSKLQEAWNDALKFKEDALNAFRLGFIDLTERATAEQLTWACAKQIAAHLPNDLKIPKELLAINKGLTETYYANISIFRSAPDTWAIQQLFPLLPIHRLQEKPDQLGHFADLTCDSDGKLARFINNGQEKFLLELHTVKANENYWIGMFLGGAYQEVMGNLHNLFGSTNAIHIRLTKNGKYKLDHVVRGNSKSDVLQAMEHDSEQLLERIRMASESAIQQGSLKINDAQRLIEHVETSLRQSTYLQE

SEQ ID NO: 33052 - protein, 292 aa, Triticum aestivum
MMAEAWMDVLPPPAPYFAGQPCWAVQQERRGGGAWTLEENKVFEEALAAIDLDAPDRWEMVALMLPRKTVADVVNHYRALENDVGFIEAGLVPFPHYDSSSPSSGFTLDWDGGAAGAGGFRRGYCLKRGRADQERKKGVPWTEEEHRLFLKGLKKYGRGDWRNISRNYVTSRTPTQVASHAQKYFIRLTSGGKDNKRRSSIHDITTVNVPDDDDRDSPSGSPPSVVTTVDTKPSPSYGGQRHAFVPSTLPAGTLGGGHPYGNVKLEHQSSFMSGAGLDLDDSLLLQMQCGQL

SEQ ID NO: 33053 - protein, 152 aa, Zea mays
MSSSSLSPAGRTSGSDGDSAADTRRREKRRLSNRESARRSRLRKQQHLDELAQEAALLQAENARVAARAADVASQHARVEQENAVLRARAAELGARLRSVNEVLRVVEEFSGVAMDIQEEVPPADDPLLRPWQLPCYPAVAMPIGAPHMLRY

SEQ ID NO: 33054 - protein, 140 aa, Rhodobacter sphaeroides 2.4.1
MAIERTLSIIKPDATRRNLTGKINAKFEEAGLRIVAQKRIHLSLAQAQKFYGVHKDRPFFGELTEFMASEPVVVQVLEGEGAIAKNREVMGATNPANADAGTIRKEFALSVGENSVHGSDAPETAAEEIAFFFSGLELVG

SEQ ID NO: 33055 - protein, 182 aa, Triticum aestivum
YTYIVQSLVPTVMASLATSVAPFQGLKSTAGLPVSRRSNGASLGSVRNGGRIRCMQVWPIEGIKRFETLSYLPPFSTEALLKQVDYLIRSKWVPCLEFSKVGFIFREHNASPGYYNGRYWTLWKLPMFGCTDASQVINEVEEVKKEYPDAYVRIIGFDNMRQVQCVSFIAFKPPGCEESGKA

SEQ ID NO: 33056 - protein, 452 aa, Sulfolobus tokodaii str. 7
MHYDVIIIGGGVGGLAAAIRSAELGKKVAIIEKNEIGGECINRACIPSKTLIDTAKIVNKILKSPWIATSAKINYNLMNKFKDDIIEGIKDNLYQVINKHKIDLLSGKGEVKNEGEVIVNGKVYTYENLVIATGSEPLSLADFPLNGKNVVDPWTAMNMTNLPENIIIVGGGVAGVELATLFRALNKNVTIIELMPRLLPVPGIDIEIANEVKKRLEEKGVRIYVNTKSRIIKSDDKVIFQAQTPSSNEEISGDLAVITIGRKPVTDGIDLKAIKVETDQRGYIKVDNRARTSNSKVYAVGDVAGAPLSATKAWRQGIVAGDNIGNRNSQMPKYIPTSIFADLEIGVVGSTLEELKKNGINGREVKVNMKEIPRAWTLNETEGFLKIVIGEDNRILGANMIGENATEVINTITLAMELSLKIDDLYKVQFSHPTVSEIITEVVQRAIVGEIY

SEQ ID NO: 33057 - protein, 410 aa, Geobacter sulfurreducens PCA
MRRVVVTGVGAVSPLGVGNAANWDALVSGTSGIGHITRFDASDLPVRIAGEVKGFDPEQYIDKKEVKKMDLFIQYAMAAAHYAMEDSGLQITEENAERTGVLVGAGLGGLPTIEKYHAAMLEGGHKKISPFFIPMLIINLAPGHISIKYGAKGPNLSSVSACATGTHSIGDAYHMIKRGDADAMIAGGTESTVTPLGIGGFAVMKALSTRNDDPTAASRPFEKNRDGFVLAEGAGIVVLEEYEAAKKRGAKIYAEIVGYGLTGDAYHLTAPAPEGEGAARCMKMALNNAGVRPEEVDYINAHGTSTPFNDYYETLAVKSVFGDYAKKVMVSSTKSMTGHLLGAAGGVEAVFTLMAMDKGVIPPTINYQEQDPECDLDYVPNAAREKSITYALSNNFGFGGTNATLLFKKV

SEQ ID NO: 33058 - protein, 332 aa, Oryza sativa
MAKEPMRVLVTGAAGQIGYALVPMIARGVMLGADQPVILHMLDIPPATESLNGLKMELVDAAFPLLKGIVATTDVVEACTGVNVAVMVGGFPRKEGMERKDVMSKNVSIYKSQASALEAHAAPNCKVLVVANPANTNALILKEFAPSIPEKNITCLTRLDHNRALGQISEKLNVQVTDVKNAIIWGNHSSTQYPDVNHATVKTPSGEKPVRELVADDEWLNTEFISTVQQRGAAIIKARKQSSALSAASSACDHIRDWVLGTPEGTFVSMGVYSDGSYGVPAGLIYSFPVTCSGGEWTIVQGLPIDEFSRKKMDATAQELSEEKTLAYSCLN

SEQ ID NO: 33059 - protein, 893 aa, Burkholderia vietnamiensis G4
MRRPAGSRVCRRARESVASYSPWRSFVSGYCRRSPSDAPDAPNAIHDCTGRHVTPRHALCCRDGRPRSEPRHRARRAARRSQRDRRRAPAGLKRVRDEPHARALARGHRRPAARARRTPARADAARDGVARARARGRTRSAGRAAAGSGRPRPRDAVGHLHAARGGVVHGDAGRPGRRRDRRRRARRARALRAAARARPRAAARRLGRSRHRQARRRRAGAAHARAVSRRARRGGAQRPPAVRRGQNHAGALRGLPPRDRGAARRLRRPGRRRRAHGGGRAQRPRGRARLSGCDARRGRHRPDRAGAALEPRQRAHAGARGCARAAQLRDPGQVARDPDLGAVAPAHARRPGASAAARRRHRRLHACVSAKPRAAPPALTVHGTAAPSFSTPFAAAVPWPPGAGRRATPRGGAPGRSAKMPHFPSCPARSSMQPASSARSAAHGADDASSARDLVYGPNDRPAPTIAFVAALQHLLAIIVPIVTPGLLICQALGVASRDTTLIVSMSLVISGIATFVQCKRFGPLGAGLLIVQGTSFNFVGPLIAGGSVMVKQGTPVETVMAAIFGVVIAGSFVEMAVSRILPFVKRLITPLVTGIVVLLIGLTLIKVGLVSMGGGYGAMANGTFASAQNLTLSCVVLGTIIVLNRVPIVWVRSTALVIALAIGYAVAAALGRLDFTGMHQAALFQVPTPLHFGIGFSWSLFVPMLIIYLVTSLEAIGDVTATSKISNEPVEGPVWMRRIKGGVLVNGANSLLAGVFNTFPSSVFAQNNGVIQITGVASRYVGIWIAAMLVVLGLFPVVAGALQAVPEPVLGGAAMVMFGAVAASGINILSGVHLDRRALLIIAVSLALGLGVSQVPDILNSLPHALKNVLASGVATGGICALVMNWFLPERQ

SEQ ID NO: 33060 - protein, 601 aa, Glycine max
MKYVLVTGGVVSGLGKGVTASSIGLLLKACGLRVTAIKIDPYLNTDAGTMSPFEHGEVFVLDDGGEVDLDLGNYERFMDIKLTRDNNITTGKIYQSVIDKERRGDYLGKTVQVVPHITDAIQDWIERVAHIPVDGKTSPADVCVIELGGTIGDIESMPFIQALGQFSYRVGAGNFCLVHVSLVPVLNVVGEQKTKATQHSVRALRGQGLTPHILACRSTMVLDENAKGKLSQFCLIPAENIVTLYDVPNIWHIPLLLRDQKAHEAMFKVLNLHGVAKEPNLEEWTCRAESSDLLYEPVRIALVGKYTCLSDSYLSVLKALLHASVDCQKKLVVDWIPASNLETATAKENHDAYKAAWKLLKGADGVLVPGGFGDRGVQGKIIAAKYARENRIPFLGICLGMQIAVIEFARSVLGVQDANSTEFEPHTKSPYIIFMPEGSKTHMGGTMRLGSRRTYFQTKECKSAKLYGCKSFIDERHRHRYEVNPDLVACLENAGLSFTGKDETGQRMEILELPNHPYFIGAQFHPEFKSRPGKPSPLFLGFIGAACGQLDAVLQRSSIVDNSLSKGVDISPVKTYRTRTTTKTAYRTAEYVYGSCNGLHF

SEQ ID NO: 33061 - protein, 205 aa, Banksia grandis
SSFDFMDGYDKPVKGRKINWMKAGILESDRVVTVSPYYAQELLSGIEKGVELDNIIRKTGITGIVNGMDVQEWNPSTDKYVDVKYDATTVFNAKPLVKEALQAAAGLPVDGNIPVIGFIGRLEEQKGSDILAEAISQFIGENVQIVILGTGKKPLEKQIEQLEVKYPGKAIGIAKFNVSLAHMIIAGADFMLIPSRFEPCGLIQL

SEQ ID NO: 33062 - protein, 257 aa, Bradyrhizobium japonicum
VYLSGWTIAALRSEFGPLPDQSMHEKTSVPVLIEELYTFLRQADSRELNDIFRSLDKARKEGDKTREKELIEKIDGFQTHVVPVIADIDAGFGNAEATYLLAKKMIEAGACALQIENQVSDEKQCGHQDGKVTVPHDVFLAKIRACRHAFLELGVEDGVVVTRTDSLGAGLTQQIAVSHKPGDIGDQYNSFLDCEEITAENARNRDVIINRNGKMMRPKRLPSNLYQFRPGTGEDRCVLDCITSLQNGATDLDRDQS

SEQ ID NO: 33063 - protein, 372 aa, Zea mays
  misc_feature (263)..(263): Xaa can be any naturally occurring amino acid
  misc_feature (265)..(265): Xaa can be any naturally occurring amino acid
  misc_feature (286)..(286): Xaa can be any naturally occurring amino acid
  unsure (1)..(372): unsure at all Xaa locations
MASEWEMAAMGVELGMGMGGTYHHNASSITTAPMSSHHSGGAGYSAAHHHHYYGMPPVGGDATAMRVDDLLENLDLSTGAGAHEFFPTASAANKGHHHSGGAMVGEPSPTANSSDHQTSLLSFADEFYIPSEEAAELEWLSKFVDDSYSDMPNYSSATHAAMAAAAAAAAAAANTAGTGAGGTSGGQDSCAAAAPGRGARSKRSSRAAAAAWHSLVPRPPSQPSPSTSCSSSDFTPASTNNKPARPSNGGSRGRKSPGPAGEXVXVGVEGGVRRCTHCASETTPQXRTGPLGPKTLCNACGVRFKSGRLVPEYRPASSPTFVLTQHSNSHRKVMELPRQKELVLIRGTPRDAAAAAAGSAGPELMFRDYGVC

SEQ ID NO: 33064 - protein, 436 aa, Arabidopsis thaliana
MGFQNEASSSSYTLKIPPPAREDTPLLGKGPPLSSQFKTFANVFIAVVGAGVLGLPYAFKRTGWLMGVLLLVSVSVLTHHCMMLLVYTRRKLDSFNAGISKIGSFGDLGFAVCGSLGRIVVDLFIILSQAGFCVGYLIFIGTTLANLSDPESPTSLRHQFTRLGSEFLGVSSKSLYIWGCFPFQLGLNSIKTLTHLAPLSIFADIVDLGAMAVVIVEDSMIILKQRPDVVAFGGMSLFLYGMGVAVYSFEGVGMVLPLESEMKDKDKFGKVLALGMGFISLIYIAFGILGYLAFGEDTMDIITANLGAGLVSTVVQLGLCINLFFTFPLMMNPVFEIVERRFSRGMYSAWLRWVLVLAVTLVALFVPNFADFLSLVGSSTCCVLGFVLPALFHLLVFKEEMGWLQWSSDTAIVVLGVVLAVSGTWSSLSEIFSVKV

SEQ ID NO: 33065 - protein, 197 aa, Banksia oblongifolia
YDKPVKGRKINWMKAGILESDRVVTVSPYYAQELLSGIEKGVELDNIIRKTGITGIVNGMDVQEWNPSTDKYIDVKYDATTVFNAKPLLKEALQAAAGLPVDGNIPVIGFIGRLEEQKGSDILAEAISQFIGENVQIVILGTGKKPMEKQIEQLEIKYPGKAIGIAKFNVSLAHMIIAGADFMLIPSRFEPCGLIQL

SEQ ID NO: 33066 - protein, 52 aa, Rhodospirillum rubrum
MDIVRIIIAILLPPLGVFLQVGLGKQFWINVLLTLLGYIPGIVHAIWVIAKY

SEQ ID NO: 33067 - protein, 623 aa, Bordetella pertussis Tohama I
MLAWRPGRPDGCQAAGGRRYNPGHDCIKASVSLNSAARNAPAGSQPVKAELWKRVYSRVGSYWKGLVLAVLLMAGAAATQPTLAVIMKPLLDDGFSGAKPHYVWFLPLAVVGLILLRGICNFFSDYLLAWVANNVLRGIRGEMFERLLGLPDADFKRGDTGRLLNRFTIDAGNVTGYATDVITVLVRETLVVIALIGVLLYMSWALTLIILVMLPVSVGIARAFTRRLRRINRETVNMNAELTRVVSEGIDGQRVIKLFDGYDAERRRFDFVNSRLRRFAMRSATADAALTPLTQVCISVAVGAVIAVALSQANSGALTVGSFASFMAALAQIFDPIKRLTNLAGKMQKMLVAAESVFTLVDQTPEADAGTRALPEPVRGKVEFRAVSHRFPDADRDTVSAVSFLVEPGQTVALVGRSGSGKTTLVNMLPRFVLPDGGDILFDDVPIQDLTLRSLRSHLSLVSQDVVLFDDTIAANVGYGAGGTVDDARVRDALAAANLLEFVDGLPLGIHTPVGQNAARLSGGQRQRLAIARALIKNAPVLILDEATSALDNESERQVQASLERLMRGRTTLVIAHRLSTVQNADRIIVLDAGKIVEHGPHSELLAANGLYASLYNMQFRED

SEQ ID NO: 33068 - protein, 805 aa, Solanum tuberosum
MAERVLTRVHSLRERLDATLAAHRNEILLFLSRIESHGKGILKPHQLLAEFESIHKEDKDKLNDHAFEEVLKSTQEAIVLPPWVALAIRLRPGVWEYVRVNVNALIVEELTVPEFLQFKEELVNGTSNDNFVLELDFEPFTASFPKPTLTKSIGNGVEFLNRHLSAKMFHDKESMTPLLEFLRVHHYKGKTMMLNDRIQNLYTLQKVLRKAEEYLTTLSPETSYSAFEHKFQEIGLERGWGDTAERVLEMICMLLDLLEAPDSCTLEKFLSRIPMVFNVVILSPHGYFAQENVLGYPDTGGQVVYILDQVPALEREMLKRIKEQGLDIKPRILIVTRLLPDAVGTTCGQRLEKVFGTEHSHILRVPFRTEKGIVRKWISRFEVWPYMETFIEDVGKEITAELQAKPDLIIGNYSEGNLAASLLAHKLGVTQCTIAHALEKTKYPDSDIYLNKFDEKYHFSAQFTADLIAMNHTDFIITSTFQEIAGSKDTVGQYESHMAFTMPGLYRVVHGIDVFDPKFNIVSPGADVNLYFPYSEKEKRLTTFHPEIEDLLFSDVENEEHLCVLKDRNKPIIFTMARLDRVKNLTGLVEWYAKNPRLRELVNLVVVGGDRRKESKDLEEQAEMKKMYELIKTHNLNGQFRWISSQMNRVRNGELYRYIADTRGAFVQPAFYEAFGLTVVEAMSCGLPTFATNQGGPAEIIVHGKSGFQIDPYHGEQAADLLADFFEKCKVDPSHWEAISEGGLKRIQEKYTWQIYSDRLLTLAAVYGFWKHVSKLDRLEIRRYLEMFYALKFRKLAQLVPLAVE

SEQ ID NO: 33069 - protein, 163 aa, Mesoplasma florum L1
MENKTIYLAGGCFWGVQAFFDYQKGIIKTTVGYAQGDIDNPTYEEVCTGKTNHTETLKIEFNEKEISLKEILDLYFSIINPFLLNQQGNDRGTQYRTGIYSINEFDFTFVKKYLENFQKQTTQKVVVENEILKNFFDAEEYHQKYLDKNPNGYCHIDLSDYKK

SEQ ID NO: 33070 - protein, 144 aa, Glycine max
  misc_feature (62)..(62): Xaa can be any naturally occurring amino acid
  misc_feature (94)..(94): Xaa can be any naturally occurring amino acid
  misc_feature (107)..(107): Xaa can be any naturally occurring amino acid
  unsure (1)..(144): unsure at all Xaa locations
FAFLISYDNPGILAGLGCSASSQAKRGRGLELSRIQAHRGPDWSQLHQYGDHYLAHHRLAIXDPAHGEHPLFNADYTESVPVNGEIYNHEELMXQLPNDTFQTGCDXDVIAHLHEEHGDYYMDMLDGIFSAALLDSRDSMHIVA

SEQ ID NO: 33071 - protein, 338 aa, Gloeobacter violaceus PCC 7421
MRAFVTGGTGLLGSNLVRLLVERGHAVRVLARDPERARRVLGELPVEVVAGDLAEVDGFAGHLAGCDVLFHAAAYFREYFQPGDHWRQLEHLNVRSTVALLKAAERWGVQKAIYVSSSGVIGPRPDGQPADESDLPGALAIDNLYFRSKVLAEAEVYRFLAHHDLSVTLILPGWMFGPGDSAPTESGQLVLDFLEGKLPGVLEIPGSVSIADARDVALAMLQAVEHGRSGGRYIVSGESYDFVQLMESLARVSGKTTPALRIPYSAALAIAWVSQNFAKLSGGKTVLTTSGLRTLADSVRLDSGKAQRELGFVARPLEETLRDEVAWFRTRGKVAAGR

SEQ ID NO: 33072 - protein, 442 aa, Mesorhizobium loti MAFF303099
MSNRLKVTPNDLSAFWMPFTANRQFKQAPRMFVSAKDMHYTTSDGRKVLDGTAGLWCVNAGHCRPKITEAIQHQAAELDYAPAFQMGHPIVFELANRLVDIAPKGMDHVFFTNSGSESVETALKMAIAYHRMKGEGARTRLIGRERGYHGVNFGGISVGGIVSNRKMFGTLLGGVDHMPHTHLPEKNAFSKGVPEYGAELANELERIVALHDASTIAAVIVEPVAGSTGVILPPKGYLQKLREICTKHGILLIFDEVITGFGRLGAPFAADYFGVVPDIMTTAKGVSNGVIPMGAVFVKKEIHDAFMTGPEHMIEFFHGYTYSGNPIACAAALGTLDTYKEEGLLTRGEELAPYWEDALHSLKGEPHVIDIRNIGLIGAIELAPIAGSPTKRAFSAFVKAFERGALIRTTGDIIALSPPLIITKGQINELIDHVREVLRSID

SEQ ID NO: 33073 - protein, 143 aa, Shewanella sp. MR-7
MAIERTFSIIKPDAVAKNHIGAIYNRFETAGLKIVAAKMLHLTKEQAEGFYAEHSERGFFGALVAFMTSGPIMVQVLEGENAVLAHREILGATNPAQAAPGTIRADFAQSIDENAAHGSDSLESAAREIAYFFSAEELCPRTR

SEQ ID NO: 33074 - protein, 352 aa, Dendrobium hybrid cultivar
MENEKKGPVVVTGASGYVGSWLVMKLLKKGYVVRATVRDPTNLTKVKPLLDLPRSNELLSIWKADLDDVEGSFDEVIRGSIGVFHVATPMNFQSKDPENEVIKPAINGLLGILRSCKKAGSVQRVIFTSSAGTVNVEEHQAAVYDESCWSDLDFVNRVKMTGWMYFLSKTLAEKAAWEFVKDNDIHLITIIPTLVVGSFITSEMPPSMITALSLITGNDAHYSILKQVQFVHLDDVCDAHIFLFEHPKANGRYICSSYDSTIYGLAEMLKNRYPTYVIPQKFKEIDPDIKCVSFSSKKLLELGFKYKYSMEEMFDDAINTCRDKKLIPLNTDQEIVLAAEKFEEVKEQIAVK

SEQ ID NO: 33075 - protein, 339 aa, Novosphingobium aromaticivorans DSM 12444
MPSSADYRPTRRVEGKPRVFVTRRLLPETEARMAELFDVVLNSDDRPLGRAELVAAMQDAHVLVPTVTDRIDASMIAEAGPQLGLIANFGAGTEHIDLAAARARKIIVTNTPGVFTDDTADMTIALIISVTRRLNYGGRVLRAGKWEGWAPSTMLGHRLAGKTLAIVGMGRIGQAVAHRARAFGLNVAYHSRHRLPEALETMFGARYVADLDTLVAEADILTLHCPATPETSHLIDARRIALMKPESYLVNTARGQLVEEEALIAALSEGRIGGAGLDVFEHEPQVDARLLAHHNVAILPHMGSATFEGRIASGDKVVANVRFWADGHRPPDQVLEGLV

SEQ ID NO: 33076 - protein, 342 aa, Gloeobacter violaceus PCC 7421
MLAEQEILDCLPFGLVVTDREGRVLLWNDAMESLTGTKAADVQGGWIQCWSAEVAEIGTQGHVFLRNGEEQSFSLSVRTAVSREGHRVWVFIPDSRQELDQAQTDFVSTVSHELRTPLTSIKGFVDTLLRSGSQLSEAQHRRFLRIIKNQADRLTRLVEDILTVSRIQSGRLKNLPQRLDLGEMIDRVFENLAQKYAAQRMRRELPGALPEVWADQDRLEQILTNLIDNALKYSEHGAPVCVSADLDPEDRNVLWIAVRDLGIGIPEENLDQIFNRFSRIDSPLTREREGTGLGLYITKSLVESLGGTIHVESRYGVGSTFTVSLPAVQAGAIEPGEEGWHA

SEQ ID NO: 33077 - protein, 437 aa, Novosphingobium aromaticivorans DSM 12444
MRKYLATALAATVALLPVLAHAQTGAVSVEDVADTGDTAWILVSSAFVLMMAMPGLTLFYGGLVRAKGFLAVLVQVGAIAAVASVLWVAVGYTLAFGDVSGGWIGGGNAWMLLNLGNVRANTAIPESAFALFQMCFALITPALMVGAWVDRARFGWVVAFSALWSLIVYAPVAHWVWGGGWLATRFGTLDFAGGIVVHTTAGVSALVVAMLLGKRAGFPRTLMLPHSPSLTMAGAALLWVGWFGFNGGSALAANDDAASAIINTHVAACVAALVWLIIEKLSVGKPTSVGFATGAVAGLATVTPAAGFISPGAAMLFGAAAACVCYPMIQIVKQRLEIDDSLDVFAVHGVGGMIGSLLLAVFLAPSFGGTGYADGMNLARQAVAQFAGVGIVAAWSAFATVICALMVSMVIPMRVTEDEEREGLDITSHGERAWEFD

SEQ ID NO: 33078 - protein, 654 aa, Prochlorococcus marinus subsp. marinus str. CCMP1375
MCGIAGLICKDRQILALDEIGSKMNTSLLNRGPDDSGIWIDNDIGILLSHTRLSVNDLSKAGHQPMLSSSNRFVLTFNGEIYNHWDLRQELEITQGSQNWKSHSDTETLIQAIECWGVYKTLTKLIGMFAFGIFDRKENKFYLARDRFGEKPIYWGITGVGTRKVLIFGSDLKALKSYPEFNNTINRESMGLFINYNYVPDPHSIYENIWKLEAGKILEIDVTDDDYSKIYPMSWWQLEDTIKNVDGREIENESEAINLLKQELIKSVKSQSKADVKITSFLSGGIDSSLVSALLQETSNSQINTFTIGFENKRFDEATYARRISNYLGSNHSELIFTNEDALNIVPKINEYYSEPFADPAAIPTLLLCNAAKSQGYTVALSGDGADELFGGYNRYTMAPKIWKYFGIIPNFMKPMLINSVNKLSTQSIDLIGSILKIRQFRERLYKITDKISYSNSLEDLYYRLIREWSDVSSITEYKYNQPFTPISNERLNQSIHELKLDPVTFMMVIDCLSYLPGNNQVKLDRASMAVGLETRSPFLDKNVGELIWRLPINLKIKNNCGKYILKEILADYIPKKLFERPKAGFATPINEWIKGPLREWAEEMLNSNKVRDEGFLNPEITTKLLNEHIQGVKDNSKKLWSALIWESWIDKNI

SEQ ID NO: 33079 - protein, 355 aa, Zea mays
  misc_feature (238)..(238): Xaa can be any naturally occurring amino acid
  unsure (1)..(355): unsure at all Xaa locations
MATPRKPIKLTLPSHETTIGKFLTHSGTFTDGDLRVNKDGLRIVSRREGGEAPPIEPLDSQLSLDDLDVIKVIGKGSSGNVQLVRHKFTGQFFALKVIQLNIDESIRKQIAKELKINLSTQCQYVVVFYQCFYFNGAISIVLEYMDGGSLADFLKTVKTIPEAYLAAICTQMLKGLIYLHNEKRVIHRDLKPSNILINHRGEVKISDFGVSAIISSSSSQRDTFIGTRNYMAPERIDXKHGSMSDIWSLGLVILECATGIFPFPPCESFYELLVAVVDQPPPSAPPDQFSPEFCAFISACLQKDANDRSSAQALLDHPFLSMYDDLHVDLASYFTTAGSPLATFKSVIGSITLLI

SEQ ID NO: 33080 - protein, 194 aa, Pirellula sp. 1
MQIYSRHSRSFRTISLSVLSASGLLLGGLALRADESRSRGSASPLEVTQEKRADESSEEDYVPATKAELRRRLNRIQYDVTQNAATEPAFSNAYWNNKKTGEYHCIVCDKPLFDSKTKFKSGTGWPSFYLPIEKDAVGYQTDYKMIYPRTEVHCKRCKAHLGHLFDDGPAPSGKRFCMNSASMKFVEAKSESKK

SEQ ID NO: 33081 - protein, 393 aa, Idiomarina loihiensis L2TR
MEAQNLQQLTFAVDTLYLLISGALVMWMAAGFSMLEAGLVRSKNTTEILTKNIVLYAIACIVYLVIGYKVMYPDPSTSAYAADANFFFQMVFVATAMSIVSGAVAERMKLMSFLLFCVVLSAVIYPVQGLWTWGGGMLTEWGFVDFAGSSIVHLTGASAALAAVLLLGPRSGKYLSDGSINALPGSNMPLAALGTFILWFGWFGFNGGSQLALSTVDDANAIARAMVNTNTSAAAGTIATLLFTKLLWKKADLTMILNGALAGLVAITAQPVTPEPWLAGVIGFIAGLIVVLSIIGLDKLHIDDPVGAISVHGVVGIFGTLVVPLSDDGASFVIQLAGVGTIFCWVFFSSLIVWAILKLILGIRVTKEQEYIGLDQVDCGVEAYPEFTSKKDG

SEQ ID NO: 33082 - protein, 94 aa, Tetragenococcus halophilus
MLKPLGDRVLIEVSEEEEKTVGGIVLASTAQEKPQTGKVVAVGPGRTLDNGELATVPVNVGDTVLFEKYAGSEVKYDGQDYMIFSAKDLVAIVE

SEQ ID NO: 33083 - protein, 575 aa, Crocosphaera watsonii WH 8501
MLKHDVVIVGGGLAGSRAALEIKRLNPSIDVAVVAKTHPIRSHSVAAQGGIAASLKNVDPEDSWQSHAFDTVKGSDYLADQDAVALLTQQAPDVIIDLEHLGVLFSRLDNGKIAQRAFGGHTHNRTCYAADKTGHAILHELVNNLRLNGVKIYDEWYVMKLIFEDEEAKGIVIYHIEDGTLEIIHSKVVMFATGGYGRVFNTTSNDYASTGDGLAMSAIAGVPLEDMEFVQFHPTGLYPVGVLISEAVRGEGAYLINSEGRRFMEDYAPSRMELAPRDITSRAITLEIRAGRGVHPDGSPGGPFIYLDLRHMGKEKIMSRVPFCWEEAHRLVGVDAVYEPMPVRPTAHYCMGGIPVNTQGRVRLSGDRLTEGFFAAGECACVSVHGANRLGSNSLLECVVYGKITGENIAYYVKDRKFSDLDEEAYLQEARQRISGLLNKGGSIRIGALRQQFQDSMAEHCGVFRTEELMQEGIEKIQQFKARYDNIYLDDKESCWNTELIEAMELRSIMVVGEMILTSALNRKESRGAHSREDYTKRDDPNFLKHTLAYYSPAGLDIQYMDVVLDMFEPKERKY

SEQ ID NO: 33084 - protein, 247 aa, Geobacter sulfurreducens PCA
MRTLVLIRHGESVWNRENRFTGWTDVGLTDKGAAEALRAGRTLKNEGFAFDEAFTSVLKRAIKTLWIVLEEMDQMWIPEHRHWRLNERHYGALQGLNKAETAERHGMEQVHVWRRSYDIPPPPLAAGDPRNPARDPRYAELDPADIPLTESLKDTVARFLPYWHETIAPRILAGRRLLIAAHGNSLRALVKYLDGIGDDAIAGLNIPTGIPLVYELEDDLHPIRSYYLGDPDEVARATQSVADQVKR

SEQ ID NO: 33085 - protein, 324 aa, Burkholderia vietnamiensis G4
MPKAIRYDQPGGPEVMKWVDVEVGEPKAGEVRIRQHAVGLNYIDVYFRTGLYPQPLPGGLGMEAAGEVTAVGDGVSALKAGDRVAYVGQPPGAYAQERVMPAERLVKLPDALGYDDAASVMLQGLTAHYLLRRTYPVKAGDTILIHAAAGGVGLLVCQWAKALGATVIGTVGSDEKAALASAHGCDHPIVYTRENFTQRVKEITNGAGVPVVYDSIGKDTYIGSLDCLAPLGYFVSFGNASGPLPPIDSKDFSSRGSLFFTRPTLFSYIAKRADLEAAAAELFDVILSGKVKTSINQRYPLAEVGRAHADLESRKTTGSTVLVP

SEQ ID NO: 33086 - protein, 205 aa, Banksia ericifolia
SSFDFMDGYDKPVKGRKINWMKAGILESDRVVTVSPYYAQELLSGIEKGVELDNIIRKTGITGIVNGMDVQEWNPSTDKYIDVKYDATTVFNAKPLLKEALQAEAGLPVDGNIPVIGFIGRLEEQKGSDILAEAISQFIGENVQIVILGTGKKPMEKQIEQLEIKYPGKAIGIAKFNVSLAHMIIAGADFMLIPSRFEPCGLIQL

SEQ ID NO: 33087 - protein, 205 aa, Banksia brownii
SSFDFMDGYDKPVKGRKINWMKAGILESDRVVTVSPYYAQELLSGVEKGVELDNIIRKTGITGIVNGMDVQEWNPSTDKYIDVKYDATTVFNAKPLLKEALQAAAGLPVDGNIPVIGFIGRLEEQKGSDILAEAISQFIGENVQIVILGTGKKPMEKQIEQLEIKYPGKAIGIAKFNVSLAHMIIAGADFMLIPSRFEPCGLIQL

SEQ ID NO: 33088 - protein, 325 aa, Pseudomonas fluorescens PfO-1
MAKRIQFRAHGGPEVLEYVDYQPAEPGPQQVRVSNKAIGLNFIDTYYRSGLYAPPALPSGVGAEGAGIVEAVGSEVTRFKVGDRVAYGSGPLGAYSDVHVLPEANLVHLPDAISFETAAGVMLKGLTVQYLLRQTYELKGGETILFHAAAGGVGLLACQWAKALGVKLIGTVSSKAKADLAKAHGAWETIDYSHENVAQRVLELTDGKKVPVVYDGVGKDTWPASLDSVAPRGLLVSFGNASGAVDGVNLGILAAKGSLYVTRPTLATYANNAENLQRMADELFGMITSGKLKVDISQRYPLADAAKAQTELSARRTTGSTVLLP

SEQ ID NO: 33089 - protein, 292 aa, Glycine max
  misc_feature (202)..(202): Xaa can be any naturally occurring amino acid
  misc_feature (248)..(248): Xaa can be any naturally occurring amino acid
  unsure (1)..(292): unsure at all Xaa locations
MAATFKHHPTGLHGWGAPRSSRNLPSFFSMRFPCSTRHHHIRASVSHHSSTEAESALILIRHGESLWNEKNLFTGCCDVPLTNRGVEEAIEAGQRISYIPIDMIFTSALIRAQMTAMLAMTQHSQKKVPIIIHDESEQATTWTQVYSEKTTKQSIPVITAWQLNERMYGELQGLNKQETAERYGKEKVHEWRRSFDIPPPKXEPQLKSGKHVMVAAHGNSLRSIIMYLDGLTSQEVTSLEISTGIPLXLYIYKEGKFNSRGSPVGPTEAGVYAYTQSLAVYRQQLDDMSSCY

SEQ ID NO: 33090 - protein, 404 aa, Glycine max
MTLPLSDRKSRRSPKTYHQNLISDAAIQCGSSFSGAVFNLSTTIVGAGIMALPAAVKQLGLIPGLVMIILCAMLTESSISMLVRFTRASKSSTYSGVVRDAFGGLGRNLLLLCIIVNNVGMLVVYMVIIGDVFSGSWSEGVHYSGVVEEWFGQRWWSTRPVLLFLTAILVLVPLASFRRVDSLRYTSALSVGLAIVFVVITAGIAIVKFIDGSIVMPRLMPKFTGLESFWKLFTTIPILVSAYICHHNVHPIENELQDPSQMKAIVRTSLLLCSSVYIATSLFGFFLFGDNTLDDILANFDGDLGVPYGSFLTDIVRVSYGIHLILVFPIVFYSLRLNIDGLMFPHAIPLAFDTQRFYLVTTVLMAFIFVGANFVPSIWDAFQFIGATAAISAGYIFPAAIALR

SEQ ID NO: 33091 - protein, 545 aa, Vigna unguiculata
MALPHSISALSTTLTLSSSVNKPTTNKVNSFPFLSNKGTQFFTKQTRPRSGRSPLLTPARVAAPPSTVETDQSFPETEKGETEEEFNEESSSSKFTWRDHWYPVSLIEDLNPLLPTPFQLLGREIVRTTSPLPKWVAFDDKCPHRLAPLSEGRIDEDGKLQCSYHGWSFDGCGSCVKIPQAASEGPEARAVGSPKACATRFPTLVSQGLLFVWPDENGWEKASASKPPMLPDEFEKPEFATVNIQRDLFYGYDTLMENVSDPSHIEFAHHKVTGRRDRAKPLPFKMDARGSWGFSGANEGNPKISAKFVAPCYYMNKIEIDTKLPVVGDQKWVVWICSFNVPMAPGKTRSIFSARNFFQFTVPGPAWWQVVPRWYEHWTSNKVYDGDMIVLQGQEKIFLSKTKEGDDINKQYTSITFTPTQADRFVLAFRNWLRRHGNGQPEWFSSIPDLPLPSTVLSKREMLDRLEQHTLKCSSCKEAYEGFQIWQKVLIGATVIFCATSGIPADVQFRVLLAGLAIVSAALAFTLNQLQKNFEFVDYVHAEIE

SEQ ID NO: 33092 - protein, 388 aa, Rhodobacter sphaeroides 2.4.1
MPVVNRIADYAEEMTAWRRHLHRHPELRFDCQNTAAFIAERLRAFGVDEIHEGIATSGLVAIIEGQGEGPTIGLRADMDALPIEELTGADYASTVPGRMHACGHDGHVTMLLGAARYLAETRRFAGRVALLFQPAEEDGGGGEVMVREGVMDRFGISQVYGIHNAPNVPLGRFVTAPGPLMAAVDTATVRVIGKGGHGATPHETVDPVVAIVGMVSALQTIISRNLYTLDDLVLSVTQIHTGSASNIIPEDGWFCATIRTFTPEVRDLVRRRFHEIVEGHAAAYGVRVEIDYELGYPPTVNDPAKAGFAAEVAAEIAGEAGVEANANREMGSEDFAYMLEARPGAYLFLGTGPGAGLHHPAYDFNDAASPLGASFFARLVERAQPLEA

SEQ ID NO: 33093 - protein, 205 aa, Banksia quercifolia
SSFDFMDGYDKPVEGRKINWMKAGILESDRVVTVSPYYAQELLSGIEKGVELDNIIRKTGITGIVNGMDVQEWNPSTDKYIDVKYDATTVFNAKPLLKEALQAAAGLPVDGNIPVIGFIGRLEEQKGSDILAEAISQFIGENVQIVILGTGKKLLEKQIEQLEIKYPGKAIGIAKFDVSLAHMIIAGADFMLIPSRFEPCGLIQL

SEQ ID NO: 33094 - protein, 285 aa, Saccharomyces cerevisiae
NVTTGEMMAVKQVEVPKYSSQNEAILSTVEALRSEVSTLKDLDHLNIVQYLGFENKNNIYSLFLEYVAGGSVGSLIRMYGRFDEPLIKHLTTQVLKGLAYLHSKGILHRDMKADNLLLDQDGICKISDFGISRKSKDIYSNSDMTMRGTVFWMAPEMVDTKQGYSAKVDIWSLGCIVLEMFAGKRPWSNLEVVAAMFKIGKSKSAPPIPEDTLPLISQIGRNFLDACFEINPEKRPTANELLSHPFSEVNETFNFKSTRLAKFIKSNDKLNSSKLRITSQENKTE

SEQ ID NO: 33095 - protein, 536 aa, Treponema denticola ATCC 35405
MKSKFIFITGGVVSSLGKGLTAASIGMLLKSRGYSVVNQKFDPYLNVDPGTMNPYQHGEVFVTEDGGETDLDLGHYERFTDVPLHKFNSTSAGKVYLAILDRERAGGYNGGTVQVVPHVTDEIQSRILGTAEQTGADFVISEIGGTVGDIEALPFIEAIRQIRYTVGKENCMFVHLGLLPYLKECGEIKTKPMQHSVKELLSFGIQPDILICRSEKRLSKSTREKLSLFSNIPQDAIIENLTAKSIYEVPLMLEEAGLGKVLCKLFNIENKEPNLEEWKKMVQTYYNPEKEITIALVGKYVELPDAYLSVAEALTAAGIYHKTSIKLLWIDSKKIETKEDAAAFLKDADGIIVPGGFGDRGINGMLLTAQFARENKIPYFGICLGMQISAIEYALNALHIEEANSSEFDKNAKNPVIDLMPDQKDVKIGGTLRLGLYRCMIAEGSLAEKAYKSHEIQERHRHRYEFNNLYREKFDNSDMIFSGLNPERNLVEIVELKSHPWFVAVQFHPEFASRPNKPHPLFRDFIKAAVDNKINR

SEQ ID NO: 33096 - protein, 197 aa, Banksia dryandroides
YDKPVKGRKINWMKAGILESDRVVTVSPYYAKELLSGIEKGVELDNIIRKTGITGIVNGMDVQEWNPSTDKYIDVKYDATTVFNAKPLLKEALQAAAGLPVDGNIPVIGFIGRLEEQKGSDILAEAISQFIGENVQIVILGTGKMPLEKQIEQLEVKYPGKAIGIAKFNVSLAHMIIAGADFMLIPSRFEPCGLIQL

SEQ ID NO: 33097 - protein, 150 aa, Triticum aestivum
  misc_feature (75)..(75): Xaa can be any naturally occurring amino acid
  unsure (1)..(150): unsure at all Xaa locations
MADQLTDDQIAEFKEAFSLFDKDGDGCITTKELGTVMRSLGQNPTEAELQDMINEVDADGNGTIDFPEFLNLMAXRKMKDTDSEEELKEAFRVFDKDQNGFISAAELRHVMTNLGEKLTDEEVDEMIREADVDGDGQINYEEFVKVMMAK

SEQ ID NO: 33098 - protein, 198 aa, Arabidopsis thaliana
MTTYGTIPSQENASSSLSLLGRAKELISLGLSSQRPWLELVQCSAFSLPISFSVATERIKSNIMIFRTNYIVIFIVSIFISMLWQPVHLSVFVILIVAWLYVYSRDNEPWVIFGSVIDDSTLVLVLLVLTIGIFLLTDVSRGIVIGVLAGLPVVLVHGMVSDFGLTRSTAEGNESIMTKSILGTYGYMAPEYACMLLL

SEQ ID NO: 33099 - protein, 257 aa, Treponema denticola ATCC 35405
MERLIFIFNITQIVLFGVGLICFVVLFFVPAGYGKMINKKWGFSFNNKIAWFLMEVPTLITMIVLMCVWAKPENFVRIIIGLFFVLHYAQRVFIFPFLLKGKSKMPILIVLMGITFNTINAFLIGAWLFYLSPKTMYPISWLYDPRFIIGALVFLLGMAINIDSDKYIRSLRKPGDTAHYFPHKRMYKYVSSANYFGEILEWFGFALLSWSFVGLLFAFWTCANLVPRAYTINKRYREEFPEEFAALKPKRVFPFIF

SEQ ID NO: 33100 - protein, 254 aa, Ipomoea batatas
MRVRFFFYFAYFLITLVFFPSVTLQSYSGGHRQEATGFCGEEGEREDNLIRMATTTLGGISDSASAENSVEIESLARFAVEEHNKKENAMIELVRVVKAEEQVVAGKLHHLTLEVIDAGKRKLYEAKVWLKPWMNFKELQGFNHIEDIPTLTSSDLGAKRDWPNTGLKSVPVNDPVVQEAAQHAVKTIQQRSNSLLPYELQEIVHANAEVIDDSAKVHMLIKTKRGEKEEKFSVEVPKNNEGAFFLNHMAPANS

SEQ ID NO: 33101 - protein, 133 aa, Brassica napus
MKNSEEQMRSLFGISLSDKPRWQQFLICSSGFFFGYLVNGVCEEYVYNRLKFSYGWYFTFVQGLVYIVMIYLNGFNTKQMVNPWKTYVKLSAVLMGSHGLTKGSLAYLNYPAQIMFKSTKVLPVMVMGAFIPG

SEQ ID NO: 33102 - protein, 460 aa, Ralstonia eutropha JMP134
MKHLQRNLGARHIRFLALGSAIGTGLFYGSASAIQLAGPAVILAYILGGAAVYMVMRALGEMAVREPVSGSFGRYASEYLGPLAGFLTGWTYILEMIIVCLADVTAFGIYMGFWFPEVPQWIWVLGIVMLICGLNLCNVKVFGELEFWLALVKILAIGAMIIGGTLILFLGVKMNGEHSPGLTNLWAHGGFLPHGAGGLIASLAVVMFAYGGIEIIGITGGEAKEPEKVIPRAINAVPARILLFYVLTMVVLMAIFPWTGIGGQGSPFVQIFSGLGIKSAAAILNLIVISAAISAINSNIFGAGRMMFGMAEQGQAPRLFAITSRQGVPWVTVLAMAAALLGGVVLNYLIPEQVFVIIASIATFATVWVWLMILLSQVAMRRRLSAEEVRALKFKVPMWPVGPALAIAFMLFVICVLGYVEDTRVALYIGAGWVALLSLAWYLRAKPHEDRILTGESSAL

SEQ ID NO: 33103 - protein, 496 aa, Glycine max
  misc_feature (225)..(225): Xaa can be any naturally occurring amino acid
  misc_feature (235)..(235): Xaa can be any naturally occurring amino acid
  unsure (1)..(496): unsure at all Xaa locations
MVFQTNINPHFVLFPLMAQGHMIPMMDIARLLARRGVIVSIFTTPKNASRFNSVLSRDVSSGLPIRLVQLHFPSKEAGLPEGCENLDMVASNDLYKIFHAIKLLHKPAEEFFEALTPKPSCIISDFCIPWTAQVAEKHHIPRISFHGFSCFCLHCLYQIHTSKVCESITSESEYFTIPGIPDKIQVTKFELPQLPSGFSNELKDFGEQVIDADIKSYGVIINTFXRVGEGICEGXKKVRNDKVWCIGPVSLCNKDGLDKAQRGNRASINEHHCLKWLDLQQPKSVVYVCFGSLCNLIPSQLVELALAIEDSKKPFVWVIREGSKYQELEKWISEEGFEERTKGRGLIIRGWAPQVLILSHPAIGGFLTHCGWNSTLEGISVGVPMVTWPLFADQFLNEKLVTQVLKIGVSVGAEVPMNWGEEEKTGVLVKKKNIERAICMVMDNDEEESKERRERATKLCEMAKKAVEKGGSSHLDMTLLIQDIMQQSSSKEDVKC

SEQ ID NO: 33104 - protein, 265 aa, Bacillus halodurans C-125
MSRLEAAVNGKKNLFIPFITAGDPNPEVTIELALTLEEAGADILELGIPYSDPLADGPVIQAASKRALKHEMTLEKALSLVPKMRAQGLTIPVIVFTYVNPLLQYGEEQFVKRAADYQVDGILVPDMPFEEGEVLQAACQEHNLSLISLVAPTSNKRIEKIAARAQGFVYCVSSLGVTGLRDELDPRVHEFLQTVKTHASVPVVVGFGISRREQVEALAENADGVVVGSAIVKLVGELEDELNDPEKLEDGLFKIKRFVSELISS

SEQ ID NO: 33105 - protein, 309 aa, Sinorhizobium meliloti
MTTHLYENPVFLKHEVPEGHPERPDRLKALNLALEHPNFADLERLEASKGDENLVLLAHTEEHLLGIKRDIPDEDINQIESDTYASPQSLEAALTGIGGAVAAVDAVFAGEADNAFVAARPPGHHAEKNRAMGFCFFNNVAIAARYAQTAHGAERVAIVDWDVHHGNGTQDIFWDDPSVLFCSTHQIPLYPGTGAKDETGVRNNVVNAPISPNSGSEHFRDAFRSRVLPALENFRPDFLLISAGFDAHHRDPLAQINLVGEDFDWATGRLLDVAGRSAGNRIVSLLEGGYDLQGLAESAGLHILRLMRG

SEQ ID NO: 33106 - protein, 408 aa, Streptomyces avermitilis MA-4680
MTAPARTRSSADLIRAEAPVLAHNYHPLPVVVARAEGTWVEDVEGRRYLDMLAGYSALNFGHRHPVLIEAAHRQLDQLTLTSRAFHNDRLAQFAESLAELTGLDMVLPMNTGAEAVESAIKVARKWAYEVKGVAPDQATIVVAADNFHGRTTTIVSFSTDDTARTGFGPFTPGFRIVPYNDLAALEAAVDETTAAVLIEPIQGEAGVVIPDDGYLAGVRELTRRTGCLFIADEIQSGLGRTGRTLAVEHESVVPDMLLLGKALGGGIVPVSAVVARRDVLAVLRPGEHGSTFGGNPLAAAVGSAVVGLLETGEFQRGAAELGVVLRDGLAALVGKGVVGFRARGLWAGVDIDPAIGTGREISERLMREGILVKDTHGSTIRLAPPLTITGEELASALGTLEKVLTQEA

SEQ ID NO: 33107 - protein, 293 aa, Ashbya gossypii ATCC 10895
MAQKAQKHAGVANCPTRSRCSTVAIKMSTPANLVPGLNDSVDVIEEFPLEVARYMTLLREIDAKCVHTVPELNAQIGRFLAGSRQPGSPQLQTINRLFQDLMPSLEEKMHVSSIAFETLDRLVARVELAYEVALKNQEIPDKLRLGNDNHPAMHLHHELMKKIESKQQSKSQQALRSESRREAMAAKKMHVDPPAPAPASYAPLPLPPAALAAKRRADLPPPARKRKKPRDDYSARPKTNEYGEALYCYCNQVAYGEMVGCDGENCQLEWFHLPCINLETLPKGKWYCDDCKR

SEQ ID NO: 33108 - protein, 861 aa, Polaromonas sp. JS666
MSVSLSVIDSAAQRPAASLHHEASVPPSHPFLRETDRLTRLAARSCGVSIAMVVVLEDGQAVFSAGTGFAAPAREGLVTLCAATLDTPLCAPTLPAPYAPGIRFYRGFQMVGEDGALLGLLAVMDTLPRSLSREQEEGLQTLARLLAGQLELRQQRHALDAQRQHLGTTMRQTQEDAHRLATRLSITLENISEGFYTLDPEWRFTYLSREGERLLGRPGTELLGKSIWKEFPGIINTAFGEQIGAAVAGNQQAELEAHFAPMDRWFEVRAYPYPDGVAIYFRDVSERRKAREQLMLLETSISHLNDIVLITEAVHTGKPGLRIIFANNAFERHTGYGRNEALDQSPRLLCGPLTQRSELDRINKAFLRGEPVQAELITYRKDGKHFWMEVDIVPVADDAGVFFTHWVAVGRDITRRKVAESEIMHLAFYDPLTQLPNRQLLMDRLQQALAHPPQLPREGALMFIDMDNFKTLNDTLGHHKGDLLLQQVAERLTGCVRTADTVARLGGDEFVVMLENLGHDPREAGARARAVGEQILAALSEPYLLAGYQHYSTCSIGVTSFNQNHDSIGDLLKQADLAMYQAKTAGRNTLCFFDPVMQAAVSASAALQSDLRQGLREKQFLLYYQPQVGRDGRMMGAEALLRWNHPVRGMVPPADFIPVAEESGLILPLGQWVLETACRQLGAWAQRPETAALSISVNVSVRQFRHPEFVDLVMAALNDTKVSPHKLKLELTESLLADDMEITIGKMAKLKAMGVTLSIDDFGMGYSSLSCLKRLPLDQLKIDKSFVADILRDPNDAAIARTIIGLAQSLGLGVVAEGVETEAQREFLYRQGCESYQGYLFCKPLPIEALEAFMKNPAPGG

SEQ ID NO: 33109 - protein, 406 aa, Nocardioides sp. JS614
MPEDEPTPPPTRVDSLIETTVGESHDELIALRRDLHAHPELSWRELRTTALVAARLRRSGWGVTELPRSGLLAEIGTVGPVVALRADLDALPVADLTDDPWSSTVEGVTHACGHDVHTTSLVGAALALSRLHAEGLLPGRVRLLFQPAEEVMPGGALSLIELGALDEVTQLFGLHCDPSLDVGRVGLREGPITGAADHLEVTLTGSGGHTSRPHLTEDLTYALGKVVTELPSILSRRLDPRAGVSVVWGVVRAGSAHNVIPATGRIGGTVRMLDAIAWSEAEKLVPVLVEQIVAPYGVHAQVDYQRGVPPVVNDVESIVLLGHAVERVVGQVGHVPTQQSLGGEDFGWYLDRVPGAMGRLGTRTPGGPTYDLHQGNLRVDERAVAIGAKVLAHVAAESLVTSIGDL

SEQ ID NO: 33110 - protein, 595 aa, Pisum sativum
MASTFSATTSSCNLSSSAAISSFPLAAGKRNANKVVLPRKNRNVKVSAMAKELHFNKDGSAIKKLQNGVNKLADLVGVTLGPKGRNVVLESKYGSPKIVNDGVTVAKEVELEDPVENIGAKLVRQAAAKTNDLAGDGTTTSVVLAQGLIAEGVKVVAAGANPVLITRGIEKTSKALVAELKKMSKEVEDSELADVAAVSAGNNHEVGNMIAEALSKVGRKGVVTLEEGKSAENSLYVVEGMQFDRGYISPYFVTDSEKMTVEFENCKLLLVDKKITNARDLINILEDAIRSGFPIVIIAEDIEQEALATLVVNKLRGSLKIAALKAPGFGERKSQYLDDIAILTGGTVIREEVGLTLDKADKEVLGNAAKVVLTKDTTTIVGDGSTQEAVNKRVSQIKNQIEAAEQEYEKEKLSERIAKLSGGVAVIQVGAQTETELKEKKLRVEDALNATKAAVEEGIVVGGGCTLLRLASKVDAIKDTLANDEEKVGADIVKRALSYPLKLIAKNAGVNGSVVSEKVLSSDNPKYGYNAATGKYEDLMAAGIIDPTKVVRCCLEHASSVAKTFLMSDCVVVEIKEPESAPVGNPMDNSGYGNI

SEQ ID NO: 33111 - protein, 252 aa, Cryptococcus neoformans var. neoformans B-3501A
MSVYVGESRGELLAWLNDLLAPTVVTKLEQCGTGSVYCQIIDSIYGDLPMSRVKFNARMEYEYLDNFKILQKAFTRHKIEKPIPVDRLIKCKMQDNLEFLQWMKKYWDMHSRGEGYDAQARAGGHIAGVRASTSRPTAARTRPAPAMAGSRTVSSASQQANSAQVAAMQARVAEIEAHSEGLLKERDFYFDKLRNIELIVQERLAVEGITPEESDVMTKIQDILYATIEGFEVPQEEDFIEEQPVEGEEETF

SEQ ID NO: 33112 - protein, 427 aa, Glycine max; identical to SEQ ID NO: 1325

SEQ ID NO: 33113 - protein, 234 aa, Nicotiana tabacum
LPLPFFNMDTSHWPQGIGLAKAVEPSKPVPVTERKPRPQKEQAINCPRCNSTNTKFCYYNNYSLSQPRYFCKTCRRYWTDGGSLRNVPVGGGSRKNKRSNSSSNNSSSSTSSSYKKIPDLTIPTSSSTQNPKIINEPHDLNLTFNPSTTSNFSNISEFMALPLMNPNSTTSFMSSIMPQISDSNNIMYSSSSTGLPNLHDLKPTLNFSLDGFDNNNGYGSLQGETAGAKLFFPL

SEQ ID NO: 33114 - protein, 248 aa, Populus tremuloides
MGRGRVQLKRIENKINRQVTFSKRRTGLLKKAHEISVLCDAEVALIVFSHKGKLFEYSTDDCMEEILERYERYSYAERQLVATDLDSQGDWTLEYNRLKAKVELLQRNHRNYVGEDLDSMSLKELQNLEQQIETALKHIRARKNHLMSQSISEMQRKEKAIQVQNNMLVKQIKEKEKKDKAVAQPAFWDQQNHGPDASSFLLSQPAGLPLPCLNIGGSYQEEAPEARRNGLGHTLEPIYSFHLGGYGA

SEQ ID NO: 33115 - protein, 217 aa, Kluyveromyces lactis NRRL Y-1140
MSPVASDFVPFTLQSNSNIKDYLKANEKWRSEMQNEHPNLFTLNGQGQDPHTLFIGCSDSRYNENVVGVLPGEVFTFKNIANKVNVEDLTCLATLEFAINVLKVNKIIICGHTDCGGIKTCLKDQRKELPGLQCSHLHQYLQEIDDLIHENKVLLNSPEYQNDLEKQSRLLSILNVKKQYESLLSVDTVQKALENKSIETYGLLYNVDSGKVEMIDL

SEQ ID NO: 33116 - protein, 416 aa, Brassica napus
  misc_feature (85)..(85): Xaa can be any naturally occurring amino acid
  unsure (1)..(416): unsure at all Xaa locations
MDAAATASLIRSSVLPLKTSDNGAGSMFLTASGPGFTRFGPGRQLRFRQNAFARFSRPLQSTTTRRSFVVKASASNDDASSSVCXNPIAPLQLESPAGQFLSQILVTHPHLVPAAVEQQLEQLQTDRDSEGQNKDASSAPGTDIVLYRRIAELKENERRRTLEEILYALVVQKFMEANVSLVPSITPSSSDPSGRVDTWPTKVEKLEKLHSSEMYEMIHNHLALILGPRMGDLASVAQISKLRVGQVYAASVMYGYFLKRVDQRFQLEKSMKLLTGGLDESKTSVEQPENVTFKAVSSHPEVGSFAGGVSAKGFGSEIKPSRLRTYVMSFDSETLQRYATIRSREAVGIIEKHTEALFGKPEIVITPEGTVDSSKDEQIKISFGGMKRLVLEAVTFGSFLWDVESHVDARYHFVLN

SEQ ID NO: 33117 - protein, 511 aa, Cryptococcus neoformans var. neoformans B-3501A
MALVDVEEQSTAGPSHSRSSSVLAATAAESVSSSRRESRRGSKDREVGDGGRGGDDHVSFKTAEEDIELQDSATAPLLAGAAASPRLLESEERHLLEAEGHNSVSRGSILDAVTNMANSIIGAGIVGLPYAVSEAGFVMGVFLLIALAAISDWTIRLVILTSKLSGRESYTETMYHCFGPLGAMAVSFFQFSFAFGGTAAFHVIVGDTIPRVVSYIFPSFAENVFLRLFVNRQAVIIMCTLFISFPLSLHRDIVKLSKSSSFALVSMVIIIVSVLFRSVAVDPSLRGSSTDVFSIVKPGVFQAIGVISFAYACHHNSNYIYKSINVPTLDRFDMVTHISTGISLIACLLVAVCGYVVFTDKTEGNILNNFSSEDWLINIARFCFGANMSTTIPLEVFVCREVIEETFYKSKPFSKLRHVIITSSVIFIAMGLALTTCDLGVVLELAGGLSASALAFILPASAYFVMLSGPWSSRRKLPALLVASFGVIVLVLSCGLSLKKAWSGEGGKSVC

SEQ ID NO: 33118 - protein, 258 aa, Glycine max
SARVEAVVAALFMNIYIVGLNQLSDVEIDKINKPYLPLASGEYSFETGVTIVASFSILSFWLGWVVGSWPLFWALFVSFVLGTAYSINVPLLRWKRFAVLAAMCILAVRAVIVQLAFFLHMQTHVYKRPPVFSRPLIFATAFMSFFSVVIALFKDIPDIEGDKVFGIQSFSVCLGQKPVFWTCVTLLEIAYGVALLVGAASPCLWSKIFTGLGHAVLASILWFHAKSVDLKSKASITSFYMFIWKLFYAEYLLIPFVR

SEQ ID NO: 33119 - protein, 396 aa, Staphylococcus aureus subsp. aureus MSSA476
MTKSEKIIELTNHYGAHNYLPLPIVISEAEGVWVKDPEGNKYMDMLSAYSAVNQGHRHPKIIQALKDQADKVTLVSRAFHSDNLGEWYEKICKLAGKDKALPMNTGAEAVETALKAARRWAYDVKGIEPNKAEIIAFNGNFHGRTMAPVSLSSEAEYQRGYGPLLDGFRKVDFGDVDALKAAINENTAAVLVEPIQGEAGINIPPEGYLKAIRELCDEHNVLFIADEIQAGLGRSGKLFATDWDNVKPDVYILGKALGGGVFPISVVLADKEVLDVFTPGSHGSTFGGNPLACAASIAALDVIVDEDLPGRSLELGDYFKEQLKQIDHPSIKEVRGRGLFIGVELNESARPYCEALKEEGLLCKETHDTVIRFAPPLIITKEELDLALEKIRHVFQ

SEQ ID NO: 33120 - protein, 399 aa, Dechloromonas aromatica RCB
MSKQIQEAYIVAATRLPVAKRNGMFKNVRPDDMLAEVIRAVVAQVPGIDPARIGDVIVGCAMPEAEQGMNVARIGLLLAGLPITVPGLTINRFCSSGVQAVADAANQIRLGLADVMIAAGTESMSVMPQIMGNKMSMNPAIFAKEENLGIAYGMGLTAEKVANQWKVSREAQDAFAVASNRKACAAIAAGHFKAETTPYTIRESLPDLKTGQIKLRERVVEFDEGPRADASLEKLAKLRPVFHARGSVTAGNSSQMSDGAGAVMLVSEKVLKEHNLTPLARFAGYAVGGVAPEIMGIGPIAAIPKVLAQVGINQDQLDWIELNEAFAAQSIAVMQELGINPDKVNPLGGAIALGHPLGATGAIRIATAVHGLRRTGGKYGMVTMCIGTGMGAAGIIEAL

SEQ ID NO: 33121 - protein, 346 aa, Rhodobacter sphaeroides 2.4.1
MQAQDATQLLEGVPLPLVLIGPDERIRAANAPAQRLFGAASVARHYVMAMRQPALLDAIEGAIRLDRPGRARYIITGPSREVTYRATVTPVRIHGESCALCAFEDITEQEQMGAIRRDFVANVSHELRTPLTALLGFIETLQGAARDDPAARSRFLGIMAREAGRMNRLVQDLLSLSRVESEERVRPKTPVDVTAVIGQAIAALRPMAEAAGVEIQRQGEAGPILLPGDPDQLTQVFHNLIENAVKYGASGKLVTVGISRDAEGLARLGPAVRIEVVDRGEGIDAIHLPRLTERFYRVDNHRSREKGGTGLGLAIVKHIVNRHRGRFLIESELGQGSRFIVTLPLA

SEQ ID NO: 33122 - protein, 432 aa, Prochlorococcus marinus str. MIT 9313
MASSDDAKLRPLPNTAALSGVLEAFAFFRDPAFAQKRFERHGNVFETSLLGQPMVFIQGGQAIRDLLAQPNAVEGWWPESVRQLLGSHSLANRNGASHRARRRVIGQLFSASALQRYSAGIISMVQDLADELQAAKTALPLAERMRRFAFSVIATTVLGLEGTDRDELFVDFEIWTRALFSIPIALPGSSFAKALKARERLLRRLQKVLLKASNGNGGLDLLAGGLDEAGIPLTDEDMVEQLLLLLFAGYETTASSLSCLMRELLLNPQVETWLREEINGVDWPPAPEQATTAYDQVNAPKLDAVVSEVMRLTPAVGGFFRRTKCALVIDGVEVPKNRVVQVALAASNRHGAGDLEAFRPQRHLEDGCSATLLPFGGGERVCLGKPLAELEIRLMVVGLFHQLRLHLIPDQDLTLQMLPSPTPRDGLLTKVL

SEQ ID NO: 33123 - protein, 205 aa, Banksia nutans
SSFDFMDGYDKPVEGRKINWMKAGILESDRVVTVSPYYAQELLSGIEKGVELDNIIRKTGITGIVNGMDVQEWNPSTDKYIDVKYDATTVFNAKPLLKEALQAAAGLPVDGNIPVIGFIGRLEEQKGSDILAEAISQFIGENVQIVILGTGKKPLEKQIEQLEIKYPGKAIGIAKFNVSLAHMIIAGADFMLIPSRFEPCGLIQL

SEQ ID NO: 33124 - protein, 390 aa, Magnaporthe grisea 70-15
MAAYFSSSNHLHDPVHDPTHDSVHLLSQAHTLHGDSPVFLTPSPSMSFTAAHKYPSPHDHHQVDQVVHSILDHHVENQLPPYPTISTRRLAFERHRPLWLRECIAEATGVFFFVFAGLASIATFTLHHATDKNSVAGIGSIFQVGWGMGMGVALAIITCAPTSGGHFNPAITICLAIWQHFPWRKVPRYIISQIFGAFLAALTIMVLYWEQIQDFAATRRAAGLPLVGSHTPASIFCSYPHPDQNLGFVLTIEFVADAFIALVVWAALDPSNPFIHPAAIPFIIGIAYADMIWGFGGITLSTNLARDLGARIVAGILFGGEAFTYHGYAPIGMLVNIPATLFGTAIYEFAFRDSLMIVGKGHANAEGGDAALYAYFKKAKLIDEEQGIKA

SEQ ID NO: 33125 - protein, 326 aa, Quercus suber
MSGGAGKIVCVTGASGYIASWLVKLLLNRGYTVKASVRDPNDSKKTNHLQVLDGAKERLHLFKANLLEEGSFDSAVEGCDGVFHTASPFYHNVTDPEAELLEPAVKGTLNVLNSCAKFPSVKRVVVTSSMAAVHCNKKAKAPDVVVDETWFSDPDVCKETKQWYMLSKTLAEENVWKFAKEKGIDIVTINPAMVIGPLLQPTLNTSAAAILNLINGTHQTFPNVAFGWVNVKDVANAHIQAYEIPTASGRYCLVESVIHHSEVVRVLRKLYPSVQLPEKCADDKPFAPTYQVSKERTRSLGIEYIPFEVSLKETVESLKEKKFISF

SEQ ID NO: 33126 - protein, 404 aa, Buchnera aphidicola str. Sg (Schizaphis graminum)
MIGKIKLITRDSFNKLILPVYNPAFFIPVKGKGSRLWDQKGKEYIDFSGGIAVTSLGHCHPVLNKVLRQQSKKLWHISNIFTNEPALRLADKLISSSFASRVFFANSGAEANEAAFKLARYYSSKIYNLKKNKIISFYNSFHGRTFFTVSVGGQAKYSDFFGPKPPAIMHAKFNEINSVKSIIDDNTCAVVMELIQGEGGIVPADVAFVREIRDLCYKYNALLIFDEIQTGIGRTSKLYAYEHYEVQPDILTIAKSLGSGFPISATLTTNGIASVIKPGIHGTTYGGNPLACSIAESVVNIVNTKKFLLGVEKKSKKIISELNIINKRFGLFTEIRGKGLLIGIVLRPELSEEIHNILNALFLEGVIVLTAGKNVIRLAPSLIISKRDIVEGMKRFYCALEKCL

SEQ ID NO: 33127 - protein, 205 aa, Banksia tricuspis
SSFDFMDGYDKPVKGRKINWMKAGILESDRVVTVSPYYAQELLSGIEKGVELDNIIRKTGITGIVNGMDVQEWNPSTDKYIDVTYDATTVFNAKPLLKEALQAVAGLPVDGNIPVIGFIGRLEEQKGSDILAEAISQFIGENVQIVILGTGKKPMEKQIEQLEIKYPGKAIGIAKFNVSLAHMIIAGADFMLIPSRFEPCGLIQL

SEQ ID NO: 33128 - protein, 195 aa, Triticum aestivum
KYKFGKTLGAGTYGIVREAESPQGKCAVKIILKKNVKGNDQMVYDELQMLQRLQHPHIVKFFDWFESRDKYYIVTQLATGGELFDRICEKGRFTEKDASATIRQVLEAVDYLHQNDVVHRDLKPENLLYLTKADDSTLVLADFGIAKHLDSPDGVLKTMAGSFGYAAPEVMLKKGHSKPVDMWSLGVITYTLLCG

SEQ ID NO: 33129 - protein, 205 aa, Banksia pulchella
SSFDFMDGYDKPVKGRKINWMKAGILESDRVVTVSPYYAQELLSGIEKGVELDNIIRKTGITGIVNGMDVQEWNPSTDKYIDVNYDATTVFNAKPLSKEALQAAVGLPVDGNIPVIGFIGRLEEQKGSDILAEAISQFIGENVQIVILGTGKKPLEKQIEQLEIKYPGKAIGIAKFNVSLAHMIISGADFMLIPSRFEPCGLIQL

SEQ ID NO: 33130 - protein, 387 aa, Petroselinum crispum
MDGSTQPSDTVMSDAAPASQTAGIENIPASLSHGGRFIQYNIFGNIFEVTAKYKPPILPIGKGAYGIVCSALNLETNEHVAIKKIANAFDNKVDAKRTLREIKLLRHMDHENVVAIRDIIPPPQRGSFNDVYIAYELMDTDLHQIIRSNQGLSEEHCQYFLYQILRGLKYIHSANVLHRDLKPSNLLLNANCDLKICDFGLARVTSETDFMTEYVVTRWYRAPELLLNSSDYTAAIDVWSVGCIFMELMDRKPLFPGRDHVHQLRLLMELIGTPSEAELEFLNENAKRYIRQLPLYRRQSLTEKFPNVHPSAIDLVEKMLTFDPRRRLTVEDALAHPYLTSLHDISDEPVCAAPFSFDFEQHALTEEQMRELIYREALAFNPEHQQM

SEQ ID NO: 33131 - protein, 319 aa, Thiobacillus denitrificans ATCC 25259
MECLAAGHDVVVFDNLSNSSEKSLERVARIAGKPVSFVRGDIRDRHALRKLFAEHAVDAVVHFAGLKAVGESVEHPLRYYDNNIGGSIALFETMAEVGLKTIVFSSSATVYGDPVRVPITEDFPLSATNPYGRSKLFIEEMLRDIARSDGGWHIALLRYFNPVGAHASGLIGEDPRGIPNNLMPYIAQVAVGRRPHLNVFGGDYPTPDGTGVRDYIHVVDLARGHVAALGRLQKTAGVQTWNLGTGRGVSVLDMVRAFEAASGRAIPYRIVERRAGDVAQCWADPSCAARDLGWRAEYDLPRMCEDAWRWQQGNPEGYA

SEQ ID NO: 33132 - protein, 205 aa, Dryandra foliosissima
SSFDFMDGYDKPVEGRKINWMKAGILESDRVVTVSPYYAQELLSGIEKGVELDNIIRKTGITGIVNGMDVQEWNPSKDKYIDVKYDATTVFNAKPLLKEALQAAVGLPVDGNIPVIGFIGRLEEQKGSDILAEAISQFIGENVQIVILGTGKKPMEKQIEQLEIKYPDKAIGIAKFNVSLAHMIIAGADFMLIPSRFEPCGLIQL

SEQ ID NO: 33133 - protein, 101 aa, Brassica napus
MMAAQRSVPAPFLSKTYQLVDDQSTDDVVSWNEDGSAFVVWKTAEFAKDLLPQYFKHNNFSSFIRQLNTYGFRKTVPDKWEFANDNFRRGQEELLSEIRRR

SEQ ID NO: 33134 - protein, 558 aa, Onion yellows phytoplasma OY-M
MCSIFGILNIKTDPQILRDQALKLSSLMRHRGPDWSRIFASQKAILAHERLSIIDVNAGAQPLYNKTKTLILAINGEIYNHLDLRKQYKDKYEFQKESDCEVILALYQEKGVNFLDELQGMFAFILYDLTKNTYLIGRDHMGIIPLYMGYYLNQNFYIASEMKALIPICQTLSIFPPGNYLYSESGKMVKYYKRNWMDYQNVYNNQTNTNQLRNFLEASVKKILMSDVPYGVLLSGGLDSSIISGITKKFAKHRIEESSKKEVCFPSLHSFAVGLKGAPDLKAAKEVDNHLGTAHHEINFTIQEGIDALKDVIYHIETYDITTIRASIPMYLMARKIKAMGIKMILSGEGADEIFGGYLYFHKAPNAQEFHKETVRKLASLHLYDCSRANKAMSAWGVEARVPFLDKNFLDVAMRLNPKDKMCGTNGKIEKHILRQTFESYLPKKIVWRQKEQFSDGVGYSWIDALKQLAQTKITDTQLKNAYVRFPYNTPTNKEGYMYREIFEILFPLPSAISLFPGGPSIACCTAKAIEWDKAFKQINDPSGRAALGVHNEAYKDK

SEQ ID NO: 33135 - protein, 374 aa, Petroselinum crispum
MESSSAATADHTHIKGVPTHGGRYVQYNVYGNLFEVSRKYVPPIRPVGRGAYGIVCAAMNSDTREEVAIKKIGNAFDNRIDAKRTLREIKLLRHMNHENVIAIKDIIRPPQIESFNDVYIVYELMDTDLHQIIRSNQQLTDDHCRYFLYQLLRGLKYVHSANVLHRDLKPSNLLLNANCDLKIGDFGLARTTSETDFMTEYVVTRWYRAPELLLNCSEYTAAIDIWSVGCILGEVMTRQPLFPGKDYVHQLRLITELIGSPDDASLGFLRSDNARRYVRQLPQYPKQQFSARFLNKSPGALDLLEKMLIFDPNRRITVDEALCHPYLAALHDINEEPVCPRPFSFDFEQPTCTEENIKELIWKESVKFNPDPIL

SEQ ID NO: 33136 - protein, 205 aa, Dryandra serratuloides
SSFDFMDGYDKPVEGRKINWMKAGILESDRVVTVSPYYAQELLSGIEKGVELDNIIRKTGITGIVNGMDVQEWNPSTDKYIDVKYDATTVFNAKPLLKEALQAAVGLPVDGNIPVIGFIGRLEEQKGSDILAEAISQFIGENVQIVILGTGKKPLEEQIEQLEIKYPDKAIGIAKFNVSLAHMIIAGADFMLIPSRFEPCGLIQL

SEQ ID NO: 33137 - protein, 566 aa, Listeria monocytogenes str. 4b H7858
MTNLRKRLSRLYAEDVVDSLAARIEARVQQTQQRKLTRKDQWDEKDIVLITYGDQFKEESKKTLKTFKKMYDSYLKSTFEVVHFLPFYPYSSDDGFSVIDYKAVNPELGDWEDIKEMEQSARLMFDFVCNHMSAKSDWFKRYLAGDEEFRNFFVEMDPKMDLSSVTRPRATPVLTPFQFDSGKVGHIWTTFSEDQIDLNFASPEVLYKMIDVLMFYLEEGAEYVRLDAVGFMWKVPGTSSIHLEETHEIVKLFRDLVDIAAPGTIIITETNVPHVDNISYFGNGEKEAHMVYQFPLPPLVLHAIHHGNAEFLRNWAKNLELPEGKRTFFNFLASHDGIGLNPVRGIIPEAEILALVNDLEEEGALVSYKQNPDGSKSPYEINVTYMDALSKQADTDDLRMSRFLVAHAVLMSIPGVPAVYVQSILGSRNDYSGVETTGHNRSINRKKYDLAEITAELEQRGSLRKATYDALTKLISTRKAESLFHPEIPMEVLESTAELFVVKRSSDVESIILIHNLSEKEVSYSLDSGVYTNLYTGSTVTGSDSIKLSGYEFCWLKTKNYREEQK

SEQ ID NO: 33138 - protein, 446 aa, Neurospora crassa
MPRSSGPVDSPARLSLISRHLAPDYPLNTPYTVERHPDNIDTSLLPKTQTRALTTDTTPANMSTQPEHATLLIPGPIEFDDAVLNSMSHYSESHVGPGFVAVFGETLSMLRKLFQTTDPSAQPFVLSGSGTLGWDLVAANLIEPGEDALVLSTGYFGDGFADCLKVYGANVTQISAEPGSRPQLPEIEKALSEKKYKLLTVTHVDTSTGVLSELKNLSELVHRVSPDTLVIVDGVCSVACEEIDFDAWKLDGVVTASQKAIGCPAGLSISMFSGRAIQAFQNRQTPPTSYFASMKNWLPIMQNYEAKKPSYFATPSPQLVRALHTALGQIVAQGVKERFAAHKAASDKIKAAVAALGLKQVAANPDDQAHGMTAIYLPENVKGAELLPKLASRGVVFAGGIHKAIAAKYIRFGHMGVSVLDPSRGHVEKAIKALEEGLSECGYQKA

SEQ ID NO: 33139 - protein, 372 aa, Hordeum vulgare
MTVDRKGAQAAAAAAATSAPFEIPALQPGRKKRPRRSRDGPNSVSETIKRWKEVNQQLEHDPQGAKRARKPPAKGSKKGCMQGKGGPENTQCGFRGVRQRTWGKWVAEIREPNRVSRLWLGTFPTAEVAAQAYDEAARAMYGPLARTNFPVQDAQAAPAVAVPVATEGVVRGSSASCESTTTSNHSDVASSSHNKQRQIQAPEISSRSDLLESTQSVEYSQQQSVPDAVSSIAMSTSEEDVYEPLEPISNLPDGEADCFDIEELLKLMEADPVEVDPVTVGSWNEFQDAGANARGSWNEFQCARANTGVSWNANAGMEMGQQEPLYLDGLDQGMLEGMLHSDYPFPVWISEDRPMHNPAFHDAEMSEFFEGL

SEQ ID NO: 33140 - protein, 363 aa, Onion yellows phytoplasma OY-M
MLTNVYDPLKGKQFQILDENGNLVQPELEPKLSKDVLLKMYKTMVLGRQADLAALKYQRQGRMGNYLLNSGQEASQVGVAAALEPQDWVSPYYRDAGIFLYRGVSLEQFYLYWYGNEKGSQLDPKLRILPANIIIGSSVNLGAGLALASKMQNKKEVTIATIGDGGTAHEEFNAGLNYAAVFGVPLVVFIQNNQYSISNPRNKVSKAKTLAQKCYACGIPGMQVDGNDILAVYVAAQEAFNEARKGNGPTLIENVSYRLEAHSTNDNASVYRSKEEELEWRKKDPIVRFQKYLMNKGYLTQKQVEQFEKEAQEEVVLAHQKVEQTGNNIDIKDIFAYTYEKMTPQLEEQYEECKAFFNTKEGK

SEQ ID NO: 33141 - protein, 237 aa, Pseudomonas syringae pv. syringae B728a
MATCDLKLPAGLVAHDFDTAQQLADALAEKVAERLKQAISENGLATLVVSGGRSPVAFFQSLATQPLEWSKVVISLADERFVPTEHADSNAGLLQRHLLQGPVAKARFLGLYSVASSVEEAAQAADQALAELPPIDVLILGMGDDGHTASLFPNSPNLSEALDLQGERRCLPMLAPSVPHQRLTLTRRLLASARSPILSVSGQAKLDTLRAALAGDDLAEMPVRAFLNPSLEIYWCP

SEQ ID NO: 33142 - protein, 2476 aa, Neurospora crassa
MESVAIPPQDDQQQLDPPARIFERLRQIAGFAWDETKPPYHSTYDNWHVFGTRFVSPFSTTGTPAPASPAPYPNTSPSSLAKLAPGHRAAPQDRPNVSASHSDAGSDRSTISLPTVAHHATDAPVVEELVVARISYHVLREERAYHITKSLVSTVDPNAEHISRPIDLIRLNPLPGDRGTIVVAIYAYSGENYLFKVLDMGPAFFYAKKHNDRWEAHREEHPVLEEPISLQHFLDFAIGAAQCLEMLHHSQSIVHGEIRPDAFHYNLELNRIKITSLGSGLRSFEHGLTSTGWSTLSKEVGARHKLQYISPEQTGRMPAEPDTRTDIYSLGVLFWSLLTQQPVFQGDTPLDIVQGVLGRRIPNVSQIRMDVPDAIGRIIQKCISKNVSDRYFSASGLRHDLVKVQELLGSGDSQSLRDFQVGSRDVSSSFRLPTIMIGRDRERSELVKVIERVSKSHGMNHKGGVNWGSDGSVLSNDVVDNAEVSSEGASSADGLNRQSGSWALALTPDPRNRVSLPPSALGTSSVTTSGETTSSGTSTGTSTISGGNRQSRQWDKPAFETSSLNENVSSDASRGSGLLSEPTSTISRQLGSKFRKQRQGNCEVVIIEGTGGLGKSYLVQSILADARRRGYCATAKFETARRTAFGPLLQLLSSLFRQVWGERNTETPFHQALKHHVRPVWPTLHKVLGLPEFLLGPPDNTPQRSNSTSSQSGQPALKRRGSSPELGGNNMYRHSSKVSSATQTSQEFLRAGASTQTSRLTNTFLDVLRMFTHYKFICFCLDDLHFADDESQELISQIIGARMKMVIIITYRPEEIGPEKVLQILSPPKSEELPRGAGAPIMTKIKLTPLSEDDIIHFVSSTLCLPKEDVTPLALVIQSKTAGNPFYMREMLNAGYRKKCIWYDYMAGEWKYDLDKLFDQFQGEQNYDVLDTAFITRRLSELPPASRSILAWAALLGQTFSFDLICRLMTGEFHFEEDKDKRQQEEDCSYIIPADESVAGLEAAIQACIIVPSDRDDHFRFVHDRYIQAAAALQECNARKMHFAIAQTLLKYHANDRTYRDNAASHICECVDIICQQVSRRRSYRALLSRCAQEASVSGARPTAAKFYGNAVALLQPDPWNDDAGDSSYEETLQLYIQAAECYLYMGLHAAANDLLQTILAKARTAVDKAPAWVLQSRIFAQRGNSEQALDSLRLCLKALGVGFDDNPSFEKCDAQFERLSVRIQTMDRSELVNPPKTEDLTLASLGAVLTETVSAGWWSNCLYFYQLALSMMELHLEKGSFPQSGMAFLFLGTIALSRFNMVQFTVDLAGIFLELLEKYRDPYSMARGYMIYANFVGHVQFPLGAIANQLEASVEFAAAMGDRISAILSFGLAAQLKFFASENISDLEAFCQYGCEEVPNWHLDTRGGVILIAIRQVCRALQGKTQVTDPYEVMSDEQHKASTYKSWLTAKASGDRTLMFYESIEIIPLFLYGHYERAIEIGEVCCKNSKMIWSARNTKLAQWFYALSLAAVILREQQDPRRMAEDEEKFQSRVEETIEKIDELNKGLKDWQAVNNVNYLAWSKLLDAQIAEIRGQYGDAIQQYEEALDHAAEYNFLFEEALGNYLMASVFIRHKGRRSARSTLRDSIALYRQLGATGIADLIETGHSILLHGPMRNPRTADAGVQTDFTGDAASVQYRTVEEEGLEDGEETAQAAVAALKGERMTAWRGSMQPEAGVGLPALDMIDLHAILVSSQVISSVLRVDELLKTMCDVILQTCSGSATLAALVVYEDEKQKDNSPLCVAASGDPDKGAEAHIPGIPLSGTDLVAENVILYCSRFREVVFLRDLVSDERFGNVSESWLRRNPNSKAVIAIPILHGSENPLLGVLYLEGVPGSFTDRNVTVLQLLVNQIGISYSNALAMKAVEKVSAENVSMVALQKRALAKAVEAETKARNAEAEAIRNVKLAEEAAKAKSIFLANVSHELRTPLNGVIGNSELLRDSNLNKEQLEMADSIRVSADLLLTVINDILDFSRMEADKMKLYIIAFNPEEMVREVVRAASYSNKEKTSKKNVKIVHDINLPPMLIYGDPIRLHQVLGNLIGNSLKFTEHGSITIGAKVDSETTEKATLTFWVKDTGIGISPQQLDKLFLPFSQADESTARKYGGSGLGLSICKSLIESTMKGKIRLDSEENVGTTVWFTVTFDKAKPEVMAGDTQSTSPVQMEPPRDRQPRPLPGAVENGDISSDQVPRPYIDLTHIPRNQLRICIAEDNSINAKIAMQYMHKLGYPNVDTYDNGLKAVEGLREKARQGNPYHIILMDVQMPVLDGYEATKMLRNDPIDSVRNVLVIAMTASAIQGDREKCLAAGMNDYLAKPVRGELLKRKLDTYLGASASMSFSTQRFLERRFAQRPGSPQPINPGSSSTKKDVDTPLSSPVPPPLADNTAASASTVKIGVGSAAASLREVAASNRRKQQQQQQQQQEVGQAFVLSIFVLQ

SEQ ID NO: 33143 - protein, 457 aa, Onion yellows phytoplasma OY-M
MKNYDVLVIGGGPGGYVAAIKAAQMGAKVALVEKHKLGGICLNYGCIPTKAYLKSAKMYKDIKRCADFGIKVQNGVSFDWSSILSRKNKIVAQLTTGISFLLKKNKIDFYHGFASVLSPCEVQVDTNLLHTQKLIIATGSTAFVTPIPGAQEAYQKGILKTSKELLQLESYPSKVTIVGGGVIGVEFATIFNSFGSEVTILERQDNILNGMDRDVVVAYTKKLQADGIQILTQVEVTKINDNQTTYTQKGNAKTITSDVILMAVGTKANLAGLEKLNLALNRNSVQTDNFCQTSIPGVYAIGDVNGKHMLAHVASHEGIVAVTHALEQKAQPINYDRVPACIYGFPEIASIGMTEQQAKEKQMDYKVSKISLGAVGKSLADGEKEGFAKLIVCKKHLEILGMHIYAYNATELISEMAVGMELEGTAYELSQAIHPHPTLSELTFEALLGAVDKPIHA

SEQ ID NO: 33144 - protein, 350 aa, Candida glabrata CBS138
MAKPIILRLGSLTFAQPQWKEVEEIADVITVDDSMTREQFLKELKNPESKLSKVSVITRTVGSASQTGLFDEEIAKALPDSVIAICHTGAGYDQIQVQYFKERHIQVANVPEIVSNATADTHVFLLLGALRNFAYGHHNILAGKWQEVTSAAETPFGYDPDGKTVAILGLGRIGRAIVDRLKPFGFGKFIYHNRHRLPEDEENGCEYVASIDDFYQQADVISINIPLNTHTKHLVNKEAFDKMKEGVVIVNTARGPVVDEKALIAALKSGKVRGAGLDVFEDEPHIPKELLELPQVLTTPHMGTHSVQTRWRMEKLVLDNAISALKTGKVITPVPEIQNDNWIEEIQPVI

SEQ ID NO: 33145 - protein, 57 aa, Glycine max
MAGDGAATCIDILLAIILPPLGVFLKYGCQVEFWICLVLTLFGYIPGIIYAVYAITK

SEQ ID NO: 33146 - protein, 238 aa, Nicotiana tabacum
VKPMEEIIPKNTNTITTICSSKPSTHIERKIRPHQKDQALNCPRCNSTNTKFCYYNNYSLSQPRYFCKTCKRYWTEGGSLRSIPIGGGSRKSKKSSSTNCSSSNTVLREFSKNVVAPVLDPPKMEGSQDLNLGFSCDFKTISELIQVPNNSFMPMPISDPNSVYSSLNFSLDYGLGISGDYENNLQDVQDSTTSGRLLFPFEDLKQISNTSIDCAEENRDGESNGYWNAVLGGNGGSW

SEQ ID NO: 33147 - protein, 374 aa, Colwellia psychrerythraea 34H
MSDKKISGAGLRGQSAGDTALCTVGQSGSGLTYCGYDISDLADNATFEEVAYLLFNGELPTSGELAEYKAELLAMRDIPQALKEVLKLIPKETHPMDVMRTGCSFLGNVEPEVDFSEQNKAANRLLAAFPAIMCYWYKFSHDGVEIDCTTEEASLGGHFLRLLNGESPSAQHERVMDVSLILYAEHEFNASTFTARVCASTLSDMFSCITGAIGTLRGPLHGGANEAAMDMIQKFTSPADAKVQMAGMLERKEKIMGFGHAIYRTSDPRNVIIKAWSEKLAAENGDTSLYDISVACEEFMWDTKKLFCNADFFHASTYNYMGIPTKLFTPIFVCSRLTGWAAHVMEQRSNNRIIRPSADYTGAEPRTVKPISER

SEQ ID NO: 33148 - protein, 368 aa, Brassica napus
MSRVIFFLLVAAALLVAITGEVVEDSFDNPIIRQVVPEENDEQLLNAEHHFSLFKSKYDKTYATQAEHDHRFRVFKANLRRARRHQLLDPSAVHGVTQFSDLTPKEFRRKYLGLKRKLRLPSDAQKAPILPTSDLPTDFDWRDQGAVTRVKNQGSCGSCWSFSATGALEGAHFLATKELVSLSEQQLVDCDHECDPEEANSCDSGCGGGLMNNAFEYTLKAGGLMKESDYPYTGHDNSGCKFDKSMIAARVSNFSVVSADEDQIAANLVHHGPLAIAINAMWMQTYIGGVSCPYICSKSQDHGVLLVGFGSSGYAPIRLKEKPYWIIKNSWGSTWGEDGYYKICRGRHNICGMDTMVSTVAAVHTSTR

SEQ ID NO: 33149 - protein, 114 aa, Nicotiana tabacum
MDTAQWPQEIVVKGMEEIIPKSINTITTICSSKPSTHVERKIRPHQKDQALNCPRCNSTNTKFCYYNNYSLSQPRYFCKTCKRYWTEGGSLRSIPVGGGSRKSKKSSSTNSSSS

SEQ ID NO: 33150 - protein, 522 aa, Colwellia psychrerythraea 34H
MSSQRLYQIVKTFLNFGLDEMVPADMLPWYANVGRHSLFWLRNKHKDKTPEQRFRLAIESLGPVFIKFGQMLSTRRDLLPPELADELALLQDKVTPFDGEQARQLIIDAMGIDVFEQHFKDFDLVPLASASIAQVHTATLLTAEKNENIVIKVLRPNISKTILADIKVMSLFAGVVARWLPDGKRLRPKEVVEEYRKTILDELDLNREAANAIQLKRNFEQGSEYDKALYVPEIYSEYSFENVLVMERIYGIGVGEIETLNQLGVNMKLLAERGVEVFFTQVFRDSFFHADMHPGNVFVDATHPEDPTWIAIDCGIVGTLNREDKRYLAENFVAFFNRDYRKVAQLHVDSGWVPANTSVDEFEFAIRTVCEPIFNKPLSEISFGQVLVNLFNTARRFNMEVQPQLVLLQKTLLYIEGLGRQLYPQLDLWQTAKPFLENWVKEQMGVKAVLSKIKANLPFWNEKLPEMPDLIYDYLKTSRENQHQQTQIMQTLLASQSKNNQRIIYSIVAAAIIIAGAILLSH

SEQ ID NO: 33151 - protein, 411 aa, Glycine max
MALRLNPIPTQTFSLPQMASLRSPRFRMASTLRSGSKEVENIKKPFTPPREVHVQVTHSMPPQKIEIFKSLEDWAEQNILTHLKPVEKCWQPQDFLPDPSSDGFEEQVKELRERAKELPDDYFVVLVGDMITEEALPTYQTMLNTLDGVRDETGASLTSWAIWTRAWTAEENRHGDLLNKYLYLSGRVDMKQIEKTIQYLIGSGMDPRTENSPYLGFIYTSFQERATFISHGNTARLAKEHGDIKLAQICGMIASDGKRHETAYTKIVEKLFEVDPDGTVMAFADMMRKKIAMPAHLMYDGRDDDLFDSYSSVAQRIGVYTAKDYADILEFLVGRWKVEQLTGLSGEGRKAQEYICGLPPRIRRLEERAQARVKESSTLKFSWIHDRESTTLNAPREEHGEIFRQYRSEKC

SEQ ID NO: 33152 - protein, 325 aa, Cryptococcus neoformans var. neoformans B-3501A
MSLGRTLKLNNGVVAPQIGFGTWQAAPGEVEKAVEEAIKVGYRHIDCALIYRVFDATGVYGIVAQGIKASGVPRKDLFLVSKLWNNSHRPEKVEADLDTSLKQLGTDYLDVYLIHWPVPFAPGDNLFPKTEDGKVAIDWDGPSVVDTWKELIRISKETKKVKAIGVSNFNVELLEKLIKETGVVPTMNQIECHPSLIQPELFKYCKEKNIVITAYSPLGNNTTGKPRIIDQPQIIDIAKKLNKEPAQVLINWAAHQGFAVIPKSVTPSRIKSNFEDFKLNDDVFEEINKVGKANAARANIPAEYNPSWPINVFGEKSEEQYKKVW

SEQ ID NO: 33153 - protein, 157 aa, Brassica napus
MLNPGQGRGPDSGVAGGSSNSDPFPAGLRVLVVDDDPTCLMILERMLRTCLYRVTKCNRAEIALSLLRKNKNGFDIVISDVHMPDMDGFKLLEHVGLEMDLPVIMMSADDSKSVVLKGVTHGAVDYLIKPVRIEALKNIWQHVVRKKANEWNVSEHS

SEQ ID NO: 33154 - protein, 1331 aa, Arabidopsis thaliana
  misc_feature (742)..(742): Xaa can be any naturally occurring amino acid
  unsure (1)..(1331): unsure at all Xaa locations
MAFTFLSPHPVFLSLTGTTSSFSYKPVLLPFSRNSRTLTVAAGPARRNSYPNPADDDPPEAPEDSMHGVSKFQQIQRQAARARKLEEEDFEKNRNTYLSAIADVEDAAETGRDDEESGGDLFSDIDRAISMKRSEFVKQGLLKPNPPKTASLKKIGEEGNEEEGDVTDDVDELDEEEVVDLDEIDKLTGLTEISDEEDWVDEEGNTRINKKKEFGSDHQFEFDLDDFGESKARIVEPKFKMCLAELLDESKVVPISVYGDLDVEITGIQHDSRGVSAGDLFVCCLGSENFLSEADKRGAVAVVASKEIDIEDTLGCRALVIVEDTNAVLAALASSFYRHPSKNMSVIGVTGTDGKTTTTYLIKSLYEAMGVRTGMFSTVSCYIHGDNKLDTPNATMNPDAVLVQSLMAKMLHNGTESLVMEASPQELALGKCDEVDFDIAVFTNLTRENTDFRGTDEEYRDAEAKLFSRMVDPERHRKVVNIDDPNAAFFVQQGNPNVPVVTFAMENTKADVHPLKFELSLFETQVLVNTPQGILEISSGLLGRHNIYNILAAVAVGIAVGAPLEDIVRGVEEVDAVPGRCELIDEEQAFGVIVDHANTPDGLSRLLDSIRELKPRRIITVIGCEGENERGKRPLMTKIATEKSDVTMLTSDNPRNEDPLDILDDMLSGIGWTMQEYLKHGEHDYYPPLANGHRLFLHDIRRVAVRCAVAMGEEGDMVVVAGKGHEAYQLEGEKKEFYDDRXEECREALQYVDELHQAGIDTSEFPWRRKILKVEEDAYKFSKKRESLEHSMDSLRFLRILLLSSSILLLSLRSTVTAGDIVHQDNLAPKKPGCENDFVLVKVQTWIDGVENEEFVGVGARFGKRIVSKEKNANQTHLVFANPRDSCTPLKNKLSGDVVIVERGNCRFTAKANNAEAAGASALLIINNQKELYKMVCEPDETDLDIQIPAVMLPQDAGASLQKMLANSSKVSAQLYSPRRPAVDVAEVFLWLMAIGTILCASYWSAWSAREAAIEHDKLLKDAIDEIPNTNDGGSGVVEINSISAIFFVVLASGFLVILYKLMSYWFVELLVVVFCIGGVEGLQTCLVALLSRWFQRAADTYVKVPFLGPISYLTLAVSPFCIVFAVLWAVYRVHSFAWIGQDVLGIALIITVLQIVHVPNLKVGTVLLSCAFLYDIFWVFVSKKLFHESVMIVVARGDKSGEDGIPMLLKIPRMFDPWGGYSIIGFGDILLPGLLIAFALRYDWLANKTLRTGYFIWAMVAYGLGLLITYVALNLMDGHGQPALLYIVPFTLGTMLTLARKRDDLWILWTKGEPERACPHHVRLEQCSEK

SEQ ID NO: 33155 - protein, 119 aa, Nicotiana tabacum
SSNWLQDTVHEETELDSSSSPSGDIFTCSRPLIERKLRPQHDQPLKCPRCDSTHTKFCYYNNYSLTQPRYFCKSCRRYWTKGGTLRNIPVGGGCRKNKKVSSKKLSNENATITKILDHP

SEQ ID NO: 33156 - protein, 411 aa, Glycine max
MALRLNPIPTQTFSLPQMASLRSPRFRMASTLRSGSKEVENIKKPFTPPREVHVQVTHSMPPQKIEIFKSLEDWAEQNILTHLKPVEKCWQPQDFLPDPSSDGFEEQVKELRERAKELPDDYFVVLVGDMITEEALPTYQTMLNTLDGVRDETGASLTSWAIWTRAWTAEENRHGDLLNKYLYLSGRVDMKQIEKTIQYLIGSGMDPRAENSPYLGFIYTSFQERATFISHGNTARLAKEHGDIKLAQICGMIASDEKRHETAYTKIVEKLFEVDPDGTVMAFADMMRKKIAMPAHLMYDGRDDNLFDNYSAVAQRIGVYTAKDYADILEFLVGRWKVEQLTGLSGEGRKAQEYVCGLPPRIRRLEERAQARGKESSTLKFSWIHDRESTTLNAPREEHGEIFRQYRSEKC

SEQ ID NO: 33157 - protein, 206 aa, Prototheca wickerhamii
AMAAAMGCVAFPVGPISTHRVRHHSRIQRISQNAMSRRSMRPRELKTLASAAPATAYVSPFSKVEHEEQLFAILKAGTASGKVPKRLVDGITELYGNYKKAVVGSNKPGATADFVAKVMASVCERVMIQITSPFVFQSKHERMLEPYNYYEFGQRYIRGLVDFDTSRLGHADRFATIQEQLARGENVVLLANHQTEADPAIFALLL

SEQ ID NO: 33158 - protein, 364 aa, Callistephus chinensis
MKEDSPPTVCVTGAAGFIGSWLVMRLLERGYIVRATVRNPGDMKKVKHLLELPKAETNLTLWKADLTQEGSFDEAIEGCHGVFHVATPMDFESKDPENEIIKPTIEGILSIIRSCAKAKTVKKLVYTSSAGTVNVQETQLPVYDESHWSDLDFIYSKKMTAWMYFVSKTLAEKAAMEAAKENNIDFVSIIPPLVVGPFINPTFPPSLITALSLINGAESHYSIIKQGQYVHLDDLCECHIFLYENPEAKGRYICSKQDATIHQLARMIKQKWPEYHVPTQFAGIDEELPTVSFSSKKLIDMGFKFKYDLEDMFKGAIDSCKEKGFLPYSTNEVKKGLFESSINGNVHGQKGNQKIGDEGVKLVN

SEQ ID NO: 33159 - protein, 141 aa, Brassica napus
  misc_feature (54)..(54): Xaa can be any naturally occurring amino acid
  misc_feature (65)..(66): Xaa can be any naturally occurring amino acid
  unsure (1)..(141): unsure at all Xaa locations
MGNHGCDREPRERERGRGDAHVETGAQVVRVVGQKEVAVRTAETVEVSAHDLDXKLSRFVKEANXXKKRAAGCGTLWKRKSTGKIRLVMRQSKTLKICANHFVTQGMNVQEHVGNEKSCVWHARDFAVGAPLPQLFFFLPP

SEQ ID NO: 33160 - protein, 647 aa, Pirellula sp. 1
MSHQSDLIATDIDAYLKQHEQKQLLRFITCGSVDDGKSTLIGRLLYDSKLVYEDELAKVQSDSVRQGSVAGGFDPSLFMDGLKEEREQGITIDVAYRYFSTAKRKFIIADTPGHEQYTRNMATGASSADLAIILIDARHGVLTQTRRHSFIVSLLGIRHVVVAVNKMDIDGVDYSEDRFNEICDDYRSFATRLDLPDLHFIPISALNGDNLVDRSENMPWYTGSTLMNFLETVYIGSDRNLQDFRLPVQLVNRPNLNFRGFCGTIASGIIRKGEEITVLPSRQKSKVKEIVTYDGNLDEAYAPLAVTLTLEDEIDASRGDMIVRSGNLPRSESDVEAMLVWMNEEAMVPGKTYLVKHSTQTVPGNVETLAYKVDVNDLHRMPAPTLELNEIGRVRLSLSAPIHHDPYRRNRTTGAIILVDRITNATVAAGMILDRGTTGSHKSVWDDEVSTDDSSDALSTVTTEERAARFGQKPATVLLTGLTGSGKTSIARAVERKLFDAGRSVAVVDGEFVRRGLSRDLGFSADDRSENLRRSGHLAHTLNDAGLICLASLVAPSDDVRQKVGKLIGEDQFLVVHVATPLDVCRERDTKGQYAKADAGELSNFPGVTAKYDVPTNPDLAVDASTTSIAECADAVVELLKLKGFIK

SEQ ID NO: 33161 - protein, 205 aa, Dryandra calophylla
SSFDFMDGYDKPVEGRKINWMKAGILESDRVVTVSPYYAQELLSGIEKGVELDNIIRKTGITGIVNGMDVQEWNPSKDKYIDVKYDATTVFNAKPLLKEALQAAVGLPVDGNIPVIGFIGRLEEQKGSDILAEAISQFIGENVQIVILGTGKKPLEKQIEQLEIKYPGKAIGIAKFNVSLAHMIIAGADFMLIPSRFEPCGLIQL

SEQ ID NO: 33162 - protein, 261 aa, Neisseria gonorrhoeae FA 1090
MSRIRQAFAALDGGKALIPYIAVGDPDIRTTLALMHGMVASGADILELGVPFSDPMADGPVIQRAAERALANGISLRDVLDVVRKFRETDTQTPVVLMGYLNPIHKMGYREFAQEAAKAGVDGVLTVDSPIETIDSLYRELKDNEVDCIFLIAPTTTEDRIKTIAELAGGFVYYVSLKGVTGAASLDTDEVSRKIEYLRQYIDIPIGVGFGISNAESARKIGRVAAAIIVGSRIVKEIENNAGNEAAAVGALVKELKDAVR

SEQ ID NO: 33163 - protein, 205 aa, Dryandra sessilis
SSFDFMDGYDKPVEGRKINWMKAGILESDRVVTVSPYYAKELLSGIEKGVELDNIIRKTGITGIVNGMDVQEWNPSTDKYIDVKYDATTVFNAKPLLKEALQAAVGLPVDGKIPVIGFIGRLEEQKGSDILAEAISQFIGENVQIVILGTGKKPMEKQIEQLEIKYPDKAIGIAKFNVSLAHMIIAGADFMLIPSRFEPCGLIQL

SEQ ID NO: 33164 - protein, 205 aa, Dryandra speciosa
SSFDFMDGYDKPVEGRKINWMKAGILESDRVVTVSPYYAQELLSGIEKGVELDNIIRKTGITGIVNGMDVQEWNPSTDKYIDVKYDATTVFNAKPLLKEALQAEVGLPVDGNIPVIGFIGRLEEQKGSDILAEAISQFIGENVQIVILGTGKKPLEEQIEQLEIKYPDKAIGIAKFNVSLAHMIIAGADFMLIPSRFEPCGLIQL

SEQ ID NO: 33165 - protein, 445 aa, Glycine max
  misc_feature (82)..(82): Xaa can be any naturally occurring amino acid
  misc_feature (97)..(97): Xaa can be any naturally occurring amino acid
  unsure (1)..(445): unsure at all Xaa locations
IRIFNYDIFIIVNPFPDIVRELLNTWPEVCKLCDSSNTSPLYSAAVQDHLDVVDAILDVDVSCMFIVRKNGKTSLHNAARYXGVLRIVKTLIARDPXIVCITDKKGQTALHMAVKGQCTSVVEEILLADPSILNERDKKGNTALHMATRKCRSQIVSLLLSYSAMDVNAINKQQETAMDLADKLPYGDSALEIKEALAEYGAKHARYVGKEDEAMELKRTVSDIKHEVQSQLIQNETTRRRVSGIAKELKKLHREAVQNTINSVTVVAVLFASIAFLAIFNLPGQYITEEGQEIGKANIADHVSFQVFCLLNSTSLFISLAVVVVQITLVAWDTRAQKQIVSVVNKLMWAACACTCGAFLAIAFEVVGKKTWMAITITLLGVPILVGTLASMCYFVFRQHFGIFRSDSQRRIKRTSGSKSFSWSYSANISDLDEYNSDIEKIYAL

SEQ ID NO: 33166 - protein, 738 aa, Oryza sativa
MMMGREDKYVRFEDWRSEQSVMSPRRHNALSSLKERTAGVFAFLGNLVHSETLKRLVLHERKLTTRTLHPQGPFLQSWNKIFVLSCIFAVSVDPLFFYIPVINDNNTCWYLDKKLEITASVLRFFTDIFYILHIIFQFRTGYIASSLTTFGRGVLVEDRYAIAKRYLSTYFLIDVFAVLPLPQVVILVVLPNLGGSEVTKAKNILMFIVICQYVPRLIRIRPLYLQITRSAGVITETPWAGAVLNLLIYLLASHEVITVKIYKIKVVILVLGALWYLLSIERKDACWRDMCSNNSTVCNQAYLYCGDKENSILRTACLPIDSNDIDPNFGIYVPALNNVSQSTNFLAKLFYCVWWGLQNLSSLGQNLKTSTYAWENLFAVFVSISGLVLFALLIGNVQGYETKDMEPCARFRVFIPIPFGDKTSIILTYLQSAHLREEEMRVKSRDTDQWMSYRLLPENLKERIRRHEKYRWHQTSGVDEELLLMNLPKDLRRAIKRHLCLSLLMRVPMFENMDDQLLNALCDRLKPVLYTEGSCIIREEDPVNEMLFIMRGNLMSMTTNGGRTGFFNSDVLKGGDFCGEELLTWALDPTSVSSLPSSTRTVKTMSEVEAFALRAEDLKFVATQFRRLHSKQLQHTFKFYSQHWRTWAACFIQAAWHRYCRKKIEDSLREKEKRLQFAIVNDGATTLSFRAAIYASRFTGNMMRILRRNATRKAWLQESVPARLLQKPAEPNFAAEEH

SEQ ID NO: 33167 - protein, 76 aa, Zea mays
  misc_feature (36)..(36): Xaa can be any naturally occurring amino acid
  misc_feature (41)..(41): Xaa can be any naturally occurring amino acid
  unsure (1)..(76): unsure at all Xaa locations
ILAEKGVVVLPDIYANSGGVVVSYFEWVQNIQGFMXAEEKXNDELEKDMSSAFQHMKAMCKSLVLPKCVVTLELLF

SEQ ID NO: 33168 - protein, 569 aa, Pseudomonas sp. K-62
MQELNEVGLSVAGMTCPSCTRHVEDALLAVPGVTRAAVDYPSNKAQVTGNRLDVSALVAAVGALGYGATPTDEFESKERSVEQPGLLGKAAQWLSGERAVEKPAGQLHVAIIGTGGAAVAAALKAAENGARFTLIERGTIGGTCVNVGCVPSKIMIRAAHIAHLRRESPFDVGLSATPQLFLRDRLLAQQQARVDELRHAKYESILESNPSINLVRGSARFKDGQTLIVEAAEGDTREVAFDRCLIATGASAAIPPLPGLAGTPYWTSTEALVSERIPKRLAVIGASVVALELAQAFARLGSEVTVLARRTLFASDDPAIGEAVTAAFRAEGITVLTQTQASAVTYCDRQFILTTAQGELKVDQLLVATGRTPNTASLNLERAGVTFDSQHRILIDQGMRTSASNIYAAGDCTDQPQYVYVAAAAGTRAGINMTGGDVKLDLDAMPAVVFTDPQVATVGYSEAEAQRIGLQTESRTLTLDNVPRALANFDTRGFIKLVAEAGSGRILGVQAVTPEAGEIIQTAAIAIRARMTVQDLANQLFPYLTMVQGLKLVAQTFSKDVTQLSCCAG

SEQ ID NO: 33169 - protein, 540 aa, Onion yellows phytoplasma OY-M
MNNKDLKTKFIFITGGVVSSLGKGITAASIGQILKNRGLKVSIQKLDPYINIDPGTMSPYQHGEVFVTDDGAETDLDLGHYERFLDENMSKKSNVTAGQIYQSVINKEREGKYLGKTVQVIPHITEEIKQKLIDVALFHKSDVVIVEIGGTVGDIESSPFLEAIRQVRFDFGYHNVLYLHTTLVPYLKKAQEIKTKPTQHSVKELRALGIQPQILVLRSEVPINPETKNKIAALCDINPQAIFEALDVDILYQMILNLHHQGIDDFILQHFKLTNFSNADLQSWKQLITRIQNLEKKVVIALVGKYIVLHDAYLSIIEALKHASYQYNCKLEIKWIDAEKVTPDNISSLLEDYDGILVPYGFGNRAIEGKILAINYARTNNIPFFGICLGMQLAVIEYARNVLHLQGANSLEVDEKTPHPVITKKIVDSNLGGTLRLGSYPCHLKANTKSKAIYNQEIIYERHRHRFEMNPHYVALFEKNNDFVVSGINQEQKLCEIVELKSHPWFIAVQFHPEFLSRPLKPHPLFKGFVEASLLNQKNK

SEQ ID NO: 33170 - protein, 484 aa, Ralstonia eutropha JMP134
MFSLKDPGLLRQQAYVDGQWRAAESGKTLDVINPANNEPLGTIPACDAADTRAAIEAANRALPAWSALTTHQRAAVLRKWRELMVAHADDLALIMTLEQGKPLAEARGEILYGASFVEWFAEEGIRAYGETIPATHASRRIIARKVPVGVCAAITPWNFPNAMITRKLAPALAAGCAVVVKPSELTPYSALALAELGERAGIPAGVLNIVTGMPQGIGGELTANPIVRKLTFTGSTQVGKLLLRQCADTVKRVSMELGGNAPVIVFDDADLEQAVAGVMASKFRNSGQTCVCANRIYVQAGIYDRFSARLSEEVRKLKVGAGTEDGVSIGPLINDAALRKVVRHVEDAVAHGAKVIVGGASLSRGQQYFEPTVVTGATDGMLIASEETFGPVAALFPFESETEIIRRANDTPYGLAAYLFSTDVNRVFRVSEALEYGMVGANTGVISSAVAPFGGVKESGLGREGSHHGIDEFLEVQTLHLEIV

SEQ ID NO: 33171 - protein, 821 aa, Arabidopsis thaliana
MSTYYYHIDSMNWLPEAEAEDDFKGLLSGDFFDDLINHLDVPLDDIDTTNGEGDWVDRFQDLEPPPMDMFPTLPSDLTSCGSGMAKAPRVDIQRNIPALVSSFYSYNLSDVNLSLSAVFITIVSSIHVEGIPNPSIILCHLLYWCIDCVPDFAIHLICLVSLVQKQSYSSEALSSTLHQSSAPPEIKVSKLFQSLSPVSVLENSYGSLSTHNNGSQRLAFPVKGMRSKRKRPTTLRLSYLFPSEPRKPEKSTPGKPESECYFSSEQHAKKKRKIHLTTRTVSSTLEASNSDGIVRKCTHCETTKTPQWREGPSGPKTLCNACGVRFRSGRLVPEYRPASSPTFIPAVHSNSHRKIIEMRRKDDEQFDSSMIRAVISRGLKTDTLVKLNDNRERLENKSFFHRDERLTYKKFQLKPSFVSLRSYKITLYKMLTLNSNFMIHFPVIVIVELFHSSVFRSSAISLFIFIACSMPFSVTCASTPTNSTSLSKKDLSEPFGIKDSVLTSGIGNVEAHYMNWLPEAEAEEHLKGILSGDFFDGLTNHLDCPLEDIDSTNGEGDWVARFQDLEPPPLDMFPALPSDLTSCPKGAARVRIPNNMIPALKQSCSSEALSGINSTPHQSSAPPDIKVSYLFQSLTPVSVLENSYGSLSTQNSGSQRLAFPVKGMRSKRRRPTTVRLSYLFPFEPRKSTPGESVTEGYYSSEQHAKKKRKIHLITHTESSTLESSKSDGIVRICTHCETITTPQWRQGPSGPKTLCNACGVRFKSGRLVPEYRPASSPTFIPSVHSNSHRKIIEMRKKDDEFDTSMIRSDIQKVKQGRKKMV

SEQ ID NO: 33172 - protein, 368 aa, Pseudomonas aeruginosa UCBPP-PA14
MSNPTSTPRADGFRMPAEWEPHEQTWMVWPERPDNWRNGGKPAQAAFAAVAKAIARFEPVTVCASAGQYENARARLDDGNIRVVEISSDDAWVRDTGPTFVIDDKGDVRGVDWGFNAWGGFEGGLYFPWQRDDQVARKILEIERRARYRTDDFVLEGGSIHVDGEGTLITTEECLLNHNRNPHLSQVEIERTLRDYLAVDSIIWLPNGLYNDETDGHVDNFCCYVRPGEVLLAWTDDQDDPNYLRCQAALRVLEESRDAKGRKLVVHKMPIPGPLYATQEECDGVDIVEGSQPRDPSIRLAGSYVNFLIVNGGIVAPSFDDPKDAEARAILQRVFPEHEVVMVPGREILLGGGNIHCITQQQPAPRKA

SEQ ID NO: 33173 - protein, 436 aa, Ashbya gossypii ATCC 10895
MSGSLLDLKSRSPKSLQSKNRKKLSLKISNGSPGPKVMMLEPPAEVAGRGDAQIYTLPALAPAPGQRGRGAEDKGGALKLTVETALRPRGEERIRFRPPPMLARGGVPAYLQDCEELGACTPVPADAPLTRSWVFRRGGAAGGCRVENAGCDGADEDDEGTLHSALRYNDVLNGNAYPGEPLCVLVPGLFLYSEPTIEQVLQFDVVVNVAKEITDFTSQIPEGSGTQYYHFKWSHTSKICSNLEELTALIHTALCDGKRVLVHCQCGVSRSASLIVAYIMRYRSMPLNDAYNYLKNVAKDISPNMSLIFQLMEWGEQLKSKDGHSSCSPASCSLSSLASENLSEQPRSCRPRSAVGPKSAFSSPDISSDLSPENTPRTPMEFLNAPSLSQKYPQTAEQSEPSKHDPLQLGSELCMKCSVVLDTFSQPSAEVVDKNW

SEQ ID NO: 33174 - protein, 512 aa, Arabidopsis thaliana
MGALEAERAANNATALETQSSPEDLGQPSPLRKIISVASIAAGVQFGWALQLSLLTPYIQLLGIPHKWSSYMWLCGPISGMIVQPIVGYHSDRCESRFGRRRPFIAAGVALVAVSVFLIGFAADMGHSFGDKLENKVRTRAIIIFLTGFWFLDVANNTLQGPCRAFLADLAAGDAKKTRVANACFSFFMAVGNVLGYAAGSYTNLHKMFPFTMTKACDIYCANLKTCFFLSITLLLIVTFSSLWYVKDKQWSPPQGDKEEKTSSLFFFGEIFGAVRHMKRPMVMLLIVTVINWIAWFPFILYDTDWMGREVYGGNSDGDERSKKLYDQGVQAGALGLMFNSILLGFVSLGVESIGRKMGGAKRLWGCVNFILAIGLAMTVLVTKSAEHHREIAGPLAGPSSGIKAGVFSLFTVLGIPLAITYSIPFALASIFSTNSGAGQGLSLGVLNIAICIPQMIVSFSSGPLDAQFGGGNLPSFVVGAIAAAVSGVLALTVLPSPPPDAPAMSGAMGFH

SEQ ID NO: 33175 - protein, 429 aa, Ralstonia eutropha JMP134
MALESTHQDLAAARAQHVARGVVTAHPIFVDHAQGSRVWDVNGRSYLDFVGGIGVLNVGHNHPRVVAAVKQQLERVSHAAFQVAGYDVYIELAARLNRLVGGSEAYKTVFLTTGAEAVENAVKIARAYRNAPGIIAFRGGFHGRTLLGMTLTGMSTPYKQNFGPFAGDVYHTPYPDPYRGFSGDDALRALDDLFATQIAPDRVAAIILELVQGDGGFLAAGSDFLKKLRALTTKHGIVLIADEIQTGFGRTGELFAFQEAGIQPDLVTVAKSLAGGLPLSGVVGRAEIMDAPLPGGLGGTYAGNPLACAAALAVLDLFEDEKLTERARELGTTLRGGLLALADKYQEIGTIRGVGPMLALEFVKHGDPHQPDADFAQRVVDACRDEGLLVIKCGVHRNNVRLLAPVNTELDDAHEAIAILGRAIAKVRG

SEQ ID NO: 33176 - protein, 451 aa, Nocardioides sp. JS614
MVDQATLEVPAQLRSDRGLPLVGRLFDYTRDPIGFFRHQWETYGPVSPFDSALDHAVVLLGPDACEQVLRNKDKAFANEPAWGKIVGPFFKRGLMLLDFDEHHAHRRIMQEAFTRDRLETYATRMHPAIAEGTASWDTERRFRSYPALKQLTLGIAADIFMGGAGDTSRAEMDRVNRAFIACVQAAAGIVRADVPFTRWGRAYRGRKVLEEFLRHYLPAKRATRTEDIFSVLCHIETEDGQRFSDEDVVNHMIFLMMAAHDTSTITTSTILQLLGQHPLWQERCRAEALALGPEPTLAELEGLQALDWVMKEALRLHAPVPILVRRTVKDTVVQGHLIPADTDVMVGVQFSHVMEDYWTDPMVFDPERFSPERREDRSHRYAWEPFGGGVHKCIGLYFAGIEVKAILHRLLRNHRWSVDPGYAAPYDNHSLPFAKDGQPIDLVRTDPRGES

SEQ ID NO: 33177 - protein, 336 aa, Ralstonia eutropha JMP134
MIEQCEFTVLSGFLGSGKTTLLSTYLACSDVSRVAVIVNDVGEVNIDGAVLALQDGIPMATLSNGCVCCSLTNDLPYTIDALVRERRLSGLPPYTRIILECSGLSDPGGVMRSLSALASLGMRVRVVTIYACDRHVAPEDFSLLAQQVSAAHTIVLTRTDLVSTQQIVDVATEAKSLGPMGRIVVETAPEVRARAAFDAPAAPPTSDPGHAPGWQYESRHPRINVFSLQWDCDLPWDHVAAWLENLAFYFDSRLLRTKGLVRLDSGDVLLIQGVGQHFDTPRKLNQLAVEGSSLVVICRDASVSEIVELAPQIPGMTVSARTAGSKAIRLARPGYD

SEQ ID NO: 33178 - protein, 761 aa, Arabidopsis thaliana
  misc_feature (172)..(172): Xaa can be any naturally occurring amino acid
  unsure (1)..(761): unsure at all Xaa locations
MKYVLVTGGVVSGLGKGVTASSIGVLLKACGLRVTSIKIALNLSDPYLNTDAGTMSPFEHGEVFVLDDGGEVDLDLGNYERFLDIKLTRDNNITTGKIYQHVIAKERKGDYLGKTVQVVPHVTDAIQDWIERVAVIPVDGEEDPADVCVIELGGTIGDIESAPFIEALGQFXNRVGPGNFCLVHVSLGPVLYGGGEQKTKPTQHSVKGLRGLGLTPDILACRSTKPLEDNVKEKLAQFCHVPLEYIFTLYDVPNIWRIPLLLKDQKAHLAISKVLNLASILNEPSLGEWTSRAELCDNLHVPVRIAVVGKYTGLSDAYLSVLKALLHASVACRKKLVVDWVPACDLEKETEKENPDAYKAAWKLLKGVDGILVPGGFGDRGVEGKILAAKYARENKIPFLGICLGMQIAVIEFARSVLSLQDANSTEFNPETKHPCIIFMPEGSKTHMGGTMRLGSRKSIFNVKDSKSAKLYENKSFVDERHRHRYEVNPDMVERLEKAGLSFAAKDETGKRMEIIELPNHPFFIGAQFHPEFKSRPGKASPLFLGLIAASCGELDTVLNPASAHQHSISNGPTNIFINGTSKKSPNGLADRECLLILTMSGKEMNIHNAFAMKALFANESKAMKDHERAILEERINYYLAKRTERIVFAELDTGGKIIECPNCHVQFTPTLGKIYKEQISFETGSRISLHVKAAKLTYLLETAQQKQRDVLVVLSHVLCQTILQCLCVADVHLEELMGFVQRTKLVLRKFTGLFLLKVTG

SEQ ID NO: 33179 - protein, 452 aa, Polaromonas sp. JS666
MRFTDLEQPTTAAGPRMDAAWLDAHWMPYTANRSFKANPRMVVEASGAYLTDAGGRKIFDGLSGLWCSGLGHCRREITEAVSRQVSKLDYAPAFQFGHPLAFELANKIKELTPQGLDYVFFTGSGSEAADTSLKMARAYWRAKGQAGKTRLIGREKGYHGVNFGGISVGGIAANRKLFGQGVEADHLPHTQPPTGSFHRGMPPTGAELADRLLDVIALHDASNIAAVIVEPFSGSAGVVIPPQGYLQRLREICTAHNILLIFDEVITGFGRCGAWTGAEAFGVVPDIMNIAKQVTNGAQPLGAVVATKDIYDTFMDAGGPEYMIEFPHGYTYSAHPVACAAGVAALDVLQKEDMIGRVKALAPHFENAVHSLKGSKHVADIRNYGLAAGFTIAALPGEPARRPYEIAMNCWKKGFYVRYGGDTIQLAPPFISEKAEIDRLINALGDALAETA

SEQ ID NO: 33180 - protein, 447 aa, Magnaporthe grisea 70-15
MSLRRVVVTGIGAVTPLGVGAQRSWQRLIAGASGITSVTHLEPLDRWQELPSTVAGLVPTSAAADANANAAKSHGGAGDVDGGKASGLWRPSDWLDATDQRRMSRFAQYALASADMALEDARWMPETPHDLEATGVCLGSGIGNLEEIYNTALAHHKHILINLAAGHIAMHHGFRGPNHAATTACTTGAHSIGDAARFIAFGDADVMVAGGSESCIHPLTFAGFARSRSLSTAFNDNPTASCRPFDESRDGFVVAEGAAVVVLEELEHALRRGARILAELRGYGCSGDAHHMTAPREDGSGALAAMKKALKHAGVRPAEVDYINAHATGTRSGDAAEALAIRSLMLGEEGLEREDQVTVSSTKGSTGHLLGAAGAVEAVFTALAVAENRVPPTKNLFNPGVGPNFNFVANQTQERTVNVAVSNSFGFGGTNASLVFSKLERGMQGSI

SEQ ID NO: 33181 - protein, 251 aa, Glycine max
MEYMNQRPKYDCLLFDLDDTLYPLSTGLAKACGQNIKDYMAEKLGIEKSKIDDLSNLLYKNYGTTMAGLRAIGYDFDYDEYHSFVHGRLPYENLKPDPVLRNLLLSLPYRRLIFTNSDKVHAVKALSRLGLEDCFEGIICFETLNPIHKSTVSDDEDDIEFVGGSGTTNPTTKKDASSFQIFDIIGHFAQPNPHTVLPKTPIICKPSENAIELALKIANLNPQRTLFFEDSVRNTQAGKRVGLHTVLVSHW

SEQ ID NO: 33182 - protein, 448 aa, Penicillium paxilli
MREIVHLQTGQCGNQIGAAFWQTIAGEHGLDGDGHYNGNSDLQLERMNVYFTHASGDKYVPRAVLVDLEPGTMDAVRAGPFGKLFRPDNFVFGQSGAGNNWAKGHYTEGAELVDQVVDVVRREAEACDCLQGFQITHSLGGGTGAGMGTLLISKIREEFPDRMMATFSVVPSPKVSDTVVEPYNATLSVHQLVEHSDETFCIDNEALYDICMRTLKLSQPSYGDLNHLVSAVMSGVTTSLRFPGQLNSDLRKLAVNMVPFPRLHFFMVGFAPLTSRNANAYRQVSVPELTQQMFDPKNMMAASDFRNGRYLTCSALFRGKVSMKEVEDQMRAIQTKNQSYFVEWIPNNVQTALCSVPPRGLRMSSTFVGNSTSIQELFKRVGDQFTAMFRRKAFLHWYTGEGMDEMEFTEAESNMNDLVSEYQQYQDASISEGEEEYLAEEGVLEDEV

SEQ ID NO: 33183 - protein, 327 aa, Burkholderia fungorum LB400
MSNTGAALDVITYGEAMAMFVAAETGRLAGVGQFAKRIAGADLNVAIGLSRLGFKVGWMSRVGNDSFGQYVRDTLTREGIDQRCVTTDERYPTGFQLKSRNDDGSDPAVEYFRRGSAASHLSLDDYAADYVLPARHLHLTGVAPAISASSRELAFHLAREMRAAGKTISFDPNLRPTLWPSRAAMVEGLNALAALADWVLPGIGEGEILTGYTQPDDIAKFYLDRGARGVIIKLGAQGAYFRTAADAALIAGQPVAKVVDTVGAGDGFAVGVVSALLEGKSLPQAVARGNRIGALAIQVIGDSEGLPGRAELDALESADATSIAAAA

SEQ ID NO: 33184 - protein, 321 aa, Burkholderia fungorum LB400
MKKIVAWKSLPEDVLAYLQQHAQVVQVDAAQHDAFVAALKDADGGIGSSVKITPAMLEGATRLKALSTISVGFDQFDVADLTRRGIVLAHTPDVLTESTADTVFSLILASARRVVELADWVKAGHWQHGIGPAQFGVDVQGKTLGIVGLGRIGGAVARRAALGFNMKVLYTNRSANPQAEAAYGARRVELAELLATADFVCLQVPLTPETKYLIGAAELRSMKKSAILINASRGATVDEAALIEALQNGTIHGAGLDVFETEPLPADSPLLKLANVVALPHIGSATHETRYAMACNAAENLVAALNGTLAVNIVNREVLAG

SEQ ID NO: 33185 - protein, 167 aa, Triticum aestivum
  misc_feature (133)..(133): Xaa can be any naturally occurring amino acid
  unsure (1)..(167): unsure at all Xaa locations
APDSLLTEECDVLIPAALGGVINKDNANDIKAKYIIEAANHPTDPEADEILSKKGVLILPDILANSGGVTVSYFEWVQNIQGFMWDEEKVNAELRTYMTRAFGDVKQMCRSHSCDLRMGAFTLGVNRVARATXLKGWEHDSSVSPCALLLYLWPGPCFVICITSRKR

SEQ ID NO: 33186 - protein, 127 aa, Brassica napus
  misc_feature (117)..(117): Xaa can be any naturally occurring amino acid
  misc_feature (122)..(122): Xaa can be any naturally occurring amino acid
  unsure (1)..(127): unsure at all Xaa locations
MSTPPPTLPVTNQQAVQSQPPINTPAFRTFFSRLSASIRDGLSQRRPWAELVDRSSMARPESLTDALSRIRKNLAYFKVNYVAVVSLVLAFSLFSHPLSLLVLLGLLAGWMFLYLFXPSDQXLVVFG

SEQ ID NO: 33187 - protein, 511 aa, Manihot esculenta
MSVAILTSLPPQWLSILAVFLLPILTLLLFRGKDDNQKKGLKLPPGPRQLPLIGNLHQLGGQPYVDFWKMAKKYGPVMYLQLGRCPTVVLSSTETSKELMKDRDVECCSRPLSVGPGQLSYNFLDVAFSPYSDYWREMRKLFIFELLSMRRVQTFWYAREEQMDKMIEILDGAYPNPVNLTEKVFNMMDGIIGTIAFGRTTYAQQEFRDGFVKVLAATMDMLDNFHAENFFPVVGRFIDSLTGALAKRQRTFTDVDRYFEKVIEQHLDPNRPKPETEDIVDVLIGLMKDESTSFKITKDHVKAILMNVFVGGIDTSAVTITWAFSELLKNPKLMKKAQEEVRRAVGPNKRRVEGKEVEKIKYIDCIVKETFRKHPPVPLLVPHFSMKHCKIGGYDILPGTTIYVNAWAMGKDPTIWENPEEYNPDRFMNSEVDFRGSDFELVPFGAGRRICPGLAMGTTAVKYILSNLLYGWDYEMPRGKKFEDFPLIEEGGLTVHNKQDIMVIPKKHKWD

SEQ ID NO: 33188 - protein, 144 aa, Prochlorococcus marinus str. MIT 9313
MSRSDSSASDSVDWIKLSPEEWQARLTREQYQVARKGGTERAFTGAYWNHKAAGMYCCVCCGAPLFSSATKFDSGTGWPSFSDGVKAGAITTHRDTSHGMERTEINCARCGAHLGHVFNDGPAPTGQRYCVNSASLDFSEEAEV

SEQ ID NO: 33189 - protein, 559 aa, Phanerochaete chrysosporium
MLFALLALGAAIGVGAAPSSGPPVVQVPSMDNFVLGSGVAGQPPQVRHYEFVVEEMLGAPDGVTKPMLVVNGLFPGPTIEVNQYDRLVVRVINRIQNATTIHWHGIPQNGTAYYDGTAGITECGIPPGQSLTYDFTFGDFSGTTWWHSHYDTQYTDGVTGALIVHPTFPDPPGFPTWDEELVIELTDVYHTFSTILNAQYLSPSGPIGGSAGDEPVPDSGALNGLGQYHGLGNYFNFTLQPNKTYRLRLIHTGSLADIRFSVDNHPLTVIEADGTLTEPTVVAGLTLAVAQRYSVLLTTNQTNGSYWMRTLQQTDMFTYKLPGQNPDNRGIISYGTGTGPTLPPAKEDPGATLGGMQLNDLDPYTLPPAVPEAVPDNTKFYQVSFEFDNLPSGASRAYMNGTSWDPLPKTNILLEIQRAYNAGRAFAPEGASVQFGNQFLITEDKIEVLDLVLENNDNGDHPFHLHGYSPWMIGVGDSPYDPNNVTLNTVNPLSRDTVEIPANGWVRLRFITYNPGAWTLHCHISWHMSAGLLMQFVTLPSVAATLPIPQVIANMCSAA

SEQ ID NO: 33190 - protein, 130 aa, Brassica napus
MAFSKSLGFILLAAFFVSFTVAQSPAPAPSNGGGRRISPAHSPKKALSPASAVSPSPQTALTPESSASPPSPPSVDSPLADSPSDLPAVSPSSISNSPAQAPAPVSGAVSNSYAVFGSVAVMLSAVVFAM

SEQ ID NO: 33191 - protein, 518 aa, Lotus corniculatus var. japonicus
MASLSCSATDLAPLLTATTNATATAAATYLCNQLDTISRKLSDTTYAVDNTYLLFSAYLVFAMQLGFAMLCAGSVRAKNTMNIMLTNVLDAAAGGLSYYLFGFAFAFGAPSNGFIGRHFFGLKHYPSPTYDYSFFLYQWAFAIAAAGITSGSIAERTQFVAYLIYSSFLTGFVYPVVSHWLWSSDGWASPTRTTGSLLFGSGAIDFAGSGVVHMVGGIAGLWGAFIEGPRIGRFDRTGRSVALRGHSASLVVLGSFLLWFGWYGFNPGSFLTIAKAYGNNGENGNYYGQWSAIGRTAVTTTLAGCTAALTTLFSKRLLEGHWKVLDVCNGLLGGFAAITSGCSVVEPWPAIVCGFVAAWVLIGLNLVAAKMKYDDPLEAAQLHGGCGAWGVLFTGLFAKGEYVAEVYGSAGRPYGLLMGGGGKLLAAQVIEILVVCGWVTATMGPLFYGLHKTKLLRISEDDETAGMDLTRHGGFAYAYHDDDDVSTKRGVMMSRIGPGSSSPSTMNTPAASAAANDC

SEQ ID NO: 33192 - protein, 114 aa, Glycine max
MGIGEKSSSKSFNLHREVKNKQQEFRGVPKGCMAIKVGQGEEQQRFVVPVIYINHPLFMQLLKEAEEEYGFDQKGTITIPCHVEEFRNVRGLIDRDKSLHHHHHHHHHVGCFGF

SEQ ID NO: 33193 - protein, 205 aa, Musgravea heterophylla
  misc_feature (14)..(14): Xaa can be any naturally occurring amino acid
  misc_feature (159)..(159): Xaa can be any naturally occurring amino acid
  unsure (1)..(205): unsure at all Xaa locations
SSFDFMDGYDKPVXGRKINWMKAGILESDRVITVSPYYAQELVSGMDKGVELDNIIRKTGITGIVNGMDVQEWNPSTDKYIDVKYDATTVFDAKPLLKEALQAAVGLPIDGNIPVIGFIGRLEEQKGSDILAEAISQFIGENVQIVVLGTGKKPLEEQXEQLEIKYPDKAIGIAKFNVPLAHMIIAGADFMLIPSRFEPCGLIQL

SEQ ID NO: 33194 - protein, 205 aa, Musgravea heterophylla
SSFDFMDGYDKPVRGRKINWMKAGILESDRVITVSPYYAQELVSGMDKGVELDNIIRKTGITGIVNGMDVQEWNPSTDKYIDVKYDATTVFDAKPLLKEALQAAVGLPIDGNIPVIGFIGRLEEQKGSDILAEAISQFIGENVQIVVLGTGKKPLEEQVEQLEIKYPDKAIGIAKFNVPLAHMIIAGADFMLIPSRFEPCGLIQL

SEQ ID NO: 33195 - protein, 205 aa, Austromuellera trinervia
SSFDFMDGYDKPVKGRKINWMKAGILESDGVITVSPYYAQELVSGMDKGVELDNIIRKTGITGIVNGMDVQEWNPSTDKYIDVKYDATTVFDAKPLLKEALQAAVGLPIDGNIPVIGFIGRLEEQKGSDILAEAISQFIGENVQIVVLGTGKKPLEEQIEQLEIKYPDKAIGIVKFNVPLAHMIIAGADFMLIPSRFEPCGLIQL

SEQ ID NO: 33196 - protein, 219 aa, Brassica napus
LNRLHDRNETMYYKVLIANIEEYAPIVYTPTVGLVCQNYSGLFRRPRGMYFSSEDRGEMMSMVYNWPAEQVDMIVVTDGSRILGLGDLGIHGIGISVGKLDLYVAAAGINPQRVLPVMIDVGTNNEKLLKDPLYLGLQQHRLENDEYIEVIDEFMEAVFTRWPHVIVQFEDFQSKWAFKLLQRYRSRYRMFNDDVQGTAGVAIAGLLGAVRAQGRPMLD

SEQ ID NO: 33197 - protein, 436 aa, Bordetella pertussis Tohama I
MNLSDKKATLSFSDGSAPIEFPVYKGTVGPDVIDIRKLYGQTGMFTFDPGFMSTAACASGITYIDGDKGELLYRGYPIEQLAVNCDFLDICYLILNGELPNGGQKQDFDSQVTHHTMVNEQLHFFLRGFRRDAHPMAVLTGLVGALSAFYHDSTDITNPHHRHVSAIRLIAKMPTLVAMAYKYSQGQPFIYPQNDLSYTGNFLRMMCATPCEEYKVNDVVERALDRIFILHADHEQNASTSTVRLCGSSGTNPFAAIAAGVACLWGPAHGGANEACLQMLEELQANGGVAKVGEFMEKVKDKNSGVRLMGFGHRVYKNYDPRAKLMQETCKEVLVALGLENDPLFKLAMELERIALEDDYFVQRKLYPNVDFYSGIVQRAIGIPTSLFTAIFALARTVGWIAQWNEMLSDPDYKIGRPRQLFTGSVTRDVPGMDKR

SEQ ID NO: 33198 - protein, 337 aa, Nicotiana tabacum
MAKVKIGINGFGRIGRLVARVALQRDDVELVAVNDPFISVEYMTYMFKYDSVHGQWKHHELKVKDDKTLLFGEKAVTVFGFRNPEEIPWGQTGADYIVESTGVFTDKDKAAAHLKGGAKKVIISAPSKDAPMFVVGVNEKEYKPELNIVSNASCTTNCLAPLAKVINDRFGIVEGLMTTVHSITATQKTVDGPSAKDWRGGRAASFNIIPSSTGAAKAVGKVLPALNGKLTGMAFRVPTVDVSVVDLTVRLEKEATYDEIKAAIKEESEGKLKGILGYTEDDVVSTDFVGDNRSSIFDAKAGIALSKNFVKLVSWYDNEWGYSTRVVDLIKHMASVQ

SEQ ID NO: 33199 - protein, 592 aa, Bordetella pertussis Tohama I
MVAVMNSLPRRQFDVVVVGAGGAGMRCSLQLAQAGLSVAVLSKVFPTRSHTVAAQGGVSASLGNMSEDNWYWHMYDTVKGSDWLGDQDAIEFMCREAPNAVYELEHFGMPFDRNADGTIYQRPFGGHTANFGEKPVQRACAAADRTGHALLHTLYQRNVAARTQFFVEWMALDLLRNEAGDVLGVTALEMETGEIYVLEAKTTVLATGGAGRIWAASTNAFINTGDGLGMAARAGIPLQDMEFWQFHPTGVAGAGVLITEGVRGEGGILLNKDGERFMERYAPTLKDLAPRDFVSRSMDQEIKEGRGCGPDGSYVVLKLDHLGADVINKRLPSIREIAIKFGNVDPIKEPIPVVPTIHYQMGGIPANYHGQVLERANGENKIVNGLYAIGECAAVSVHGANRLGTNSLLDLIVFGRATGNHIVDSHPERQHAHQPLPKEAVDRSLARVDELESRTSGEKTQDVANAIRMSMQRHCGVFRTLELLNEGVGQIEDLAQTAQHIYFKDKSKVFNTARVEALELANMTEVARATIKSAANRTESRGAHALNDHPERDDVNWLKHTLWYSEGSRLDYKPVQMKPLTVESFPPKARTF

SEQ ID NO: 33200 - protein, 476 aa, Ralstonia solanacearum
MPATFPAAAQANAAARLERLPFSGYHKRIFIIIAIAFFFDSVDLATMTFVLGSIKKEFGLSTATAGLVASSSFFGMVIGAAVAGLLADRFGRRPVFQWSMVLWGVASYLCSTAQSVEALIAWRILLGIGMGMEFPVAQTLLSEFVPTANRGRLIALMDGFWPLGFITAGIVSYFVLPQFGWRAVFALLAVPAIFVLIVRRAVPESPRWLEHAGRNAQADTVMRGIEAKVMRSLNTTTLPPIVQHSAPQPVRRHSALREIWSAAYRRRTTMVWLLWFFALLGFYGLTSWLGALLQQAGFAVTQSVYYTVLISLGGVPGFLCAAWLVERWGRKPTCIASLLGGGAMAYLYGQSALYGGSVTLLICTGLAMQFFLFGMWAVLYTYTPEQYGTGARATGSGFASAIGRVGSLIGPYVVGVVLPVFGQGGVFTLGAISFAVAALAVWALGIETRGLALEALASEDAAAETAPYSTTADNIS

SEQ ID NO: 33201 - protein, 186 aa, Aeropyrum pernix K1
MQALTTYKCIEKGIVVWLTGLPGSGKTTIATRLADLLQKEGYRVEVLDGDWARTTVSEGAGFTREERLRHLKRIAWIARLLARNGVIVICSFVSPYKQARNMVRRIVEEEGIPFLEIYVKASLEEVIRRDPKGLYKKALKGELENFTGITDPYEPPENPQLVLDTESNTIEHNVSYLYSLVKAVIE

SEQ ID NO: 33202 - protein, 329 aa, Bordetella pertussis Tohama I
MSKPALRVAVTGAAGQIGYALLFRIASGEMLGKDQPVILQLLEIPDEKAQKALKGVIMELEDCAFPLLHEVTAHSDPRTAFKDADVALLVGARPRGPGMERKDLLSVNAQIFTAQGRALNDVASRNVKVLVVGNPANTNAYIAMKSAPDLPAKNFTAMLRLDHNRALSQLSAKSGKRVADIEKLIVWGNHSPTMYPDFRFATVGGQGLTQLINDDAWNRDTFIPTVGKRGAAIIEARGLSSAASAANAAIDHVRDWVLGSNGKWVTMGIPSDGSYGIPEGIIYGFPVVTENGEYKMIKDLEIDAFSRERLDFTLKELLEERDGVKDLLK

SEQ ID NO: 33203 - protein, 400 aa, Bordetella pertussis Tohama I
MSTSQKKPTVQQKKPAAQPAEKAAFKPKKSVALSGVVAGNTALCTVGRTGNDLHYRGYDILDFAGSAEFEEIAHLLVHGKLPNKAELKAYKEKLRALRGLPAQLQNVLECLPASSHPMDVMRTAVSVLGCVLPEKDDHNTPGARDIADRLMANLGSALLYWYHYSHNGRIIDVQTDDDSIGGHFLHLLHGAKPSDEWVRAMHTSLILYAEHEFNASTFTGRVIAGTGSDMYSSITGAIGALRGPKHGGANEVAFEVQKRYETPDEAEADIRQRVENKEVIIGFGHPVYTVSDPRNKVIKDVAKKLSRKAGSTKMFDIAERLETVMWDIKKMFPNLDWFSAVSYHMMGVPTAMFTPLFVIARTAGWSAHIIEQRIDNKIIRPTANYVGPEDQTYVPISKRA

SEQ ID NO: 33204 - protein, 622 aa, Saccharomyces cerevisiae
MLFYSFVWSVLAASVALAKTHKLNYTASWVTANPDGLHEKRMIGFNGEWPLPDIHVEKGDRVELYLTNGFQDNTATSLHFHGLFQNTSLGNQLQMDGPSMVTQCPIVPGQTYLYNFTVPEQVGTFWYHAHMGAQYGDGMRGAFIIHDPEEPFEYDHERVITLSDHYHENYKTVTKEFLSRYNPTGAEPIPQNILFNNTMNVTLDFTPGETYLFRFLNVGLFVSQYIILEDHEMSIVEVDGVYVKPNFTDSIYLSAGQRMSVLIKAKDKMPTRNYAMMQIMDETMLDVVPPELQLNQTIQMRYGHSLPEARALNIEDCDLDRATNDFYLEPLIERDLLAHYDHQIVMDVRMVNLGDGVKYAFFNNITYVTPKVPTLTTLLTSGKLASDPRIYGDNINAQLLKHNDIIEVVLNNYDSGRHPFHLHGHNFQIVQKSPGFHVDEAYDESEQDEMTVPYNESAPLQPFPERPMVRDTVVLEPSGHVVLRFRADNPGVWYFHCHVDWHLQQGLASVFIEAPVLLQEREKLNENYLDICKAADIPVVGNAAGHSNDWFDLKGLPRQPEPLPKGFTTEGYLALIISTIIGVWGLYSIAQYGIGEVIPNDEKVYHTLREILAENEIEVSRG

SEQ ID NO: 33205 - protein, 215 aa, Prototheca wickerhamii
SDLRTGSHGNHNLPPSVRPAPAPPAALPSLWLAPGFAAIVRPVSLRAPRSRTSVSVHAAVKYDYDTKVFQKELVKFAGTEEYIYRGGRDKFNKLPEAFKGIKQIGVIGWGSQAPAQARNLRDSFAEAGMDTKVVIGLRKGSPSETEARAVDFTEQDGTLGEVFDVISSSDFVILLISDAAQAKLYPRILAAMKPGGHLGLSHGFLLGVMQNDGAD

SEQ ID NO: 33206 - protein, 308 aa, Colwellia psychrerythraea 34H
MSDTMSKSMLENKLTKLFPFTRNFINRNGHQYHYVNEGQGSPVVMVHGNPSWSFYYRNLVSQLSKSHQCIVPDHIGCGLSDKPDDDGYDYTLANRIDDLEALLEHLDVKENITLVVHDWGGMIGMGYAARHPERIKRLVILNTGAFHLPKAKKLPPALWLGRNTFVGAALVRGFNAFSSVASYIGVKRKPMSKEVREAYVAPFNSWTNRISTLRFIQDIPLKIGDRNYQLVSDISDNLAQFKKIPMLICWGLKDFVFDRHFLDEWQHRFPDAQVHAFDDCGHYILEDASDEVVPLIENFLKTSETKLA

SEQ ID NO: 33207 - protein, 324 aa, Sinorhizobium meliloti 1021
MRRDRIVKPKVIVTRRWPTEVEDRLTAEFDTRLNETDQPYDRRELRAALEEADAVLPTVTDKISADMLEGGIRAKILGNFGVGFNHIDTAAATKVGLVVTNTPGVLTDATADLAMTLLLMCARRAGEGERELRAGKWTGWRPTHLCGSHVTGKTVGIIGMGRIGQAVARRCHFGFGMDVVFFDSHSIAGLDVPARQLPSVDDVLATADFVSLHCPGGGENYHLIDDDRLACMKWSAFLINTARGDVVDEHALVRALETRRIAGAGLDVFEGEPRVPGRLAERQDVVLLPHLGSATKETRVAMGMRVIENLKAFFSGRSPPDAVC

SEQ ID NO: 33208 - protein, 193 aa, Glycine max
MTFKLLHLVKPFMPFLPEVTAPERKVPFKERVLWTAITLFIYLVCCQIPLYGIVSSDSADPFYWMRVILASNRGTLMELGISPIVTSGLVVQLLAGAKIIDVDQGNKEERNLYNGAQKLLGMLITLGQSTVYVMSGMYGDTASLGFSNSTLIVLHLFFAGIIVLVLDELLQKGHSLGSGISLFIATNICESII

SEQ ID NO: 33209 - protein, 401 aa, Sinorhizobium meliloti 1021
MRNGTSHLFVPGPTNIPDAVRRAMNVPMQDMRAPDFPDLVLPLFADLKGVFRTDNGSIFLFPGSGTGAWEAAISNTLNRGDRVLMSRFGQFSHLWADMAGRLGLDVECLDVEWGEGVPVEEYRRRLDADKNRRIKAVFVTHNETATGVTSDVAAVRAALDDTGHKALLFVDGVSSIASIEFRMDDWGVDLAVTGSQKGLMLPAGLGILAVSPKALEAHASSTIERCYFSFEDMKAPSETGYFPYTPPTQLLLGLRASLDLIFAEGLDAVIARHHRLAEGVRRGVHAWGLNLCATEKKWWSDTVSAIVVPEDVDARQVIANGYSKYRTSFGAGLSKVAGRVFRIGHLGDLNEVMCLSALAAAEMSLRDAGAKIEAGSGVAAAQEWYRSQIGLAAPNLQERAA

SEQ ID NO: 33210 - protein, 331 aa, Nocardioides sp. JS614
MADSSQPTLQQQLSAEAIGTFVLVFFGCGSIVFAHEADAQTTIATIGLTFGLAVGVMAYAFGRVSGAHFNPAVSVGAAVGGRMSWARAGWYLLAQVGGAVLAALTLFLLLHGFDGFDSERNMGQNFFGDQGSGYAWWAAFVLEALLTAVFVGVILAVTDERNEHPALAPLTIGLTLAAIHFVAIPATGTSVNPARSIGPALFAGPDAIIQLWLFILAPALGATIAGAGYSLLFGRVGDPVPGSGVVLRRPRTAAQVPGYAAPDQYQQQWNQESPSAYVAPIVQDGWQWDPIGQQWHPVGQTPEQWRVQQAAEQAAQDESDDGGTRIRPPAE

SEQ ID NO: 33211 - protein, 328 aa, Vibrio sp. Ex25
MSISNTVTKVEEFAFDNASVKTIDNELEKSSSTESKTAAREEFDASSKSLDATQLYLGEIGFSPLLTAEEEVLYARRALRGDEAARKRMIESNLRLVVKISRRYSNRGLALLDLIEEGNLGLIRAVEKFDPERGFRFSTYATWWIRQTIERALMNQTRTIRLPIHVVKELNIYLRTARELSQKLDHEPTAEEIAAQLDIPVEDVSKMLRLNERISSVDTPIGGDGEKALLDIIPDANNSDPEVSTQDDDIKSSLIHWLEELNPKQKEVLARRFGLLGYEPSTLEEVGREIGLTRERVRQIQVEGLRRLREVLIKQGLNMENLFNVEDD

SEQ ID NO: 33212 - protein, 328 aa, Nocardioides sp. JS614
MSSTPLKVAVTGAAGQIGYSLLFRLASGSLLGDRPIELRLLEITPALKALEGVVMELDDCAFPNLAGVQIGDDAEQIFDGVNLALLVGARPRGPGMERGDLLSANGAIFTAQGKALNKVAADDVRIGVTGNPANTNALIAMTNAPDIPQARFSALTRLDHNRAISQLAAKTGAAVTDIKKMTIWGNHSATQYPDVFHAEIGGRNAAEVVGDQDWIESTFIPTVAKRGAAIIEARGSSSAASAASATIDAARDWLFGSADADWVSMAVVSDGSYGVPEGLISSFPVTTKDGDWEIVQGLEIDDFSRAKIDASTAELADEREAVKELGLI

SEQ ID NO: 33213 - protein, 264 aa, Arabidopsis thaliana
MYVIESKGGTITCMLLALLFLGTWPAIMTLTERRGRLPQHTYLDYTLTNLLAAVIIAFTLGEISPSRPNFTTQLSQDNWPSVMFAMAGGIFLSLGTLATQYAWAFVGLSVTEVITASIAVVIGTTLNYFLDDRINRAEVLFPGVACFLIAVCFGSAVHKSNAADNKSKLQGFKSLETTSSFQMETSSIKEGKAKVGTADFLIEVEKQRAIKVFGKSTIIGLAITFFAGAVQIENKHFGGYCCLENTKDHQEKHIHFLSVCYLCS

SEQ ID NO: 33214 - protein, 430 aa, Haemophilus influenzae 86-028NP
MMDEQSLLAFDTQHIWHPYSSVSSDMPLYAVERADGVMITLKDGRRLIDGMSSWWAALHGYNHPRLNAAAQNQLAKMSHIMFGGFTHDPAVELAQLLVQILPNGLDKIFFADSGSVAVEVAMKMAIQYQHAKGEVQRQKFATIRSGYHGDTWNAMSVCDPTTGMHHLFHHSLPVQYFLPQPNIPFNESWNDCVIEPLADLLKKKGSEIAALILEPVVQGAGGMYFYSPTYLVKAQALCKQYGVLLIFDEIATGFGRTGKLFAAEHAGISPDIMCIGKALTGGYLTLSASITTTEIAQIICSGEAKCFMHGPTFMANPLACAIAAESIRLLLESPWQQNIQRIEHSLKQQLSPLAEKDYVKEVRALGAIGVVEMKSAVNMKTLVPRFVEQGVWIRPFGKLVYVMPPFVIKDDELQKLTEGMILALIQEYEH

SEQ ID NO: 33215 - protein, 379 aa, Haemophilus influenzae 86-028NP
MDAFKQQLEQLSAQNQYRSIPDLVHQGRYIMRENRKMLNMSSNDYLGLASNENLRQSFLQQYGGNFPSFTSSSSRLLTGNFPIYTDLEELVAQRFQRESALLFNSGYHANIGILPALTTKSLILADKLVHASMIDGIRLSQCEFFRYRHNDYEHLKNLLEKNVGKFDRTFIVTESVFSMDGDVADLKQLVQLKKQFPNTYLYVDEAHAIGVYGKNGLGIAERANVIADIDLLVGTFGKALASMGAYVVCDQILKECLINQMRPLIFSTALPPFNVAWTYFIFERLPQFSKERSHLERLSAFLRQEVEHRTQIMPSQTCIVPYILGENEATLAKAKDLQEQGYYCLPIRPPTVPKGTSRIRLSLTADMTMDEVKQFVACL

SEQ ID NO: 33216 - protein, 600 aa, Magnaporthe grisea 70-15
MFFFKVLVAFLLQIVTVYAADTAAWKSRSIYFALTDRVARGSNDTGGASCGNLSKYCGGTFKGLESKLDYIKNLGFDSIWINPVVSNKADGYHGYWAQDLYAINSNYGSAADLKSLVNTAHSKGIYVMVDVVANHMGPGSISDNRPAPLNQNSSYHSQCTIDNSNQSSVENCWVANLPDINTQSSGIRQLLNTWVSWLVKEYSFDGVRIDTVKHVEKSFWPGFVKSIGAYAIGEVFDGNPSFMAGYANLMPGLLNYAVYYPMNRFYQQGNSPQELVNMIDNITASFPDPAALGTFLDNHDNPRWLNQTNDQTLLQNALAFVFLSRGIPILYYGTEQGLVGGDDPANREDLWRSGYKTDTTLHGAVAKLNAARKAAGGLDGNDHTHLYVTNDTYAWSRAGADLVVLTTNAGRCSHAQHCFNTTRANGRWADVYGSGAYVFSDKTGRACVKLANGQPVVLLALANSTTGDGKPPTLPAPITWYNSTSPPDDSANGSNVCPPAVAVSFTVRVATAPGDTIKMVGNTAQLGSWDAAKAPSLSASGYNSTNMAWSITLPMAPGRTVQYKFVKVSRSGGTTWESDPNRFYTPPVSQATADVSNIWR

SEQ ID NO: 33217 - protein, 290 aa, Zea mays
MGKDDVIESGAGGGEFAAKDYTDPPPAPLIDAAELGSWSLYRAVIAEFIATLLFLYITVATVIGYKHQTDASASGADAACGGVGVLGIAWAFGGMIFVLVYCTAGISGGHINPAVTFGLFLARKVSLVRALLYIVAQCLGAICGVGLVKAFQSAYFDRYGGGANSLASGYSRGTGFGAEIIGTFVLVYTVFSATDPKRNARDSHVPVLAPLPIGFAVFMVHLATIPVTGTGINPARSLGAAVIYNKDKPWDDHWIFWVGPLVGAAIAAFYHQYILRAGAIKALGSFRSNA

SEQ ID NO: 33218 - protein, 159 aa, Arabidopsis halleri subsp. gemmifera
MRIRRREEKENQEYKKGLWTVEEDNILMDYVLNHGTGQWNRIVRKTGLKRCGKSCRLRWMNYLSPNVNKGNFTEQEEDLIIRLHKLLGNRWSLIAKRVPGRTDNQVKNYWNTHLSKTSSEITPPPSKPRGKTTALCRHCSSLLPQLLLVIINKKMSTRI

SEQ ID NO: 33219 - protein, 252 aa, Lactobacillus brevis
MSNRLDGKVAIITGGTLGIGLAIATKFVEEGAKVMITGRHSDVGEKAAKSVGTPDQIQFFQHDSSDEDGWTKLFDATEKAFGPVSTLVNNAGIAVNKSVEETTTAEWRKLLAVNLDGVFFGTRLGIQRMKNKGLGASIINMSSIEGFVGDPSLGAYNASKGAVRIMSKSAALDCALKDYDVRVNTVHPGYIKTPLVDDLPGAEEAMSQRTKTPMGHIGEPNDIAYICVYLASNESKFATGSEFVVDGGYTAQ

SEQ ID NO: 33220 - protein, 435 aa, Saccharomyces cerevisiae
MGENHDHEQSIKRNSMIYNENERQLCNSNLKILQNKRALSKNDSSSKQQVQDSKPRRALTDVPVNNNPLSQNKRIVAGSKAAKVRREENIRPIVSAVQKRQIYNDRTAAEQEEEEEEEGEDDDAASIVNKKRRIDAEGVSEIVGWQDLDYVEKDDTAMVAEYSAEIFAFLYRRELETLPSHNYLLDKTSKYYLRPSMRTILVDWLVEVHEKFQCYPETLFLSINLMDRFLAKNKVTMNKLQLLAVTSLFIAAKFEEVNLPKLAEYAYITDGAASKNDIKNAEMFMLTSLEFNIGWPNPLNFLRRISKADDYDPVNRNIGKFILEYAYCCHQFIHLPPSTVSAMAMYIARRMTNRNKNELWNGTLQHYSGGIDPIHDEAFQSLCIDLVKDIASSKTHLDSLILKYKKPRYGSVYFQTFKWCTSEMHSNFQNLFNLK

SEQ ID NO: 33221 - protein, 228 aa, Arabidopsis halleri subsp. gemmifera
MRIRRREEKENQEYKKGLWTVEEDNILMDYVLNHGTGQWNRIVRKTGLKRCGKSCRLRWMNYLSPNVNKGNFTEQEEDLIIRLHKLLGNRWSLIAKRVPGRTDNQVKNYWNTHLSKKLVGDYSSAVKTTGEDDGSLPSLFITAATTSSRYHQQENVYENIAKSFDGVVSASYEDKPKQELAQNDVLMATTNDPSHYYGNNALWVHDDDFELSSFVMMNFASGDIEYCL

SEQ ID NO: 33222 - protein, 164 aa, Arabidopsis lyrata subsp. kamchatica
MRIRRREEKENQEYKKGLWTVEEDNILMDYVLNHGTGQWNRIVRKTGLKRCGKSCRLRWMNYLSPNVNKGNFTEQEEDLIIRLHKLLGNRWSLIAKRVPGRTDNQVKNYWNTHLSKKLVGDYSSAVKNHRRKRRLSAVIVHHCRHNFFSSSSTRKCLREYSQEL

SEQ ID NO: 33223 - protein, 213 aa, Pseudomonas putida
MKSYDVVIIGGGPGGYNAAIRAGQLVLSVACVEGRSTLGGTCLNVGCMPSKALLHASELYEAASGEEFAHLGIEVKPTLNLAQMMKQKDESVTGLTKGIEYLFRKNKVDWIKGWGRLDGVGKVVVKAEDGSETALQAKDVVIATGSEPTPLPGVTIDNQRIIDSTGALSLPQVPKHLVVIGAGVIGLELGSVWRRLGSQVTVIEYLDRICPGT

SEQ ID NO: 33224 - protein, 339 aa, Francisella tularensis subsp. tularensis SCHU S4
MNKKILVTGGVGYIGSHTVVELLDRDYQVVVVDNLSNSKVSVIDRVKKITNKDFDFYQLDLLGKAKLTKVFQEYDIYAVIHFAGFKAVGESVEKPLEYYHNNIQGTLNLLELMQEYKVYNFVFSSSATVYGMNNKPPFTEDMPLSTTNPYGATKLMLEDILRDLQNANNNFNITCLRYFNPVGAHSSGMIGEDPQGIPNNLMPYVAQVGAGKLAKLSIFGGDYETIDGTGVRDYIHVVDLAIGHILALEKLSQDKPSWRAYNLGSGNGYSVLEIVKAYQKALGKEIPYQIVARRAGDIAASFADVAKAKRELGFETQKTIDDICDDMLKWQKYAKENNI

SEQ ID NO: 33225 - protein, 177 aa, Listeria monocytogenes str. 4b H7858
MTKESLEKATFAGGCFWCMVKPFDTQPGIEKVISGYTGGHTVNPTYKEVCSGTTGHTEAIQITFDPAVFPYEKLVEVYWQQTDPTDAAGQFLDRGDSYRPVIFYHNEEQKEIAEKSKAALDASGRFKKPIVTEIAKAETFYPAEEYHQDFYKKEKAHYEGYQVASGRAAFIDANWKG

SEQ ID NO: 33226 - protein, 347 aa, Pyrus communis
MGSESESVCVTGASGFIGSWLVMRLLEHGYTVRATVRDPTNQKKVKHLLDLPKAETHLTLWKADLADEGSFDEAIQGCSGVFHVATPMDFESKDPENEVIKPTINGLLDILKACQKAKTVRKLVFTSSAGTVNVEEHQKPVYDESNWSDVEFCRSVKMTGWMYFVSKTLAEQAAWKYAKENNIDFITIIPTLVIGPFLMPSMPPSLITGLSPILRNESHYGIIKQGQYVHLDDLCLSHIYLYKHPKAEGRYICSSHDATIHELVKMLREKYPEYNIPTKFKGIDDNLEPVHFSSKKLREIGFEFKYSLEDMFVGAVDACRAKGLIPIPAEKTEAAEESNLVDVKVGG

SEQ ID NO: 33227 - protein, 375 aa, Glycine max
MTSIEKGKVNLETIMSIGTTLLSTPPHYCFHSNTQTTFLSTVTPIQNLSIRNNNFRVLCFSSDPSQLPPVVVVGSANADIYVEVDRLPGEGETLAARSGQTIAGGKGANQATCSAKLAYPTYFVGQVGDDAYGRLVTAGLRGGGVRLDNLAVVASAATGHAVVMLQSNGQNSIVYIGGANLSCWPSSLPRQHLDLVAQAGIVLLQREIPDAVNAQVAQAAKNAGVPVVLDAGGMDGPLPPQLINFVDILSPNETELARLTGMPTESFEEIQQAALKCHEMGAKQVLVKLGHKGSALFVEGEKTIQQPAILAKTVVDTTGAGDTFTAAFAVALVEGKSKKECLRFAAAAACLCVQVKGASPSMPDRKSVLDLLNCQ

SEQ ID NO: 33228 - protein, 347 aa, Pyrus communis
MGSESESVCVTGASGFIGSWLVMRLLEHGYTVRATVRDPTNQKKVKHLLDLPKAETHLTLWKADLADEGSFDEAIQGCSGVFHVATPMDFESRDPENEVIKPTINGLLDILKACQKAKTVRKLVFTSSAGTVNVEEHQKPVYDESNWSDVEFCRSVKMTGWMYFVSKTLAEQAAWKYAKENNIDFITIIPTLVIGPFLMPSMPPSLITGLSPILRNESHYGIIKQGQYVHLDDLCLSHIYLYKHPKAEGRYICSSHDATIHELVKMLREKYPEYNIPTKFKGIDDNLEPVHFSSKKLREIGFEFKYSLEDMFVGAVDACRAKGLIPIPAEKTEAAEESNLVDVKVGS

SEQ ID NO: 33229 - protein, 330 aa, Flaveria linearis
MSTASAFAINAPSFVNASSLKKSSTSSARSGVLSARFTCNSSSSSSSATPPSLIRNEPVFAAPAPIITPNWTEDGNESYEEAIDALKKMLIEKGELEPVAAARIDQITAQAAAPDTKAPFDPVERIKSGFVKFKTEKFVTNPALYDELAKGQSPKFMVFACSDSRVCPSHVLDFQPGEAFVVRNVANMVPPFDKTKYSGVGAAVEYAVLHLKVQEIFVIGHSRCGGIKGLMTFPDEGPHSTDFIEDWVKVCLPAKSKVVAEHNGTHLDDQCVQCEKEAVNVSLGNLLTYPFVRDGLRNNTLALKGGHYDFVNGTFELWALDFGLSSPTSV

SEQ ID NO: 33230 - protein, 318 aa, Streptomyces avermitilis MA-4680
MPDSVETFDLITMGRIGVDLYPLQPGVPLPQVESFGKFLGGSAANVAVAAARLGRSTAVITRTGNDPFGTYLHQALEEFGVDDRFVTPVDAYPTPVTFCEIFPPDDFPLYFYRQPKAPDLEIRTEELDFFALRAARIFWITGTGLSEEPSRSATLAALKARTKGGTTVFDLDWRPMFWQDPRAARPYYAEALRHATVAVGNLDECEIATGVREPRACAEALIEAGVELAVVKQGPKGVLAVHRDGTTAEVPPVPVEVVNGLGAGDAFGGSLCHGLLAGWELERTMRYANAAGALVASRLACSSAMPTLDEVEDLVARG

SEQ ID NO: 33231 - protein, 473 aa, Alkalilimnicola ehrlichei MLHE-1
DPHPHEAPTQQSHTHTHANPKTIPMKNSDIVKRDLDVLWHPCTQMKDHEWLPLIPVKKGEGVWLEDFDGNRYIDAISSWWVNLFGHCHPHISGAVQQQAAELEHVILAGFSHEPVVRLSEKLVQITPPGLSRCFYTDNGSSAVEVALKMSYHYWRNTGKPEKLKFITLSNSYHGETLGTLGVGDVALYKETYKPLLMEAITVPSPDAFLREPGSSWAEHAERMFAHMEAALERHAHETAAVIVEPLVQCAGTMRMYHPVYLERLREACDRHGVHLIADEIAVGFGRTGTMFACEQAGISPDFMCLSKGLTAGYLPLATVLTHDRIYQAFYDDYATLRAFLHSHSYTGNPLACAAALATLELFERDDVIARNRELAREMGEAFAHLADHPHVGEVRQTGMVLAAEMVPDKHKPEPYPWEERRGMIVYQHALKNEALMRPLGSVVYLMPPYVITPEQIRHLARVATEGIDLATRA

SEQ ID NO: 33232 - protein, 164 aa, Prochlorococcus marinus str. MIT 9312
MNQFFSRRTFILIPTMSILKIIFQPMKVLASSFSSKDEWNLSKDEWKSRLSPESYYILREEGTERAFSSELNNEKRKGVFHCAGCDLPLFLSDKKYDSGTGWPSFWDPIKGSVATKVDFKLIVPRTEYHCSRCGGHQGHVFNDGPLPTGKRYCNNGLALRFVPE

SEQ ID NO: 33233 - protein, 326 aa, Clostridium magnum
MSISNSKIIDMYKTMLKIRKFEEVAMNASAEGRIPGFIHLYIGEEAVATGVCANLNDKDYITSTHRGHGHIVAKGGDLKLMMAELFGKATGYCKGRGGSMHIADATKGILGANGIVGAGHDLALGAGLSAQYRGTNEVCICFFGDASTNQGTFHEALNMASVWKLPIVFVCENNGYGISTSQKRHMAIKDVADRGVGYNVPGVVVDGNDVFAVYEAAGEAIKRAREGKGPTLLECKTYRHRGHFEGDPMTYKPKEEQDMWLKKDPIPRFEKHILNNEVLSEEGIKEVQDDIENQIKEAVAFADNSPIPNVETALEDVYSDIKDQGR

SEQ ID NO: 33234 - protein, 713 aa, Pseudomonas fluorescens PfO-1
MSTKKPANDKSQLAGTDTPDRANTNAKLDSLEKFRSDATGQALRTNQGVKVADNQNTLKAGARGPSLLEDFIMREKITHFDHERIPERIVHARGTGAHGFFQSYENHSTLTKAGFLQDPGKKTPVFVRFSTVQGPRGSGDTVRDVRGFAVKFFTDEGNFDLVGNNMPVFFIQDAIKFPDFVHAVKPEPHNEIPTGGSAHDTFWDFVSLVPESAHMVIWAMSDRAIPKSLRSMQGFGVHTFRLINAEGKSRFVKFHWRPTAGTCSLVWDEAQKLAGKDTDYHRRDLWEAIEMGDYPEWELGVQVIEEENEHDFDFDILDPTKLIPEEIVPITPLGKMTLNRNPDNFFAETEQVAFCPGHIVPGIDFSNDPLLQGRLFSYTDTQISRLGGPNFHELPINRPVAPFHNGQRDAQHRTVIDKGRASYEPNSIDGGWPKETPPAAQDGGFESYPERIDANKIRQRSESFSDHFSQARLFFNSMSAHEKEHIIAAYSFELGKVEREFIRARQVNEILANIDLELAKRVAANLGLPAPGKGTVDVPKTSLDRSPSLSQANLLPENIKTRKVAILAANGVDGAAIDAMKKALAAEGAHAKLLGPTSAPVKTADGKSLAVDASMEGLPSVAFDAVFVPGGAASVKALSGDGVALHYLLEAYKHLKAIALQGEAKQLLDVLKLEADAGLLEGKDVGALTKPFFSAIGQHRVWDREAKAKAIPA

SEQ ID NO: 33235 - protein, 341 aa, Porphyromonas gingivalis W83
MTKRLFLPEWAPQEAVQLTWPHDRTDWAYMLDEVETCFVRIATAILRHERLIVVCPDRKRVFGLLPPELHHRLYCFELPSNDTWARDHGGISLLADGRPMIADFAFNGWGMKFAAHHDNLITRRLHALGLFAEGVTLDNRLAFVLEGGALETDGEGTLLTTDSCLFEPNRNAGLSRTAIIDTLKESLGVSRVLSLRHGALAGDDTDGHIDTLARFVDTRTIVYVRSEDPSDEHYSDLTAMEQELKELRRPDGQPYRLVPLPMAEALYDGADRLPATYANFLIINGAVLVPTYDSHLDAVALSVMQGLFPDREVIGIDCRPLVKQHGSLHCVTMQYPQGFIR

SEQ ID NO: 33236 - protein, 228 aa, Arabidopsis lyrata subsp. kamchatica
MRIRRREEKENQEYKKGLWTVEEDNILMDYVLNHGTGQWNRIVRKTGLKRCGKSCRLRWMNYLSPNVNKGNFTEQEEDLIIRLHKLLGNRWSLIAKRVPGRTDNQVKNYWNTHLSKKLVGDYSSAVKTTGGNDDSLPSLFITAATTSSRHHQQENVYENIAKSFDGVVSASYEDKPKQELAQNDVLMATTNDPSHYYGNNALWVHDDDFELSSLVMMNFGSGDIEYCL

SEQ ID NO: 33237 - protein, 301 aa, Asparagus officinalis
GSSSAHLSTNFYSSSCPKVFSTIKPVLQSAIAKEKRMGASILRLFFHDCFVNGCDGSILLADTANFRGEQHAGPNNGSVRGFKVIDKIKTAVENACPGVVSCADILAVAARDSVVILGGPDWKVKLGRRDARTASATLANNNIPPPTSSLSNLISKFAAQGLSTKDMVALSGAHTIGQARCTSFRGHIYNDADIDASFASLRQKICPRKSGSGDTNLAPLDLQTPTAFDNNYYKNLINKKGLLHSDQELFNNGATDSLVKSYSNSEGSFNSDFVKAMIKMGDISPLTGSKGEIRKICSKIN

SEQ ID NO: 33238 - protein, 217 aa, Vibrio fischeri ES114
MTFKAAIFDMDGLLLDTERVCMSVFQQACEAENVPFLEDVYLSGIGCNAKRIEELFRAGYGPDIDYPALNKAWRIRYFSIVQNQAIPVKEGVIELLEWLKANKIPMAVATSTQNDIAIKKLALAGLDGYFDVLATGCEVENSKPHPEIYFLAAERLGIAPETCLAFEDSNNGTRAAVTATMITYQIPDLVQPSQDVIELGHRILPSMVEVLAELKAR

SEQ ID NO: 33239 - protein, 390 aa, Carboxydothermus hydrogenoformans Z-2901
MREAVIVKALRTPVGKAPRGKLRNTRPEDLGALVIKEIINQTGINPEIIEDVIIGCAFPEAEQGMNLGRVVALRAGLPYSVPGVTVNRFCSSGLNAIADAAMKIMTGMSDVVIAGGIESMSMVPMGGNDLLPNPELMNVMPDAYLSMGLTAENVASRYNISREEQDEFAYKSHMKAKEAILGGKFKDEIVPVPVVEKIFDGKKVIEKTEMFEVDEGPRFDTTLEALARLKPVFRQGGTVTAGNSSQTSDGAAAALLMSAEKAEELGLKPIAVFRSFAVGGVEPEIMGIGPVVAIPKALKLAGITLDQVDVFELNEAFAAQALAVIKTLEIDPAKVNPNGGAIALGHPLGCTGAKLTATLLSEMQRRRAKYGVVSMCIGGGMGAAGVFELI

SEQ ID NO: 33240 - protein, 616 aa, Treponema denticola ATCC 35405
MIKQAVILAGGLGSRLKDKTKTMPKGFLEIGGTAIVEQSVQKLLAHGIEKIVIGTGHCNEYYDNLAKKYPAIITVKNENYANTGSMGTLEVCASFVNESFLLLESDLIYDSAGLFSLINDERKNLILASGATKSGDEVYLEADEKNCLTGLSKNRDALKNIFGELVGITKLTKSTLDKMCAYAKIHHSDLPKMEYEHALLEAAKTIPVAIKRIEYFVWREIDNEDHLEMAVKNIYPHIVENEKLRAVRREVLLNPGPATTTDSVKYAQVSADICPREKAFGDLMQWLCDELKLFALASETNPDEYETVMFGCSGTGADEVMVSSCVPDTGRLLVIDNGSYGARMAKIADIYKIPMDIFKSSTYEPLDLQKLEAEFATKKYTHLACVYHETTTGLLNPLHIICPMAKKYGMVTIVDAVSAYCGMPMDLKSLGIDFMASTSNKNIQGMAGVGFVICNKAELEKTKDYPMRNYYLNLYDQYAYFAKTHQTRFTPPVQTMYALRQAVLETKQETVQKRYERYTACWNILVAAIKKLGLKMLVKEEHQSHFITAILEPETPKYSFEALHDFAAEHSFTIYPGKLGNIDTFRIANIGDIQPEEMRRFTVKLKEYMNGIGVGV

SEQ ID NO: 33241 - protein, 292 aa, Brassica napus
MAANGSTQLSQKEADIKMMCAAEVHLGTKNCNYQMERYVFKRRNDGIYIFNLGKTWEKLMMAARVIVAIENPQDIIVQSARPYGQRAVLKFAQYTGANAIAGRHTPGTFTNQMQTSFSEPRLLILTDPRTDHQPIKEGALGNIPIIAFCDTDSPMRFVDIGIPANNKGKHSIGCLFWLLARMVLQMRGTIRPAQKWDVMVDLFFYREPEETKPEDEDEVAPQAEFGLPAPEYGGGDQWTTAAIPDAAWPGEAQAPISAAPAAGSWNDSAAPAAAEGGWDAAVPPTTAVTNWE

SEQ ID NO: 33242 - protein, 368 aa, Pseudomonas syringae pv. tomato str. DC3000
MTTLNSTPRADGFHMPAEWAPQTQVWMVWPERPDNWRLGGKPAQAAHVAIAKAIARFEPVTVAVSAAQYDNARARLDMPNIRVVEMSSNDAWVRDSGPTFVINDRGELRGVNWEFNAWGGFDGGLYAPWNLDSQVGSKVLEIERCPRYATQGFVLEGGSIHVDGEGTLITTEECLLNRNRNPHLTREQIEAVLSDYLAVDKIIWLPDGLFNDETDGHVDNFCCYIRPGEVLLAWTDDPEDPNYPRCHAALSILENTRDAQGRAFIVHKMPIPGPLFATEEECAGVDQVHGSQERNPSVRLAGSYVNFLIVNGGIIAPSFDDPMDEKAREILQKLFPEHEVVMAPGRELLLGGGNIHCLTQQQPAPFKA

SEQ ID NO: 33243 - protein, 335 aa, Arabidopsis thaliana
GSISQVATMATSSSTEKLPRVLIVKRPDAMAVLGDGFVASTKFEILKAFESPLPLPEFLAYHSDSISAIIAPVAAPVTADLIRILPNLRLVVTTSAGVDHVDLVECRRRGISVANAGSSFSEDVADTAVGLLIDVFRRISAANRFVKQRFWPLKGDYPLGSKLGRKRIGIVGLGSIGSKVATRLDAFGCQISYSSRNRKPYDVPYHYYMDIEEMAANSDALIICCELNEKTLRLINKDVLSALGKRGVIVNVARGAIIDEEEMVRCLREGEIGGAGLDVFEDEPNVPKELFELDNVVFSPHSAFMTLEGLEELGKVVVGNIEAFFSNKPLLTPVL

SEQ ID NO: 33244 - protein, 406 aa, Haemophilus influenzae 86-028NP
MRRAVITGFGIISSIGNNKEEVLASLKEGKSGIEVVPEFVEMNMRSHVAGTIKLNPSEHIDRKVFRFMGDAAAYAYLSMREAIEDAGLTEDQVSNDRTGLVIGAGTGSAHNQLVACDAVRGPRGVKAIGPYAVTKTMASSVSACLATPYKIRGVNYSMSSACATSAHCIGHAVELIQLGKQDIVFAGGAEELSWECATEFDAMGAVSTKYNETPEKASRAYDANRDGFVIAGGGAVVVVEELEHALARGAKIYAEIVGYGATSDGYDMVAPSGEGAERCMKQAMATVDTPIDYINVHGTSTPVGDVKELGAIKNVFGDKIPAISSTKSMTGHSLGAAGAHEAIYTLLMLDNDFIAPSINIETLDEAAEGCNIVTETKENAGLQTVMSNSFGFGGTNATLIFKRYNG

SEQ ID NO: 33245 - protein, 458 aa, Bacillus thuringiensis serovar konkukian str. 97-27
MYSMEQVVNLAKHRGFVFPGSEIYGGLANTWDYGPLGIELKNNVKKAWWKKFIQESPYNVGLDAAILMNPKTWIASGHVGNFNDPMIDCKKCKARHRADKLIEDALDAKGIEMVVDGLTFDQMADLMKEHEVKCPDCSSEEFTEIRQFNLMFKTFQGVTESSTNEIFLRPETAQGIFVNFKNVQRSMRKKLPFGIGQIGKSFRNEITPGNFTFRTREFEQMELEFFCKPGEDLEWFAFWRETCKNWLLSLGMTEESMRLRDHGEEELSHYSNATTDIEFKFPFGWGELWGVASRTDFDLKRHMEHSNEDFNYIDPQTNERYVPYCIEPSLGADRVTLAFLCDAYEEEQLENDSRTVLRFHPALAPYKAAILPLSKKLSEGATEVFAELAKDFMVDFDETGSIGKRYRRQDEIGTPFCITYDFDSVEDKAVTVRDRDTMEQVRMPISELKGFLEKKIQF

SEQ ID NO: 33246 - protein, 655 aa, Burkholderia vietnamiensis G4
MCGIDGFLNSVAFDEETARGTLARMTASLAHRGPDGQGMWVDPEAGIALGHRRLAIVDLSVQGRQPMASACGRYVLVFNGEIYNHRELRAELERTGRAPAWRGRSDSEVLVAAIAAWGVDATLRRATGMFAFALWNRASRVLTLARDRIGEKPLYYGRIGDALVFASELKALRGYPGFDGAVDRDALCLYLRQSSVPAPHTIYRGISKLPPGTFIQFEHARDTPRVRAYWALEQAIEAGRERPFDGNADDAVGQLDAVLRQAVARQMEADVPLGAFLSGGIDSSAIVALMQAQSAKPVDTFTIGFHEAGYDEAGYAKAVARHLGTRHTELYVTADHALAVVPKLPSIYDEPFSDASQIPTFLVSDLTRRHVKVSLSGDGGDELFGGYTRYFLTPRLWRKLHRVPAAVRARIAAALHALRPDHADQLAAVAQGAWGGVDARDGASRIGDRLHKLGHVMTAESRIGLYRLLMSSVHHPERLALAGQEPPTPLDTVSAWPAHLSFAEQAMAIDTLTYLPTDILAKVDRAAMAVGLETRMPFLDHHVVEFAWRLPAAVRLPQGQPKALLRRLLDQYVPRALIDRPKQGFCAPVDHWLRGALRDWAEALLEPSRLRAEGFFDAAAVERLWRQHLTGRMNWQHQLWTVLMFQAWLEGQRAA

SEQ ID NO: 33247 - protein, 390 aa, Arabidopsis thaliana
DCHMLLSFFISTFLITVVTSQTRCRNFKSIISFGDSITDTGNLLGLSSPNDLPESAFPPYGETFFHHPSGRFSDGRLIIDFIAEFLGIPHVPPFYGSKNGNFEKGVNFAVGGATALECSVLEEKGTHCSQSNISLGNQLKSFKESLPYLCGSSSPDCRDMIENAFILIGEIGGNDYNFPLFDRKNIEEVKELVPLVITTISSAISELVDMGARTFLVPGNFPLGCSVAYLTLYETPNKEEYNPLTGCLTWLNDFSVYHNEQLQAELKRLRNLYPHVNIIYGDYYNTLLRLMQEPSKFGLMDRPLPACCGLGGPYNFTFSIKCGSKGVEYCSDPSKYVNWDGIHMTEAAYKWISEGVLTGPYAIPPFNWSCLDSKIKNNESLHTQYSLMNS

SEQ ID NO: 33248 - protein, 505 aa, Helicobacter pylori 26695
MVNKDVKQTTAFGAPVWDDNNVITAGPRGPVLLQSTWFLEKLAAFDRERIPERVVHAKGSGAYGTFTVTKDITKYTKAKIFSKVGKKTECFFRFSTVAGERGSADAVRDPRGFAMKYYTEEGNWDLVGNNTPVFFIRDAIKFPDFIHTQKRDPQTNLPNHDMVWDFWSNVPESLYQVTWVMSDRGIPKSFRHMDGFGSHTFSLINAKGERFWVKFHFHTMQGVKHLTNEEAAEVRKYDPDSNQRDLFNAIARGDFPKWKLSIQVMPEEDAKKYRFHPFDVTKIWYLQDYPLMEVGIVELNKNPENYFAEVEQAAFSPANVVPGIGYSPDRMLQGRLFSYGDTHRYRLGVNYPQIPVNKPRCPFHSSSRDGYMQNGYYGSLQNYTPSSLPGYKEDKSARDPKFNLAHIEKEFEVWNWDYRADDSDYYTQPGDYYRSLPADEKERLHDTIGESLAHVTHKEIVDKQLEHFKKADPKYAEGVKKALEKHQKMMKDMHGKDMHHTKKKK

SEQ ID NO: 33249 - protein, 190 aa, Flaveria linearis
NPTLYGELAKGQSPKFLVFACSDSRVCPSHILDFQPGEAFVVRNIANMVPPYDTIKHSGAGAAIEYAVLHLKVENIVVIGHSCCGGIKGLMSIPDDGTPASDFIEQWVKLGLPAKSKVKANCNNLEFADLCTKCEKEAVNVSLGNLLTYPFVRDALVNKKLSLKGAHYDFVNGAFDLWNLDFGISPSLLQ

SEQ ID NO: 33250 - protein, 1174 aa, Nocardia sp. NRRL 5646
MAVDSPDERLQRRIAQLFAEDEQVKAARPLEAVSAAVSAPGMRLAQIAATVMAGYADRPAAGQRAFELNTDDATGRTSLRLLPRFETITYRELWQRVGEVAAAWHHDPENPLRAGDFVALLGFTSIDYATLDLADIHLGAVTVPLQASAAVSQLIAILTETSPRLLASTPEHLDAAVECLLAGTTPERLVVFDYHPEDDDQRAAFESARRRLADAGSLVIVETLDAVRARGRDLPAAPLFVPDTDDDPLALLIYTSGSTGTPKGAMYTNRLAATMWQGNSMLQGNSQRVGINLNYMPMSHIAGRISLFGVLARGGTAYFAAKSDMSTLFEDIGLVRPTEIFFVPRVCDMVFQRYQSELDRRSVAGADLDTLDREVKADLRQNYLGGRFLVAVVGSAPLAAEMKTFMESVLDLPLHDGYGSTEAGASVLLDNQIQRPPVLDYKLVDVPELGYFRTDRPHPRGELLLKAETTIPGYYKRPEVTAEIFDEDGFYKTGDIVAELEHDRLVYVDRRNNVLKLSQGEFVTVAHLEAVFASSPLIRQIFIYGSSERSYLLAVIVPTDDALRGRDTATLKSALAESIQRIAKDANLQPYEIPRDFLIETEPFTIANGLLSGIAKLLRPNLKERYGAQLEQMYTDLATGQADELLALRREAADLPVLETVSRAAKAMLGVASADMRPDAHFTDLGGDSLSALSFSNLLHEIFGVEVPVGVVVSPANELRDLANYIEAERNSGAKRPTFTSVHGGGSEIRAADLTLDKFIDARTLAAADSIPHAPVPAQTVLLTGANGYLGRFLCLEWLERLDKTGGTLICVVRGSDAAAARKRLDSAFDSGDPGLLEHYQQLAARTLEVLAGDIGDPNLGLDDATWQRLAETVDLIVHPAALVNHVLPYTQLFGPNVVGTAEIVRLAITARRKPVTYLSTVGVADQVDPAEYQEDSDVREMSAVRVVRESYANGYGNSKWAGEVLLREAHDLCGLPVAVFRSDMILAHSRYAGQLNVQDVFTRLILSLVATGIAPYSFYRTDADGNRQRAHYDGLPADFTAAAITALGIQATEGFRTYDVLNPYDDGISLDEFVDWLVESGHPIQRITDYSDWFHRFETAIRALPEKQRQASVLPLLDAYRNPCPAVRGAILPAKEFQAAVQTAKIGPEQDIPHLSAPLIDKYVSDLELLQLL

SEQ ID NO: 33251 - protein, 119 aa, Arabidopsis thaliana
  misc_feature (10)..(10): Xaa can be any naturally occurring amino acid
  misc_feature (23)..(23): Xaa can be any naturally occurring amino acid
  misc_feature (25)..(25): Xaa can be any naturally occurring amino acid
  misc_feature (35)..(35): Xaa can be any naturally occurring amino acid
  misc_feature (37)..(37): Xaa can be any naturally occurring amino acid
  misc_feature (39)..(39): Xaa can be any naturally occurring amino acid
  misc_feature (54)..(54): Xaa can be any naturally occurring amino acid
  misc_feature (74)..(74): Xaa can be any naturally occurring amino acid
  misc_feature (79)..(80): Xaa can be any naturally occurring amino acid
  misc_feature (98)..(98): Xaa can be any naturally occurring amino acid
  misc_feature (102)..(103): Xaa can be any naturally occurring amino acid
  misc_feature (106)..(107): Xaa can be any naturally occurring amino acid
  misc_feature (112)..(112): Xaa can be any naturally occurring amino acid
  misc_feature (114)..(116): Xaa can be any naturally occurring amino acid
  misc_feature (118)..(118): Xaa can be any naturally occurring amino acid
  unsure (1)..(119): unsure at all Xaa locations
MAMIDEPLYXIAVLIDELKNEGXPXRLNSIRRLSXIXRXLGEERTRKELIPFLXENNDDEDEVLLAMAEELGVXIPYVXXVEHAHVLLPPLETLCTVXETCXXDKXXESLCXIXXXMXE

SEQ ID NO: 33252 - protein, 330 aa, Flaveria brownii
MSTASAFATNVPSFVNASSLKKSSTSSARSGVLSAKFTCNSSSSSSSATPPSLIRNEPVFAAPAPIITPNWTEDGNESYEEAIDALKKMLIEKGELEPVAAARIDQITAQAAAPDTKAPFDPVERIKSGFVKFKTEKFVTNPALYDELAKGQSPKFMVFACSDSRVCPSHVLDFQPGEAFVVRNVANMVPPFDKTKYSGVGAAVEYAVLHLKVQEIFVIGHSRCGGIKGLMTFPDEGPHSTDFIEDWVKVCLPAKSKVVAEHNGTHLDDQCVLCEKEAVNVSLGNLLTYPFVRDGLRNNTLALKGGHYDFVNGTFELWALDFGLSSPTSV

SEQ ID NO: 33253 - protein, 794 aa, Streptomyces coelicolor A3(2)
MAELPTSHLAAAVLTDGNRALVAVIAVVALAALVLAGVLVRQVLAAGEGTDSMKKIAAAVQEGANAYLARQLRTLGVFAVVVFFLLMLLPADDWNQRAGRSIFFLIGAAFSAATGYIGMWLAVRSNVRVAAAAREATPAPGEPEKDLALVSHKATKIAFRTGGVVGMFTVGLGLLGACCVVLVYAADAPKVLEGFGLGAALIAMFMRVGGGIFTKAADVGADLVGKVEQGIPEDDPRNAATIADNVGDNVGDCAGMAADLFESYAVTLVAALILGKVAFGDFGLAFPLLVPAIGVLTAMIGIFAVAPRRSDRSGMSAINRGFFISAVISLVLVAVAVFVYLPGKYADLDGVTDAAIAGKSGDPRILALVAVAIGIVLAALIQQLTGYFTETTRRPVKDIGKSSLTGPATVVLAGISLGLESAVYTALLIGLGVYGAFLLGGTSIMLALFAVALAGTGLLTTVGVIVAMDTFGPVSDNAQGIAEMSGDVEGAGAQVLTDLDAVGNTTKAITKGIAIATAVLAAAALFGSYRDAITTGAADVGEKLSGEGAPMTLMMDISQPNNLVGLIAGAAVVFLFSGLAINAVSRSAGAVVYEVRRQFRERPGIMDYSEKPEYGKVVDICTRDALRELATPGLLAVMAPIFIGFTLGVGALGAFLAGAIGAGTLMAVFLANSGGSWDNAKKLVEDGHHGGKGSEAHAATVIGDTVGDPFKDTAGPAINPLLKVMNLVALLIAPAVIKFSYGADKSVVVRVLIAVVAFAVIAAAVYVSKRRGIAMGDEDDADPEPKSADPAVVS

SEQ ID NO: 33254 - protein, 329 aa, Flaveria pringlei
MSTASAFAINAPSFVNASSLKKSSSSARSGVLSARFTCNSSSSSSSATPPSLIRNEPVFAAPAPIITPNWTEDGNESYEEAIDALKKMLIEKGELEPVAAARIDQITAQAAAPDTKAPFDPVERIKSGFVKFKTEKFVTNPVLYDELAKGQSPKFMVFACSDSRVCPSHVLDFQPGEAFVVRNVANMVPPFDKTKYSGVGAAVEYAVLHLKVQEIFVIGHSRCGGIKGLMTFPDEGPHSTDFIEDWVKVCLPAKSKVVAEHNGTHLDDQCVLCEKEAVNVSLGNLLTYPFVRDGLRNNTLALKGGHYDFVNGTFELWALDFGLSSPTSV

SEQ ID NO: 33255 - protein, 145 aa, Bacillus thuringiensis serovar konkukian str. 97-27
MRNLFPEITKRQNGIFDFGPSLLEGMTDAFFKPMNMDTFKVDVHEQSDKYTVKADLPGFQKENIQVEFEQDVLTIQATNHNEVEEKNENGTYIRKERSIGSVTRRFSFKQVEEENVRANYKDGVLTIELPKLKEEKNSKTTINIE

SEQ ID NO: 33256 - protein, 170 aa, Nicotiana tabacum
MASSSGTSSGSSLFLQNSGSEEDLQQLVDQRKRKRMISNRESARRSRMRKQKHLDDLMAQVATLRKENNQILTSMNVTTQHYLNVEAENSILRAQLAELNHRLESLNEIIAFLDANNNCNGLANMDHNQEEPYSFNFAQNEPMVDGFNMTNSWNYLCANQPIMTADVLQY

SEQ ID NO: 33257 - protein, 449 aa, Pseudomonas sp. ND6
MSNAMRTIDVSALIDGARFNAFHARVLVWCALIIIFDGYDLVIYGVVLPSLMTEWGLSSLQAGALGSCALVGMMLGALFFGSISDRIGRRKTIVICVLLFSGVTALNGFASSPEIFALCRFIAGLGIGGVMPNVVALMNEYAPKKSRSTLVAIMFSGYSLGGMLSAGLGMLFIPQWGWQAVFYVALIPLLMLPLLLRQLPESMDFLLRSGQIEQAKSVLALTTPSYLPEADDQLVHAVSRGATASIGELFRDGRLISTLALWVAFFCCLLMVYALSSWLPKIMSSAGYGLNSSLAFLLVLNGGAILGAIAGGWLGDRVGIARVLLLFFACGALSLSLLAIKAPLAVLYLLIAIAGACTIGTQILANACAVQYYPPHVRSTGLGWAMGIGRTGAIIGPVLGGVLHGSSLPLQASFLFFAIPGVIGAAAILVFLKRRKEIPPVQISPQTVS

SEQ ID NO: 33258 - protein, 144 aa, Nicotiana tabacum
MALTQQPASSGSDGQRYATNDDRKRKRMESNRESARRSRMRKQQHLEELMSQMTQLQNQNVLWREKIDAVGRNYLTLDAENNVLRAQMAELTERLDSLNSLTRFWADANGLAVDIPEIPDTLLEPWQLPCPIQPITASADMFKF

SEQ ID NO: 33259 - protein, 550 aa, Bordetella pertussis Tohama I
MTKYVFVTGGVVSSLGKGIAAASLAAILESRGLQVTLLKLDPYINVDPGTMSPFQHGEVFVTEDGAETDLDLGHYERFISARMRKVNNFTTGQIYESVLRKERRGDYLGKTVQVIPHITNEIQDFVARGAEAAWNGATDVAIVEIGGTVGDIESLPFLEAARQMSLRMGRNNAAFVHLTLVPYIASAGELKTKPTQHSVQKLREIGIYPNVLLCRADRRIPDDERAKISMFSNVPLDAVISVWDVDSIYKIPAMLHKQGVDNIVCEALGLTPPPADLSMWDNLVDALEHPQDSVTIGMVGKYVDLTESYKSLSEALVHAGIHTRSKVNIEYIDSEDIETRGTDQLKHLDAILVPGGFGKRGTEGKIAAIRYARENGVPYLGICLGMQLAVIEFARHVAGLGGANSTEFDPAAPHPVVALITEWMDREGRVERRDNSSDLGGTMRKGAQRCPIRPGTRAQSIYGDDVNERHRHRYEVNNVYVPRLEDAGMVISARTPTENLPEMMELPSHPWFVGVQFHPEFTSTPRDGHPLFSSYIRAALEHKAQRAKEA

SEQ ID NO: 33260 - protein, 138 aa, Nicotiana tabacum
MSALRQSASSSASEDDQRYAGMDEKKRKRMISNRESARRSRMKKQKLLQDLTGEVSRLQVANKNILAKIEETTERYTVCTAQNNVLKAHAMELNDRLRYLNDVINDTGLAVDAADPLLKPLQIPRPMQPIASSGLFKF

SEQ ID NO: 33261 - protein, 129 aa, Methanocaldococcus jannaschii DSM 2661
MAEQKKEKWGIVHIYSSYNNTIIHATDITGAETIARVSGGRVTRNQRDEGSPYAAMQAAFKLAEVLKERGIENIHIKVRAPGGSGQKNPGPGAQAAIRALARAGLRIGRIEDVTPVPHDGTTPKKRFKK

SEQ ID NO: 33262 - protein, 578 aa, Clostridium magnum
MAKIVVMPKLGLTMTEGTLVTWKKAEGDQVKVGEILFEVSTDKLTNEVESSDEGIVRKLLVNEGDVVECLNPVAIIGSADEDISSLLNGSSEGSGSAEQSDTKAPKKEVEAVKGGDNLVVIGGGPGGYVAAIRAAQLGAKVTLIEKESLGGTCLNVGCIPTKVLLHSSQLLTEMKEGDKLGIDIEGSIVVNWKHIQKRKKIVIKKLVSGVSGLLTCNKVKVIKGTAKFESKDTILVTKEDGVAEKVNFDNAIIATGSMPFIPEIEGNKLSGVIDSTGALSLESNPESIAIIGGGVIGVEFASIFNSLGCKVSIIEMLPHILPPMDREISEIAKAKLIRDGININNNCKVTRIEQGEDGLKVSFIGDKGEESIDVEKVLIAVGRRSNIEGLDVEKIGVKTEGGSIIVNDKMETNVEGIYAIGDCTGKIMLAHVASDQGVVAAENIMGQNKKMDYKTVPACVYTKPELASVGLTEEQAKEKGIDYKVGKFQLAANGKSLIMNETGGVIKIITDKKYEEILGVHILGPRATDLITEAALALRLEATLEEIITTVHAHPTVGEAMKEAALAVNNQAIHMMNK

SEQ ID NO: 33263 - protein, 204 aa, Cyanidium caldarium
GGIAEMSGAEPDVRRITDRLDECGNSTKAFTKGFAVGSAALAGYLLFSSFMEEMSAQLPGKMEFRTVDLAKPEVFTAGLLGAAVVFLFASLAMTAVGRAAQQVVGEVRRQFREHPGIMSGTEKPEYERCVALVATAALRQMVLPGLLPVLAPILIGVVFREIGTLTAQPLLGLECAAGLLMVATITGVLMALFMNNAGGAWDNA

SEQ ID NO: 33264 - protein, 490 aa, Aspergillus fumigatus
MPTLGGLLKKRRTKDSHTLSKELESSSSPAAAQTQTSPNSADHDHHYQHYDQTHHHQHSASSNPSNNSATPSAAQPHRSSNDNPNRSSGTDQKSEGQTASMQFAVTQPHPSTHHNPRLHHLQQQQQQPQQQSHTSRLHNILHPSHHASSQASTEGHAHSQQANQTEARTTKGKYSLDDFTIQRTLGTGSFGRVHLVQSKHNHRFYAIKVLKKAQVVKMKQVEHTNDERRMLNRVRHPFLITLWGTWQDARNLYMVMDFVEGGELFSLLRKSQRFPNPVAKFYAAEVTLALEYLHSQQIIYRDLKPENLLLDRHGHLKITDFGFAKEVPDITWTLCGTPDYLAPEVVSSKGYNKSVDWWSLGILIFEMLCGFTPFWDSGSPVKIYENILRGRVKYPPYLHPDAVDLLSQLITADLTKRLGNLHGGSEDVKNHPWFAEVTWDRLARKDIDALYVPPIREGQGDASQYDRYPEETEQYGQQGEDVHGHLFPDF

SEQ ID NO: 33265 - protein, 324 aa, Fusobacterium nucleatum subsp. nucleatum ATCC 25586
MQTILVTGGAGYIGSHAVVELLDNNYNVVVIDTLENGFKEFVDKRAKFYQGNVQDYELMSRIFQENKIEAVMHFAGYIRVPESVDDPNKYYLNNTYTTMCLIQSMVKHNIKNIIFSSTAAVYGEITEDNPIDEKHSTIPINPYGASKLMSERIIRDCAKAYGLNYSIFRYFNVAGAHEKYPIGQKGAGVTSLITLTLQAAKDSNRILEVFGDDFPTKDGTGIRDYIHVVDLVKAHVLSLKLLFKNESNIFNLGNGNGFSVLETVEAARKVTNKEIICKIAARRKGDPACVIASSEKAKKILGWKAQYTNVEKIIETGWHFVEKQ

SEQ ID NO: 33266 - protein, 1625 aa, Gloeobacter violaceus PCC 7421
MPMNPIEPVAIVGMAALFPKAATVGDFWQNIVDKVDAVSEAPASWARHYFDPNSKEQDRIYTSKGGFLGELAEFDPTEFGIMPNTLDAAEPDHFIALKLARDALADAGYLDRPFNRKKAGIILGHGVYVNRGHMAMLQQTLVLDQTMDTLRRVCPELGEEALAAVHRALRKSAPAFNAEVVPGMVPNVITGRIANRLDLMGPNYLVDAACASGLIVVELAMKELASGRCDLVLAGGVQASLPPQYNMAFCQLGALSRTNIRPFDRAADGNVMGEGCGILVLKRLADAELDGDRIYAVVRGVGSSSNGKALGMLAPRLEGEVLALEEAYSLTGIDPASVDLVEAHGTGIPVGDRTEMEALAQVYGAREGDLPRVGMGSVKSMIGHCIPASGAASFIKMALALYHKVLPPTLLDAVNPELGVEKTPFYLNNATRPWVSANQRPRRAGINAFGFGGINAHAILEEHTPTGPDTVLHRRWPSELVVFAADDRPGLIAKIERTLVVHPTLPLAQIACNQAAGTAGDYRLAVVAKDRADLHKKLRQAVEKLKEPGRVRLRGGVMYGEVTSEMADAQTAMIFPGEGCQYPNMLADLCLHFPVVREWFDFLDSALGADRPHPPSRYIFPPPTAIDEQVQEQTHRAIYQMELAVASVATASMALYELLQQFEIKADVMVGHSTGELTSLVASGVVRLTDRSQMMEKLLLLNGLYQRLEQMNIVPRGALLAVGAVKSDDLQQVLADLEGRLHLAMDNCPNQVVLFGDEQAVTQASERLQASGAICSRLPFDRAYHTPLFEEAGKVLRGFYDALDVGPGHTPLFSCASVGLFPDDPEGIRTLGERQWPSRVRFRETLETLYSQGVRHFVEVGPSGNLTGFVDDVLKGRDYKAVPVNSQRKSGLEQLQHLVGQLFVSGKHVSFAPFYSRRGLLPQPPAPGEAQPKRRGRVLDLTLPHMELPPDFVLPERQAPAVPVPAPKATTNGSHPPSLTSLTAAPAPVSTLAPSQEPPVAALATLERSVPIAEDPPNVPAPIQAPANGHDLGAAAVIVDHFALMQEFLASQDRMLSALLTGAPAQTAEMAVSVDPWPLLGQVIHLDVQSLVCRRRFTIGEDIFLRDHTLGGNPSSLQPALLPLPILPFTTSMELLAEAAVYLAGGNGVVTAMSEVRGFRWLALDRGVLTVEAVLRRLPDGRYQAQLFQLSDEDASVRLPAFEAVIAVAAAYTSSPAPRDLDPGALWPLSAELADDRLYSTGMFHGPRFQSLKHIHCCGERGIQADLGVWGTGDFFADGRPGVFQLEQSLIDAAGQLAAFWLSQDIDSPDFSMFPFQVRSFEQFGASPPAGTRLLCRCTSRYLSENATESHLDYIDGEGRVLYRLTGWQSRFFLSPPRYQDFRVAPQVNYLSEPWMQAETGLFVRRYENPDDYLEESWEIWKRVTAHLILNEAERTYWYALPEQGPRRRDWLLGRLAAKEALRQWTEAAYGLQLAPADFEILSNELGKPMVSCPALAAFGPLPEISIAHSEGHAVAAVAYGMALGIDLQRLERLGSTDWLTAAFDPSELALVSSPTELALIGLWSAKEAAAKAFGTGLEGEPRRWQVVARNPEGTEMTVVHGEHRFSVRLWYAPDEVFAVCGWQP

SEQ ID NO: 33267 - protein, 489 aa, Saccharomyces cerevisiae
MARGDGHLWTETYDSSTVAFMILGAALVFFMVPGLGFLYSGLARRKSALALIWVVIMATLVGILQWYFWGYSLAFSKTATNNKFIGNLDSFGFRNVYGKISDDSTYPELIYAIFQMMFMCVALSIIAGATAERGKLFPHMVFLFVFATLVYCPITYWIWAPGGWAYQWGVLDWAGGGNIEILSAVAGFVYSYFLGRRKENLLINFRPHNVSMVTLGTSILWFGWLLFNAASSLSPNMRSVYAFMNTCLSATTGGMTWCLLDYRSEKKWSTVGLCSGIICGLVAATPSSGCITLYGSLIQGIIAGVVCNFATKIKYYLKVDDSLDLLAEHGIAGVVGLIFNALFAADWVIGMDGTTKHKGGWLTHNWKQMYIQIAYIGASAGYCAVVTAIICFVLGKIPGVHLRVTEEAEALGLDEDQIGEFAYDYVEVRRDYYQWGVDTDALHTTCNGANSASETNPTEDSQNSSLSSATVSGQNEKSNNPKLHHAKEA

SEQ ID NO: 33268 - protein, 544 aa, Arabidopsis thaliana
MSMIDEPLYPIAVLIDELKNDDIQLRLNSIRRLSTIARALGEERTRKELIPFLSENNDDDDEVLLAMAEELGVFIPYVGGVEYAHVLLPPLETLSTVEETCVREKAVESLCRVGSQMRESDLVDHFISLVKRLAAGEWFTARVSACGVFHIAYPSAPDMLKTELRSLYTQLCQDDMPMVRRAAATNLGKFAATVESAHLKTDVMSMFEDLTQDDQDSVRLLAVEGCAALGKLLEPQDCVQHILPVIVNFSQDKSWRVRYMVANQLYELCEAVGPEPTRTELVPAYVRLLRDNEAEVRIAAAGKVTKFCRILNPEIAIQHILPCVKELSSDSSQHVRSALASVIMGMAPVLGKDATIEHLLPIFLSLLKDEFPDVRLNIISKLDQVNQVIGIDLLSQSLLPAIVELAEDRHWRVRLAIIEYIPLLASQLGVGFFDDKLGALCMQWLQDKVHSIRDAAANNLKRLAEEFGPEWAMQHIVPQVLEMVNNPHYLYRMTILRAVSLLAPVMGSEITCSKLLPVVMTASKDRQFQTSNSTSLKYFNPSFQ

SEQ ID NO: 33269 - protein, 308 aa, Clostridium tetani E88
MNVKKILVIGSFMMDLVAQTPRAPIEGETIIGKSFSQFTGGKGANQAVAAARLGAYVTMIGKLGKDSFGEAHIESLRREGINHDYVLFDDVESSGVGHITLEENGNNRIIVIPGANLKLTPKEVEDLEDNIKSSDIVILQLEIPFETVYKTIELAHKHGKTIILNPAPAAKLKEHFVELVDYIVPNESEASLLTGIKVNSIESARKAAKSLLNLGCKNVIITLGEKGVLLVNNNEEIFQESFKVKPVDTTAAGDSFIGAFAYSLANGLGNVKSLEFACAVGALTVTKIGAQPSLPKLTEVEMFMKENR

SEQ ID NO: 33270 - protein, 342 aa, Clostridium tetani E88
MKLRWGIIGASGIADECTIPGILKTNNSEVVAVMSRSIEKAEKIREKYNIKKVYSNVEDLLNDKEVDAVYIATPVFDHKNSVILSAKAKKHIFLEKPMGLTTEECEEMIKVTKENDVKLGIAFMMRFGEHHRKVRKLLKENIIGDIINTRIQYSWWYPDDNVWRLDPKLSGGGTVVDLGSHCIDLIQYLLDTKIKTVSAMLGTKTFNYEVEDSAQIMCEMENGVYGAFNFHFNIPNSISNNTMEIYGTKGSIVCYDTIGREDVGKVLIKLSGENGEIDFSDYTLEELSINPVDRYEKEIQAFSDAVINNEELPVSGEAGLNVVRITSAIYKSYKNKRFVNVY

SEQ ID NO: 33271 - protein, 424 aa, Triticum aestivum
  misc_feature (314)..(314): Xaa can be any naturally occurring amino acid
  misc_feature (323)..(323): Xaa can be any naturally occurring amino acid
  misc_feature (359)..(359): Xaa can be any naturally occurring amino acid
  misc_feature (395)..(395): Xaa can be any naturally occurring amino acid
  misc_feature (401)..(401): Xaa can be any naturally occurring amino acid
  misc_feature (404)..(404): Xaa can be any naturally occurring amino acid
  unsure (1)..(424): unsure at all Xaa locations
MVGRSSLPDGALFLGLDSSTQSVKATVLSNELIIVASETVNFDSELPHYKTEGGVYRDPTDDGRIYSPTIMWVEALELLLEKLKPKINFSKVVAVSGSGQQHGSVYWKKGSQAVLSSLDPGKSLASQLKDAFSTMDSPIWMDSSTTKQCREIENAVGGALELSKLTGSRAYERFTGPQIRKIYQTAPHIYENTERISLVSSFMASILAGCYASIDETDGAGMNLMDINKRTWSKAVLEATAPDLEQKLGNLAPAYAAAGRISSYFVERHQFDKNCLVIQWSGDNPNSLAGLTLNTPGDLAISLGTSDTVFGITXAEAKPSLEXGHVFPNPVEPDGYMVMLCYKNGSLTREDVRNQCAEXSLDVFNNYIEKTPPLNDWKLGFYYKDHEILPSLPGXFHRYIXKNXNDALFDNLTEHEGEENQSRS

SEQ ID NO: 33272 - protein, 499 aa, Arabidopsis thaliana
MATRLLRTNFIRRSYRLPAFSPVGPPTVTASTAVVPEILSFGQQAPEPPLHHPKPTEQSHDGLDLSDQARLFSSIPTSDLLRSTAVLHAAAIGPMVDLGTWVMSSKLMDASVTRGMVLGLVKSTFYDHFCAGEDADAAAERVRSVYEATGLKGMLVYGVEHADDAVSCDDNMQQFIRTIEAAKSLPTSHFSSVVVKITAICPISLLKRVSDLLRWEYKSPNFKLSWKLKSFPVFSESSPLYHTNSEPEPLTAEEERELEAAHGRIQEICRKCQESNVPLLIDAEDTILQPAIDYMAYSSAIMFNADKDRPIVYNTIQAYLRDAGERLHLAVQNAEKENVPMGFKLVRGAYMSSEASLADSLGCKSPVHDTIQDTHSCYNDCMTFLMEKASNGSGFGVVLATHNADSGRLASRKASDLGIDKQNGRIEFAQLYGMSDALSFGLKRAGFNVSKYMPFGPVATAIPYLLRRAYENRGMMATGAHDRQLMRMELKRRLIAGIA

SEQ ID NO: 33273 - protein, 421 aa, Peptoniphilus asaccharolyticus
MTDTLNPLVAAQEKVRIACEKLGCDPAVYELLKEPQRVIEISIPVKMDDGTVKVFKGWRSAHSSAVGPSKGGVRFHPNVNMDEVKALSLWMTFKGGALGLPYGGGKGGICVDPAELSERELEQLSRGWVRGLYKYLGDRIDIPAPDVNTNGQIMSWFVDEYVKLNGERMDIGTFTGKPVAFGGSEGRNEATGFGVAVVVRESAKRFGIKMEDAKIAVQGFGNVGTFTVKNIERQGGKVCAIAEWDRNEGNYALYNENGIDFKELLAYKEANKTLIGFPGAERITDEEFWTKEYDIIVPAALENVITGERAKTINAKLVCEAANGPTTPEGDKVLTERGINLTPDILTNSGGVLVSYYEWVQNQYGYYWTEAEVEEKQEADMMKAIKGVFAVADEYNVTLREAVYMYAIKSIDVAMKLRGWY

SEQ ID NO: 33274 - protein, 1008 aa, Burkholderia sp. 383
MKSSGSARTARRNAALSSSDASTDTVATAANGRAKTATKPKDPIRQTKRTAKAAGPAARTAARTAAAPKSGTRTREDKDGPLFDDIRFLGRLLGDVVREQEGDTVFDVVETIRQTAVKFRREDDSEAAQTLEKKLRKLTPEQTVSVVRAFSYFSHLANIAEDRHHNRRRRIHALAGSASQPGTVAYALEQLKTTGNASKRLLQRFFDDALIVPVLTAHPTEVQRKSILDAQHDIARLLAERDQELTGRERQYNESMLRARVTALWQTRMLRDARLTVGDEIENALSYYRATFLDELPALYGDIEAALAEHGLSARVPAFFQMGSWIGGDRDGNPNVTAPTLEEAINRQAAVILEHYLEQVHKLGAELSVSNLLVGANDAVKALAAASPDQSPHRVDEPYRRALIGIYTRLAASARVRLGEGTVPVRSAGRGAAPVRATPYADSEAFVADLKVLTASLDEHHGTSLAAPRLAPLVRAAEVFGFHLASIDLRQSSDIHEAVVAELFARAGVEADYAALAEEDKLRVLLAALADPRPLRSPYFEYSALAQSELGVFEKAREVRAQFGARAVRNYIISHTETVSDLVEVLLLQKETGLLDGALGVPGGDAKNSLMVIPLFETIPDLRDAARIMREYFALPGIDALIAHQGAEQEVMLGYSDSNKDGGFLTSNWELYRAELALVDLFRDRKITLRLFHGRGGTVGRGGGPTYQAILSQPPGTVNGQIRLTEQGEVIASKFANPEIGRRNLETVVAATLEATLLPQNNAPAQLPAFEAAMQTLSDSAMAAYRALVYETPGFTDYFFSSTPITEIAELNIGSRPASRKLQDPKQRKIEDLRAIPWGFSWGQCRLLLTGWYGFGSAVSAYLDGAQDDAERTKRVALLKKMNKTWPFFANLLSNMDMVLAKTDLAVASRYAQLVSDRKLRKHVFERIVAEWERTSQALAEITGHEGRLATNPLLARSIKNRFPYLDPLNHLQVELIKRHRAGDTNARLRRGIHLTINGIAAGLRNTG

SEQ ID NO: 33275 - protein, 448 aa, Streptococcus suis
MSNAKAYIQASFEAVKARNPHETEFLQAVEELFSTLEPVFEAHPEYIEENILARIVEPERIISFRVPWTDKDGNVQVNRGYRVQFNSAVGPYKGGLRFHPTVNQSILKFLGFEQIFKNVLTGLPIGGGKGGSDFDPKGKTDAEIMRFCQSFMTELQKHIGPSLDVPAGDIGVGGREIGYMYGQYKRLRQFDAGVLTGKPLGFGGSLIRPEATGYGLVYFTDNMLAANGKSFKDQTVLISGSGNVAQYAVQKATELGAKVISVSDSNGYIIDETGIDFDLLVDIKEKRRARLTEYAAEKSTAKYFKGSVWNYDGKADIALPCATQNEINGKQAAALVKNGVYCVAEGANMPSDLDAIKVYKENGVLYGLAKAANAGGVAVSALEMSQNSLRLSWTREEVDGRLKDIMANIFNTAKETAEKYDLGTDYLAGANIAAFEQIADSMIAQGLV

SEQ ID NO: 33276 - protein, 496 aa, Pastinaca sativa
MIGVWCMLLAYTLVSIGRIRAKATRKLPPGPFPLPIIGNIHKLGKHPHKSLANLAQVYGPIMRLKLGHMTTVVISSSTTARQVLRKQDIAFSNRALPNAVRALDHNKYSAVWLPVGSQWRGLRKIMSMNLFTANKLDANQHLRSQKVHDLIRYCEKCSQSGEAVDIGGAAFLTSLNLMSNTIFSKDMIDSYENSEAKVFRDLVWNIMVEIGKPNLVDYFPLLQWMDPQGIKRRLAYNFDTLIKLFDVMVDERLELNGPQNSRDVLDELLKLVNTDEIDKSHIQHMFLDLFGAGTDTSSSTVEWAMSEILRKPATVLVKAKAELDQVIGNGKIVEEADISKLDYLRCIVKETLRLHPPAPLLVPRQVQEEVELCGYTVPKNSQVLVNAWAIGRDPMLWENPLSFQPERFVDSEIDINGHGYELIPFGAGRRICPGMPLAMRMVPIMLGSLLNCFDWKLQGGIAPEDLNMEDKFGLTLAKLHPLRVVPTSRPTHLFAF

SEQ ID NO: 33277 - protein, 538 aa, Rhodopseudomonas palustris CGA009
MESVTSVSWWAAGVLYQIYPRSFQDSNSDGIGDLRGIIDRLGYLSDLGVDAIWLSPIFPSPMADFGYDVADYVGIDPIFGTMDDFDALVLTAHARGLKVILDLVPNHSSEQHPWFIESRSSRHNPKRDWYIWRDPAPGGGPPTNWLSEFGGSGWEYDDATGQYYYHAFLKQQPDLNWRNPEVRAAIYDAMRFWLRKGVDGFRVDVIWHLIKDDQFRDNPPNPDFRPGMPPHAALIPIYSADRPETLEVVAELRRVVDEFDHRLLIGEIYLPVERLVAYYGAELKGAQLPFNFALLSTPWRAREIATLIERYEQALPAGAWPNWVLGNHDRPRVASRVGPAQARVAAMLLLTLRGTPTMYYGDELGMEQVEIAPEDVQDPFEKNVPGIGVGRDGCRTPMQWDASDQAGFSDVRPWLPLAPNATQDNVANLRADAQSILNLYRALLRLRRALPQLALGAYQPLAAEGELLLYRRHHQGQSILVALNLGPDPISAASDAIGLDGEVLLSTMLDRAGERIGATLDLRGNEGIIVGRAPEDVV

SEQ ID NO: 33278 - protein, 692 aa, Bacteroides thetaiotaomicron
MNKHLHFLSLLWLSMLMAFMTACSDDKNITDPAPEPEPPVEGQWTALTASPDTWDETKRADISYQLLLYSFADSDGDGYGDLNGVTQKLDYLNQLGVKALWLSPIHPCMSYHGYDVTDYTKVNPQLGTESDFDRLVTEAHNRGIKIYLDYVMNHTGTAHPWFTEASSSSESPYRNYYSFSEDPKTDIAAGKIAMITQEGAAGYNAAEWFQVSDETAAVKGLLKFTLDWSNAPSPILVVSTGTKADEDNPDTGTDNAKYLYYGEDICKKFYDKGNNIYELTVDFESTWGLLIRTSNASFWPSGTKYGASSSSEKLALNKDFKLTNAGNPANIMFDSQQITYFHSHFCTDWFADLNYGPVDQAGESPAYQAIADAAKGWIARGVDGLRLDAVKHIYHSETSEENPRFLKMFYEDMNAYYKQKGHTDDFYMIGEVLSEYDKVAPYYKGLPALFEFSFWNRLEWGINNRTGCYFAKDILSYQQKYANYRSDYIEATKLSNHDEDRTSSKLGKSADKCKLAAAVLLTSAGHPYIYYGEELGLYGTKDNGDEYVRSPMLWGDSYTTNYTDKTDATVSKNVKTVAHQQADTHSLLNIYFSLTRLRNTYPALAEANMTKHSVYNESQEKDYKPIAAWYMTKDNEKLLVIHNFGGTAMQLPLTDKIEKVLFVNGETQQNTDSDSYTLKLGGYACVVFKLGN

SEQ ID NO: 33279 - protein, 348 aa, Clostridium perfringens str. 13
MKILKWLLIFIPISIIGEFMHFSPTLMFVLSALAIVPLAGLMGEATEEISFYTGPKLGGFLNATFGNATELIISFFALKDGLFDVVKASIAGSVIGNILLVLGASMLAGGLKYKTQSFNKKVMETSSSMLLFAVIGLTIPAIFMHTIKPEFLNTKYESLSVIVAVVMFAIYILSLIFSFFTHKDIYAVEQDEEDGEAKWSLKKAITVLVVATVIIAIESEFLVGAVEPMTETLGLSKLFVGIILIPIIGNAAEHSTAIIMAMKNKMDVSVEIAIGSSLQVILFVAPVLIFLSLIFKPMSIIFNAFELVALIVSVLIANRIVNDGESNWLEGVQLLAVYIIIAAMFMIV

SEQ ID NO: 33280 - protein, 205 aa, Oryza sativa
  misc_feature (191)..(191): Xaa can be any naturally occurring amino acid
  unsure (1)..(205): unsure at all Xaa locations
LNVAIRHNKSISRLSSLSFHTSSLVNSAAANTQQQQQSGPGHFGFYRQVELFYDRAAKILEEKLVADMTKTRLPDEEKLKKVRGILKIIKPCNHVLEIRFPIRRDNGELHMIEAYRAQHSQHRTPCKGGIRYSLDVNLDEVKALAALMTYKCACVDVPFGGGKAGVKINPKDWSEAELERITRRLTVELAXKGFIGPGIDVPAPD

SEQ ID NO: 33281 - protein, 210 aa, Papaver somniferum
MSIIPSFFSNQRSNVFDPFSLDIWDPFQGFPFSTGALTANWQGGSDTARETSQLANTRIDWKETPEAHVFRADLPGVTKEEVKVEVEEGRVLQISGERRSRESEEKNDKWHRVERSSGKFLRRFRLPENTKMDEVKATMENGVLTVCVPKVEQRRPEVKSIEISGASEGSTQVPMETPVLRLHKTRLLRDVAMTGNLQASYVVSCLVLFS

SEQ ID NO: 33282 - protein, 128 aa, Psychrobacter arcticus 273-4
MAYSDQVIDHYENPRNVGNLDKNAKNVGTGMVGAPACGDVMRLQIQVDDNGIIEDARFKTYGCGSAIASSSLVTEWLKGKSLDQAGEIKNSDIAEELALPPVKVHCSVLAEDAIKAAISDYKGKHIPA

SEQ ID NO: 33283 - protein, 461 aa, Pseudomonas aeruginosa UCBPP-PA14
MSSLQSPSDASARNDLVYGLDDRPSAPIALLAALQHLLAIIVPIVTPGLLICQALGVSPRDTNLIVSMSLVISGIATFVQCKRFGPFGAGLLIVQGTSFNFVGPLIAGGALMVKQGTPVESVMAAIFGVVIAGSFVEMGISRILPFVKRLITPLVTGIVVLMIGLTLIKVGLISMGGGFSAMSNGTFANGENLLLSGVVLGIIVVLNRIPVVWMRSCAIVIALAVGYALAGYLGRLDFTGMHQAELFQVPTPLHFGLDFSWPLFIPMLVIYLVTSLEAIGDVTATSKVSKQPVEGPLWMQRIKGGVLVNGANSFLAGIFNTFPSSVFAQNNGVIQLTGVASRYVGLWIAAMLVLLGLFPSVAGVIQAVPEPVLGGAAMVMFGAVAASGINILAGIQLDRRALLIIAVSLALGLGVSQVPEFLAHMPAALRNVLESGVATGGICALLLNWFLPESPVQKAGH

SEQ ID NO: 33284 - protein, 175 aa, Triticum aestivum
  misc_feature (132)..(132): Xaa can be any naturally occurring amino acid
  misc_feature (134)..(134): Xaa can be any naturally occurring amino acid
  unsure (1)..(175): unsure at all Xaa locations
MAPTVMASSGTSVAPFQGLNSTDGLPVSRRSNGASLGTVSNGGRIRCMQVWPIEGIKKFETLSYLRPIRTEALLKQVEYLIRSKWVPCLEFSKVGFIFREHNASPGYYDGRYWTMWKLPMFGCTDATQVINXCXEVKNEYPDAYVRIIGFDNMRQVQCVSFIAFKPPGCKESGKA

SEQ ID NO: 33285 - protein, 95 aa, Arabidopsis thaliana
  misc_feature (18)..(19): Xaa can be any naturally occurring amino acid
  misc_feature (22)..(22): Xaa can be any naturally occurring amino acid
  misc_feature (28)..(28): Xaa can be any naturally occurring amino acid
  misc_feature (30)..(30): Xaa can be any naturally occurring amino acid
  misc_feature (52)..(52): Xaa can be any naturally occurring amino acid
  unsure (1)..(95): unsure at all Xaa locations
PGPPFLTGAPKDLSSPGXXAIXPLGKGXPXPNYGSRGLVTADLDPGDIATAXKVYSDVVGHFSEPDIFVLAVNEHPQNPVTFMTKVEEAEDESNK

SEQ ID NO: 33286 - protein, 548 aa, Oleispira antarctica
MAAKDVLFGDSARAKMLVGVNILADAVRVTLGPKGRNVVIEKSFGAPIITKDGVSVAREIELKDKFENMGAQMVKEVASQANDQAGDGTTTATVLAQAIISEGLKSVAAGMNPMDLKRGIDKATAAVVAAIKEQAQPCLDTKAIAQVGTISANADETVGRLIAEAMEKVGKEGVITVEEGKGLEDELDVVEGMQFDRGYLSPYFINNQEKMTVEMENPLILLVDKKIDNLQELLPILENVAKSGRPLLIVAEDVEGQALATLVVNNLRGTFKVAAVKAPGFGDRRKAMLQDLAILTGGQVISEELGMSLETADPSSLGTASKVVIDKENTVIVDGAGTEASVNTRVDQIRAEIESSTSDYDIEKLQERVAKLAGGVAVIKVGAGSEMEMKEKKDRVDDALHATRAAVEEGVVAGGGVALIRALSSVTVVGDNEDQNVGIALALRAMEAPIRQIAGNAGAAGAAVVDKVKSGTGSFGFNASTGEYGDMIAMGILDPAKVTRSSLQAAASIAGLMITTEAMVADAPVEEGAGGMPDMGGMGGMGGMPGMM

SEQ ID NO: 33287 - protein, 155 aa, Laccaria bicolor
MSVFYYEPYYDFDRLLDGIFTPRTARNGVHKRALQSDATPEGAVRALKPRMDLHEDKEKNLVTATFEFPGSKKEDVHLEIHNGRLVVSVENKISEEHDESGYAVRERRYGKFSRTLQLPQGVKDDEIKAGMEDGVLTVTFPKSGAELAPKKISIS

SEQ ID NO: 33288 - protein, 592 aa, Bacillus thuringiensis serovar konkukian str. 97-27
MAETLAKRGPDDNKVWIKGNVAFGHKRLIVVDPEGGKQPMTCLKDEANYAICYNGELYNTEDIRKELLRRGYTFKGHSDTEVLLASYIEWKEECVDHLNGIYAFAVWDEQKEQVFIARDRLGVKPLFYKYDSGRLLFGSELKAILAHPDVKAEVTLEGLSEIFGLGPSRTPGHGIYAGIKELRPGHAMTFSKNGLCIWRYWNVESKKHEDSFEETVEKTRFLLQDAITRQLVSDVPLCTFLSGGVDSSAITAIAAKEYERSGKGQLHTYSVDYEDNDKYFKANAFQPNSDAPFIHLMTETFQTIHHRCVISNEQLAQYLTEAVLVRDLPGMADIDSSLLWFCREIKQDFVVGLSGECADEIFGGYPWFYREDDLQSSAFPWMRSTEAREQLLKKEWRNKLNLQQYVQQRYEESIQEVPILDGESPLEAKRRQLFYLNMVWFMTTLLDRKDRMSMGASLEVRVPFADHRLVEYAWNIPWEMKMYKNREKGLLRKALEGLLPNEILYRKKSPYPKTHNPHYTKAVTVWIQDLLTDKGSILHELFDKEQLSGLIESGGSAFQTPWYGQLMTGPQLLAHLAQIHVWFKEYGVNIKE

SEQ ID NO: 33289 - protein, 97 aa, Oleispira antarctica
MKIRPLHDRIVVRRKEEETATAGGIILPGAAAEKPNQGVVISVGTGRILDNGSVQALAVNEGDVVVFGKYSGQNTIDIDGEELLILNESDIYGVLEA

SEQ ID NO: 33290 - protein, 548 aa, Oleispira antarctica
MAAKDVLFGDSARAKMLVGVNILADAVRVTLGPKGRNVVIEKSFGAPIITKDGVSVAREIELKDKFENMGAQMVKEVASQANDQAGDGTTTATVLAQAIISEGLKSVAAGMNPMDLKRGIDKATAAVVAAIKEQAQPCLDTKAIAQVGTISANADETVGRLIAEAMEKVGKEGVITVEEGKGLEDELDVVEGMQFDRGYLSPYFINNQEKMTVEMENPLILLVDKKIDNLQELLPILENVAKSGRPLLIVAEDVEGQALATLVVNNLRGTFKVAAVKAPGFGDRRKAMLQDLAILTGGQVISEELGMSLETADPSSLGTASKVVIDKENTVIVDGAGTEASVNTRVDQIRAEIESSTSDYDIEKLQERVAKLAGGVAVIKVGAGSEMEMKEKKDRVDDALHATRAAVEEGVVAGGGVALIRALSSVTVVGDNEDQNVGIALALRAMEAPIRQIAGNAGAEGSVVVDTVKGGTGSFGFNASTGEYGDMIAMGILDPAKVTRSSLQAAASIAGLMITTEAMVADAPVEEGAGGMPDMGGMGGMGGMPGMM

SEQ ID NO: 33291 - protein, 441 aa, Arabidopsis thaliana
MNRRQQVKRRVGKYEVGRTIGEGTFAKVKFARNSETGEPVALKILDKEKVLKHKMAEQIRREIATMKLIKHPNVVQLYEVMASKTKIFIILEYVTGGELFDKIVNDGRMKEDEARRYFQQLIHAVDYCHSRGVYHRDLKPENLLLDSYGNLKISDFGLSALSQQVRDDGLLHTSCGTPNYVAPEVLNDRGYDGATADMWSCGVVLYVLLAGYLPFDDSNLMNLYKKISSGEFNCPPWLSLGAMKLITRILDPNPMTRVTPQEVFEDEWFKKDYKPPVFEERDDSNMDDIDAVFKDSEEHLVTEKREEQPAAINAFEIISMSRGLNLENLFDPEQEFKRETRITLRGGANEIIEKIEEAAKPLGFDVQKKNYKMRLENVKAGRKGNLNVATEIFQVAPSLHMVQVSKSKGDTLEFHKFYKKLSNSLEQVVWTNNEVKKETAK

SEQ ID NO: 33292 - protein, 387 aa, Prochlorococcus marinus str. MIT 9312
MAIQQKLSLMIPGPTPVPEKVLQALSKHPIGHRSKEFQDLVESTTKNLQWLHQTQNDVLTITGSGTAAMEAGIINTLSKGDKVICGENGKFGERWVKVAKEFGLEVIKIDSEWGTPLDPEEFKKVLEEDNQKEIKGVILTHSETSTGVINDLETISSYIREHNTALSIVDCVTSLGACNVPVDEWKLDIVASGSQKGYMIPPGLSFIAMSQKAWEAAEKSNLPKFYLNLKSYRKSLLSNSNPYTPAVNLVFALDEALTMMREEGLDNIFNRHNKHKLAMSNAVKALNLKLFADEKYLSPSITAIETGEMDAEEFRKTIKNNFDILLAGGQDHLKGKIFRVGHLGYVNDRDIITVVSAISNTLLELGKITAQQAGEALVVVSKYLDGN

SEQ ID NO: 33293 - protein, 229 aa, Haemophilus influenzae 86-028NP
MDKIKQLFANNYSWAQRMKEENSTYFKELADHQTPHYLWIGCSDSRVPAEKLTNLEPGELFVHRNVANQVIHTDFNCLSVVQYAVDVLKIEHIIICGHTNCGGIHAAMADKDLGLINNWLLHIRDIWFKHGHLLGKLSPEKRADMLTKINVAEQVYNLGRTSIVKSAWERGQKLSLHGWVYDVNDGFLVDQGVMATSRETLEISYRNAIARLSILDEENILKKDHLENT

SEQ ID NO: 33294 - protein, 422 aa, Saccharomyces cerevisiae
MRISILQLVPVVGYIGFALGELYKPKNSISCSPNNPCPAEWPCCSPYNECGAGPICVGGCNVRSSFDEESCAPIPALVASQKLEFVSTPKVPKFIVNYQPKPPIREGNGPNKANTKVGVVEGELNSKRIIHYAKFLVTPDSKEAEKMLEDFDFTHSGYTSIEASSGNIVLAMPKKTTGSLITSTRSFLYGKASVRMKTARSRGVVTAFDLTSAIGDEIDFEWLGGDLMTAQSNYYSQGHLDYTRMQRFPVGADTWATYHTYEIDWDPDRIIWYVDGKIARTVLKKDTWDPISKEYRYPQTPMRLEIAVWPGGSETNGPGTINWAGGLIDWENSPDIIEKGQFTAHVEQITVTPYQNKFTEQVQFCIKAKKKAPTFSQKDLSRVVVSYNRQDRLNHHDEGSLKWDCFVTPKINDWLSSWKRSK

SEQ ID NO: 33295 - protein, 535 aa, Carboxydothermus hydrogenoformans Z-2901
MTKFIFVTGGVVSSLGKGITAASLGRLLKSRGLKVAIQKFDPYINVDPGTMSPYQHGEVFVTDDGAETDLDLGHYERFIDINLTKNSNVTTGKVYWAVISKERRGDYLGGTVQVIPHITNEIKERILRVAKESNPDVVITEIGGTVGDIESLPFLEAIRQLKNDVGKDNVLYIHVTLVPTLRVTGELKTKPTQHSVKELRSIGIQPDIIVARSEQPLSREITEKIALFCDIDKNAVIQAVDASNIYEVPLKLKEEGLDDIVIKKLGLTCGEPDLSEWEQIVERYKNPKFEVTIGIVGKYVSLPDAYLSVAEALRHAGIYHETRVNIRWIDSEMLEKEPVEKYLSNLDGILVPGGFGDRGVEGKIKAIQYARENKVPYLGLCLGMQTAVIEFARNVAGLKDANSSEFKPDGPHSVIDLLPEQKEVEQLGGTMRLGLYPCKLVPGTKAHAAYGEEIIYERHRHRYEFNNEYRELLTGLGLVISGTSPDGRLVEIIELSDHPWFVATQFHPEFKSRPNRPHPLFREFIGASLKTNKLF

SEQ ID NO: 33296 - protein, 258 aa, Arabidopsis thaliana
MATESYEAAIKGLNDLLSTKADLGNVAAAKIKALTAELKELDSSNSDAIERIKTGFTQFKTEKYLKNSTLFNHLAKTQTPKFLVFACSDSRVCPSHILNFQPGEAFVVRNIANMVPPFDQKRHSGVGAAVEYAVVHLKVENILVIGHSCCGGIKGLMSIEDDAAPTQSDFIENWVKIGASARNKIKEEHKDLSYDDQCNKCEKEAVNVSLGNLLSYPFVRAEVVKNTLAIRGGHYNFVKGTFDLWELDFNTTPAFAFS

SEQ ID NO: 33297 - protein, 498 aa, Triticum aestivum
  misc_feature (470)..(470): Xaa can be any naturally occurring amino acid
  unsure (1)..(498): unsure at all Xaa locations
MWKQFLSKLPRTKSSGGGGGDSGQCSGGGNGNPIQRTSSVPAGGGGRSASTIKRMSSAVFPSSVVAGIEPLVAFKDVPSSQRHNLFVSKLGLCCAVFDFSDPAKSSAEKDIKRQTLLDLIDFVDSTTGRYPEAVIAACSRMLAVNLIRVFPPSYRSGGSSSGGGGEGDEDEPMFDPAWCHLQLVYELLLKFIGSNSLDAKIGKKYFDHSFIVRLLNLLDSEDPRERDSLKTILHRIYGKFMVHRPFIRKAVSNIFYHFVFETQRHNGIAELLEVFGSIISGFALPLKEEHKIFLWRVLIPLHKPKSVGVYLQQLTYCVTQFLEKDPKLAGSIIIGLLRYWPVTNSQKEVMFLSEIEEILEATSMVEFQKCMVPLFRRIAQCINSSHFQVAERALFMWNNDHIISLVAQNRQVIMPIIVPALEQNGQNHWNHAVLNLTANVMKMFSEMDEELFSACLTKCKEDEENQASMXEKRRLKWAKLESAAALQPVTGHTAVLVG

SEQ ID NO: 33298 - protein, 853 aa, Ipomoea trifida
MRNAAEDHRYPLWFFLISQIFIGNLAVALAVDSITPTQPLAGNRTLVSSDGLFELGFFTPNGSDQSYVGIWYKEIEPKTVVWVGNRDGASRGSAGILKIGEDGNIHLVDGGGNFIWSPTNQSAARNTVAQLLDSGNFVLRREDDENPENYLWQSFDYPTDTLLPGMKLGWDSKTGLNRYISAWKSLNDPGEGPISFKLDINGLPEIFLRNRDKIVYRSGPWNGVRFSGVPEMKPTATITFSFVMTKNERYYSFELHNKTLYSRLLVTRNGNLERYAWIPTSKIWSKFWYAPKDQCDSYKECGTFGFCDTNMSPVCQCLVGFRPKSPQAWDLRDGSDGCVRYHELECRKDGFLTMNFMKLPDTSSSFVDTTMNLDECMKMCKNNCSCTAYTNSNISNGGSGCVIWTTELLDAAVRGGRRWPSCLHPRSASDVAQGGDSGDASGRTKRIIIACGIAVGVGILLFALSALFILKRRQSKRALGKNTELRGFRDRSQDLLMNAAVIPSKREYSGETMTDEFELPLFDFSTIVVATDNFADVNKLGQGGFGCVYKGMVEGEEIAVKRLSKNSGQGVEEFKNELRLIARLQHRNLVRLLGCCVDMEEKILIYEYMENKSLDSTLFNKQRSSLLNWQTRFNIICGIARGLLYLHQDSRFRIIHRDLKASNILLDKEMNPKISDFGMARIFGGDETDANNTKRVVGTYGYMSPEYAMDGLFSVKSDVFSFGVLVLEIVTGKKNRGFYNQNNQQNLLGHAWRLWRERRGSELLDSAIGESYSLCEVMRCIQVGLLCVQEQAEDRPNMATVVLMLGSESATLPQPKHPGFCLGSRPADMDSSTSNCDESCTVNQVTVTMLDGR

SEQ ID NO: 33299 - protein, 2306 aa, Haloarcula marismortui ATCC 43049
MNGSARGGLCPDPDDDEGLIVSDSDGMIVDVTEPLPRVTGYSKSELLGMETAALFWLRDGDNHSGHTRAPVSETEGRSHGLLECADGSRITVEQRSYTVRPEAETHVCTTVLFPGDGEAAASATSRDEPPMSTVDALSRLQRTAMDDDSVEDTVERLLALGCEYLGASAGAVARVDDDTYVVEHTTGETDVYEQGRAVPFEETIIDEHVTGGASERRAFTVAKGQRESPDSDVRGATMCVPVIVGDDNYGVVEFTGPATRERPFGQREREFVELLAQWLGNELGRRRRVEDLERYESIVEAVDDPMYALDTDGCFTFVNDAAKREFGYGEEIIGEHVSIGMEAADIERIQGQIKKLLGTDERSATAEFELQVEDGERRIVENRLALIGDDEFRGTAGVLRDVTARQERKRELEQYETVAQTASDVIITIDTDSVVQNVNPAVSAVFGYEPEELIGQPMTALIPERLRAGHAAGISRYLSTGERALDWEYIEIPGCRADGTEVPLGVSFSEYEFQGEQYFTGIIRDISERKESERELESFQRAIEEAADGVAILADGEYEYVDQTHVDMYGFDEKDQLLGESWRKLYDDEETARLEAEAFPALEADGHWQGMVTGTRPDESTFPAELSLTIIDDGRLVCTVRDETERKARERELALKNRAMDEATVGIQITDPTQADNPLVYVNDGFERMTGYTAEDALGRNPRFLQGADTDPEQVARLREAIDADEPVSVELKNYRKDGTPYWARLSITPVTGENGTVTNYVGIQQDVTERRERKRQADARVDFLERMYEVTTDPETGFEEKISGLLEAGCEHLDLSYGYLSRIDMDDDPTPGIHVISTVGSHERIQPGESGLLSESYCHRTIDHEGALALTDAAESELISDVAYETFGLDTYIGGNVVAGDELYGTLCFASNESRDALFGQFERSLVSLLGRWVGYEIEQRDAREKLRQQQERLELTLSGTNTGITEWNLETDALNSDDTFIDLVGQDVDTAEEYFECVIHPDDREHVRETLEANLAARAPTKIEYRVQTDDDDTRWLQSRAVPTYDDDGSQESVLAIVTDISTRKAKECERQRNERRFKSLFADPGMLVGLLDTDGTLLEINETALKYVEQTAAELAGQPFPETPWWSHSEALQQDLREWIRRAADGEYVEYSAIHPGPDGDRSHIEGVIRPVTDTDGTVTSLLISGRDVTERERQRSELRDRQRKLDLVLSNTDTTFAEFDFAAGSVQWDEAMGSSEFGSPETLDEFFETIHPDDRERIRSEIETAGDSGEPNSVEFRFVEPDGTVVWVVGQAVPVTDDEGNLTERVVGIATDITDLKQREQALEDSRQRYQTLLQAAPDPIFVADAETGEIVEANAAAEELRGQPRDDIIGRHQTELHPEEAGGLYEDVFEQAFDDASTITELPDGTQPELATPDGETVPIEISAAAVSLPDGPVLFGVFRDVSDREERKRELELKERAMDEANVGITISDPDREGNPLVYVNDGFVDQTGYSREEALGRNCRFLQRDDRDQSALDELRKAIASEEPSIVELRNYRKDGEQFWNRLSVTPIYDDVGTLANYIGIQQDVSDEKTREQRIRALHGTTRELLEADDKDEAVAKALDTLSEELDFQLAGVYLREGDELVHAGTVGATPDATPNRIERGRTPLWDAIESGESMMIEDYGSLWGDIERGDVSKGLYIPVGEQGVFVVGAADSTRLDESEQRLVEVLAGNFASVLDTLVRQDELFEERERFQLLTESIEEYAFLVVDDDGTIQTWNSGAETLFGYDADTAVGMSMGQLHRESDRESGVPDRLLQQARIGSESSHEGWRVRADGSEFYADVRYAKLETDDGESRGYAKIVRDMTDERRQRRRTERFVEESEDVVTVVDPDGTVTYASGSAKGVFGYEPDSLAGENIFDYLHPDGREHATETFFSCVENSESTTAECRLRAPDGGWFNVEGRCRNMLDDDAIDGILVYLRNVTEQRERARRFEGIFNQTYQFTGLLNPDGTVIEANDAALDFGGLDRDEIVGKHFADIPWWSHSDTERDNVRDALERAASGEFVRYETEVRGVDGLGTIDFSVKPVTDQDENVTLLVVEGRDITARQQRRQHLQVMQRVFRHNIRNDLTVLRGRTEALADESDPDKRAQMVATVEKTLDKWERMTTRMKQVREVLDSRQHHETATEVPVLVERAITETTAMYPDAAIETALDGVDSVTAPAVLSEAVTELLKNAVEVSAPESVELGCTRPNEDWLELTITDCGPGMPETEIDVIETGEETPLTHGQGLGLWMVRMVIKQVGGEVSADVTDNGTTVRLRIPL

SEQ ID NO: 33300 - protein, 433 aa, Neisseria gonorrhoeae FA 1090
MPSEHQHTSSLLNFDRTHLLHPYTSMTDPLPVYPVKRAEGVFIELADGTRLIDGMSSWWCAIHGYNHPVLNQAVENQMKQMAHVMFGGLTHEPAVELGKLLVGILPQGLDRIFYADSGSVSVEVALKMAVQYQQARGLTAKQNIATVRRGYHGDTWNAMSVCDPETGMHHIFGSALPQRYFVDNPKNRFDDEWDGADLQPVRALFEAHHVDIAAFILEPVVQGAGGMYFYHPQYLRGLRDLCDEFDIVLIFDEIATGFGRTGKMFACEHAEVVPDIMCIGKGLSGGYMTLAAAITSQKVTETISRGEAGVFMHGPTFMANPLACAVACASVKLLLSQDWQANIRRIESILKGRLKAAWDIRGVKDVRVLGAIGVIELEKGVDMARFQADCVAQGIWVRPFGRLVYLMPPYIISDGILTKLADKTVQILKEHSK

SEQ ID NO: 33301 - protein, 459 aa, Emericella nidulans
MSNLPVEPEFEQAYKELASTLENSTLFEQHPEYRRALQVVSVPERVIQFRVVWENDKGEVQINRGYRVQFNSALGPYKGGLRFHPSVNLSILKFLGFEQIFKNALTGLNMGGGKGGSDFDPKGKSDSEIRRFCTAFMTELCKHIGADTDVPAGDIGVTGREVGFLFGQYRRIRNQWEGVLTGKGGSWGGSLIRPEATGYGVVYYVQHMIKHVTGGKESFAGKRVAISGSGNVAQYAALKVIELGGSVVSLSDSKGSLIVKDESASFTPEEIALIADLKVARKQLSELATSSAFAGKFTYIPDARPWTNIPGKFEVALPSATQNEVSGEEAEHLIKSGVRYIAEGSNMGCTQAAIDIFEAHRNANPGDAIWYAPGKAANAGGVAVSGLEMAQNSARLSWTSEEVDARLKGIMEDCFKNGLETAQKFATPAKGVLPSLVTGSNIAGFTKVAEAMKDQGDWW

SEQ ID NO: 33302 - protein, 340 aa, Ginkgo biloba
MSSTGKIKIGINGFGRIGRLVARVALLRDDIELVAVNDPFISTDYMTYMFKYDSVHGQWKKHEVKVKDSNTLLFGEKAVTVFGCRNPEEIPWGETGVEYVVESTGVFTDKEKAAAHIKGGAKKVVITAPSKDAPMFVVGVNEHEYKPDLAIVSNASCTTNCLAPLAKVINDRFGIVEGLMTTVHSITATQKTVDGPSNKDWRGGRGAGFNIIPSSTGAAKAVGKVLPALNGKLTGMAFRVPTPDVSVVDLTVRLEKPASYDEIKAAIKEESEGKLKGILGYTEDDVVSTDFIGDNRSSIFDAKAGIALSDNFVKLVSWYDNEWGYSSRVIDLIVHMASTV

SEQ ID NO: 33303 - protein, 271 aa, Arabidopsis thaliana
  misc_feature (146)..(146): Xaa can be any naturally occurring amino acid
  unsure (1)..(271): unsure at all Xaa locations
MGRGKIAIKRINNSTSRQVTFSKRRNGLLKKAKELAILCDAEVGVIIFSSTGRLYDFSSSSMKSVIERYSDAKGETSSENDPASEIQFWQKEAAILKRQLHNLQENHRQMMGEELSGLSVEALQNLENQLELSLRGVRMKKVLMLXQISQILEPFRRSNGCTLSTLFFCLLQDQMLIEEIQVLNREGNLVHQENLDLHKKVNLMHQQNMELHEKVSEVEGVKIANKNSLLTNGLDMRDTSNEHVHLQLSQPQHDHETHSKAIQLNYFSFIA

SEQ ID NO: 33304 - protein, 417 aa, Candida albicans
MFLQNILSVLAFALLIDAAPVKRSTGFVTLDFNVKRSLVDPKDPTVEVKRSPLFLDIEPTEIPVDDTGRNDVGKRGPVAVKLDNEIITYSADITIGSNNQKLSVIVDTGSSDLWVPDSNAVCIPKWPGDRGDFCKNNGSYSPAASSTSKNLNTPFEIKYADGSVAQGNLYQDTVGIGGVSVRDQLFANVRSTSAHKGILGIGFQSNEATRTPYDNLPITLKKQGIISKNAYSLFLNSPEASSGQIIFGGIDKAKYSGSLVDLPITSDRTLSVGLRSVNVMGQNVNVNAGVLLDSGTTISYFTPNIARSIIYALGGQVHYDSSGNEAYVADCKTSGTVDFQFDRNLKISVPASEFLYQLYYTNGEPYPKCEIRVRESEDNILGDNFMRSAYIVYDLDDRKISMAQVKYTSQSNIVGIN

SEQ ID NO: 33305 - protein, 389 aa, Glycine max
  misc_feature (274)..(274): Xaa can be any naturally occurring amino acid
  unsure (1)..(389): unsure at all Xaa locations
MGLIRSMRSRSQRVVQEQEAAECVGVVVGDSMRQSCWANMPQELLREVLLRIEASEDTWPPRKSVVSCAGVCRSWRHITKDIVKTPELSSKITFPISVKQPGPRENLLRCFIKRNRSTQTYYLFLSLTSTLAEDGKFLLAARKCRRPTCTDYIISLDADDMSKGSNSYVGKLRSNFLGTKFTIYDSQLPHTGAKIMKSRSTRLVNLKQVSPKVPTGNYPVAHISYELNVLGSRGPRRMHCVMDSIPATAIEPGGVAPTQTEFSLNNIDMFPSFXFFRSKSNRAENSMSGPLVDQKDGMLVLKNKAPRWHEQLQCWCLNFHGRVTIASVKNFQLVASAENGPAGPEHDKIILQFGKVGKDLFTMDYRYPISAFQAFAICLSSFDTKIACE

SEQ ID NO: 33306 - protein, 396 aa, Listeria monocytogenes str. 4b H7858
MRTKLMNMLQERKDEITQIRRHLHEHPELSFHEAETAKFIQDFYKGKDVEMATEVGNGHAVVVTIKGGKPGKTIALRADFDALPIEEQTELPFKSKKPGVMHACGHDGHTAYLLVLADCLIQLKENIPGTIKIVHQHAEETPPGGAKSVVESGILDDVDQIFGIHVFPFGESGQVYYHSGFAMAGRTYFKLKIQGVGGHGSSPHMANDAIVAGAYFVTAIQTVVSRRLNPFDTGVITIGSFDGKGSFNVIKDAVELEGDVRYMNTENRDKMDAEIHRIVAGMEAMFGVTVELTYTNDYPPLYNDPAVTEQVVASLQKGVGEYLTGISEYDMLSGSEDFAYYLQKIPGVFFYIGAKPKNTSNAYFNHHPKFDIDEDALLVAAKSVADVVLDYYKLNG

SEQ ID NO: 33307 - protein, 322 aa, Bifidobacterium longum NCC2705
MSASCLDLLDHLHGSVSVVGSMNVDYTVVTERLPKPGETVNGGPLTLLPGGKSANQASAAARIGAQVRMFGAVGEDTNADFLLEHLRDAGVDTSHIAAVAGPSGTTVITVDANGENTIVYSAGSNGEVSVDYVQQSSDALVAADVLGLCLESPMETVTACARLCHDAGLKVLLNDSPFVAELPAELIEASDILLVNEHEMAQLLDIAEPDDDDWDGLDWSDVARQMHDFGFNQAIITLGGDGSVVIDGDDIYRIAPVAVEAIDTTGCGDAFMGTVLAGLASGHALADSAQLASYVSAYAATGFGAQASYGTAAQIRERFGAK

SEQ ID NO: 33308 - protein, 395 aa, Listeria monocytogenes str. 4b H7858
MKEKLFQKLDEKRDRMIEIRRYLHEHPELSFQEENTAKYIADFYKEMDCDVRTHVGGNGVVVTIDTGKPGKTLAIRADFDALPITEETGLAFASKNPGVMHACGHDGHTAYMLILGETLIEMKQELTGKIVILHQHAEETPPGGAIQMIQDGALDGVDNVLGIHVMSTMKTGEVFYREGAIQTGRSYFKLKVQGQGGHGSSPHLANDAIVAASEFVVAVQTVISRRLNPFDVGSITIGSFDGKGSFNVIKDAVELEGDVRSMSEEARNIIQKEITRIVSGIEAMFGVTCELDYKNDYPVLNNDEALTDFVVKSIKGAKIPEITDVVRCEPQPPSEDFAYYAKERPSSFFYVGAMPADGHFYPHHHPKFDINEDSLLIASKAMGACVVDYLKGENN

SEQ ID NO: 33309 - protein, 389 aa, Arabidopsis thaliana
  misc_feature (339)..(339): Xaa can be any naturally occurring amino acid
  unsure (1)..(389): unsure at all Xaa locations
MQIFVKTLTGKTITLEVESSDTIDNVKAKIQDKEGIPPDQQRLIFAGKQLEDGRTLADYNIQKESTLHLVLRLRGGMQIFVKTLTGKTITLEVESSDTIDNVKAKIQDKEGIPPDQQRLIFAGKQLEDGRTLADYNIQKESTLHLVLSLRGGMQIFVKTLTGKTITLEVESSDTIDNVKAKIQDKEGIPPDQQRLIFAGKQLEDGRTLADYNIQKESTLHLVLRLRGGMQIFVKTLTGKTITLEVESSDTIDNVKAKIQDKEGIPPDQQRLIFAGKQLEDGRTLADYNIQKESTLHLVLRLRGGMQIFVKTLTGKTITLEVESSDTIDNVKAKIQDKEXVFLRTSSVSSSLESSLRMDVLWPTTTSRRSLLFTWSCVFVVVSKSRLCYA

SEQ ID NO: 33310 - protein, 268 aa, Zea mays
MGRGRIEIKRIENNTSRQVTFCKRRNGLLKKAYELSVLCDAEVALIVFSSRGRLYEYANNSVKATVERYKKAHTVGSSSGPPLLEHNAQQFYQQESAKLRNQIQMLQNTNRHLVGDSVGNLSLKELKQLESRLEKGISKIRARKSELLAAEISYMAKRETELQNDHMTLRTKIEEGEQQLQQVTVARSVAAAAAATNLELNPFLEMDTKCFFTGGPFATLDMKCFLPGSLQQMLEAQQRQMLATELNLGYQLAPPGSDAANNNPHHQF

SEQ ID NO: 33311 - protein, 207 aa, Glycine max
  misc_feature (16)..(16): Xaa can be any naturally occurring amino acid
  unsure (1)..(207): unsure at all Xaa locations
IDNVYSKIQDKEGIPXIQQRLISAGKQLEDGRTLSDYNIQKESTLHLVLRLRGGMQIFVKTLTGKTITLEVESSDTIDNVKSKIQDKEGIPPDQQRLIFAGKQLEDGRTLSDYNIQKESTLHLVLRLRGGMQIFVKTLTGKTITLEVESCDTIDNVKSKIQDKEGIPPDQQRLIFAGKQLEDGRTLSDYNIQKESTLHLVLRLRGGQ

SEQ ID NO: 33312 - protein, 472 aa, Xanthomonas campestris pv. campestris str. ATCC 33913
MHRHVHEPEILADPAAFEAAEHWRQRDLAVVWHPCTQMREHPHTLPLVPIARGDGAWLIGHDGRHYLDAVSSWWTNLFGHAEPRIGAAIAQQAGRLEQVMLAGFTHAPAVQLAERLLAIAPRQPDRAPLAKVFYADNGSAGVEVALKMAFHYFHNRDEHRRTRFIALENGYHGETIGALSVGDIPLYRRVYAPLLLESIFAPSPDAYLAEPGQSAEDYALQAADALQHLLEQSPGEICALILEPRVQCAGGMRMYHPAYLRRARELCDAHGVFLIADEIATGFGRTGTLFACEQAGVMPDLLCLSKGLTGGFLPLSAVLATQQLYDAFLDDSRERAFLHSHSYTGNPLACAAALATLQIFADDDIIARNQRTAAHMTQLAAQIGEHSAVADVRQAGMIVAFELTQGGDKRTPFPAAARVGLQAYRAALARGVVLRPLGDVLYWMPPYCVDDAQLALLADTTRHAIAKAVACA

SEQ ID NO: 33313 - protein, 305 aa, Methanocaldococcus jannaschii DSM 2661
MILVTGGAGFIGSHIVDKLIENNYDVIILDNLTTGNKNNINPKAEFVNADIRDKDLDEKINFKDVEVVIHQAAQINVRNSVENPVYDGDINVLGTINILEMMRKYDIDKIVFASSGGAVYGEPNYLPVDENHPINPLSPYGLSKYVGEEYIKLYNRLYGIEYAILRYSNVYGERQDPKGEAGVISIFIDKMLKNQSPIIFGDGNQTRDFVYVGDVAKANLMALNWKNEIVNIGTGKETSVNELFDIIKHEIGFRGEAIYDKPREGEVYRIYLDIKKAESLGWKPEIDLKEGIKRVVNWMKNNNRT

SEQ ID NO: 33314 - protein, 648 aa, Prochlorococcus marinus str. MIT 9312
MTNFEPKKLKNIWTIEDSISTYNIDKWGDKYFSINSKGNISVTKDIKSENKIDLFKLVKELKSREINPPLIIRFNDILKDRINALHDSFFKAIKTYKYKNIYQGVFPVKCNQQKNVLEKIIEFGSQWNFGLEVGSKSELLIGLALLENQNSLLICNGYKDKKYIEIATLARKLGKNPIIVIEQRDEVKRIIQAVQELNATPLIGIRAKLSSKSSGRWGKSIGDNSKFGLSIPEIMLTIKELKEANLINEMKLLHFHIGSQISDIAVIKDALQEASQIYVELCKLGAPMQYIDVGGGLGIDFDGTKTSSNTSTNYSLQNYANDVIATIKDSCELNNIKHPIIISESGRAIISHCSVLIFNVLGTSHVSSKLQIFDKKNQQLIISNLLETFYELKKLKNKKINLSQIIELWNDAKKFKEDCLVAFRLGFLSLAERAYAEELTWACAKEISKNLNNDAINHPDLSEITETLASTYYANLSIFKSIPDSWAINQIFPIVPIHRHLEEPFCKGNFADLTCDSDGKLNNFIDDGKIKSLLNLHKPEEDKDYLIGIFMTGAYQEALGNLHNLFGSTNVVHIDINQDNSYKVKNIIKEDSKSEILQLLDYSSASLVESIRINTESAIDQKKLTIEEARKLMDQIEISLRKSSYLSE

SEQ ID NO: 33315 - protein, 448 aa, Moorella thermoacetica ATCC 39073
MDLQACLDYYCQLAEKNNTIDPDLYEKYNVKRGLRNKDGTGVLVGLTEIGEVHGYILDEGERTPDHGRLLYRGIDIWDIVRGFQQEGRFGFEEVCYLLLFGELPDKKRLEEFTHLLAEHRSLPDGFVEDMILKAPSNDIMNKLARSVLAAYSYDPNPDDISIRNVLRQCIELIARFPIMVAYGYQAKAHYYENKSLYIHLPQTELSTAENFLYMIRPDNQYTSLEAELLDLALVLHAEHGGGNNSAFTVHVVSSTGTDTYSVIAAATGSLKGPKHGGANIKVMKMIEDIKNNVKDWHDEEELRNYLIKILRKEAFDRSGLIYGIGHAVYTLSDPRAVLLKQKAAELAREKDMEDEFGLYLAIEKMAPELFVAEKKVDKVVAPNVDFYSGFVYKMLNIPIELYTPIFAISRIAGWCAHRIEELVSGGKIFRPAYKNVLGKKSYIPLEQR

SEQ ID NO: 33316 - protein, 443 aa, Rosa hybrid cultivar
ETTLVELGRTLGLEECALWMPCRSGMNLQLSHTLNYEAQIGSTVPFSLPVVSEVFKSSQAMRIPYTCPLARVRPLVGRYVQPEVVALRVPLLNLSNFQINDWPDVSAKSYAIMVLILPTNSTRKWRDHELELVDVVADQVAVALSHAAILEESMRASDQLVEQNGALDLARREAELAIHARNDFLAVLNHEMRTPMHAIIALSSLLLETDLEDGSLDLDIGKFNLHGVFREAINLIKPIATVKKLSMTLILAPDVPVCAVGDENRLMQTILNVAGNAVKFTKEGYISVIASVAKPDSSRDWRPPEFYPASSDGHFYLRVQVKDSGSGILPQDIPHIFTKFAEPRNGSNRVKDGAGLGLAICKRFVNTMGGHIWIESEGIDKGTLVVFIVKLGICDNCGNTTIAHQKVPKGEANHGSADLIGYKPAFRDGYGLASTNPRYQRSL

SEQ ID NO: 33317 - protein, 395 aa, Prochlorococcus marinus str. MIT 9313
MSALVEESSAELRLSSQSSGLSRVFRGGLLLGTGLVCLPVLSGLSPQPLQAASAATALSKQSFVADAVARSGPAVVTLETSRTVRSMGMAGLPQGLLADPLFQHFFGLPGRVAPRSRIERGQGSGVIFSAEGLVLTNAHVVEKTDQLMVGLPDGRRVPGRLVGQDKITDLAVVQLDGSGPWPTAPLGDSDQLRVGDWAIAVGNPFGLENTVTLGIVSNLNRNVSQLGISGKRLDLIQTDAAINPGNSGGPLLNSEGNVVGINTLVRSGPGAGLGFAIPINRARTIAQQLVERGRASHPMVGVGLSPVPSARSGEANSPGAVIRSVVPDGPAARAGLKVDDVIISVEGLPIDGPAEVVSAIDRHGVGRPITFGLIRGDSRIELAVTPVELTAMQAP

SEQ ID NO: 33318 - protein, 490 aa, Debaryomyces hansenii
MAPLQAIRKYDYLVIGGGSGGVASARRAASYGAKVLLIELKFNKMGGTCVNVGCVPKKVMWYAGDLAEKRHHLKSYGLSTTDDKVKYGDFDWSTFKDKRDAYVKRLNGIYERNLKNEGVDYIYGFAHFANSNGDVEVTLTGDQELSFLEEGKEFKKDEKLVFAGSKTLIATGGYAINPPNVEGHELGTTSDGFFELQKQPKSVAVVGAGYIGVELSGIFKALGSETHLVIRGDTVLRSFDESIQNSITDYYTDKLGVNIIKQSGSVSKVEKIDGDRKKITLGNGQVLEVDELIWTMGRKSLINIGLDKVGVTLNDKQQVDVDQFQQTANPNIFSLGDVIGKVELTPVAIAAGRRLSNRLFSGDKAFENDHLDYSNVPSVIFSHPEAGSIGLSCKEAKEKYGEDQIKIYKSKFNAMYYAMMEDDSLKSPTSYKVVCAGEDEKVVGLHIVGDSSAEILQGFGVAIKMGATKKDFDSCVAIHPTSAEELVTMK

SEQ ID NO: 33319 - protein, 90 aa, Helicobacter hepaticus ATCC 51449
MKFRPLGERVLVERVEEDTKTSSGIIIPDNAKEKPLMGIVKAVSAKIKDDKILKENDKVVFGKYKGAEIKLDSKEFIVLELDDILGVIEK

SEQ ID NO: 33320 - protein, 378 aa, Zea mays
TSLTTSATNQTKGHFVREHVGGSVSAASQRRSPTRHRSTAPHCPWTHASRRAHPARVRVPLSASRLPPPPQRGARGGGALAILVSIPAAGVPVPLLLLAVARASRRAPEPEPRVKSRVASAPPPPPETPSGWNQNEGDRRRKLRGTPLVECTGDRSVEEQPEHAGVEGKAWKMSSTVPKSSNIFWHDCPVGKTDRQNVLKQKGCVVWITGLSGSGKSTLACTLGRELHTRGKLAYVLDGDNLRHGLNKDLGFKAEDRAENIRRVVAKLFADAGLVCIASLISPHRRDRESCRALLSDSSFIEVFLNMSLELCEARDPKGLYKLARAGKIKGFTGIDDPYEAPLNCEIEIKEVDGVCPPPAEMAGQVVTYLEEKGFLHE

SEQ ID NO: 33321 - protein, 545 aa, Helicobacter hepaticus ATCC 51449
MASKEINFSDSARNKLYEGIKQLSDAVKVTMGPKGRNVLIQKSYGAPTITKDGVSVAKEIELADPIANMGAQLVKEVASKTADAAGDGTTTATVLAYSIYKEGLRNITAGANPIEVKRGMDKASAAIIEELKKSSKKIGGKSDIAQVATISANSDENIGALIAEAMEKVGKDGVITVEEAKGINDELSVVEGMQFDRGYLSAYFVTNTDKMTAQLENAYVLLTDKKISNMKEILPLLEATMQSGKPLLIIAEDIEGEALTTLVVNKLRGVLNVSAVKAPGFGDRRKAMLQDIAILTGGQVISEELGKTLEAATLADLGSAARIVIDKDNTTIVDGKGKTKDVKDRIAQIKTEIENTTSDYDREKLQERLAKLSGGVAVIKVGAASEVEMKEKKDRVDDALSATKAAVDEGIVIGGGSALIRASQKVKLKLEGDEAIGYDIIKRAIKAPLAQIATNAGYDAGVVVNEVEKNSKDGFGFNATTGEYVDMFKEGIIDPLKVTRVALQNAVSVSSLLLTTEATINEIKEDKPAPAMPDMGGMGGMGGMM

SEQ ID NO: 33322 - protein, 549 aa, Salmonella enterica subsp. enterica serovar Paratyphi A str.
MLNQKLNPTPSEDLTIDVDLLYETDPCELKLDEMIEAEPEPEMIEGLPASDALTPADRYLELFEHVQSTKLFPDSKTFPDCAPKMDPLDILIRYRKVRRHRDFDLRRFVENHFWLPETLSSEYVSNPENSLKEHIDQLWPILTREPQDHIPWSSLLALPQSYIVPGGRFSETYYWDSYFTMLGLAESGREDLLKCMADNFAWMIENYGHIPNGNRTYYLSRSQPPVFALMVELFEEDGVRGARRYLDHLKMEYAFWMDGAESLALNQAYRHVVRMPDGSLLNRYWDDRDTPRDESWLEDVETAKHSGRPPNEVYRDLRAGAASGWDYSSRWLRDAGRLASIRTTQFIPIDLNAFLYKLESAIANISALKGERDTEALFRQKASDRRAAVNHYLWDDENGCYRDYDWRREEMALFSAASIVPLYVGMANHEQADRLANVVRSRLLTPGGIMATEYETGEQWDKPNGWAPLQWMAIQGFKRYGDDMQGDEIAHNWLKTVNHFYQEHHKLIEKYHISGGTPREGGGGEYPLQDGFGWTNGVVRRLIGLYGEP

SEQ ID NO: 33323 - protein, 105 aa, Citrus maxima
EPFDYYMFGQNYIRPLVDFRSSYVGNVSLFFEMEEKLNQGHNIVLISNHQTEADPAIIALLLESTNPHVAENLTYIAGDRVITDPLCKPFSMGRNLICVYSKKHM

SEQ ID NO: 33324 - protein, 899 aa, Helicobacter hepaticus ATCC 51449
MQHSHSPQEGIKKSPKSTLLQPIQVEFVSDTIIHLLQSVDEELKNAFLNIKQSLQNHDSTMLKRILADISAQDKTLFIIKAFTLYHMLLNIIEELNLSNNAMLNHLPKTLKELNQEGYDKNDTLEILQHLRFYPVFTAHPTESRRRTFLEAHHQMSENIKNIFAHNDANAKSQLLYRLHLLWHTHLVRSEKMEILFELDNLLYIIESSILKSATQVLGDIKSTLGKALESSPIILGSWIGGDRDGNPYVSNEVMTKTMKIAHKAIIEIYIRTSEKLIRELSMSMDFIQPSKRLIQSLQNDSSELLNNEAKLFAKEPFRAKLYLIKKKLQNRLIAINTTDSIDFTYKDSNELLEDIDMMIESLDDISARGLVEFRHLVLLGGFHLLRLDFREHRDIILSTISEIFCLIGFCDSDFKDLNENKKIEILNYALSAKKYDLNTIIEQLSESSKRLVGAFLRIQWAKKHISKHILQSFIISMSTQASDLLCVLWFAKQSGLWKPGKKKEGKKGKASVSITPLFETIDDLQRAQSIIQTLYANTHYQQYLFDHNSTQEIMVGYSDSSKDGGIFTSNYNLYCAISNLTKLQTQLDIRISFFHGRGGSVSRGGGSLEEALLCSAPQSVHSFLKTTEQGEMISAKYLNSHIATKNFSSTLSALLKKGVYDSYGTEKYKNNPQTMALLENVSNASCATYRALVYENKGFLEYFKNATPIKFIQNLNLGSRPSKRKDTQKIEDLRAIPWVFAWTQNRAIISAWYGLGSGLANVDKNQLRDCYEQSLFFKTTIDNISQALLKVDLDIASLYNQFVKDKKVREDIWEHIYTQYHLTMEYLLHLRGESVLLDSEGAIRESILLRKPYLSVLNLTQIELIKKYESCKYPKGQERLLEQIHATIVGIAQGIRNTG

SEQ ID NO: 33325 - protein, 238 aa, Zea mays
VPSVETSLRCYIASLASILTPQAISISTATSLFLAARTNPPPSTYCHSASSWPPLRQMGLSEEQQKQALELRSMTNGGKESLEETETDGASCNPAATGGCCQGNGGFTRALEQQKQALELRSMTNGGKESLEETETDGASCNPAATGGCCQGNGGFTCCHPDLPKEKRDKSIAIEQNPKSCEENGKDGGAGSKKGNSKTCPMPTWFETWERADTYAALAVVAAAAAVFISFRIYKNLN

SEQ ID NO: 33326 - protein, 341 aa, Helicobacter hepaticus ATCC 51449
MALKVYYDKDCDLGLIQKKKVAVIGFGSQGHAHAENLRDSGVEVIIGLYRGGSSWVKAEAKGFKVLEVSEATKVADVIMILIPDELQADVFAKDILPSLSEDKIIAFGHGFNIHFGQIKAPKGVGVIMVAPKAPGHTVRSEFVKGGGIPDLIAVEQDTSRGDAKAIALSYASAIGGGRSGIIETTFKDETETDLFGEQAVLCGGVTSLVKAGFETLVEAGYPEEMAYFECLHELKLIVDLIYEGGLANMRYSISNTAEYGDMVSGPRVINEESKKAMKQILKDIQEGRFAKDFILERKAGYARMNAERKNLANHKIEQVGGRLRAMMPWIGANKLVDKERN

SEQ ID NO: 33327 - protein, 449 aa, Rhodopseudomonas palustris CGA009
MTTAPAPDEQARPVRELVLAPPPPSSTSLLTHWSDRLRHAAIILIAAALALTALVLFAQLAIGPAIAAFACLVAAALVPWRLHDGSNALDDALGVSPVEMPVVRAIVGGMPDPAVLLDRAGRVIHLNAAAAQLAPALRVRELAQFALRSPEIVTALREAIATSEPRRVTYLDHGSIERWLELIIAPVQVPTAFGGTDQCMLMTFHDLTPLRRVEEMRADFVANASHELRTPLAALSGFIDTLQGQARDDPKARERFLGIMHAQATRMARLIDDLLSLSRVELSAHVRPDAMIDLKPLIKQVTDGLEPLAKERQVVIELELPEDAATIAGDREELLRLFENLIENALKYGASGGRVVVSVVAAVSGDGVPEYRALVRDFGPGIAPEHLPRLTERFYRVDVGDSRSQGGTGLGLSLVKHIVNRHRGRLLIESVLKKGATFTVCFPQGKPQV

SEQ ID NO: 33328 - protein, 330 aa, Arabidopsis thaliana
MADTSSRTDVSTDGDTDHRDLGSDRGHMHAAASDSSDRSKDKLDQKTLRRLAQNREAARKSRLRKKAYVQQLENSRLKLTQLEQELQRARQQGVFILSSGDQAHSTGGNGALAFDAEHSRWLEEKNRQMNELRSALNAHAGDTELRIIVDGVMAHYEELFRIKSNAAKNDVFHLLSGMWKTPAERCFLWLGGFRSSELLKLLANQLEHMTERQVMGINSLQQTSQQAEDALSQGMESLQQSLADTLSSGTLGSSSSDNVASYMGQMAMAMGQLGTLEGFIRQADNLRLQTLQQMLRVLTTRQSARALLAIHDYSSRLRALSSLWLARPRE

SEQ ID NO: 33329 - protein, 476 aa, Arabidopsis thaliana
MTMIALNREVETQSLKKLSLKSVRRAREIFSPVHGQFPQPDPESKRIRLCHKIQVAFGGVEPASKPTRIADHNSEKTAPLKALALPGPKGSKELRKSATEKALVVGPTLPPRDLNNTGNPGKSTAILPAPGSFSERNLSTAALMERMPSRWPRPEWHAPWKNYRVLQGHLGWVRSVAFDPSNEWFCTGSADRTIKIWDVATGVLKLTLTGHIGQVRGLAVSNRHTYMFSAGDDKQVKCWDLEQNKVIRSYHGHLHGVYCLALHPTLDVVLTGGRDSVCRVWDIRTKMQIFVLPHDSDVFSVLARPTDPQVITGSHDSTIKFWDLRYGKSMATITNHKKTVRAMALHPKENDFVSASADNIKKFSLPKGEFCHNMLSLQRDIINAVAVNEDGVMVTGGGLWFWDWKSGHNFQRAETIVQPGSLESEAGIYAACYDQTGSRLVTCEGDKTIKMWKEDEDATPETHPLNFKPPKEIRRF

SEQ ID NO: 33330 - protein, 398 aa, Helicobacter hepaticus ATCC 51449
MPIKTSFDYTSSSDVGLNARLKSLKNAHNFRTITDYQHDGIYITPYASHAHHSSHKPLINFASNDYLALSLDTALIQEFLSTLSPQDMVFSSASSRSLSGGFPIYETLESHLSQLYAPKKALLFNSGYHCNLSCIQALSTLSHTLFLLDRFSHASVFDGVRNAHFKRFRHNDMTALETLIDFHHRHYERIIIVTEGLFSMEGDFGNIKEIIQLKKDYPNVFLYVDEAHSVGVCGNNGLGIAYECIEDIDFLVLTFGKALASMGACMLCNTTQRDFFINTARGLIYSTALPAINIAWSNFIWSKILTLTNKREKLQLLSQHLRSHLKEKGYAIRGEAHIISLMCGDNQSAVQLSHQLRERGFFAPAIKEPTIPKGTARIRFCLNAALELEHIAQLAETL

SEQ ID NO: 33331 - protein, 250 aa, Xanthobacter autotrophicus Py2
MSRVAIVTGASSGNGLAIATRFLARGDRVAALDLSAETLEETARTHWHAYADKVLRVRADVADEGDVNAAIAATMEQFGAIDVLVNNAGITGNSEAGVLHTTPVEQFDKVMAVNVRGIFLGCRAVLPHMLLQGAGVIVNIASVASLVAFPGRSAYTTSKGAVLQLTKSVAVDYAGSGIRCNAVCPGMIETPMTQWRLDQPELRDQVLARIPQKEIGTAAQVADAVMFLAGEDATYVNGAALVMDGAYTAI

SEQ ID NO: 33332 - protein, 342 aa, Glycine max
MNVTNKPNPDGSTNGFQSQLQVQQQNGWEQGSSRLRPTKPYPAPTARYQDIVRDANLFWGTLQAFHKILGTKYKVATVGGTSLDLHRLFVEVTSRGGIEKVIVDRKWKEVILTFNFKDTITSASFVVRKSYLSMLYHYEQVYYFGRQGIPPPTPDLMIRGQSGQPYSSTTIPEVAAVNDSPVQSTPVQAHDDMVSGTIDAKFDGGYVVTVILGSEQLKGVLFHVPDNVSQSSHAEGTSSSQNLGDGTSNSQSRKRAKYAPRDPFRPKSNRSGYNFFFAENYARLKPSYHGQERAISKRIGFLWNNLSEAERQVYQEKGMRDKERYRTELMEYKSNNSTPNAQ

SEQ ID NO: 33333 - protein, 254 aa, Festuca arundinacea
MSRKKKVRRRSTGPDSVSEIIKKWKEQNQKLQEENGSRKAPAKGSKKGCMAGKGGPENSNCKYRGVRQRTWGKWVAEIRKPNRGNRLWLGSFPTAVEAAHAYDEAARAMYGATARVNFSERSPDANSGCTSAPRVLMSNGPTAVSHPADGKDESESPPSLTSDAKDEPESAGTVVHEVKTEASNDSTSVREERKTVEVFQPEGEALRKEEKVSYDYFNVEEVLDMIIVELSADRKMEVHEEYQDGDDGFSLFSY

SEQ ID NO: 33334 - protein, 390 aa, Psychrobacter arcticus 273-4
MAVGIENTIEEARFVEQARNFDIQRVIVKIGSSLLTNNGRGLDRTAIYEWAKQIAKLHKQGIEVLLVSSGAVAEGVVRMNLEERPKKLAALQACASIGQMGLIETWWSALIQHGIQSSQLLLTHDDLSNRSRYLNTTGALTQLLEWRVLPVINENDTITIDEIKFGDNDTLGAMAAAMVNADLYIILTDQEGVFTDNPRDNPNAKMIRQERAMADYLFDIAGDGGKLGRGGMLTKIRAGRLAAMGGCPTVIVSGAIDDVITRVVSGEAVGTLLTTNDQDKIIARKQWLAAHLRMSGSLIVDAGAAKAVVEHQKSLLPVGVSEVRGDFDEGDVVEIVHQDTGERIAVGQVNFSSRDACRVARERTEQFDRILGNNEERVVMVHRDNLALTM

SEQ ID NO: 33335 - protein, 264 aa, Festuca arundinacea
MSRKKKVRRRSTGPDSVSEIIKKWKEQNQKLQEENGARKAPAKGSKKGCMAGKGGPENSNCKYRGVRQRTWGKWVAEIREPNRGNRLWLGSFPTAVEAAHAYDEAARAMYGATARVNFSERSPDANSGCTSAPPVLMSNGPTAVSHLADGKDESESPPSLTSDAPTATLDRSDAKDEPESAGTVVHEVKTEVSNDSTSVREERKAVEVFQPEGKALRKEEKVSYDYFNVEEVLDMIIVELSADRKMEVHEEYQDGDDGFSLFSY

SEQ ID NO: 33336 - protein, 138 aa, Prototheca wickerhamii
HPARGHLLRRQMFDESDVVVLTVKNFEVELRKQKYALVEFYAPWCGHCKSLKPAYAAAATEVKKLGLPVVLAKVDATVEADLGSQFEVRGYPTLKWFVNGKVASDFGGGRTKDDIVRWVSKKSGPATTDLESVAALET

SEQ ID NO: 33337 - protein, 686 aa, Zea mays
MAAAEARGGEFPVGMKVLVVDDDPTCLVVLKRMLLECRYDVTTCPQATRALTMLRENRRGFDVIISDVHMPDMDGFRLLELVGLEMDLPVIMMSADSRTDIVMNGIKHGACDYLIKPVRMEELKNIWQHVIRKKFNENKDHEHSGSLDDTDRNRPTNNDNEYASSANDGGDGSWKSQRKKREKEDDETDLENGDPSSTSKKPRVVWSVELHQQFVNAVNHLGIDKAVPKKILELMNVPGLTRENVASHLQKFRLYLKRIAQHHAGIPHPFVAPVSSANVAPLGGLEFQALAASGQIPPQALAALQDELLGRPTSSLALPGRDQSSLRVAAIKGNKHHEEREIAFGQPIYKCQNNAYGAFPQNSPAVGGLQPFAAWPNNKVGMTDSTSTLGNVGNSQNSNMLLHELQQQPDTLLLGTLHNIDAKPSGVVMPSQSLNTFPASEGISPNQNPLIIPSQPPSFVSSIPPSMKHESLLGLPSTSTSLLGGLDMVNQASTSQALISSHGTNLPGLMNRSSNAIPSPGISNFQSGNIHYVVNQNAMGVSSKPPGVLKTESTDSLSCSYGYIGGSTSVDSGLFSSQSKNPQYGLLQNQNDVNGSWSPSQDFDSFGNSLGQGHPGTTSSNFQSSALGKLPDQGRGRNHGFVGKGTCIPSRFAVDEVESPTNNLSHSIGNSGDIVNHDIFGFSGHM

SEQ ID NO: 33338 - protein, 328 aa, Oryza sativa (japonica cultivar-group)
MARSALDEVTDAGAFDRSPSTFRSSISRDSSARFPAVPGRYHLYVSYACPWASRCLAYLKLKGLDHAIGFTSVKPIFERTRETDDHLGWVFPATGDEEPGADPDPFNGAKTIRELYEIASPNYIGKPTVPVLWDKQLKTVVNNESSEIIRMLNTEFNEIAKNPDLDLYPAHLQTSVNEINELVYDAINNGVYKCGFAKKQGPYDEAVTRLYEALDKCEEILSRQRYICGNQLTEADVRLFVTLIRFDEFLQVYAVHFKCNKRLLREYPNLFNYTKDIYQIPGISSTVNMEHIRKHYYGSHPSINPYGIIPAGPNIDYNAPHDRERFSA

SEQ ID NO: 33339 - protein, 226 aa, Moorella thermoacetica ATCC 39073
MRARILVVDDDAKITSMLKRALTYEGYDVEIAANGHQALALAANNPDLIILDIMLPGIDGLAVCRQIRSNSDIPILMLTARDDTADRVLGLDTGADDYLVKPFALEELLARIRALLRRRSRETEAEVLQFSDLTLNTSTREGFRGQRSFSLTAKEYELLLYFLQNPHRVLTRDELMTRIWGYDFSGESNVLEVYIGYLRAKLEAGGEPRLIQTVRGVGYVLKEQQP

SEQ ID NO: 33340 - protein, 175 aa, Prototheca wickerhamii
AKLGEDSAKPILDFFGLDAAKVEPQPVGFESTSSKKYSFPEGAAVDVDGLVAFAQSLADGTAEVLRKSAPVPEEPKENGVTVVVGSTVDSIVNSEEHDVLLEVYAPWCGHCKSLAPTYEKLAQRFASVDSVVIAKLDGTTNEHPSIEAKGYPTLLFFPATDKTPVPYTGDRTVPA

SEQ ID NO: 33341 - protein, 342 aa, Clostridium tetani E88
MYYKNIPIFTKSFLFTILKGVDYMKTKIDIFSGFLGAGKTVLIKKLISEKLYNDKIVIIENEFGEVGIDGTILKKSNIQVKEINAGCICCTVTGNFNDSIKEVIEKYNPERIIIEPSGVAKLSEILDICKKHELKDILSINMIITVVDVLRFNMYITNFNDFYKNQIVNAKTIILTRTENLSPENLLKTVEKIKQINSKAAIISTNWSNLPATKIIKVAEKDLYSPQFKSFTLLKPTTNKISVKHKIKNITNETFESFGIETPKLFPKETLNVILHKLENSNYYGTILRAKGIVQVNEKEWLQFDYVPEELNIKTSSPDYTGKICVIGTNLNKLALENLFLS

SEQ ID NO: 33342 - protein, 479 aa, Klebsiella pneumoniae
MTAPVQHPMYIDGQFEPGRGDAWIDVINPATEALLSRIPDGSAEDARRAILAAERAQPGWEALPAIERARWLRKIAAGIRERAEEIAALIVAEGGKIQQLAAVEVSFTADYLDYMAEWARRYEGEIVQSDRTGENILVFKRALGVTTGILPWNFPFFLIARKLAPALITGNTIVIKPSEFTPNNAIAFAQIVHDIGLPKGVFNLVLGRGETVGQELASNPKVAMVSMTGSVAAGEKIMAAAAKNITKVCLELGGKAPAIVMDDADLELAVKAVVDSRVINSGQVCNCVERVYVQKGIYDRFVNRLGEALKAVQFGDPASRDDIAMGPLINAAALARVEQKVAKAVAQGARVALGGKAVTGRGYFYPPTLLLDVRQEMDIVHEETFGPVLPVVAFDTLEEALAMANDSDYGLTSSIYTRDLNVAMKAIKGLKFGETYINRENFEAMQGFHAGWRKSGVGGADGRHGLNEYLQTQVVYLQA

SEQ ID NO: 33343 - protein, 715 aa, Glycine max
MENTDPCRHFLKDVKRIIIKVGTAVVTRQDGRLAVGKLGALCEQIKELNSLGYEIILVSSGAVGLGRQRLRYRKLINSSFADLQKPQVELDGKACAAVGQNSLMALYDVLFSQLDVTSAQLLVTDNDFRDKDFRMQLSETMKSLLALKVIPIFNENDAVSTRKAPYEDSSGIFWDNDSLSALLALELKADLLILLSDVEGLYSGPPSDPHSKLIHTYIKEKHQSEITFGDKSRVGRGGMTAKVKAAVHAADAGIPVVITSGFAAENIINVLQGQRIGTLFHKDAHEWVPVKEVDAREMAVAARECSRRLQAISSEERKQILLKIADALEANEKIIRTENEADVAVAQEAGYEKSLVARLALKPGKIASLANNMRIIANMEDPIGQVLKRTELSDGLILEKTSSPLGVLLIVFESRPDALVQIASLAIRSGNGLLLKGGKEAKRSNAILHKVITEAIPDTVGGKLIGLVTSREEIPELLKLDDVIDLVIPRGSNKLVSQIKSSTKIPVLGHADGVCHVYVDKSANVEMARRIVLDAKIDYPAACNAMETLLVHKDLIEKGWLNDIVVDLRTEGVKLYGGPRASSLLNIPQAQTFHHEYSSLACTVEIVDDVYAAIDHINLYGSAHTDSIVAEDKEVANVFLRQVDSAAVFHNASTRFSDGARFGLGAEVGISTSRIHARGPVGVEGLLTTRWILKGSGQVVDGDKGIVYTHKDIAT

SEQ ID NO: 33344 - protein, 309 aa, Salmonella enterica subsp. enterica serovar Paratyphi A str.
MSKKIAVIGECMIELSQKGADVQRGFGGDTLNTSVYIARQVDSAALAVHYVTALGTDSFSQQMLEAWQHENVDTSLTQRMENRLPGLYYIETDDTGERTFYYWRNEAAAKFWLESEQSAAICEALATFDYLYLSGISLAILSPTSRVKLLSLLRECRANGGKVIFDNNYRPRLWTSREETQQVYQKMLDCTDIAFLTLDDEDALWGKQPVEEVIARTHAAGVQEVVVKRGADSCLVSIQGEALIDVPAVKLPKEKVIDTTAAGDSFSAGYLAVRLTGGSATDAAKRGHLTASTVIQYRGAIIPHDAMPQ

SEQ ID NO: 33345 - protein, 477 aa, Haloarcula marismortui ATCC 43049
MVVGDVTTSTDVLVIGAGPGGYVAAIRAAQLALDVTLVEKGEYGGACLNRGCIPSKALIHGSKLASEAGQAEELGIYADPTVALDEMINWKDGVVDQLTSGIEQLCTAAGVNLLKGTAEFADENKVRIIHQGEGQGSESLKFENCIIATGSRPIEIPGFGFEDERIVSSDGALNFDTVPDELVIVGAGYIGMELATVYSRLGSDVSVIEMLEQALPSYEEDIASIVRKRAERLGVDFHFGYTADSWAASDGKAVLTAVPADEAAHDSDIELTADRILVAVGRRPVTDTLSIDDAGVETNAQGFIPTDSTCRTNKEHIFAVGDVAGEPMLAHKGSKEGEVAAEVIAGEPAAVDYQALPAAVFTDPEIGTVGLTENEAANKGMTPVTGEFQFQASGRALTANRAEGFVRIIATKETERVIGAQIVGPEASELIAEIAAMIEMGAKLEDIGSTVHTHPTLSEAIMEAAQNAREKAIHRRN

SEQ ID NO: 33346 - protein, 244 aa, Wolbachia endosymbiont strain TRS of Brugia malayi
MFRLEGRKFLVTGASGGIGQAIVKTMHKAGAILCVSGTKKETLEGVAKLYEKNIYILPCNLLNTEEVNQLINRASKLMGGLDGLVCNAGVTQDSLLLRMTDEAWQKVVDINLSSTFKLNREAYKKLTKNNWGRIINISSIIGLTGNAGQANYAASKAGIIAMSKSIAKEVASRNITVNCIAPGFMDTKMTKILTEEQKKKILDNIPMKRMGTGEEIAAGVLFLASDEAKYITGHVLNINGGLFM

SEQ ID NO: 33347 - protein, 382 aa, Haloarcula marismortui ATCC 43049
MNMKNEAGSTDLPAPVREDSDLVQVLDAEGNVLPQASVPDISDRQLLEMYETIKLARHFDQRAISFQRQGRLATYAPMTGQEGSQVATSLALAEQDWLFPTYREHAAKYAHGMDLVSLFEPLRGYRDGYAIPDDVNVMPEYIPIATQVPQAMGMAWGHKLQGKTETAVLCHLGDGATSEGDFHEGLNFAGVFDVPAVFVCNNNQWAISVPRERQTASETIAEKAQAYGIDGVRVDGLDPLAVYKVASEALAKARNPGPGERRPTLIESVQYRFGAHTTADDPSVYRDESEEEAWRDRDPVDRIEKYLYNEGILDSDLESEIQDSIEQEVSEAIETAEQTEASPDNIVEHVYEDVPARLEEQRDELNRLREKYDDGAFSEVLE

SEQ ID NO: 33348 - protein, 989 aa, Cryptococcus neoformans var. neoformans JEC21
MDSMHPDPTPDIPPSLPDLKAQVARLEASHKEKGLPLSGRIIHVMHHLPVEIVRIVPADALESAGSGFLSPPMTPEFKPEDAETTVESADAKWRIHARTAHPALVSGIKSLSETHDQLLVAWTGEVLIQPDNTQSPQQPSQATFSSIASNLLAPFSGGAGDATPQPQPPPQQGSLMVFGGEFNEADQKEIASELDRFAEAESKFDPTDKLKYVPVFLPPDVSKGHYEGFCKKTLWPLFHYLLWLDSTATVPSPDPSWLAYQKTNQMFAQRVAQIYKPGDLIICHDYHLLLAPKMIRESLGQVFHPNAGWGTAHPSPSLHHAQRKGFDWESNQQTPTPEKAKGEKIGAFMNHVGTALGNHLGTMEHGLQNEIMIGMFMHTPWPSSEIFRCLPKRREILDGMLGANLVSFQTYSYSRHFVSTCIRVCGYESTPGGVDANGQVTAVGYCPIGIDIKRVVHDRAQPGVLPKMQALRDLYKDKKIIVGREKLDVAKGVYNKLQAFEKFLQVYPEWRGKVVLIQVTTPALSESPKLERMTAELVSHINGTYGSLDFTPVHHYHQALEKDEYFGLLSCADLALITSLRDGMNTTSMEFILCQDKTSKSPLVLSEFMGTAPSFASALQINPHDLLGVAQAINKGLTMREEEKAERHANLLEGVLAHTSHTWAATILKQLLENVGGEHTAHHTPALDTAQFADAYKKANKRLLLFDYDGTLTPIVKVPAHAVPTERTRNAIAALCKDPKNIVYLISGRDGDFLEEHWGHLDRLGLSAEHGSFVKQPGEEDFINMTEALDMSWMSEVEEIFKYYTERTTGSTIEVKKASITWHYRNSDPDFGEFQCKQALDLLESSLAPRRPIEVLVGKKNLEVRPLAVNKGEIVRRLMYENPDVDLIFCAGDDKTDEDMFRALRTVFPPGGVVDNNPVVMKPPVAVTSALEPEEVAELPDVELSIRTKGVFATTVGPPAKRTLAGWHVTCPEEVVEALESLLEEIQVV

SEQ ID NO: 33349 - protein, 581 aa, Oryza sativa (japonica cultivar-group)
MAAATSTSSTALAHPKTLNPASKSAAAGSVSFPAAQPPCPLAASAGGRRRRGAVAAKVSSPQVIGATMPSLDFETSVFKKEKVSLAGHDEYIVRGGRNLFPLLPEAFKGIKQIGVIGWGSQGPAQAQNLRDSLAEAKSDIVVKIGLRKGSKSFEEARAAGFTEESGTLGDIWETISSSDLLLLLISDAAQADNYEEIFSHMKPNSILGLSHGFLLGHLQSVGLDFPKNISVVAVCPKGMGPSVRRLYVQGKEVNGAGINSSFAVHQDVDGRATDVALGWSVALGSPFTFATTLEQEYRSDIFGERGILLGAVHGIVEALFRRYTEHGLDEDSAYKNTVECITGIISKTISKKGMLEVYNSLTEEGKKQFIEAYSAAYYPCMDILYECYEDVSSGSEIRSVVLAGRRFYEKEGLPAFPMGNIDQTRMWKVGERVRSTRPAGDLGPLHPFTAGVYVALMMAQIEVLRKKGHSYSEIINESLIESVDSLNPFMHARGVAFMVDNCSTTARLGSRKWAPRFDYILTQQAFVTVDKNAPVNQDLISNFFSDPVHSAIEVCAQLRPTVDISVPADADFVRPELRQSS

SEQ ID NO: 33350 - protein, 277 aa, Citrus maxima
MSSLSLTFFATTAPRVLVPSSSSNPKLSPSSYSFSATTARWHSTAVSFRSGARRTSATCPCASFSSFNVRAMAKMVQDRESAVSSSSASDEQNKKMLNIEVNHSRTFLDVRFEQDLLSGIGREVEAGRLPSNLATGMEELYHNYKNAVFQSGNSRADEIVLSNMAVAFDRVLLDIEEPFTFSSYHKSMREPFDYYMFGQNYIRPLVDFRSSYVGNVSLFFEMEEKLNQGHNIVLISNHQTEADPAIIALLLESTNPHVAENLTYIAGDRVITDPLCK

SEQ ID NO: 33351 - protein, 499 aa, Francisella tularensis subsp. tularensis SCHU S4
MQIVWFKRDLRVTDNLALSLASEKGDILPLYIIEPELWQQPDMSHRQYLFLSECLEELNTELTKLGQSLAIMLGDAVEIFEQLIQKYNIKNVWSHQETWNDWTYQRDIKLEKFFKQNNIVWHQPYQNGVVRCLADRDNWALLWHQHMSEKIIRAPTKLKFICENQIKIPTAESLGLEYDDCYKRQKGGRIRALRILDSFLYQRGCGYTKEMSSPVTAFKSCSRLSPYIAFGVISLKEIYQKANQRKNEIKESSVKNKTKWLSAMRSFLSRLRWHCHFMQKLEDQPSIEYENLHSAYDQLRTEPLNQQCFEAWKTGNTGYPMIDACMRALIATGWLNFRMRAMLMSFASYHLWLDWRVTSLYLARLFTDYEPGIHYSQVQMQSGTTGINSIRIYNPIKQSIDQDPNGEFIRRWLPELENVSNENIHTPWLEKHNSLDYPDPTIDEKQARKFAADNIYKIRKSSKNSQETKNIVKKHASRKTSRKIKSKQHKVESIQGELF

SEQ ID NO: 33352 - protein, 465 aa, Arabidopsis thaliana
MVSSQRPVPNKIQKQQYLSISPSNSVLKDDVELEFSDVFGPLPEEANDIAYDEPAVVYSRSHSLVGPCSLDSHSLKLTKLTLLETEDSIDLVECLEGESLKENDDFSGNDDSDNEKALEGDLVKVSGVVGIDDFEVMKVVGKGAFGKVYQVRKKETSEIYAMKVMRKDHIMEKNHAEYMKAERDILTKIDHPFIVQLKYSFQTKYRLYLVLDFINGGHLFFQLYHQGLFREDLARVYTAEIVSAVSHLHEKGIMHRDLKPENILMDTDGHVMLTDFGLAKEFEENTRSNSMCGTTEYMAPEIVRGKGHDKAADWWSVGILLYEMLTGKPPFLGSKGKIQQKIVKDKIKLPQFLSNEAHAILKGLLQKEPERRLGSGLSGAEEIKQHKWFKGINWKKLEAREVMPSFKPEVSGRQCIANFDKCWTDMSVLDSPASSPSSDPKANPFTNFTYVRPPPSFLHQSTTTL

SEQ ID NO: 33353 - protein, 252 aa, Boea crassifolia
MADYQHHELKSEEPYAPTPVKIEEIDQPVEASDRGLFDFIGKKKDEEEEKKCDEGKFASEFDDKVQICDEKKEEPKFEVYEDPKLEVSEEPKEEEKKHESLLEKLHRSNSSSSSSSDEEEVEEGGEKKKKKKGLKDKVKEKITGDKKEEAAETKCEETSVPVEKYDEIHTLEPEEKKGFLDKIKEKLPGGKKTEEVYAPPPPKEDVAEYSTAPEAEGKEKKGFLDKIKEKLPGYHPKAEEEKEKEKREEACH

SEQ ID NO: 33354 - protein, 753 aa, Escherichia coli
MSQHNEKNPHQHQSPLHDSSEAKPGMDSLAPEDGSHRPAAEPTPPGAQPTAPGSLKAPDTRNEKLNSLEDVRKGSENYALTTNQGVRIADDQNSLRAGSRGPTLLEDFILREKITHFDHERIPERIVHARGSAAHGYFQPYKSLSDITKADFLSDPNKITPVFVRFSTVQGGAGSADTVRNIRGFATKFYTEEGIFDLVGNNTPIFFIQDAHKFPDFVHAVKPEPHWAIPQGQSAHDTFWDYVSLQPETLHNVMWAMSDRGIPRSYRTMEGFGIHTFRLINAEGKATFVRFHWKPLAGKASLVWDEAQKLTGRDPDFHRRELWEAIEAGDFPEYELGFQLIPEEDEFKFDFDLLDPTKLIPEELVPVQRVGKMVLNRNPDNFFAENEQAAFHPGHIVPGLDFTNDPLLQGRLFSYTDTQISRLGGPNFHEIPINRPTCPYHNFQRDGMHRMGIDTNPANYEPNSINDNWPRETPPGPKRGGFESYQERVEGNKVRERSPSFGEYYSHPRLFWLSQTPFEQRHIVDGFSFELSKVVRPYIRERVVDQLAHIDLTLAQAVAKNLGIELTDDQLNITPPPDVNGLKKDPSLSLYAIPDGDVKGRVVAILLNDEVRSADLLAILKALKAKGVHAKLLYSRMGEVTADDGTVLPIAATFAGAPSLTVDAVIVPCGNIADIADNGDANYYLMEAYKHLKPIALAGDARKFKATIKIADQGEEGIVEADSADGSFMDELLTLMAAHRVWSRIPKIDKIPA

SEQ ID NO: 33355 - protein, 214 aa, Ralstonia solanacearum
MYRPKRMLVGNVAWAHEIAERDPRFFSRLAQGQKPQVLWIGCADSRVPAETITHSNPGDLFVHRNIANLVCPADDNTMSVLEYAVRVLKVGHIIVCGHDGCGGVRASLLPQSDALPHVNRRIGPLCALAVRHRAELDAVPDMDDRVNRLAELNVLEQVRWLRESSIVREAEPAPRVHGWIFGLADGRIRVLGSGEPGEAPPVRGDILEPAEAEA

SEQ ID NO: 33356 - protein, 492 aa, Helianthus annuus
MDPYKYRSSSAYNAPFWTTNSGAPVYNNNNSLTVGSRGPILLEDYHLVEKLANFDRERIPERVVHARGASAKGFFEVTHDITALTCADFLRAPGVQTPVIVRFSTVIHERGSPETLRDPRGFAVKFYTREGNFDLVGNNFPVFFIRDGMKFPDMVHSLKPNPKSHIQEDWRIMDFFSHHPESLHMFTFLLDDIGVPQDYRHMDGSGVNTYTLINKAGKAYYVKFHWKPTCGVKSLLEEEAIKIGGANHSHATQDLYDSIAAGNYPEWKLFIQTIDPDHEDRLDFDPLDVTKTWPEDIFPLQPVGRLVLNKNIDNFFAENEQLAFCPAIIVPGIYYSDDKLLQTRIFSYSDTQRHRLGPNYLQLPANAPKCAHHNNHYDGFMNFMHRDEEIDYFPSRYDPARHAEQYPIPPVRLSGKRDKCVIEKENNFKQPGERYRSFSPDRQERFINRVVGGLSDPRVTHEVRSIWVSYWSQADKSLGQKIASRLNVKPNY

SEQ ID NO: 33357 - protein, 617 aa, Ralstonia metallidurans CH34
MNNTHPESLVALVALGSERGFLTHGEISDALPDSDFGQIQRVLEELGVQIVERTLANEPIRLEEHADALVVDEAVIEEAAAAVMQADGREARTTDPVQLYLREIGTIPLLTREDEVAIARRHEIAVTEMVAEMVSCPLVVYELLTMADEIERGEMAVDDLIDHWDEVPAAAVNVPAIEMSEAVQDDDPAPGAAGVDLEETDPVSTGASTARSSAALESEVIARLAIVRARFLDWSRQSRQQAATSDAFVALNAIRAELAVYHFSAAAVARLGQVLSTHIAAIQQAERRIAGIVIDRCGIAREQFLQTFPGHEIDLGWSEALAAERISGAADALVRAIPEIQAIQREMRVLENRAAMSLGDLKNLGQRVAKARARAQAARDEMIRSNLRLVVSNAKKYLHRGMPLLDLIQEGNLGLMRAVDRFDYRRGYKFSTYATWWIRQGITRAIADKGPTIRIPIHLVEVVGKVNRASRELFHETGEAPAPEALAARLSLSVKKVKAILDLVKEPLSLEMSVGESGDALLWDTLTDECSASPDESAMRVSLRKDLDEALATLKPREAKIVKMRYGVDAGTDYTLEEIGQQYGLSRERVRQLERQALRKLRNPDRAPRLQAHRDIH

SEQ ID NO: 33358 - protein, 177 aa, Listeria monocytogenes EGD-e
MTKESLEKATFAGGCFWCMVKPFDTQPGIEKVVSGYTGGHTVNPTYKEVCSGTTGHTEAIQITFDPAVFPYEKLVEVYWQQTDPTDAAGQFVDRGDSYRPVIFYHNEEQKEIAEKSKAALDASGRFKKPIVTEIAKAETFYPAEEYHQDFYKKEKAHYEGYQVASGRAAFIDANWKG

SEQ ID NO: 33359 - protein, 380 aa, Magnaporthe grisea 70-15
MQSRLCLWAATKCSRSASESQIGQGSRNNLKTSSSQGMSRGAETYRKASVLCSTGTALGNRRREISTGQNRTSGVLSLSRRREIYKLCSQFDIVLIEDNPYFSLYYPPSAGGETFDGASFPYGLFNELVPSFLRLDTEGRVIRLDSFSKSIAPGCRLGWIMASPTVCQHLFSIVDDTTQQPLGFVQVVIARLLSEPDGDDANGSSSRTSWGFQSWVGWLQGPRSAYRRRMVKMATVLERGKHVATASTTNGGGEDNKVAMFDFRWPMGGMFLWVEVKIKNHPLAVSVDLRRLMRDLWIKCIRPPYLVLTVTGDDFAETEAVKTGRGYKFLRFCLAAIEEDLLEEKPASFVPAYRDFWSIRRKEDVERIIKEEEAYQVTTS

SEQ ID NO: 33360 - protein, 55 aa, Coffea arabica
KRVERSSGQFMRRFRLPENAKMDQIKAAMENGVLTITIPKEEAKKTDVRAIQISG

SEQ ID NO: 33361 - protein, 455 aa, Zea mays
  misc_feature (115)..(115): Xaa can be any naturally occurring amino acid
  unsure (1)..(455): unsure at all Xaa locations
MGRHGVDQIGAVAAFVWVTLLPLLLVCVVWPGAQAGHTSEYRRQLGSAIDMPLDADVFRPPSGYNAPEQVHITQGNHDGTAMIISWVTTSEPGSSTVIYGTSEDNLNYTANGKHXSFDTKYYYAVGIGQTVRKFWFLTPPKSGPDVPYTLGLIGDLGQSFDSNVTLTHYESNAKAQGVLFVGDLSYADNYPYHDNVRWDTWARFVERSVAYQPWIWTAGNHEIDFAPELGETKPFKPFSHRYPTPYKASGSTAPYWYSIKRASAYIIVLASYSAYGKYTPQYKWLEAEFPKVNRSETPWLVVLMHAPWYNSYNYHYMEGETMRVMYEPWFVKYKVDVVFAGHVHAYERTHRISNVAYNVVNGLCTPIPDQSAPVYITIGDGGNQEGLATNMSQPQPSYSAFREASFGHAILDIKNRTHAYYTWHRNQDGSAVAADSMWFTNRYWEPTDDSADDFQ

SEQ ID NO: 33362 - protein, 731 aa, Zea mays
MGRGGIGGAAAMAMAMETADPARAFVKDVKRIIIKVGTAVVTGMNGRLAMGRLGSLCEQVKQLNFQGYEVILVTSGAVGVGRQRLQYRKLIHSSFADLQNPQMNFDGKACAAVGQSVLMAIYDTLFSQLDVTSSQLLVTDRDFKDPSFGDQLRETVFSLLDLKVVPLFNENDAISTRRQPYEDSSGIFWDNDSLAALLAAELNADLLIMLSDVEGLYSGPPSDPQSKIIHTYVNEKHGKLISFGEKSSVGRGGMQAKVSAAANAASKGVPVVIASGFATDSIITVLKGEKIGTLFHNEANLWACSKEATAREMAVAARDCSRRLQKLSSEERKQILLDIADALEANEDAIRSENDADVEAAQVAGYEKSLVARMTLKPGKITNLARSIRKTADMEDPISHTLKRTEVAKDLVFEKAYCPLGVLLIIFESRPDALVQIASLAIRSGNGLLLKGGKEVMRSNAILHKVITGVIPDTVGKKLIGLVTSKEEIADLLALDDVIDLVIPRGSKSLVSQIKATTKIPVLGHADGICHVYIDKSADMDMAKRIVLDAKIDYPAACNAMETLLVHKDLNKSEGLDDLLVELEKEGVVIYGGPVAHDKLKVPKVDSFRHEYSSMACTVEFVDDVQSAIDHINRYGSAHTDCIITTDRSAAEAFLQQVDSAAVFHNASTRFCDGTRFGLGAEVGISTERIHARGPVGVDGLLTTRCILRGSGQVVNGDKGVVYTHKDLPLQ

SEQ ID NO: 33363 - protein, 401 aa, Spirodela polyrrhiza
MDYVYGPGRNHLFVPGPVNIPEPVIRAMNRNNEDYRSPAVPALTKTLLEDVKKIFKTTSGTPFLIPTTGTGAWESALTNTLSPGDRIVSFLIGQFSLLWIDQQQRLNFNVDVVESDWGLGANLDVLAEKLAADHSHSIKAICIVHNETATGVTNNLATVRKLLDDYRHPALLLVDGVSSICALDFRMDEWGVDVALTGSQKALSLPTGMGIVCASPKALEASKTAKSVRVFFDWNDYLKFYKMGTYWPYTPSIQLLYGLRAALDLIFEEGLENVIRRHSRLGTATRLAVEAWGLKNCTQKEEWFSDTVTAVVVPGYIDSSEIVRRAWKRFNLSLGLGLNKVAGKVFRIGHLGNVNELQLLGCLSGVEMVLRDVGYPAKLGSGVAAAAAYLLNNTPLIPSRI

SEQ ID NO: 33364 - protein, 320 aa, Vibrio fischeri ES114
MKKTKITIIGECMIELSGNAFSTQTQSFGGDTLNTAVYLSRLLPHVSPYYLTALGQDQYSSLMLKAWEKENIDCSLVLRDQERLPGLYSINIDDKGERSFHYWRDNSAAKYMCQHLLFVPNIAKIMDADIIYLSGISLAILPTHDREILFDVLATLKKHGATIITDSNYRPRLWKNNLDAKFWLDNLYRLSDMALVTGDDEELLLDKPNMPEKEVADRLHALGVGHVVVKLGAKGAMWSTLEGKSGYVDGESVDKLVDTTAAGDSFNAAYIAAYSQGASMAESCAWGNRLASQVIQHKGAIIPMDYLQTLITDMGQINEK

SEQ ID NO: 33365 - protein, 136 aa, Brassica napus
  misc_feature (38)..(38): Xaa can be any naturally occurring amino acid
  misc_feature (40)..(40): Xaa can be any naturally occurring amino acid
  misc_feature (45)..(46): Xaa can be any naturally occurring amino acid
  misc_feature (50)..(52): Xaa can be any naturally occurring amino acid
  misc_feature (56)..(57): Xaa can be any naturally occurring amino acid
  misc_feature (74)..(74): Xaa can be any naturally occurring amino acid
  misc_feature (86)..(87): Xaa can be any naturally occurring amino acid
  misc_feature (108)..(108): Xaa can be any naturally occurring amino acid
  misc_feature (129)..(129): Xaa can be any naturally occurring amino acid
  misc_feature (134)..(134): Xaa can be any naturally occurring amino acid
  unsure (1)..(136): unsure at all Xaa locations
RQGTRETDRSTIVGGEIGDHGNHKTEADRSRGDRNRNXSXSESTXXGADXXXTPGXXERPKGNSWNRTLPPPGXQSRKWEDWGVPXXTSRSFLTIVILGVGLNAKPDXSIETWAHQKALERLQMERLAXSAGDXSD

SEQ ID NO: 33366 - protein, 418 aa, Burkholderia fungorum LB400
MGTLMRQYWVPAAKSSELKRDGDPMRLMLLGEKLIAFRDSEGRVGVLDHRCPHRCASLFLGRNEESGIRCVYHGWKFDVAGRCVDMPSVPPHQDFKDKVHAKAFRTAERNGLVWVYMGDAAEPPPLPAIEANLVADCEIWCLQRDCNWLQALEGDIDTSHVGFLHVGSLKPDDLADDHPMRPTVLDRAPEYAVTNTAWGTMYGGYRPNDDGQRSWRVAHFMFPFWTQTPNNRFSSRAIARAWVPMDDEHSMLFDITCGVDEGNPAYSSTRKTGEPLFAPFEYAPATTDWFGRWRCVDDRRNDWGIDRELQRNGSQYTGIPNITMQDQAVTESMGPIIDHSYEHLAPTDQMIARTRRRLLLATQALSEQGTLPPGAQDSDVFFGARAGSFLCDPGLPFETAYATQLETATRWAGDKVVS

SEQ ID NO: 33367 - protein, 151 aa, Triticum aestivum
  misc_feature (45)..(45): Xaa can be any naturally occurring amino acid
  misc_feature (116)..(116): Xaa can be any naturally occurring amino acid
  misc_feature (126)..(126): Xaa can be any naturally occurring amino acid
  unsure (1)..(151): unsure at all Xaa locations
MADQLTDDQIAEFKEAFSLFDKDGDGCITTKELGTVMRSLGQEPXREAELQDMINEVDADGNGTIDFPEFLNLMARKMKDTDSEEELKEAFRVFDKDQNGFISAAELRHVMTNLGXKKLTDEEVDXMIREADVDGDGRFNYEEFVKAMMGK

SEQ ID NO: 33368 - protein, 399 aa, Methanococcoides burtonii DSM 6242
MATVIKKNNILEDMKACIMCGGEGTRLRPLTFERPKPSIPILNKPSVVHLVEHLAKEGFTEIVITIGYMAEKIEECLGDGRMYGVYIEYVYEEKRLGTAGGVKNAEEFLKDEPFMIVGGDHVMDLSLRSIYRQHEMNDAMITIGLMSIDDPREFGIADMDVNNRIHRFLEKPGPGEIFSNLASTGIYMCSPEIFDWIPKDEKYDFAKDLFPALMSKGKKINGMLVRGHWTDVGSSTAYRQAQRWMLESLPGTSIEGNFNTKDARIQGPLKIGNNVIVGTNSALVGPMVIGNNTTIGDNVLIGPYTAIGSNCVIKDNCRILSSYIFNDVTIGSNTNASGSIIDNHTIVGQNCNLENGTVIGPRVIIRDDATIHSDVKIWPEVNIKAGSRIKETIINPEFD

SEQ ID NO: 33369 - protein, 446 aa, Burkholderia fungorum LB400
MSKNDLADLLRVGPETTMGKFMRQYWLPAVLSHEVKADGDPVRLMLLGEKLIAFRDSSGRVGVLDHRCPHRCASLFVGRNEENGIRCVYHGWKFDVDGNCVDMPSVPARLDFKEKVHARAYKAVERNGLIWVYMGENQNNPPPLPAIEANMIPGSKIWCLQRQCNWLQALEGDIDTSHVGFLHVGALQPEDLPEGSPLRPTVLNRAPEYRVQNAEWGATYGAYRLAEDGRMSWRAAQFMFPFWTMTPNILFSTRAIARAWVPMDDTHVMLFDITGGVDEGNPFFTTKLKNGEPMYEKIRRKPNGTGWYDRWLPVDGLQNDWGIDREAQRNMIHYTGIDNPSMQDQAITESMGPITDHSFEHLAPTDQMIAFVRRRLTQALRNFRDDSAPAPCAFSPETYFGARSGAFWADPVVEFSTAYRVELEKAQRWPANPDGSAVEREPEVAR

SEQ ID NO: 33370 - protein, 198 aa, Oryza sativa (japonica cultivar-group)
MLSLHDAMPLDFGLPDMDVGFGLFGVDAAAFGYDGVASDAAAGLSPVVGAGDGSGGGGDVLLYCDGGGGGGGGGEDGEEERRRRLRRKISNRESARRSRARRRQRVEELERAADELRAERRALASRLDATARRALAVRGANARHHAEAGVLRRRLGEAQRNAAVLIGLSRLLRSTANGAHGGAAPAQLSNGGVASLMT

SEQ ID NO: 33371 - protein, 319 aa, Haloarcula marismortui ATCC 43049
MTDTTVLVTGGTGFLGSYVVEDLIEHGHDVVAYDLSTDDHILSKLGVDDDVTIRRGDVSEATDVIHAVKETGTTHIVHLAALLTNTARDNPRAGLDVNIKGTNNVFEAARTLDDQIERVTWASSAAVYAPPHNYAEYVDENELVYPDTLYGATKEYNEHQARVYHEDYGVDHVGLRPTVAYGPYRETGGSAFLANIIEKPALGEPFSVEYGDQVIDWQHARDIAQAFRKATFVDEDDLSQRIYNVRGVLATIREAANAVREIVPDADLDVSDEGELPWTQNLDMTAAQNDLGYEVEYDLESGFRSYINTLREENGLESL

SEQ ID NO: 33372 - protein, 368 aa, Thermotoga petrophila
MTVLIVEDDDITREAMGQYLKLSGIDVIEAENGEKAVELSKDVDVALVDVMLPGMSGIEVVNKIKAKNPSCVVFVVTAYDDTGIIKKCVEVGTDDFIKKPVNLELLRLKITHALRNRVFHLYRNSYLKSLKKKLFLLEKTAEEFFTEYEDFLFEVLEILNMLSEYRDMETHRHTERVGWLSGRIAEEMGMSEVFVTEIQFAAPLHDIGKIGIPDRILLKPGILTPEEFEIMKQHTTIGFKILSRSNSPILQLGAEIALTHHERWDGSGYPRGLKGREIPISGLIVAVADSFDAMVSKRPYKNPKPLEEAFREIESLSGKLYSPEVVEAFLKLEKEITDVYRREKDEDTSNNGRRSHQSSSGEGVEGIR

SEQ ID NO: 33373 - protein, 859 aa, Clostridium perfringens str. 13
MKKVHVVSHSHWDREWYIPFQKHRVKLVDFMDSLIDTLENNEHFKYFHLDGQTIALDDYLEIKPYMFHRLKKLIEEGRLHVGPWYVLQDEYLISAEANVRNMLLGMRFAKRFGNPVKIGYFPDSFGNISQAPQILRGFGIDNAVFGRGITPIAFDNQKVEEAGENEYHSEVLWKSPDGSEVLGILMANWYSNGNEIPVYKKEAIEFLNDRVNKADMYATTNQVLLMNGCDHQPVQTNVGDIIDNVKEDVDFELVHSNLVQYIEDVKKEVKDLKEVTGELNGQYTDGWWTLCNTASSRLYLKQMNNKSQVLLERYVEPLGVMASLEGKKYESDFILQAWKYLIQNHPHDSICGCSIDEVHQDMVTRFKSSMQISEEMIARSTEHMLNLVNGTTTDRESIVVFNTLGWDRSEVVEATVDVNKESGIENFKVVTENGEEVPSVVEVLGETFKYTLPNNRFRQPEYVNRFKVKFLANNIKALGLKSFKIVPCEKREEKEVSKDLTFENKFFSLKFNENGTFDLIHKGTNKEYKNLNAFEDCGDIGDEYIFRAPEKDLVVNTLGNKASINVLKDNEVEKVIEVKNTLEVPVKAIKKESRRVEETTEIKLVSTIILSEVSKRVDIKVEIENTAKDHRVRALFPTGIEASTHFAEGHFDVIERETTPWEGWQNPSNCQKQTNFVDVNDGKVGLMVANMGLPEYEVLRDGENTIALTILRSVGELGDWGVFKTPEAQCLGKNVAEYSIIAHEGDYTGERAYEEAYNLNTPMLALQGDFKDEDSLVSIKGENVVLSAFKKAEDGDSIIVRIFNISDKEENFQIKVNRDVKEINEVNLNEELIEKLEVKENAINGIISKKQIKTFEIVL

SEQ ID NO: 33374 - protein, 706 aa, Lycopersicon esculentum
YFSIPIELVYFVQKSAVFPYRWVLVQFGAFIVLCGATHLINLWTSTPHTRTVAMVMTTAKFSTAAVSCATAVMLVHIIPDLLSVKTRELFLKNKAAELDREMGLIRTQEETGRYVRMLTHEIRSTLDRHTILKTTLVELGRALQLEECALWMPTRTGVELQLSYTLHHQNPVGFTVPIQLPVINQVFSANCAVKISPNSAVARLRPTRKYIPGEVVAVRVPLLHLSNFQTNDWPELSPKSYALMVLMLPSNSARQWHVHELELVDVVADQVAVALSHAAILEESMRARDLLIEQNVALDLARREAETAVRARNDFLGVMNHEMRTPMHAVVALSSLLQESELIPEQRLMVETILKSSNLLATLINDVLDLSRLEDGSLQLDVGTFNLHALFREVLNLIKPVAAVKKLFVTLSLSSDFPEVAIGDEKRLMQILLNVVGNAVKFSEEGSVSVSAVNAKSESLIDPRAPEFFPVQSENHFYLRVQVKDTGSGINPQDFPKLFCKFAQNQEPATKNSAGTGLGLAICKRFVNLMEGHIWIESEGVGKGSTAIFIVKLGIPGRLNESKLPFTAGLPANHMQMTFQGLKVLVMDDNGFSRMVTKSLLVHLGCDVTTIGSGDECLRILTREHKVLIMDASITGMNCYDVAVSVHEKFGKRLERPLIVALTGNTDQVTKENCLRVGMDGVILKPVSIDKMRSVLSGLLEHGTVL

SEQ ID NO: 33375 - protein, 445 aa, Pseudomonas fluorescens Pf-5
MTISRVHPVDEVLPVRQLFTFGLQHVLVMYAGAVAVPLILGNALGLTPAQVVLLINANLLTSGIATLVQTLGFWRFGARLPLIQGCSFIALAPMIMIGKQFGLTEVFGAVIAAGVITIALAPLFSRLLRFFPPVVIGSLITIIGISLMPAAAIWLGGGNPAADDFGAPANLLLGLATVAVTLVIYGKFSGFIGNLSVLIGLLVGSLIAAAFGMTDFAQVSQAAWFELSRPMAFGAPQFSLVPILIMTLAMLVIMAETTGNCLAIGKLTGKPTTQRTLGDAFRADGLSTLLGGLFNSFPYNAFTQNTGLIALSRVKSRFVVAAAGAIMVLMGLFPKLGALVAAVPTPVLGGCAIVMFGMTTVAGIQELSRVPFEGTRNAIVVAVSVSVGVLPMSFPALFAHLHGPLRLVLESGIFLGAITAIVLNLLLNPREAAAQVLAAHVELND

SEQ ID NO: 33376 - protein, 327 aa, Erwinia chrysanthemi
MTTKNIAIIGECMIELSRKARISIRGFGGDTLNTAVYISRQVKPDALDVHYVTALGTDSFSSEMMASWQKEGVKTDLIQRLDNKLPGLYFIETDATGERTFYYWRNDAAARYWLESPDADTISQQLAQFDYIYLSGISLAILNQASRARLLTVLRACRANGGKVIFDNNYRPRLWQSKEETRQAYSDMLACTDIAFLTLDDEDMLWGELPVDEVLKRTHGAGVMEVVIKRGADACLVSIQGEALLEVPAIKLPKEKVVDTTAAGDSFSAGYLSVRLNGGSAQDAAKRGHLTASTVIQYRGAIIRWKRCLPEQRYSAEETKNAASVPY

SEQ ID NO: 33377 - protein, 353 aa, Arabidopsis thaliana
MDKYDVVKDLGAGNFGVARLLRHKDTKELVAMKYIERGRKIDENVAREIINHRSLKHPNIIRFKEVILTPTHLAIVMEYASGGELFDRICTAGRFSEAEARYFFQQLICGVDYCHSLQICHRDLKLENTLLDGSPAPLLKICDFGYSKSSILHSRPKSTVGTPAYIAPEVLSRREYDGKHADVWSCGVTLYVMLVGAYPFEDPNDPKNFRKTIQRIMAVQYKIPDYVHISQECKHLLSRIFVTNSAKRITLKEIKNHPWYLKNLPKELLESAQAAYYKRDTSFSLQSVEDIMKIVGEARNPAPSTSAVKSSGSGADEEEEEDVEAEVEEEEDDEDEYEKHVKEAQSCQESDKA

SEQ ID NO: 33378 - protein, 533 aa, Borrelia burgdorferi B31
MKKNLKILVITGGVISGIGKGVTSASIARLFRYDFRVTPIKCDGYLNTDPGTINPVEHGEVFVLDDGGEVDMDFGHYERFLNLNAKSSWNITMGKIYKKILENERKGKYLGRTVQLIPHVTDEIKSTIFQIASSENSDMLIIEIGGTVGDMENILFIETVRQIRQEIGSGNISFIHLTYVPSPAGINEQKSKPTQQSVKTLNKAGIFPDLIIARSSQVLTDQIRKKVAMFCNVESTSIIDNVDVSTIYEIPISFYKQGVHEILSSKLNIKVDPKIEELSKLVGVIKSNFFVPKKIINIAICGKYAELDDSYASIRESLVHVAAHLDLLIKSTLIDSNDLNESCLKEFDGIIVPGGFGGKGYEGKIMAIKYARENNIPFLGICLGLQLAVIEFARNVCGILDADTEENLARDKPLKSPVIHLLPEQKGIKDKGATMRLGGYPVILKKNTIAFKLYGQDRIIERFRHRYEVNNDYIDLFAKNGLIVSGFSSDFKMAKLIEIPENKFFVACQFHPELITRIENPAKLFLGLIKACI

SEQ ID NO: 33379 - protein, 83 aa, Glycine max
PKTPWPNVDAHSEVLLTHFGLTQENFYTVLFGVSRALGVLSALVWDRALGFPIERPKSVTTEWIKKNFHGKEAPPKKAGGSEE

SEQ ID NO: 33380 - protein, 265 aa, Triticum aestivum
  misc_feature (87)..(87): Xaa can be any naturally occurring amino acid
  misc_feature (95)..(95): Xaa can be any naturally occurring amino acid
  misc_feature (213)..(213): Xaa can be any naturally occurring amino acid
  unsure (1)..(265): unsure at all Xaa locations
MLAIFQKQVAHAPQELNSPRGSTAKPKNPDEILRDFHAAHPSDAFSTSFGGGAALACVAAQPRNLAAAGYQRMFCGLDDIYCVFMGXLDNLSALXRQYGLTGRSTNEALLVIEAYRTLRDRGPYPADQVVKDLSGSFAFVVFDNRGRSGSGAAVFAAQSTDGGVPLHWGVAADGSVVICDDRGVAKAGCGLSYAPFPPGCMFHSEGGLKSFEXPMNRLKALPRVDSEGVMCGANFKVDAFTKINSMPRVGSATNWGRHLGTKAAI

SEQ ID NO: 33381 - protein, 458 aa, Bacillus cereus ATCC 14579
MKRGLEARHIQMIALGGTIGVGLFMGSASTIKWTGPSVMLAYAIAGIFIFFIMRAMGEMLYMEPSTGSFATFGHKYIHPLAGYMTAWSNWFQWVIVGMSEIIAVGAYMQYWFPDLPAWIPGIIAMVILGAANLISVKSFGEFEFWFAMIKIVTILLMIIAGFGLIFFGIGNGGEAIGISNLWSNGGFFTGGFSGFFFALSLVVGAYQGVELIGITAGEAKDPKKTLTRAIQSTIWRILIFYIGAIFVIVTVYPWDQLSTIGSPFVATFAKVGITAAAGLINFVVITAAMSGCNSGIYSAGRMLYTLGVNGQAPKYFTKLSGNGVPLFGTVGVIIGLAVGVVLSYIAPKNLFVYVYSASVLPGMVPWFVILISQINFRKEKGAEMKDHPFKMPFAPVTNYLTIAFLIMVLIGMWFNDDTRISLVVGIIFLAIVTISFYAFGIGKRAPLDVQNNKEISSK

SEQ ID NO: 33382 - protein, 387 aa, Ralstonia solanacearum
MSEADSSTPAGAFKPKKSVALSGVTAGNTALCTVGRTGNDLHYRGYDILDLAAACEFEEVAYLLVHGKLPNKAELTTYKARLKALRGLPANVKAALEWVPASAHPMDVMRTGVSVLGTVLPERDDHNLPGARDIADRLMASLGSMLLYWYHYSHNGRRIEVETDDDSIGGHFLHLLHGVEPSKSWVDAMHVSLNLYAEHEFNASTFTGRVIAGTGSDIYSAITGAIGALRGPKHGGANEVAFEIQKRYDTPDEAEADVRRRVEAKEVIIGFGHPVYTISDPRNKVIKEVARKLSKEAGNTRMFDIAERLETVMWDVKKMFPNLDWFSAVSYHMMGVPTAMFTPLFVISRTSGWAAHVIEQRIDNKIIRPSANYTGPEDLKFVPLGKR

SEQ ID NO: 33383 - protein, 216 aa, Pisum sativum
MVRGKTQMKRIENATSRQVTFSKRRNGLLKKAFELSVLCDAEVALIIFSPRGKLYEFSSSCMQDTIERYRRNTRSAQPLQRSDEQNMQNLKQETASLMKKIELLEASKRKLMGEGLGSCSLEELQQIEQQLEKSVSTVRAERIRFYKNQIEQLKEKEKVLLAENSRLSKQPQPQLLQLPPPPPPNDHPRENQPYAESSSPSSDVVTELFIGLHRSS

SEQ ID NO: 33384 - protein, 565 aa, Zymomonas mobilis
MMEIAGSYGRYFRRSLVYTIIATLIQVASYAVLVPLMMAICHDKPNTEIWSWVGFYAATIVVEVFFRLKSMNFNYQYWPCVIGEQRIRLAEALYKMPLLQLREKDVGDLSEIMGSNVMNAANALSSLANIFVEVVSLPILLWVAITLFDYRMGLILAVSLIAMLPILYKIQAIYNSSSADLDRADAESASRIIEYVKGIAVFKATSQAGAKSPRLEAVFHDQQEIQSHGNKSSASYISLCQFIVQLALVILIAFAGYLAQKHSLNIPKTVALVIIAVHIIEPLNTIAAISKLFEIAEISLQRIKNILNSKGLPQLQPQAIPQKFDINFNQVTFEYPDSPVVLHDIDLALPSESLTGVVGSSGCGKTTLVQLIARFADPTKGEIKIGGVDIRSLTQSQLSSLLSIVYQDVWLFNDTIRANILMGRPEATEEELIHAAQSANIHDFICSLPQRYDTLVGEVGSSLSGGERQRISIARAILKNTPIIILDEPTASLDSESEYAVQRAISSLIKGKTVIMVAHRLNTLTAADKIIVLDRGSIIEEGCHEDLIKNKSYYYNMWNTQLKLT

SEQ ID NO: 33385 - protein, 1014 aa, Oryza sativa
MISLHSAPFTLLVKLPGRRRSGLTPPRCAVRGAGNVSSAAVREMAVAEGRRQHEYSIDARLRQLAPEKVSADDRLVDYETLLVARFLDILEDLHGGDFRQVVEDCLRLSGEYQSEGDPARLGELGGLLTSLDVGDAIMVASSFSHMLNLANLAEEIQMVYRKKAEASRRGDFVDEASAPTESDIDETFQRLVRGLGKSPREVFDALRSQTIDLVLTAHPTQSVRRSLLQKHASIRSCLTQLCGEGISDNEEQEIDEALQREILAAFKTDEIRRTPPTPQDEMRAGMSYFHDTIWNGVPKFLRRVDTALKNIGIDERLPYNAHEDQFSSWMGGDRDGNPRVTPEVTRDVCLLARMMAANMYFSKMADLMFELSMWRCNDELRARANELHRKSSRKYAKYYIEFWKKISPGEPYRIILGDVRDKLYNTCERARQILSKGISSIPEDQTYTNVEQFLEPLELCYRSLCDCGDKLIADGRLLDLMRQVSTFGLSLVKLDIRQESERHTDAMDAITTHLGIGSYREWPEERRQEWLVSELRGRRPLFGPDLPQSEEVADVLGAFRVIAELPADSFGAYIISMATAPSDVLAVELLQRECGVKKPLRVVPLFEKLADLQQARATMELLFSVDWYKERIDGKQEIMIGYSDSGKDAGRLSAAWQLYKAQEEIVGVAERHGVKLTIFHGRGGTVGRGGGPSHLAILSQPPNTVNGSLRVTVQGEVIEKSFGEENLCFRTLQRFTAATLEHGMNPPVSPKPEWRRLLDDMATVATDEYRSIVFQEPRFVEYFRAATPETEYGRMNIGSRPSKRKPGGGIESLRAIPWIFAWTQTRFHLPVWLGFGAAFRHAMQQSDAGGGLATLREMYDEWPFFRVTIDLLEMVFAKGDPGIAALYDELLVPDDLRPFGEQLRANYVETQRLLLQVAGHKDLLESDPYLRQRLMLRDSYITALNVCQAYTLKRIRDGGFRPETRPPLSKELLGSSAVAEKLVKLNPNSEYDPGLEDTLILTMKGIAAGMQNTG

SEQ ID NO: 33386 - protein, 285 aa, Streptococcus agalactiae A909
MTSPEERYSSLRRFATEIRLNTLETLNHLGFGHYGGSLSIVEALAVLYGDIMDINPEKFKESDRDYMVLSKGHAGPALYSTLYLKGFFDKTFLHSLNTNGTKLPSHPDRNLTPGIDVTTGSLGQGISIATGIAYAQKIENSSYYTYTIVGDGELNEGQCWEAIQFAAHHQLHHLIVFVDDNKKQLDGLTADICNPGDFVAKFEAFGFDAVRVKGDDIEAIDKAIKTFQDSNSVRPKCIVLDSIKGQGVKELEELASNHHLRPDLQQKTMLERALISLRESLEVVE

SEQ ID NO: 33387 - protein, 362 aa, Oryza sativa (japonica cultivar-group)
MAMVPSGSGGGPPVIAEVEMNGGADSGAATVRATVVQASTVFYDTPATLDKAERLIEEAAGYGSQLVVFPEAFVGGYPRGSTFGFGANISIGNPKDKGKEEFRKYHAAAIEVPGPEVTRLAAMAGKYKVFLVMGVIEREGYTLYCSVLFFDPLGRYLGKHRKLMPTALERIIWGFGDGSTIPVYDTPLGKIGALICWENKMPLLRTALYGKGIEIYCAPTADSRQVWQASMTHIALEGGCFVLSANQFCRRKDYPPPPEYVFSGLGEEPSPDTVVCPGGSVIISPSGEVLAGPNYEGEALITADLDLGEIVRAKFDFDVVGHYARPEVLSLVVNDQPHLPVSFTSAAEKTTAAKSDSTAKPY

SEQ ID NO: 33388 - protein, 467 aa, Leptospira interrogans serovar Copenhageni str. Fiocruz L1-130
MSAEFDVVVIGAGPGGYVCAIRCAQLGFKTAIIEKRKTLGGTCLNVGCIPSKALLDSSEEYHKTLHKLEVHGISVGKVDLDLNKLMNRKDQIVKEVTDGVDFLMNKNKIKRYEGFGKVLSAGKVEVAFNDGKKETLSAKHIVVATGSVPIDIPGLTVDGKNIITSDHAIDVRKLPKKMIIIGAGVIGLELGSVWGRLGTSVTVVEFLPGLISNVDRQMGSLLERSLTSQGMEFLFEHKVKGATTTKNGVKVQIEDSKGESKDLEADVVLVAVGRRPFLEGVGLEEVGVAFTQRKRIQVDAHFKTSVPGIYAIGDAIDGPMLAHKAEEEGVALAELLAGQSGHVNYNAVPYVIYTWPEMAWVGKGEEELKAAGIEYKVGKSLFRPNARSKAMNEAEGQVKILADKKTDKLLGAFVFGPRASDMVAELAVAMEFGASAEDIARSFHAHPTLSEVIKEAAMAVDKWAIHA

SEQ ID NO: 33389 - protein, 309 aa, Thiomicrospira crunogena XCL-2
MTQQTLLLTGATGFIGSHLLGKLLEQGYDVVVLKRSSSDIWRIQHLADQVRMYDVDTQPVSEVFESEKIDVVIHMATLYRKFDNGNEVSEMLASNVTFPTEILEAGARNGIKGFINTGTFFEYDCSRQPVDENAPIVPFNFYAKTKLAFETVLKTHSDTMMVNTFRLFSPYGEKDNQKLVPMIIQKALKGEAIELSEGLQKIDLIYVEDIVSGYMKAVERILSDTFQPEYEVFNLGSGVALSIRDVVSIVEQKIGKPLKKTWGEASEVDIPIAYADITKLARILHWKPEYTASQGIENTVNFYQKEGMK

SEQ ID NO: 33390 - protein, 472 aa, Bradyrhizobium sp. BTAi1
MRRHRRAKIVATVGPASNSPEMLKALFLAGVDTFRLNFSHGTQADHAKVHAAIRALEKDVQRPIGILMDLQGPKIRVGTLRDKKIQVESGETIRFVLNGTEGDKTSIPLPHPEIFAAVAPGHDLLIDDGRVRVRVTGLGDDWIEAKVIVSGTISNHKGINLPGTILELSPLTPKDRSDLAFGLELGVDWVALSFVQKPSDVLEARGLINGRAGIMSKIEKPAALDRIDDIIQLSDAIMVARGDLGVEIPNEDVPGKQKELVRACRLAVKPVIVATQMLDSMVATPTPTRAEVSDVATAIYDGADAVMLSAESASGQYPREAVAMMDSIIKATEGHKMYRSIVEATQPGEEQTPPHAVATAAADLASAIHAKAIVAYTSSGTSASRVARKRPSLPILAITPNEDTSRRMCLLWGAHSVLSQDVQSYEEMVERATFFAVQEEFAQTGDLLVVVAGIPFAQAGTTNNLRVVTVPR

SEQ ID NO: 33391 - protein, 247 aa, Broussonetia papyrifera
MATNGEGKQNEAGRHQEVGHKSLLQSDALYQYILETSVYPREPEAMKELREITAKHPWNIMTTSADEGQFLNMLLKLINAKNTMEIGVYTGYSLLATGLALPDDGKILAMDINRENYELGLPVIEKAGVAHKIDFREGPALPVLDQMIEDGKYHGSFDFIFVDADKDNYLNYHKRLIELVKVGGVIGYDNTLWNGSVVAPPDAPLRKYVRYYRDFVLELNKALAADPRIEICMLPVGDGITVCRRVS

SEQ ID NO: 33392 - protein, 440 aa, Burkholderia fungorum LB400
MLSHQDNEILVRVGPGTPTGQFMRLFWLPFLPSSDLSVDGQPQRVRLLGEDLLAFRDSEGRVGLVDHACPHRGAPLVFGRNENSGLRCVYHGWQFGVDGRVIETPAEPIESRLKEKVRIKSYPCRERNGIVWTYMGDASADGLPPLPNLEWNMVPVENVHFSFRVQECNWLQAVEGEIDSAHAPILHGRIDSQGAINEWTAKRDLRPVFECQRQDFGISIASRRVLDEEHHYWRVNQFLFPFYTLVPPQSKYPELSGHAWVPIDDENTLCLMFSYTPATPLYEKTRQLFEQGHQGRETGHASVNAYEPRPVTNPYAKYWTRYNLESAFQFDYDAQTKTWFSGLPGLWVQDAACQSGVAPIYDRSKENLGISDTGVAMTRRLLLENVRKLAAERVSTVQVDEPDLWMVRAVSLTLQAGASWQNDGAVHMRARLGADFGYKP

SEQ ID NO: 33393 - protein, 272 aa, Triticum aestivum
  misc_feature (19)..(19): Xaa can be any naturally occurring amino acid
  misc_feature (50)..(50): Xaa can be any naturally occurring amino acid
  misc_feature (64)..(64): Xaa can be any naturally occurring amino acid
  unsure (1)..(272): unsure at all Xaa locations
SISALIFGGAKQSEDGSTXCAGYNIQKEVPPSTFSWVLGGGMQIFWKTLXTGKPVTLKVKLSDXTIDNVKAKIQDKEGIPPDQQRLIFAGKQLEDGRTLADYNIQKESTLHLVLRLRGGMQIFVKTLTGKTITLEVESSDTIDNVKAKIQDKEGIPPDQQRLIFAGKQLEDGRTLADYNIQKESTLHLVLRLRGGMQIFVKTLTGKTITLEVESSDTIDNVKAKIQDKEGIPPDQQRLIFAGKQLEDGRTLADYNIQKESTLHLVLRLRGGQ

SEQ ID NO: 33394 - protein, 441 aa, Salmonella enterica subsp. enterica serovar Paratyphi A str.
MPQPGLTTPDNDALPWQTTLLLALQHVLVVAATPITSVFLIAKALHFTDTVTASVLSATFLMCGLGAILQSLGVKGVGARLPFIMVPGGAPIAIFVAIALQTNIQTAIGAVILTSLFYFIALPIFRRCLHHFPPFIIGIMLLMVSINLIRLYGGLIIGQPGSADFAHPTSIILSLGTILITLIFALAFSGILRQLAVMFGLLAGTLLGMALGSTDFSGVSHGPLFSFPQLLPFGWPIFDLSASLPLLIYAVISMAEATGQTIATAEIVNSTQNVQQAIPRTIRGDAVMSLLGGIFGTSLIITSGENIGVVRTTNVKSRFVTAAAGGLLILIAIFAPLVRLATCLPGSVVCGTAVIVFSIIGVIGIDMIAREPLHTPGKTYALAMGLAMGMLPILVPGLYQNFPAGVQMVFGNGMAAGTLTAILVNSLFNWSEKRTQARAKS

SEQ ID NO: 33395 - protein, 311 aa, Streptococcus pneumoniae TIGR4
MHEIYLAGGCFWGVEEYFSRVPGVTDAVSGYANGRGETTKYELINQTGHAETVHVTYDAKQISLKEILLHYFRIINPTSKNKQGNDVGTQYRTGVYYTDDKDLEVINQVFDEVAKKYDQPLAVEKENLKNFVVAEDYHQDYLKKNPNGYCHINVNQAAYPVIDASKYPKPSDEELKKTLSPEEYAVTQENQTERAFSNRYWDKFESGIYVDIATGEPLFSSKDKFESGCGWPSFTQPISPDVVTYKEDKSYNMTRMEVRSRVGDSHLGHVFTDGPQDKGGLRYCINSLSIRFIPKDQMEEKGYAYLLDYVD

SEQ ID NO: 33396 - protein, 345 aa, Burkholderia fungorum LB400
MFLRNMWYVAAFSADVKPGKCLARTFLNEPVVLFRTASGSLGALIDRCSHRAMPLSEGHVDGDIIRCPYHGLEFNAAGVCAHIPGQERIPAAANVRSYPVSERDGLIWIWMGEPEKADLRSIMSNPEHRDPGWSWRPYYMHVNSNWQLLVDNILDLTHVAYIHANTIGGNPQTHFNADMSVQFDGEKVTLLRKMPNSVPPKTYVAAGGFKGNVDRWQMVEYRPCGGNVLRVNAGACEVGTGAYEGRRDNGFTLLNVHGVTPETETTTHYIWTICTDAPRESGVPDMLFDQFYETICEDERALEAQQRRINDMPDMRFVGIASDGAVSRARLLLERLHENETAVTS

SEQ ID NO: 33397 - protein, 560 aa, Moorella thermoacetica ATCC 39073
MKKFAALFLAVVIAVTMLAAPAASSAAGTPQYDLGASAQPDHITLTWTQDPLTTQTITWRTNITIARGLVQYAKAADKASFPGKAATVEATVQKFTSDLGDMNIHTATLTGLEPGTEYIYRVGDGTNWSDIHTFTTEASNTHSFKFLIFGDSQSGDPLNPEYKPWHDTIQNAFKTNTDAKFFVNVGDLVEQGQNYVHWNKWFEAAKGVIDTIPAMATQGNHETYNPPDGHSTKPIFWTTQFKLPQNGPEGLKGQAYSFDYGNAHIVMLDSQEEEEKGVAGDILAAQKAWLEKDLQNTNKPWKLVFFHKTPYYNKATRTNEDIKAAFQPLFDKYHVDVVFNGHDHAVARTYPIAGDKFVSSPAKGTIYYLTGRSGNKYYPDLSAKVWDAFFYDPQDQPNYIVAELNGDKLTLRAMKQDGTPIDTYTIDKASGLDTPQTIVPPKYNSTRLVIFGNMLQQPLLPVTPKQVNGQWYIPVRAFMQFLGGNVAWYDDGSVTIVYGKDKVQMASKSARATINGQEVNLPGSSLMDKNTLFIPAADLEEFFGFSYKYDAATNMLMFTK

SEQ ID NO: 33398 - protein, 617 aa, Helicobacter hepaticus ATCC 51449
MVDYGINFWANNDFIIKDGKVKVNFKHKPALIDIVQDAREKGYKGPLLLRFPHLIKNQVDKVFKAFESAIKEYSYKGKFKAVFPLKVNQMPNFVLPLVEQSQDKCYGLEAGSKSELILAMAYVNKNAPITVNGFKDKEMISLGFSAANMGHDITLTIEGLNELETIIEVAKELGEPYPNIGLRIRLHSIGVGIWAKSGGINSKFGLTSTELLEAINMLEKEQLLHKFTMIHFHIGSQMSDISPLKKAIREAGNIYAELRKKGAKNLQCVNIGGGLAVEYTQHEGKNSCNYTLSEFSGDVVFSLREIAKNKKEPEPDILIESGRFIAANHAVLIAPVLELFSQEYDEKALKLKKHNPPLIEELFDLYNSVVEKNAIEYLHDSLDHMESLLTLFDLGYIDLQDRSNTEVLVHLIIKKVIKLLKHKSHNEILQIQEQVQERYLLNCSFFQSLPDYWGLGQNFPVMPLDRLNRRPNRSASLWDITCDSDGEIAFNPMQPLFLHDVDVTKEEYFLGFFLVGAYQEVLSMRHNLFTHPTEFSIEFDDDLNKGYEITRLIEAQTSLDVLDDLDYDTKEIERRLKQHIEENQNLDEEGKKEMLGQLYVMLSENSYLRTIATKGRE

SEQ ID NO: 33399 - protein, 264 aa, Pinus taeda
MAIEILLGVAPMEEGRRGRSCGSLLPSVRKVVAEFIGTFFLIFVGCGSVVVDKISNGSITHLGVSLVWGMAAMIVIYSIGHISGAHLNPAVTLALAAVKRFPWVQVPGYIVAQVFGSISAGFLLRFMFGEVAFMGATVPSGSEMQSFALEIITTSLLVFVVSAVATDTKAVGELGGLAIGATIAMNVAISGPISGASMNPARTIGSAVAGNKYTSIWVYMVGPVIGALMGAMSYNMIRETKMSEREIMKSGSFVKDMGSSESTA

SEQ ID NO: 33400 - protein, 89 aa, Brassica napus
  misc_feature (22)..(22): Xaa can be any naturally occurring amino acid
  unsure (1)..(89): unsure at all Xaa locations
PGYEHLNEQLHILIEAELPIEXVDARLMQAREILDDLLTRVEEPHDFYKKQQLRELALLNGSLREEGSPMSGSVSPYNSLGMKRAKTRD

SEQ ID NO: 33401 - protein, 467 aa, Vigna radiata
MRLLSTIATCNSHGQDSSYFLGWQEYEKNPYDELHNPKGIIQMGLAENQLSFDLLESWLAKNPDVAGFKRDGKSIFRELALFQDYHGLPSFKKALVDFMSEIRGNKVTFDPNHIVLTAGSTSANETLMFCLAEQGDAFLLPTPYYPGFDRDLKWRTGAEIVPIQCTSSNNFQITEPALKQAYEEARKRNLRVKGVLVTNPSNPLGTTMSRSELNLLVDFIKEKKDTHLISDEIYSGTVFSSPGFVSVMEILKERNDTEEIWNRVHVVYSLSKDLGLPGFRVGAIYSENDTVVAAATKMSSFGLVSSQTQYLLSAMLGDKKFARNYIVENQKRLKRRQRMMVSGLQKAGISCLESNAGLFCWVDMRHLLHSNTFEAEMELWKKIVYQVGLNISPGSSCHCTEPGWFRVCFANMSEETLTLAMKRLKNFVVESTCTQRSALFNGTSKRKSLTKWVFRLSSRDHREQEER

SEQ ID NO: 33402 - protein, 403 aa, Zea mays; identical to SEQ ID NO: 900

SEQ ID NO: 33403 - protein, 570 aa, Triticum aestivum
  misc_feature (260)..(260): Xaa can be any naturally occurring amino acid
  unsure (1)..(570): unsure at all Xaa locations
MAASAVLALLLASALAGAAAGGDIVHQDDQAPKIPGCNNDFVLVKVQSWVGGNEGDEFVGVGARFGPKIVSKEKQATREPLTLADPIHACAPPKNKLVSGGVLLVERGKCKFTKKAKLAEAAGASGILIINSVTELYKMVCEKNETELDIHIPAVLLPKDAGQALRSLLTANTSSVGVQLYSPDRPVVDTAEVFLWLMAVGTVLCASYWSAWSAREAVTEQEKLLKDGHEVSLTVEGGGSSGIVDINVISAMMFVVVASXFLIMLYKLMSAWFIDLLVVIFCIGGVEGLQTCLVAILSRWFTSAAGSFVKVPFFGAISYLTMAVSPFCVVFAVLWAIYRQFPYAWIAQDILGIALIVTVIQIVRVPNLKVGSVLLSCAFLYDIFWVFVSKSLFHESVMIAVARGDNTDEDGVPMLLKIPRMFDPWGGYSIIGFGDILLPGLVVAFALRYDWAAKKKSLRSGYFLWSASAYGTGLLITYVALNLMDGHGQPALLYIVPFTLGTLMSLGWKRGELRNLWFKGEPERVCTHQDQGYVQMAKPPAAAAEDEDDDEDAEEGKNTPGASPGPSCSS

SEQ ID NO: 33404 - protein, 546 aa, Shigella flexneri 2a str. 301
MTPGEVRRLYFIIRTFLSYGLDELIPKMRITLPLRLWRYSLFWMPNRHKDKLLGERLRLALQELGPVWIKFGQMLSTRRDLFPPHIADQLALLQDKVAPFDGKLAKQQIEAAMGGLPVEAWFDDFEIKPLASASIAQVHTARLKSNGKEVVIKVIRPDILPVIKADLKLIYRLARWVPRLLPDGRRLRPTEVVREYEKTLIDELNLLRESANAIQLRRNFEDSPMLYIPEVYPDYCSEGMMVMERIYGIPVSDVAALEKNGTNMKLLAERGVQVFFTQVFRDSFFHADMHPGNIFVSYEHPENPKYIGIDCGIVGSLNKEDKRYLAENFIAFFNRDYRKVAELHVDSGWVPPDTNVEEFEFAIRTVCEPIFEKPLAEISFGHVLLNLFNTARRFNMEVQPQLVLLQKTLLYVEGVGRQLYPQLDLWKTAKPFLESWIKDQVGIPALVRAFKEKAPFWVEKMPELPELVYDSLRQGKYLQHSVDKIARELQSNHVRQGQSRYFLGIGATLVLSGTFLLVSRPEWGLMPGWLMAGGLIAWFVGWRKTR

SEQ ID NO: 33405 - protein, 393 aa, Solanum tuberosum
YAFSTNFDPLQQNLWGSKPPISSLSIKDIDFKQCDKHNILSKKPLYISAVLSGFGHADESKEFKSRDPLVQCNAYEASQPQSIPIDIEFGQEAQAAATQKLKIGLYFATWWALNVVFNIYNKKVLNAFPFPWLTSTLSLAAGSLMMLVSWATKIAETPKTDFDFWKALFPVAVAHTIGHVAATVSMSKVAVSFTHIIKSGEPAFSVLVSRLLGETFPLPVYLSLLPIIGGCGLAAITELNFNLIGFMGAMISNLAFVFRNIFSKKGMKGKSVGGMNYYACLSMMSLLILIPFAIAVEGPQVWALGWQNAVSQIGPNFIWWVVAQSVFYHLYNQVSYMSLNEISPLTFSIGNTMKRISVIVSSIIIFQIPIQPINALGAAIAILGTFLYSQAKQ

SEQ ID NO: 33406 - protein, 247 aa, Bacillus cereus ATCC 14579
MKLKDKVAIITGGASGIGESTVRLFIEEGAKVVIADFSERGKELSDELNAHGYNTLFIKTDVTKEADIKQLIHETVSTYGKLDIMYANAGVADDAPANELSYEKWKRTIDINLSGVFLSDKYSIEQFLKQGTGGVIVNAGSIHSFVSLPTPTAYSSAKGGVKLLTQNLCTAYAKYGIRINAVCPGYIDTPLLGSVNPQQKEYLASLHPQGRLGTPEEVAKAVLFLASDDASFVNGTTLLVDGGYTAR

SEQ ID NO: 33407 - protein, 553 aa, Daucus carota
MNRNSINILNYMQFTDAYLDKYGVLMTLELYSNNISGPIPSDLGNLTNLVSLDLYMNSFSGPIPDTLGKLTRLRFLRLNNNSLSGPIPMSLTNITTLQVLDLSNNRLSGPVPDNGSFSLFTPISFANNLNLCGPVTGRPCPGSPPFSPPPPFIPPSTVQPPGQNGPTGAIAGGVAAGAALLFAAPAMAFAWWRRRKPREHFFDVPAEEDPEVHLGQLKRFSLRELQVATDTFSTILGRGGFGKVYKGRLADGSLVAVKRLKEERTPGGELQFQTEVEMISMAVHRNLLRLRGFCMTPTERLLVYPYMANGSVASCLRERQPSEPPLDWPTRKRIALGSARGLSYLHDHCDPKIIHRDVKAANILLDEEFEAVVGDFGLARLMDYKDTHVTTAVRGTLGYIAPEYLSTGKSSEKTDVFGYGIMLLELITGQRAFDLARLANDDDVMLLDWVKSLLKEKKLEMLVDPDLENNYIDTEVEQLIQVALLCTQGSPMERPKMSEVVRMLEGDGLAEKWDEWQKVEVIHQDVELAPHRTSEWILDSTDNLHAFELSGPR

SEQ ID NO: 33408 - protein, 454 aa, Colwellia psychrerythraea 34H
MTQHFDYLAIGGGSGGIASANRAAKLGKKAAVIEAKYIGGTCVNVGCVPKKAMWYAGQISDALKYASDYGFAQHLTQDTPQFDWAKLVANREAYIERIHAAYQRGFDANDVTVIDGFAKFVDKNTVEVNGELITADHITIATGGRPTLPNIEGADYGIDSDGFFALTEQPKSVAVVGAGYIAVELAGVFHALGTKAHLLVRKEKPLRGFDNMLSDTLVEQMAKHGPTLHNHSTPERIEKLADGSLVIHLTNGKTIGPVETLVWAIGREPATDNINLAAAGVAMNERGFIETDKYQNTNVDGIYAVGDNTGRAQLTPVAVAAGRRLCERLFNNKPEEHLDYSGIATVVFSHPVIGTVGLTENEAIAQYGEENITVYKSQFTALYQAITEDHRDPTRMKLICAGKEEKVVGLHSIGFGSDELLQGFAVAMKMGATKADFDNTIAIHPTSAEEFVTM

SEQ ID NO: 33409 - protein, 264 aa, Humulus lupulus
MGRAPCCDKTKVKRGPWSPEEDAALKHYMHNNGTGGNWIALPHKAGLNRCGKSCRLRWLNYLRPDIKHGGFTEEEDNVVWTLYSNIGSRWSVIASQLPGRTDNDVKNHWNTKLKKKLLARSTNCNETTNTTDHLNLARFSPLIPKTENSDQGNSAYCYTNSDTLPYLMNGNCVQNFDLKKPSKPSYSSNPVQVSDFGTNGNTSSSISSTREASSLSTSSSTLAMENYTNFASWSGTGIESTEDGILVDLGFDSSNDVFLSGFGF

SEQ ID NO: 33410 - protein, 723 aa, Thermotoga sp. RQ7
MWLLFLIPLVALGFAAANFAAVVKKPEGTDRMKEISSYIRSGADSFLAHETRAIFKVAIVIAILLMIFTTWQTGVAFLLGAVMSASAGIVGMKMATRANVRVAEAARTTRKIGPALKVAYQGGSVMGLSVGGFALLGLVLVYLIFGKWMGQLDNLNIYTNWLGINFVPFAMTVSGYALGCSIIAMFDRVGGGVYTKAADMAADLVGKTELNLPEDDPRNPATIADNVGDNVGDVAGLGADLLESFVGAIVSSIILASYMFPIYVQRVGENLVHQIPKETIQSLITYPILFALVGLGCSMLGILYVIVKRPSDNPQRELNISLWTSAILTVVLTAFLTYFYLKDAQGLDVVGFRFGPISPWFSAIIGIFAGILVGFWAEYYTSYHYRPTQFLSRSSIEGTGMVISNGLSLGMKSVLPPTLTLVLGILFADYFAGLYGVAISALGMLSFVATSVSVDSYGPIADNAGGISEMCELDPEVRKITDHLDAVGNTTAAIGKGFAIGSAILAALSLFASYMFSQISPSDVGKPPSLILLLNMVDARVIAGALLGAAITYYFSGYLISAVTKAAMKMVDEIRRQAREIPGLLEGKAKPDYNKCIEITSDNALKQMGYPAFIAILTPLVTGFLLGPEFVGGVLIGTVISGAMLAILTANSGGAWDNAKKFLEAGNLEGYGKGSEPHKALVIGDTVGDPLKDTVGPSLDILIKIMSVVSVIAVSIFKHVHLF

SEQ ID NO: 33411 - protein, 235 aa, Corynebacterium glutamicum ATCC 13032
MDNQSDGQIRVLVVDDEPNIVELLTVSLKFQGFAVMTANDGNEALKIAREFRPDAYILDVMMPGMDGFELLTKLRGEGLDSPVLYLTAKDAVEHRIHGLTIGADDYVTKPFSLEEVITRLRVILRRGGAVEEDTSTSLQYADLTLNDETHEVTKAGELIDLSPTEFNLLRYLMLNAEVVLSKAKILDNVWHYDFGGDGNVVESYISYLRRKVDTQDPQLIQTVRGVGYVLRTPRS

SEQ ID NO: 33412 - protein, 343 aa, GIBBERELLA ZEAE PH-1
MPISTINDSISESSVHKSSIPTKVEMSQNEKYSEAPSEAPTIPPPPEQYAWSRIRENCQDAFSEFFGTFVLLLFGDGVVAQVVLSRGTKGDYQSISWGWGSSLTGLSLGVMLGVYVGGKSGGHLNPAVTLANCLFRGHPWRKFPIYAVAQVLGAMAAAAVVYGNYKSAIDAYEGGPGIRTVIGENATAGVFCTYPAEFMTRTGMFFSEFIASTILQFVIFAMADSANIGAGPLMPLGLFFLIFGIGACFGWETGYAINLARDFGPRLVSYMLGYGSEVWSAGGYYFWIPMVAPFFGCAFGGFLYDVFIYTGPSPINTPGMGFGRLVSPRRSTWSNTYNANSPV

SEQ ID NO: 33413 - protein, 172 aa, Brassica napus
  misc_feature (155)..(155): Xaa can be any naturally occurring amino acid
  unsure (1)..(172): unsure at all Xaa locations
EQSFGEEHLCFRTLQRFTAATLEHGMRPPVSPKPEWRDPRVRGRVGATEEYRSVVFQEPRFVEYFRLATPELEYGRMNIGSRPSKRKPSGGIESLRAIPWIFAWTQTRFHLPVWLGFGAAIRHVVEKDVKNLHMLQDMYQHWPFFRVTIDLIENXSAKRGSGIRCLYHKLFV

SEQ ID NO: 33414 - protein, 223 aa, Triticum aestivum
MAALLARQAALALRARQTARLGPSATAMQGHLRTYMDAGAPKRFKEDEEKEQLAKELAKDWSAVFERSINTLFLTEMVRGLMLTLKYFFERKVTINYPFEKGPLSPRFRGEHALRRYDTGEERCIACKLCEAICPAQAITIEAEEREDGSRRTTRYDIDMTKCIYCGFCPEACPVDAIVEGPNFEFSTETPEELLYDKEKLLQNGDPWETQIAENLKAGALFR

SEQ ID NO: 33415 - protein, 619 aa, Candida albicans SC5314
MSSSHPDRTHQFTHSNTKRRASIVYGSVGKGGLYLPSDFIPTKDNGHNNTFDNEDEEADNNNETQPLLPDSFGNSPSTLLYNKKKIRRKSSVINHELIEEERELLKDNHIPIPETNGSTNAIQDEAVAQEEEDQEDNIIRDTFENAIINKEIQSTTSTIELKNLIKSSIPLVLTFLLQNSLSTVSVFSVGHLGATELAAVSMGAMTANITGYATIQGIATALDTLCPQAFGAKKYKLVGSYLQKCTALISVIMLPIFIIWIFFGYDLICLILPDKETAKLSAVYLKYLTFGMPAYILFECGKRFLQAQGIYHISTYVLLIAAPSNLIMNLLFVKHIGYLGAPIAVAINYWIMFSGLIILTVFYVKPEDTPSGLHPMECWGGFSIKDAFHDWKKLIVLAIPGLIMLEAEFLAFEILTLMASYLGTIALAAQSVGTTMAALTYQVPFAIGIASSTRIANFLGAGLGDAAKITTKVALLFGLFISVFNFLVLFIFQTQIAKAFTNDEKVISAVTNVMWLIALMQISDAMNANSAGCLRGQGQTKIGGIVNLFSYYVVGLPLSVYLSFYSPWKGSLHGLWIGSTVALTIIGSVQSYYALTVDFNKLCDDARKRTNTENHHNHV

SEQ ID NO: 33416 - protein, 733 aa, Arabidopsis thaliana
MFLFFSVLGTEIVSGLVTNVASILWKWLWSLQTSTTTTTTTKSGVSSRSMVKYESGYNMETVFDGSKLGIEPYAIEVSPNGGELIVLDSENSNIHKISMPLSRYGKPKLLSGSQEGYTGHVDGKLKEARMNRPRGLAMDDRGNIYVADTINMAIRKISDDGVSTIAAGGRWSGGSKEESMRFSDDFDLIYVSSSCSLLVIDRGNQLIKEIQLHDHDCSQPEPDTDSLHLGTALLVAAVFFGYMLALLVRRVRSLFSSSSHDTKSKRHVATPSMTMAPYQRYPRPVRQPLIPPQHESEKEEGFLGSLGKLVVKTGSSVSEMMSGSRNVIPPNFHQYHHQQEPNQWPVQESFAIPEEDGPPALEPRSGTNPDKPYLRAQGTNQNRSYYQDYDQYQNQQKRNVNDTASFEDNREKNEIVFGAVQEQDGRREAMVIKAVDFNEAINDQRNLRPRINYMGYSSQLPGLTAYCTDLTSYTMRSDHLIFNKSTGSISVHISKTDGQYEREIEDEEEEGDFLQEKEKIRVRVAEKQRGRRIRRIQIQALYSSLSLSLNLYDLSQNQSHCFMGLESFPISEMDATDEMHEAMFAKRGCCFILPCLGSSQPSGPNGSVWWQRIRTVDKLEPDERWWVSGWMKMREWSEIVAGPKWKTFIRRFGRNHCCNGGIDGGCNRPEHVSFRYDSWSYSLNFDDGKQTGHFEDEFPYRDYSMRFAAPSLPVSTKCSIDFDNDNHAPSLFK

SEQ ID NO: 33417 - protein, 89 aa, Oryza sativa
MASSRWVRPEVYPLFPAMGVAVGICGFQFFRNITGNPEVRVNKVGRAAGVLQNPEEGRRYPEHGLRNYVRDKTPEIMPAINKFFPEPTK

SEQ ID NO: 33418 - protein, 258 aa, Glycine max
MDHQGHSQNPSMGVVGSGAQLAYGSNPYQPGQITGPPGSVVTSVGTIQSTPAGAQLGQHQLAYQHIHQQQQHQLQQQLQQFWSNQYQEIEKVTDFKNHSLPLARIKKIMKADEDVRMISAEAPVIFARACEMFILELTLRSWNHTEENKRRTLQKNDIAAAITRTDIFDFLVDIVPREDLKDEVLASIPRGTMPVAGPADALPYCYMPPQHASQVGAAGVIMGKPVMDPNMYAQQSHPYMAPQMWPQPPDQRQSSPEH

SEQ ID NO: 33419 - protein, 371 aa, Bacillus thuringiensis serovar konkukian str. 97-27
MKTLELQERLTEIFQHLHENPEVSWKEYETTAYITNFLKEEGISYKIFDDCPGVIAEIGSGNPVIAVRADMDALWQEVNGEFKANHSCGHDAHMTIVMGLILQLKNMRWKSGTVKFIFQPAEEKGNGALKMVEKGAVDDADFLFGVHLRPIEELSLKQAASSIRHGAAGFLEGTIHGEDAHGARPHQGINAIDVISMINIGLKNIWLPPQSSYSVKMTRCQAGGDNLNIIPGNGHFSLDVRAENNTLLEELKKRIEHVIESAASMGSKTSYEWIDLAPGAEVSEEAERFMRKGILEVYGEDKCTGPLYTTGSDDFHYYTVKRPYLKAVMLGLGADLQPGLHHPYMKFDHSCIMDGVEILKQTVLKVLEDRG

SEQ ID NO: 33420 - protein, 645 aa, Borrelia burgdorferi B31
MSDTVPKRFKDVVALYSELDIFMYKEGESKSFKKQIYADFWNETKRVASGLLHCGIKRGEKVVIISDSRREWIIIDVATLGLGCVDVPRGNDSSEDELAYIINHSESTFIFVENNKQLHKVLSKKHDLRLVRCIVVIDDDKSYEEKIGNITVFSYKKLLELGTEYLRANPKSFDMEIEKGSSKDIATIIYTSGTTGMPKGVMLRHESFIFQLDRLYDYLPTLKPGKIMISILPLWHSFERACEYIVALKGIAIAYSKPIGPVLLKDFLLLNPQMIVSVPRIWEGIRIGIIKKVSESFIKKFVFGGFLKVGIIYAKLKERFLGLSPIYKKTNFLISLFSKLFLFIGIVLIFPIKLLGDILVFKKIKNALGQNFEFGVSGGGALVDYVDYFFKAVGIKVLEGYGLTETGPILSVRRLKGPVAKTVGPILPDVEYKVVGIDGRVLPYGEKGELWVRSPQIMSGYFKDKAKTSEVLTEDGWFNTGDLVRLTINNEISIVGRSKDTIVLRGGENIEPEPLERVLGKSLFIENIMIVGQDQKFLGAVIVPNFDNLEKWANSSGVSFSSRSDLLANEDVNKLYSKHISDTINTKLGFKNFEKIVGFVLLQDPFTIGEELTNTLKLKRYYISKKYEDKIKLIFSKSDLDLNGY

SEQ ID NO: 33421 - protein, 435 aa, Listeria monocytogenes EGD-e
MLGKGKIAALGFQHVLAMYAGAVIVPLLIGGALGFNGEEMTYLVSIDIFMCGIATLLQLTVNRFFGIGLPVVLGCAVQAIAPIILIGQDMGIGAIYGSIIVSGLFVLLIAPFFSKVVRFFPPVVTGSVVTVIGLTLIPVAINNLAGGEGAKDFGSMYNLGLGFGTLLLIILVYRFGQGFSKAIAVLIGLVGGSLFAALYKGISLGPVSEASWFHMPKPFYFGTPTFEWPAIITMILIALVSMVESTGVYFALSDITERKLTQKDLTRGYRAEGLAIMLGGVFNTFPYTAYSQNVGLVQLSGIKTRKVIYAAAGFLIVLGLIPKIGAVTTIIPTPVLGGAMVAMFGMVVAQGIKMLGKVNFTSQENLLIIACAVGVGLGVTVVPDLFNAFPSFVRLFTSNGIVAGSVTAITLNIIFNMIPHRKDKKVADPEPQHAK

SEQ ID NO: 33422 - protein, 230 aa, Streptomyces purpurascens
MQAWQVHENGEPSEVMRLEDASATPAKAGLLSARANITPDACCAALQSARCLIGVEICGETEDGRRVIANPALPHGFAEYAVADAAALLPAPDALDDAEAAALHIGYQTGWFGLHRRAGLEAGETLLVHAAAGGVGSAAVQLGKAAGATVIGVVGGPGKAAVARELGCDVVIDRRAEDVVAAVKEATGGRAPNVIYDPVGGEAYTQSAKVVAFEGRIIVVFAGGTIPARP

SEQ ID NO: 33423 - protein, 201 aa, Brassica napus
  misc_feature (26)..(26): Xaa can be any naturally occurring amino acid
  unsure (1)..(201): unsure at all Xaa locations
DAQDQEDEFDDNVEEETAVIGFWSGXVWLVGMTLVIALLSEYVVATIEEASESWGLSVSFISIILLPIVGNAAEHAGAIIFAFKNKLDISLGVALGSATQIGLFVVPLTIIVAWILGINMDLNFNLLETGSLALSIIITAFTLQDGTSHYMKGLVLLLCYIIIAICFFVDKLPQKQPNAVHLGHQLMNNVAAAVGEGVFSS

SEQ ID NO: 33424 - protein, 133 aa, Xanthomonas campestris pv. campestris str. ATCC 33913
MTENMAAGGELAGLKVMVIDDSKTIRRTAETLLKREGCEVVTATDGFEALAKIADQQPQIIFVDIMMPRLDGYQTCALIKGNQLFKSTPVIMLSSKDGLFDKARGRIVGSEQYLTKPFTREELLSAIRTYVNA

SEQ ID NO: 33425 - protein, 571 aa, Magnaporthe grisea 70-15
MADEKGTVGSGTLPTYGASPDASHQDMAMDGREENFYTRNGLNLESFKCRSYGQGIVELDRSMKKRHLHMIAIGGSIGAGFFVGSGAAFAKGGPGAVFIDFAIIGVMMFNVVYALGELAVMYPVSGGFYTYSVRFIDPSWGFAMGWNYVFQWAVVLPLELTVCGLTLNYWEGTQAVPLWGWILIWWFAIIIINIFGTLGYAEEEFWSSCLKLSAIVIFMIIAFVLVLGGGPKGGKYDSYWGARHWYEPGAFQNGFKGFCAVFVTAAFSFSGTELVGLAAAESANPAKALPGAIKQVFWRITLFYILGLFFVGLLVSSTDDRLLSSNPYADGTSPFVIAAKDAGLVGFDHFMNVIILVSVLSIGVSCVYGGSRTLTALAQQGYAPKVFTYVDKSGRPLASVFVIIACGALAFLNLDAGAEKVFSWLLSLSGLAALFTWGSICLAHIRFRQAWKAQGHTLDEIPFQAALGVTGSWIGLILCVLVLIATFYSALFPYNKPGVGTAESFFQEWLSVPVILFFWACGYIWKREGGLKLEQIDVDTGRREHDWDQINAYKAELAAMPSWKRFVKKIF

SEQ ID NO: 33426 - protein, 469 aa, GIBBERELLA ZEAE PH-1
MAPVTKETDYLVIGGGSGGLASARMASNKFGIKATIVENKRLGGTCVNVGCVPKKVTYNAAALAEAIHDSKAYGFSVQETAPFDWSTFKTKRDAYIKRLNGIYERNLNNDKVDYVHGWARLTSKNQAEVTLDDNSKVLINAKKILVAVGGKPTIPPEIPGSEYGTNSDGFFDISTQPKKVAIVGAGYIAVEFAGMFNALGTETHLFIRHDTFLRNFDPMIQEAVTKEYERLGVKLHKRSQASKIEKDSNGKLTVTYKDDQGNESVVSDVDNLIWAIGRTPETKGIGLEEAGVKLAKSGHIIVDEYQNTDVDSIYALGDVTGEVELTPVAIAAGRRLAHRLFGGAEFSTLKLDYSNIPSVVFSHPEVGSIGLTEPEAIEKYGKDNIKVYKTSFTAMYYAMMEPEQKGPTNYKLITTGPEEKVVGLHIMGIGSGEMLQGFGVAIKMGATKADFDSCVAIHPTSAEEIVTLK

SEQ ID NO: 33427 - protein, 316 aa, Arabidopsis thaliana
  misc_feature (79)..(79): Xaa can be any naturally occurring amino acid
  unsure (1)..(316): unsure at all Xaa locations
TRKVVLDLWFVDSELVYSWKILFKVPEHQVAGHIAKDGKPGPLVDDKGRFFKPLQGDSRGEIEAKFYESLSTRGKVLRXFSSNTEGPEHIHRYLPVYHGTQAVEGSDGAAMMVLENLLAEYSKPSVMDVKMGSRTWYPDASEEYIQKCLKKDTGTTTVSSGFRISGFEVYDHKESSFWKPERKLLRGLDVDGARLTLRKFVSSNSLSDTGSKPDSAFASSVYGGSHGILTQLLELKTWFENQTLYHFNSCSILMVYENESILKGNDDDARPQVKLVDFAHVLDGNGVIDHNFLGGLCSFINFIREILQSPDESADS

SEQ ID NO: 33428 - protein, 606 aa, Zea mays
MDTHIGSVNGAASNQTVGCPASAPGCPMASTPAQPAATLSAGEASLGRHLARRLVQVGVNDVFAVPGDFNLTLLDHLIAEPGLRLVGCCNELNAGYAADGYARARGVGACAVTFTVGGLSVLNAIAGAYSENLPVICIAGGPNSNDYGTNRILHHTIGLPDFSQELRCFQTVTCHQAVVNNLDDAHEQIDTAIATALRESKPVYLSISCNLPGLPHPTFSRDPVPFFLTPRTSNKMGLEAAVEATVEFLNKAVKPVLVAGPKLRVAKAGKAFVDMVDASGYAYAVMPSAKGLVPETHPHFIGTYWGAVSTAFCAEIVESADAYLFTGPIFNDYSSVGYSFLLKKEKAIIVQPERVIVGNGPAFGCVMMKEFLSELAKRVNKNTTAYENYKRIFVPEGQPLESEPNEPLRVNVLFKHVQKMLTGDSAVIAETGDSWFNCQKLKLPEGCGYEFQMQYGSIGWSVGALLGYAQGANHKRVIAFIGDGSFQVTAQDVSTMLRCEQNSIIFLINNGGYTIEVEIHDGPYNVIKNWNYTGFVDAIHNGEGKCWTSKVKSEEELTAAIETALGEKKDCLCFIEVIAHKDDTSKELLEWGSRVSAANSRPPNPQ

SEQ ID NO: 33429 - protein, 324 aa, Salmonella enterica subsp. enterica serovar Paratyphi A str.
MKPSIILYKTLPDDLLHRLEAHFTVTQVPNLHPETVARHAQAFASAQGLLGASETVNRALLEKMPALRAASTISVGYDNVEVDALTARKIVLMHTPAVLTETVADTVMALMLATARRVVDVAERVKAGEWTESIGPAWFGVDVHHKTLGIVGMGRIGMALAQRAHFGFTMPVLYHARRRHQEAEDRFNARYCDLDTLLQEADFVCVILPLTTETRHLFGTTQFARMKSSAIFINAGRGPVVDENALIAALQNGEIYAAGLDVFEHEPLSVDSPLLNMSNVVAVPHIGSATHETRYNMMACAVDNLIDALQGKIEKNCVNPQAAG

SEQ ID NO: 33430 - protein, 233 aa, Azoarcus sp. EbN1
MKFARRHTERHRTDRLGWMRAAVLGANDGIVSTASLVVGVAAAGSGQGAALVAGVAGLVAGAMSMAAGEYVSVHSQADAENADLSRERTELERQPIAEHRELAAIYIARGLEPGLAHQVADQLMAHDALGAHARDELGISATLSARPVQAALSSAASFAVGAALPLAVTALAPAQGLIAWVSGTSLAFLALLGAVAARVGGASVPTGAWRVTFWGALAMAVTAGVGALFGAVA

SEQ ID NO: 33431 - protein, 360 aa, Lolium perenne
MGSTAADMAASADEDVALFALQLASSSVLPMTLKNAIELGLLEILVAAGGKSLTPTEVAAKLPSAVNPEAPDMVDRILRLLASYNVVTCLVEEGKDGRLSRSYGAAPVCKFLTPNEDGVSMAALALMNQDKVLMESWYYLKDAVLDGGIPFNKAYGMSAFEYHGTDPRFNRVFNEGMKNHSIIITKKLLELYHGFQGLGTLVDVGGGVGATVAAIAAHYPAIKGVNFDLPHVISEAPQFPGVTHVGGDMFKEVPSGDAILMKWILHDWSDQHCATLLKNCYDALPANGKVVLVECILPVNPEANPSSQGVFHVDMIMLAHNPGGRERYEREFQALARGAGFTGVKSTYIYANAWAIEFTK

SEQ ID NO: 33432 - protein, 466 aa, Cytophaga hutchinsonii
MYDVVVIGSGPGGYVAAIRCAQLGMKTALIEKYSTLGGTCLNVGCIPSKALLDSSEHYYNATHTFKEHGIDVKDVKVNLKQMIDRKAGVVKQTCDGINYLMKKNKVDVHTGIGSFVDKNTIKVTAADGSVKELKTAKTIIATGSKPTSLPNVAIDKKRIITSTEALELTEVPKHLIVIGGGVIGMELGSVYARLGAKVSVVEFMDTLIPTMDKALGKELIKVSKNHLGFDFYFSHKVTGATAKGKEVTVTAEDKDGKVLELKGDYVLVATGRRPYTEGLGLEAAGVKLDERGRVAVDGHLQTNVPGIYAIGDVVVGAMLAHKAEEEGVFVAESIAGQKPHINYNLIPGVVYTWPEVAAVGYTEEQLKKDGKAYKVGNFPFKASGRARASMDLDGFVKVLADKETDEILGVHMIGPRVADMIAEAVVAMEFRASAEDISRMSHAHPTFTESFKEACLAATDNRALHI

SEQ ID NO: 33433 - protein, 450 aa, Helicobacter hepaticus ATCC 51449
MSYASNVLNKLKEQYPSQTLFHQAVAEVFESLEPALQKDKKYETYAILERLTIPDREIHFRVSWTDDNGKIQTNRAYRIEFNAAIGPYKGGLRFHPSVNEGVIKFLGFEQILKNSLTTLAMGGGKGGSDFDPKGKSEGEIMRFCQAFMNELYRHIGATTDVPAGDIGVGGREIGYLFGQYRKLTNCFEGVFTGKAIPWGGSLVRTEATGYGCVYFAQEMLKDRGESLEGKVCSVSGAGNVAIYTIEKLLQLGAIPVTASDSQGMIYDKEGIDLALLKEVKEIKRLTLAEYAKARPQAVYTKVADYPKDSNPVWAIPCFAAFPSATQNELNGNDAKTLLANGCKCVSEGANMPSTIEAVHQFLDAKICYGPGKAANAGGVAVSGLEMAQNASMNPWTFEVVDKRLHTIMESIYANASETAKEFGEPTNLVLGANIAGFRKVAGAMIDQGVI

SEQ ID NO: 33434 - protein, 581 aa, Cryptococcus neoformans var. neoformans JEC21
MNPLRSRAALPRPARLIQNAAVQKRGFASKDVVFGNDARQGMLKGVDVLAKAVAATLGPKGRTVIIGQSFGGPKITKDGVSVAKAITLKDPVENLGARLVQDVASKTNDTAGDGTTTATVLARAIYSEGVKNVAAGCNPMDLRRGAQKAVDKVLEVLAANKKVITTSEEIAQVATISANGDTHVGAIIAQAMEQVGKEGVITVKEGRTIDDEIEITEGMRFDRGFISPYLITDTKNQRVELEKPFILLSEKKISALQDILPSLEIAAQTRRPLLIIAEDIDGEALAAVILNKLRGQLSVAAVKAPGFGDNRKSILGDIAILTGGTVFTDELDVKLEKATPDMFGTTGSVTITKEDTIILNGEGDKSLIQSRCEQIRALINDSSTSDYDRTKLQERLAKLGGGVAVIKVGGSSEVEVGEKKDRYDDALNATRAAVEEGIVPGGGTALLKASTALEDIAVDNFDQKLGISMIRQAIRRPVRTIVENAGEEGSVVVGRLLSEEFAAPEKFNWGYDAQTSQYRDMIAAGILDPLKVVRTALVDASGVASLLTTSEACVVDAEEKTPPSGMGMGGMGGMGGMPGMM

SEQ ID NO: 33435 - protein, 725 aa, Cryptococcus neoformans var. neoformans JEC21
MESIPIELVFDRVESGSVLLVDTRPLASFLNSHLPNSIPLSVPTLLSKRFQKSQSQSNPSAISWATLSPFVSLPSARERWDSVDQNKVEIAVICQGEEGRVVEDILKSLINDRTKVVKGGWAAVLNYERARRTLVSGQATTRPCLDVGVSETDSKPRPEPTSILLPPKSAPPCEIPLPPIPASPSPSSPKSLNHRPSLPSLRPPFAGPTRNLPSLSINAGQASQRRTPKLSLNLDRPLKSATLGGYHDIPPTPHGFLCTRTRPQRSPGLSLNIPHTPFQPQQGQVQDRIVGDSRSNGSASIQTRAYEQSHFPPSASTFGDAKQIENEGEDMAPNQYDGRTPRAPISHSPRKSQEYQAARFYSSPPSMNGALPSSPPTIRTAVAPFNPSVILPSFLYLGPDIQSESDVQYLLRLGVKRILNVALECDDNQGLSLKERFKYRKVGMRDIVEENGVGKGMRDACEFLDDARLHSAPTYVHCQAGKSRSVTIILAYLIHANAWTLKTSYAYVAERRKGISPNIGFVAELMQWEETELGVKQSGGVHGDGNGRAKTAGCGGGGGSSRHKEDGDDDEGRAKTHLRDSLPPTWSSSVDTYTRPAKVYSPVGGDDGGEEEGGREGRIAVGDEREVRKNGVWVHHRRAPVDRTTLQPGRRVSKAGLESLQPFLITSADPSSPSAAPNNGDNIDNEHQLNNNNDSETRPSPRAISGMGMRGHAMTPAGDGPLRWI

SEQ ID NO: 33436 - protein, 349 aa, Treponema denticola ATCC 35405
MKVAINGFGRIGRLVFQALVNQNLLGKDKFDVVAVVDLSTDAKYFAYQLKYDSVQGKMDAKIGTDGDDVLVVNGHKIKCISGKGLTPAQLPWKELGIDVVIESTGIYTNEKAYEHLEAGAKKVIISAPGKSKDPAKPIKTFVMGVNENEYKASEHHVVSNASCTTNCLAPVVHVLLKEGFGIETGLMTTIHAYTATQKTVDGVSLKDWRGGRAAAVNIIPSTTGAAKAVGEVLPTTKGKLTGMSFRVPTPTGSVVDLTIRTEKDTSIEEIDKAIKKASESYLKGVLAYCDEEIVSTDIIHDPHSSIYDSKATLQNNLPGEKRFFKLVSWYDNEWGYSNRVIDLLKFITK

SEQ ID NO: 33437 - protein, 381 aa, Haloarcula marismortui ATCC 43049
MTASDSQAVVVDAVRTPQVPKDGALAGTHPEDLVSTVLTALVDRTGVPAVEWDDFRLGCANQEGEQGRNLARQSILAGGFPETVPGATTTRLCGSSLTTLVDAARAIEAGDGAVYPVAGVEHMSTVPFSDWLHPAIEQRYDPDRLPMGQTAETIARTHDISRKAQDEFALRSHERAVAAMESGRFDAETVPVHTDETAVESDKTPRADTSVEQLSELPTVFRDDEAATVTPGNASPLTDGAAGMLVTSAAYADQHGLDVLGRIETRSVAGVDPLVMGRGPIPATRAALDNAGLTIDDIDLVELNEAFAAQSLHCKRELGIPTERLNVNGGAIALGHPLGCSGARITTTLLHEMQRQDATHGLATMCVGFGQGIAVVFENPC

SEQ ID NO: 33438 - protein, 494 aa, Pyrenomonas salina
MGTSGVRFLTLVKPFMFALPEVSSATKKIPVNEKLLWTSIVVFLYLVCCQIPLYGITNTKSSDPFYWMRVILASNKGTLMELGISPIVTSGLVMQLLAGSKIIDVDQGTKEDKTLFQGAQKLLGILITIGESVAYVLSGMYGDVKDLGAGNAILIIVQLFTSGIIVICLDELLQKGYGIGSAISLFIATNVCESIVWKSFSPTTINTGRGTEFEGALVALFQLMITKTDKVRALQEAFYRQNLPNVTNLLATVLVFVLVVYFQGFQVELPITPAKSKGMAGQFYPIKLFYTSNMPIILQTALVSNLYFISQILYKRYPENIIIHILGRWEEPEMSVSGQMRPVGGIAYYISPLNSFAEIVSDPVHALLYIIFILASCALFSKTWIQVSGTSASDVSKQLRDQQMVMKGFRASSMQRELNRYIPTAAAFGGMCIGALSIVADFMGAIGSGTGILLAVTTIYQSWETILLAVTTIYQSWETIRKESRDTDALKMFG

SEQ ID NO: 33439 - protein, 294 aa, Vibrio fischeri ES114
MAYAKLDMRVCEEQGLNDSYSLYLKEINRYQLLTAEEELAYSRLYKKGDVSARNTLIESNLRLVVKVANKYRKRNQTDLAILDIIEEGNLGLIKAIDKFNPELGYRFSTYAVWWIRESIESALFNHSRTVRLPVHITKELNTYLRAARELSKSLKREPSIRDISTYCEEEQIKVSKIISLIPNQLTCHSACSDELSPKFFELSSNNKALEPDSSLSQNNLEMNLSSWIDSLNYREKEIIINRYGLFGCKVKTLEDLGKDLDLSKERVRQIQSETLIKLNTIFKKNKLDLEIALG

SEQ ID NO: 33440 - protein, 427 aa, Clostridium perfringens str. 13
MNMDRNKEIFEESKKYMPGGVNSPVRSFGSVGINPPVIKSGKGAMIKDENGNEYIDFVLAWGPMILGHCDEDVVEAIKKTSEESIAFGASTKLELDLAKLLCETLDNVDMIRMVNSGTEATMSAVKLARGYTKKDKIIKFAGCYHGHFDGFLIEAGSGVLTEGIPGCLGVPEESIKNTLIGIYNDEKQVEELFEKYGNDIAGIIIEPVAGNMGVVKCDPKFMRKLRELCDKYGALLIFDEVMCGFRVAYKGAQTLFDVKPDLVTYAKIMGGGLPCGAYGGRREIMENLSPLGGVYQAGTMSGNPIVMSAGLATVKKLYENPSYYNHIEKIGSKLEKGVLEIAKKKGLGLVVNRQGGMITLFFTDLKEVKCYDDVKTCDGERFKRYFLHMLNKGFNIPPSQFEAMFLSVKHTEEHIDKFLEAFETFEG

SEQ ID NO: 33441 - protein, 175 aa, Glycine max
MAPTVMASSATSVAPFQGLKSTAGLPVSRRSNGASLGSVSNGGRIRCMQVWPIEGIKKFETLSYLPPLSTEALLKQVDYLIRSKWVPCLEFSKVGFIFREHNASPGYYDGRYWTMWKLPMFGCTDATQVINEVEEVKKEYPDAYVRIIGFDNMRQVQCVSFIDFQPPGCEESAKA

SEQ ID NO: 33442 - protein, 170 aa, Francisella tularensis subsp. tularensis SCHU S4
MKKIILILAFIPIITLADTQNWQSFDKTQALAKLTRLQYYVTQKGGTERAFNNKYWNNHRQGIYVDVVSGEPLFSSTDKYDSGTGWPSFTKPIDNSFIKTKTDNSWFMTRTEVLSRYANSHLGHVFDDGPQPTGKRYCMNSAALKFIPKEDMQKDGYGKYLYLFTNKNLQ

SEQ ID NO: 33443 - protein, 387 aa, Shigella flexneri 2a str. 301
MEQVVIVDAIRTPMGRSKGGAFRNVRAEDLSAHLMRSLLARNPALEAAALDDIYWGCVQQTLEQGFNIARNAALLAEVPHSVPAVTVNRLCGSSMQALHDAARMIMTGDAQACLVGGVEHIGHVPMSHGVDFHPGLSRNVAKAAGMMGLTAEMLARMHGISREMQDAFAARSHARAWAATQSAAFKNEIIPTGGHDADGVLKQFNYDEVIRPETTVEALATLRPAFDPVNGTVTAGTSSALSDGAAAMLVMSESRAHELGLKPRARVRSMAVVGCDPSIMGYGPVPASKLALKKAGLSASDIGVFEMNEAFAAQILPCIKDLGLMEQIDEKINLNGGAIALGHPLGCSGARISTTLLNLMERKDVQFGLATMCIGLGQGIATVFERV

SEQ ID NO: 33444 - protein, 464 aa, Francisella tularensis subsp. tularensis SCHU S4
MALAKTLKPRHIELIALGGIIGSCFFLGTGYVLAEVGPAAILAYILAGIIVYAVTLCLAELTANSPNSGSFIYYTAKYVSPAIACGMGWSYWLNWIIYIPSECIAGGIIMHTFLPAVPTYMWATLFGLFITIINLTKVKIFGEIEFWLALVKIIALGLFSVIAILIFFDIIQNNTGGVLGGTYIVSDGGFFPKGKLILITTMVILLVNFQGSEIIGLAASESNNAEKQMPRIAKHVAIRIVGLYVIPVFLLATIFPWQKMSLSDSVFATALQYYHLDKFAAVFAFVVLVAAFSCANSGFYAAVRSLYGLSRARMAPSIFRKLNSLAIPHFAVYISIIAVWTFLILSFKLSASAAFTNLLAMSGFTATICWICICWSQYNFRKQLIRRNATDKILFKAPLFPYISLFGIWIQVLCLVLTLFNDELRGAFYFGAPAMIIPCCIYFFVSKKKNTKIVQRTISLKKVF

SEQ ID NO: 33445 - protein, 92 aa, Zea mays
PPQAPEDEKKALLAKIKKKLPGGPKKPEKVGSPPPAPAVHGPPPAPQAKVDVNSPDGKKGFLGKIMAKIPGSPKSSGEKTPKHPPGEPKTSS

SEQ ID NO: 33446 - protein, 381 aa, Bacillus sphaericus
MAKQLEKSSKIGNEDVFQKIANHEQIVFCNDPVSGLQAIIAIHDTTLGPALGGTRMYPYKNVDEALEDVLRLSEGMTYKCAAADIDFGGGKAVIIGDPEKDKSPALFRAFGQFVESLNGRFYTGTDMGTTMDDFVHAQKETNFINGIPEQYGGSGDSSIPTAQGVIYALKATNQYLFGSDSLSGKTYAIQGLGKVGYKVAEQLLKAGADLFVTDIHENVLNSIKQKSEELGGSVTIVKSDDIYSVQADIFVPCAMGGIINDKTIPKLKVKAVVGSANNQLKDLRHANVLNEKGILYAPDYIVNAGGLIQVADELYGPNKERVLLKTKEIYRSLLEIFNQAALDCITTVEAANRKCQKTIEGQQTRNSFFSRGRRPKWNIKE

SEQ ID NO: 33447 - protein, 2546 aa, Burkholderia mallei ATCC 23344
MVNTKIAIIGASCRFPGGVAGLEEYWQLLKSERDAVTEIPPERFGTDFYRHPSKREPGKSYTFSAGVLDNVAGFDAAFFGISPREATQMDPQQRLLLELAWEAFEDAGVRPADMRGSNCGVYVGVAGTDYGNRSMDDLNAIDPYSATGNTLSIASNRVSYLFDLRGPSMSVDTACSSSLVALHQAVQALQSGEAETALAGGVNLLLHPFGFVSFSKASMLSPRGRCRAFDATGDGYVRAEGGAFVLLKPLDRAIADGDTIHAVIAGSGVNSVGHSPGGISVPGAAAQAALLRSVYARAGVDPQSLAYLEAHGTGTAVGDPIEARALIDVVSGARPADRPLLIGSVKTNIGHLETASGMAGLLKAVLCLKHRAVPRSLHFSIPNPAIDFDGGRLRVVDRYMPLEAGNAPLTVGVNSFGFGGTNAHIVLTEAPVSAAVADDVPTSATQAARAPSALVLTARSPNALGALANRYLAALENGGDWQALAAAAARRRQWLEHRAIVAPADAAEGRAALAALARPAPEGGPSCVTTGRAPADAPRTALVFSGNGCQWVGMGNALYAEDAVFRAALDEVDALWCADGSPSLVDVMRGGPGAQWLAGAGAEWLAATENAQPLLFAIQVGMIRVIDARGMRYDAAIGHSVGEVAAAWVTGALSLTDAVRVIKIRSRAQAMTRGCGRMAAVGIGDAAARELIARHGLARRVEIAGVNSPDAVTLAGEPQGLQVLEAALRGSGKFFQMLDLDYAFHSSHMDRIEPVVLAGLAGLRPQPGNGAFVSTVTGGALAGSELDARYWWRNIREPVRFGDGIAHLIEQGVRLFVEVSPHSILRTYVKQALAAAGVTGVALPTLKRDHGSAATLRQAILAAIAHGASVDPDRFAPGASRAALPSYPWQRERFWLTPTVEGYGLVNRRREHPLLGYRLHEHAFAWENQLDPAKLPMLADHVVDGGVAFPGAGYVEMALAAACTFFDTPDAALENVEIRMPVVFQPQQAKLFRLVIEPRTATFTIETRDRMSDGAWTLNVTGRMLESGNALGTASVVPSDMLERLLALPAADGDMLYANTAAIGLGYGPAFRWVRTVRLAEGDDAALADVAAPDACGDARTLSAYRLHPALMDSGFHPLFALLAAHARDGEHPAYVPVQIGRVDYLRGDTVARVLARIDRRSPHSIVAHFEFLDAQGAIVARLGACRFRRVDLVGRRQNLPARFVYRLEAMPLPGDVDAAGLPAPDALLARAVARLDAGHDGRRTRHLTEILPLLDVLASLYVLQAFDALGAFAGTWRPAHGCAALAARLADMLVEDGLAHRDGDRLVRDDAACAALPPLDELWRGLLAESPAHVAELTLLAHCGSALPGVLSGAKDGTRLLSPTGHSLVEHLLAASPTWQHVYALLTASVEQAVDAWQPARRLRVLELGATDGDVLQTLGMHLAPARCDHTIAATAGQLAGFGADAQAAVTTVALQPGERLSLAADEAGPYDVIVANRALSGRRDVADALNAMRSWLAPGGLLLLAESRRGRFSDIVFGMQAPSTQTDAPAPLAPADLEAALAHAGYVGVVRHVEQSLDLEGTPMFVIARNPASAVAAPSGGDSSDLDTLARSEQWLVLHAPDVVGGFGARLADALAHAGYPADIVEITHAADAIASLPAGQPAHVVFCAPETPLAEAATGDDLMAAQRNGVIALAALVRVLGAQPNATTRLTIVTRGGAPFAGTAHAHPEQATLWGLGRVLANEHPELACRLIDIDCAADRIPEALIRELTGAALEEEVVLGAHGRRVPRMLTAAQDAARNDGAIARAAVLAFDAPGSLRNLEWFALAESALGADEVEIEPVATGLNFRDVMYAMGLLSDEAVETGFAGATIGMELSGRVVRVGSAVTEFAPGDAILGFAPASFATRVRTRAQAIAPKPERLSFEEAATVPTTFFTAYYALVELARLRRGERVLVHGGAGGVGIAAIQLARYFGAEVFATAGSDEKREFVRLLGADHVLDSRSLAFADEIRAMTGGEGIDIVLNSLAGEAMVRSIDTLRPFGRFLELGKRDFYENSHIGLRPFRNNISYFGIDADQLMGALPELTARLFGDVMGLFAAGVLHPLPYRAFPAERAEDAFRYMQQARQIGKVLVTYPCGTPAPTHGAARADSLALDPHGAYLVVGGTGGLGFASARWMVERGARRLTLASRSGELAVAARDEIECWRATLGVAVDIVSCDVTDAAAVDAMIAAIVRRDIPLKGVLHSAMTIDDGLVRNLDDARMAAVLAPKVAGAWNLHRATRSLPLDLFVVYSSATTYLGNPGQSNYVAANSFLEALVEHRRAAGLPGTFMAWGPLEDVGFLARHADTREALQSRIGGASITSGEAMIALERALVAGAAGEAVVRLDWHAVARGMPAAKARRYSLLQSHANGGDARDGGTQLREEVLALPRDEAIALVAGTLQAQIARILHMTPDRIALDKSVLDMGMDSLMGMELGLAVEEAFEVKLSVMAIAEGASAMTLAGRIVDSIGASADAGAGAAADSAHEAVAALAAKHAIDGDARAVLDIRPAPVAGQVSPTLEVAR

SEQ ID NO: 33448 - protein, 366 aa, Thermoactinomyces intermedius
MRDVFEMMDRYGHEQVIFCRHPQTGLKAIIALHNTTAGPALGGCRMIPYASTDEALEDVLRLSKGMTYKCSLADVDFGGGKMVIIGDPKKDKSPELFRVIGRFVGGLNGRFYTGTDMGTNPEDFVHAARESKSFAGLPKSYGGKGDTSIPTALGVFHGMRATARFLWGTDQLKGRVVAIQGVGKVGERLLQLLVEVGAYCKIADIDSVRCEQLKEKYGDKVQLVDVNRIHKESCDIFSPCAKGGVVNDDTIDEFRCLAIVGSANNQLVEDRHGALLQKRSICYAPDYLVNAGGLIQVADELEGFHEERVLAKTEAIYDMVLDIFHRAKNENITTCEAADRIVMERLKKLTDIRRILLEDPRNSARR

SEQ ID NO: 33449 - protein, 326 aa, Lactococcus lactis
MTVLVLGGAGYVGSHAVDMLVNRGYDVAVVDNLVTGHREAVSEKVRFYEGDVRDHAFLASVFEKENIEGIMHFCAYSLVGESMQKPLMYFNNNVGGAQVILETMEEFGVKHIVFSSTAATFGIPEESPISEKTPQKPINPYGESKLIMEKMMKWQSQATDMTYVALRYFNVAGAKDDGSIGEAHKNETHLIPIILQTALGQREFITIYGDDYQTPDGTCIRDYIDMEDLIEAHIKALEYLKSGGKSDQFNLGSSKGYSNLEVLETARKVTGKEIPSQMGERRPGDPDELVADSTKAGEILGWKVKNDLEHIITNAWEWHQSHPKGY

SEQ ID NO: 33450 - protein, 386 aa, Ralstonia metallidurans CH34
MDGGSRLTIRPTPGAGAFCTILSRIVRQWTRQGRTIAFKPPARWHRQWAANGPRGGRFTGDIKMAKAVRFYETGGPEVLKFENVEVGDPGPGQARVRHTYIAVNFIDIYFRTGHYPLELPNGLGSDAVGVVEAVGPGVTDIRVGDRVGYLLGPQGAYSDVRVMPADVLIPLPDGIADRTAATLMMKGMTAQYLFRQVYPLKGGETILYHAAAGGVGLIACQWARALGVTMIGTVSSDEKAEIAKANGCTHTIVTSRENIAERVKALTDGKGVPVVFDSIGKSTLEASLDSLQVRGTLVSNGTTSGPVEIDSRVIARKGSLWVTRPAMIHYATPRSHMLAMAAEVFDMVMAGKIHNEPRQTFALAEAALAHQALESRQTSGATVLVP

SEQ ID NO: 33451 - protein, 270 aa, Nostoc sp. PCC 7120
MPTISDHFQSLRQRQQCALIPFITAGDPDLQTTAEALRILDRHGADFIELGVPYSDPLADGPVIQAAATRALQRGTKLEQVLEMLETVIPSLQAPIILFTYYNPILHRGIQSFLETIAAVGVRGLVVPDLPLEEAEELIKTAANFGIEVILLVAPTSSQNRIEAIARQSQGFIYLVSVTGVTGIRSQIQDRVQHLITDLRHVTDKPIGVGFGISAPEQARQVKEWGADAVIVGSAFVKRLAEGSPSQGLQAVEKLCQELKTAITRVEARV

SEQ ID NO: 33452 - protein, 181 aa, Arabidopsis thaliana
  misc_feature (40)..(40): Xaa can be any naturally occurring amino acid
  unsure (1)..(181): unsure at all Xaa locations
LHLGIVTLQEDQLVTSAESWADVTDRAWADFLGKKRDETXPEETPIASEFEQKVHISEPEPEVQHESLLEKLHRSDSSSSSSSEEEGSDGEKRKKKKEKKKPTTEVEVKEEEKKGFMEKLKEKLPGHKKPEDGSAVAAAPVAAPPPVEEAHPVEKKAILEKIKEKLPGYHPKTTVAEEKQD

SEQ ID NO: 33453 - protein, 220 aa, Porphyromonas gingivalis W83
MKFFIDTANLDQIREANDMGVLDGVTTNPSLMAKEGISGKDNCMRHYLAICEIVDGDVSAEVIATDYEGMIREGEELAALHPQIVVKVPCTAEGIKAIKYFSDKGIRTNCTLIFTVGQALLAAKAGASYVSPFVGRLDDIASDGIKLVENIVAMFGFYRYETEVLAASIRHTQHIIQCLEAGADVATCPLNAIKGLLKHPLTDSGLKAFLEDHRRVNEGK

SEQ ID NO: 33454 - protein, 212 aa, Glycine max
MASATAPRFIKCVTVGDGAVGKTCMLICYTSNKFPTDYIPTVFDNFSANVVVEGITVNLGLWDTAGQEDYNRLRPLSYRGADVFVLAFSLVSRASYENVLKKWIPELQHFAPGIPLVLVGTKLDLREDKHYMADHPSLVPVTTDQGEELRKHIGATYYIECSSKTQQNVKAVFDAAIRMVIKPPQKQNEKRKKKPRGCFLNVLCRRNIVRLK

SEQ ID NO: 33455 - protein, 603 aa, GIBBERELLA ZEAE PH-1
MLVIERSDQIRWMSISRQEHKLTRYVNVASSLLSVIVLLLNNPKLLALSLTPLSTGDLRLSALRQLPVRMPETVGENGNAAPGRLLLLSNRLPITIKRSEDGSYSFSMSSGGLVTGLSGLSKTTSFQWYGWPGLEVPDNEVEGMKQRLKEEYGAHPVFIDDELADRHYNGFSNSILWPLFHYHPGEITFDESAWAAYQEVNRLFAKTVIKDVQDGDLIWVHDYHLMLLPQMLREEIGESKKNVKIGFFLHTPFPSSEIYRILPVREALLTGLLDCDLIGFHTYDYARHFLSSCSRILECPTTPNGVDWNGRFVTVGAFPIGIDPDNFVEGLKKPKVQERIAALSRKFEGVKLVVGVDRLDYIKGVPQKLHALEVFLTEHPEWIGKIVLVQVAVPSRQDVEEYQNLRAVVNELVGRINGKFGTIEFMPIHFLHQSVNFDELTALYAVSDVCLVSSTRDGMNLVSYEYIATQQKNHGVMILSEFTGAAQSLNGSLIVNPWNTEELANALHDAVTMSPEQREANYKKLERYVFKYTSAWWGASFVAEMTRLSAEGSQPKTLRNVSGAVIGLEQKAQQIVTGLEKKADELLSGNEKNETETSEEPSQ

SEQ ID NO: 33456 - protein, 318 aa, Saccharophagus degradans 2-40
MPQIAAIGEVMIELAPAGTDATSGKAMNTLSFAGDTYNTVVTLARLGIDASYVSRLGDDRFSDNIIANLSDENVATNTIERAKGEVPGLYMIQNTPDGEREFFYWRGQAPAKQMFTSANTPALLDSLSAHPWLYFSGITLAIISEQARITLFGFLASYRANGGKVAFDSNYRPRLWANPELAQQATIAALAQTDLALLTLDDEALLWGDSDDLLADAQKRYQSLEISELVFKRGADDVIIVQGDSEQRVSVPKVENIIDTTAAGDTFNAGYLSARLKGEPPVKAAQEANRCANIVIRHRGGVIPKEVFLEEHRALLKQ

SEQ ID NO: 33457 - protein, 347 aa, Musa acuminata
HVHELEPVEVVADQVAVALSHAAILEESMRARDLLMEQNVALDYARQEAELAIRARNDFLAVMNHEMRTPLHAIITLSSLLLETELNPEQRSMVETVLKSSSLLATLINDILDLSKLEDGSLELEIGIFNLHSVFREVVNFIKPIAAVKKLSVSLTLSPDLPLCAIGDEKRLMQILLNIVGNAVKFTKEGHISLTASVARADYLRDFRASEFYPVSSDGHFYLRVQVKDTGCGISSQDLPHLFTKFAHGRNVASRGFSGSGLGLAICKRYVSLVQGHIWLESEGIGKGCMATFVVKLGICENPDGSQQKIVLLPWTKHGQEDTSSSRGMPKDPKAFIPLKPRYQRSV

SEQ ID NO: 33458 - protein, 167 aa, Bradyrhizobium sp. BTAi1
MIDRRLMLTTAAGLFGFAALRWFGGSAPARAAEKFEIEKTEAEWRAQLTPQQYEILREEGTERPWTSPLLKEHRKGIFACAGCDLPLFSSETKFDSGTGWPSFFKPLDNAVGTRQDKTYGMVRTEVHCRRCGGHLGHVFDDGPKPTGLRYCMDGLSLVFHPANPSST

SEQ ID NO: 33459 - protein, 437 aa, Debaryomyces hansenii CBS767
MREIGAAFWETICGEHGLDNNGNYHGEDDLQKAKLNVYFNEASSGKYVPRAVLVDLEPGTIDGVKTSNIGNLFRPDNYIFGQSSAGNVWAKGHYTEGAELVDSVMDVIRREAEGCDSLQGFQITHSLGGGTGSGMGTLLISKMREEFPDRMMATFSVVPSPKVSDTVIEPYNATLSIHQLVENSDETFCIDNEALYNICQKTLKLPQPSYAELNSLVSSVMSGVTTSLRYPGQLNSDLRKLAVNLVPFPRLHFFMVGYAPLTSLRSKSFRSLTVPELTQQMFDAKNMMAASDPRNGRYLTVAAFFRGKVSTKEVDDEMHKVQTRNSSYFVEWIPNNVQTAVCSVPPKDLDMSATFIGNSTSIQELFKRVGDQFSAMFRRKAFLHWYTSEGMDEMEFTEAESNMNDLVSEYQQYQDAGVDDEEELDYADEVPLEDGLE

SEQ ID NO: 33460 - protein, 675 aa, Salmonella enterica subsp. enterica serovar Paratyphi A str.
MKFAAFALTLIPGIAIASSWTSPGFPTFSTQETGRFTSHAALTKGTRALTLHIDQQCWQPSSAIKLNQMLSLKPCEGAPPQWRLFKDGDYTITVDTRSGTPTLLLSIKTEPERTAQLTYQCPVWDGSPLTLDVRQTFPEGTVVRDYYSGQTDTIQNGKITLRPADSHGLLLLERAETHASAPFNWRNATVYFVLTDRFRNGDPTNDHSYGRHKDGMQEIGTFHGGDLRGLTSQLDYLQQLGVNALWISAPFEQIHGWVGGGTKGDFPHYAYHGYYTQDWTTLDANMGSEADLRALVDGAHQRGIRILFDVVMNHAGYATLADMQEYQFGALYLSGAERQKILGDRWTNWRPATGQSWHSFNDYINFSDSAAWEKWWGKKWIRTDIGDYDSPGFDDLTLSLAFLPDIKTESTTPSGLPAFYANKPGTKAKFIEGYTPRDYLTHWLSQWVHDYGIDGFRVDTAKNVELPAWQQLKTQASAALHEWKQANPDKALDDSPFWMTGEAWGHGVMKSDYYRYGFDAMINFDYQEQAAKAVDCLAEMGPVWQQMADKMQDFNVLSYLSSHDTRLFREGGDKAAELLLLSPGAVQIFYGDESARPFGPTGSDPLQGTRSDMNWQDVSGKSAAAVAHWQHISQFRARHPAIGAGQQTTLTLKHGYGFVRQYGDDTVMVVWAGRR

SEQ ID NO: 33461 - protein, 321 aa, Bacillus cereus ATCC 14579
MKALCFETFGDANVLHYKEIHDPIISPNEILVRTKAIGLNFADIYRRRGDYHLAGNPPYVLGYEGAGIVEKVGADVTTINLGDRIAFADVPFANAELVAVPSEKVIPLPDSISFETAASVLLQGLTAHYLTHDSYQLKQGDIALVHAAAGGVGQLLIQMIKLQGGTVIGLTSSKEKAKIATLAGADHVFLYTEAWHMKVLEMTNGTGVNVVYESVGSTLGESFNATKIGGTVVFYGMAGGNPAPVDPRMLMDTSKTLTGGDLWNVLTTFEERKKRSTQLFDWIATGKLNISNPTTFSLQDGALAHELLESRKSTGKILLIP

SEQ ID NO: 33462 - protein, 349 aa, Nicotiana tabacum
MALVPTPAVNEGPLFAEVDMGDNSSTPTVRATVVQASTIFYDTPATLVKAERLLAEAASYGAQLVVFPEAFIGGYPRGSTFGVSIGNRTAKGKEEFRKYHASAIDVPGPEVDRLAAMAGKYKVYLVMGVIERDGYTLYCTVLFFDSQGHFLGKHRKIMPTALERIIWGFGDGSTIPVYDTPLGKIGAAICWENRMPLLRTAMYAKGIEIYCAPTADSRDVWQASMTHIALEGGCFVLSANQFCRRKDYPPPPEYVFSGTEEDLTPDSIVCAGGSVIISPSGAVLAGPNYVGEALISADLDLGEIARAKFDFDVVGHYARPEVLSLIVRDHAVSPVSFTSTSSKAESSPK

SEQ ID NO: 33463 - protein, 153 aa, Glycine max; identical to SEQ ID NO: 829

SEQ ID NO: 33464 - protein, 224 aa, Burkholderia mallei ATCC 23344
MRRRHRTHKKESSMNRPKSMLVANIAWARETSERSPDFFDALSRGQNPRVLWIGCADSRVPAEAITQSAPGELFVHRNIANIFQPDDDNCASVLEYAVKVLKVDHVIVCGHYGCGGVRASLLPPSPELPHVNRRIAPLCALAGRHRAELDGVPPDAAADRLAELNVLEQVRLLRSSPIIRDAAPAPLVHGWIFSLADGRLKELASGYPAAQRPPQAERAQAAAA

SEQ ID NO: 33465 - protein, 493 aa, Zea mays
  misc_feature (372)..(372): Xaa can be any naturally occurring amino acid
  unsure (1)..(493): unsure at all Xaa locations
MDPYKHRPSSGSNSSFWTTNSGAPVWNNNSALTVGQRGPILLEDYHLIEKLAQFDRERIPERVVHARGASAKGFFEVTHDVSHLTCADFLRAPGVQTPVIVRFSTVVHERGSPETLRDPRGFAVKFYTREGNFDLVGNNMPVFFIRDGMKFPDMVHAFKPNPKTNLQENWRIVDFFSHHPESLHMFTFLFDDVGIPLNYRHMEGFGVNTYTLINRDGKPHLVKFHWKPTCGVKCLLDNEAVTVGGTCHSHATKDLYDSIAAGNYPEWKLYIQTIDLDHEDKFDFDPLDVTKTWPEDIIPLQPVGRMVLNKNVDNFFAENEQIAFCPAIIVPGIHYSDDKLLQTRIFSYADTQRHRLGPNYLMLPVNAPKCAXHHNNHHDGFMNFMHRDEEVNYFPSRFDPARHAEKVPIPPRVLTGCREKCIIQKENNFKQAGERYRSFDPARQDRFIQRWVDALTDPRVTHEHRTIWISYWSQCDAALGQKLASRLNLKPSM

SEQ ID NO: 33466 - protein, 165 aa, Pyrococcus abyssi GE5
MVRRRRWDIWDPFDIIREIQEEIDAMFDEFFSRPRLWTYRRWREPEVYEESREVWREPFVDIFDRGDEFVVIAELPGVRKEDIKVRVTEDSVYIEATVRREKELEEEGAVRIERYYSGYRRVIRLPEEVIPEKAKAKYNNGVLEIRIPKKQPTKKEGEGFEVKIE

SEQ ID NO: 33467 - protein, 293 aa, Pyrococcus abyssi GE5
MRFDVICMGNLNYDIVFLMEKFPGIHEKVNAKGVFTGLGGSAGNTATWLAKLGLKVGFIGAVGNDDFGRLHLEFFREIGVDTSGIKVVNDATGIAVTMVKGEDKRIVKYPGANRWKEVNTEYLKRARHLHLSSNPIELIREAVEKAKELGLTVSFDPGEMEVPRDVEKELDILMMNEDEFKAKYGSLDRIKDVKARIAIATLNGGGALVRDEKGEVHEVRGLSAKAIDTTGGGDAFNAGFLYGFLSGWDVVNSAKLGMLLAYLTVQEVGARSAVRPLDEIKKIAQELKLNLPI

SEQ ID NO: 33468 - protein, 485 aa, Corynebacterium glutamicum ATCC 13032
MDDSNSFVVVANRLPVDMTVHPDGSYSISPSPGGLVTGLSPVLEQHRGCWVGWPGTVDVAPEPFRTDTGVLLHPVVLTASDYEGFYEGFSNATLWPLFHDLIVTPVYNTDWWHAFREVNLKFAEAVSQVAAHGATVWVQDYQLLLVPGILRQMRPDLKIGFFLHIPFPSPDLFRQLPWREEIVRGMLGADLVGFHLVQNAENFLALTQQVAGTAGSHVGQPDTLQVSGEALVREIGAHVETADGRRVSVGAFPISIDVEMFGEASKSAVLDLLKTLDEPETVFLGVDRLDYTKGILQRLLAFEELLESGALEADKAVLLQVATPSRERIDHYRVSRSQVEEAVGRINGRFGRMGRPVVHYLHRSLSKNDLQVLYTAADVMLVTPFKDGMNLVAKEFVANHRDGTGALVLSEFAGAATELTGAYLCNPFDVESIKRQMVAAVHDLKHNPESAATRMKTNSEQVYTHDVNVWANSFLDCLAQSGENS

SEQ ID NO: 33469 - protein, 155 aa, Arabidopsis thaliana
  misc_feature (116)..(116): Xaa can be any naturally occurring amino acid
  misc_feature (130)..(130): Xaa can be any naturally occurring amino acid
  misc_feature (143)..(143): Xaa can be any naturally occurring amino acid
  misc_feature (146)..(146): Xaa can be any naturally occurring amino acid
  unsure (1)..(155): unsure at all Xaa locations
KKDETKPEETPIASEFEQKVHISEPEPEVKHESLLEKLHRSDSSSSSSSEEEGSDGEKRKKKKEKKKPTTEVEVKEEEKKGFMEKLKEKLPGHKKPEDGSAVAAAPVVVPPPVEEXAHPVEKKGVLEKIXKGKLPGYHPKTTXEEXERSLKRNDG

SEQ ID NO: 33470 - protein, 293 aa, Zea mays
  misc_feature (52)..(52): Xaa can be any naturally occurring amino acid
  unsure (1)..(293): unsure at all Xaa locations
MGKDDVVQSGAGGGEFAAKDYTDPPPAPLVDAAELGSWSLYRAVIAEFIATXLLFLYVTVATVIGYKHQTDASASGAGADAACGGVGVLGIAWAFGGMIFVLVYCTAGISGGHINPAVTFGLFLARKVSLVRALLYMVAQCLGAVCGVGLVKAFQSAYFDRYGGGANSLASGYSRGAGLGAEIVGTFVLVYTVFSATDPKRNARDSHVPVLAPLPIGFAVFMVHLATIPVTGTGINPARSLGAAVVYNKDKPWDDHWIFWVGPLLGAAIAAFYHQYILRAGAIKALGSFRSNA

SEQ ID NO: 33471 - protein, 242 aa, Panax ginseng
MSFYDDQSGNLSPQRKLGRGKIEIKRIENTTNRQVTFCKRRNGLLKKAYELSVLCDAEVALIVFSTRGRLYEYANNSVKGTIERYKKACTDSPNTSSVSEANAQFYQQEASKLRQEISSIQKNNRNMMGESLGSLTVRDLKGLETKLEKGISRIRSKKNELLFAEIEYMQKKEIDLHNNNQYLRAKIAENERAQQHMNLMPGSSDYELAPPQSFDGRNYIQLNGLQPNNHYSRQDQTALQLV

SEQ ID NO: 33472 - protein, 530 aa, Leptospira interrogans serovar Copenhageni str. Fiocruz L1-130
MILVNFENEKEISLSKPQNLLEISLNNGIPHTHACGGNARCSTCRVLVLENPSHLSPPEQKEKELSQKKGFPKSVRLACQTTVLGDVRVRRIVLDEEDYNLTIPGSATISGEEKEIAILFSDIRDFTLFSESHLPYDVIHILNRYFYKMGDVILKHGGKIDKYIGDGLMALFGVNGGSPQEICISALRAAKEMELELYSLNEYLKSHLHTSFRIGVGVHYGNCILGQLGHPANMSYTAIGDSVNIASRIESKTKKSGASVLISESLYKQVKEKVVKGRVFSAQLKGKTGNYKLYEIQEILEKVDANLWEEAKNSLRRIILVREVGSWLKLVYHLSCLFDENQNWIGLSAANSFQKFSKLPENGDLVQNFYQIKDTFNEQFQNSFSFADLLALAGAVAIEKSGGPKIPIQPGRKDRLLSEVFQILPLSMQTQKDQLPYLQKMKLGIRDIVLISGARTIGWLGGESFTSNPYNFDNSYFHVLLKAGLEGPLLIPNDRELLKNDESRAFVLDYALDPSKFFEDFTSTYLKLTS

SEQ ID NO: 33473 - protein, 256 aa, Glycine max
MLAIFHKAFAHPPEELNSPASYKGSKKPKVPEETLKDFLSHHPHNTCSMSFGDAAVLACVRPDQSFSRHQRLFCGIPNDIYCLFLGSLNNLSLLNKQYGLSKRKNEAMFVIEAYRTFRDRGPYPADQFVKELDGSFGLVVYDQARFGSVFAALGSDGGVKLYWGIAADGSVVISDDLEVIKEGCAKSFAPFPTGCMFHSEGGLMSFEHPMNKLKAMPRVDSEGAMCGANFKVDKFARVNSIPRVGSQSNWMEWDQH

SEQ ID NO: 33474 - protein, 480 aa, Musa acuminata
RSTLDRHTILKTTLVELGRTLDLAECALWMPSRSGLNLQLSHTLHHQMPLGSVVSINLPVVNQVFSSNRAVRIPHTCPLARIRPQTGRYVPPEVVAVRVPLLHLSNFQINDWPELSAKSYAIMVLMLPSDSARKWHIHELELVEVVADQVAVALSHAAILEESMRARDLLMEQNVALDSARREAEMAIRARNDFLAVMNHEMRTPMHAVIALSSLLLETELTPEKRLMIETVLKSSNLLAALINDVLDLSKLEDGSFELEIANFNLHAVFREVINLIKPIAAIKKLSVSVTLAPDLPLCAIGDEKRLMQTILNVAGNAVKFTKEGHISITASVARSDSSRDPRAPEFSPVTSDRHFDLRVQIKDTGCGISPQDLPHIFTKFAHSRNSANKASNGSGLGLAICRRFVSLMEGQIWLESEGIGKGCTATFIVKLGICDPSGNLQQILQTTPSHGDANLPGPRAKFDDENGKFTPMMRYQRSV

SEQ ID NO: 33475 - protein, 1065 aa, Bacillus thuringiensis serovar konkukian str. 97-27
MDKKVSAIPQPKTYGPLGNLPLIDKDKPTLSFIKLAEEYGPIFQIQTLSDTIIVVSGHELVAEVCDETRFDKSIEGALAKVRAFAGDGLFTSETDEPNWKKAHNILMPTFSQRAMKDYHAMMVDIAVQLVQKWARLNPNENVDVPEDMTRLTLDTIGLCGFNYRFNSFYRETPHPFITSMTRALDEAMHQLQRLDIEDKLMWRTKRQFQHDIQSMFSLVDNIIAERKSSENQEENDLLSRMLNVQDPETGEKLDDENIRFQIITFLIAGHETTSGLLSFAIYFLLKNPDKLKKAYEEVDRVLTDSTPTYQQVMKLKYIRMILNESLRLWPTAPAFSLYAKEDTVIGGKYPIKKGEDRISVLIPQLHRDKDAWGDDVEEFQPERFEELDKVPHHAYKPFGNGQRACIGMQFALHEATLVMGMLLQHFEFIDYEDYQLDVKQTLTLKPGDFKIRIVPRNQTISHTTVLAPTEEKLKKHEIKKQVQKTPSIIGADNLSLLVLYGSDTGVAEGIARELADTASLEGVQTEVVALNDRIGSLPKEGAVLIVTSSYNGKPPSNAGQFVQWLEELKPDELKGVQYAVFGCGDHNWASTYQRIPRYIDEQMAQKGATRFSTRGEADASGDFEEQLEQWKQSMWSDAMKAFGLELNKNMEKERSTLSLQFVSRLGGSPLARTYEAVYASILENRELQSSSSERSTRHIEISLPEGATYKEGDHLGVLPINNEKNVNRILKRFGLNGKDQVILSASGRSVNHIPLDSPVRLYDLLSYSVEVQEAATRAQIREMVTFTACPPHKKELESLLEDGVYQEQILKKRISMLDLLEKYEACEIRFERFLELLPALKPRYYSISSSPLVAQDRLSITVGVVNAPAWSGEGTYEGVASNYLAQRHNKDEIICFIRTPQSNFQLPENPETPIIMVGPGTGIAPFRGFLQARRVQKQKGMKVGEAHLYFGCRHPEKDYLYRTELENDERDGLISLHTAFSRLEGHPKTYVQHVIKEDRIHLISLLDNGAHLYICGDGSKMAPDVEDTLCQAYQEIHEVSEQEARNWLDRLQEEGRYGKDVWAGI

SEQ ID NO: 33476 - protein, 172 aa, Wolbachia endosymbiont of Drosophila ananassae
MRNNFSIKLSYIRNLFAKEYKTIEEYCILEKKQHIQISPEEGKLLSLFIKIHKIKSIVEIGTLYGYSSICMAKALLEDGHIYTIENNPQYSRIAKKNFSAFNLSDKITLIESNALEKLNELSAKAPFDMIFIDADKGGYPKYLDWAESYIKQMGYRCRYTLLFNTVFLESPP

SEQ ID NO: 33477 - protein, 582 aa, Bacillus subtilis subsp. subtilis str. 168
MGYYLTWLTISRKKEICLNNIKKTKEGHLETTLRGKEVLSIPTLNKGVAFSLEERQELGLEGLLPPTVLSLDQQAQRAYEQFQAQPDRLRQNVYLSDLANRNEVLFYKLLKNHLREMLPVVYTPTVGEAIQEYSHEYRRPQGIYLSIDNIDGIEKAFENLHATAGDIDLIVATDSESILGIGDWGVGGINIAIGKLAVYTAAAGIDPSRVIPVVLDVGTNNEKLLNDPLYIGNKHERVQGERYEAFIDAYVKAALKFFPKALLHWEDLGNKNARNIMKKYNHEILTFNDDIQGTGAITLAGVLAAMKKTGASIKDQRVVIFGAGSAGIGIADQIRDTMVLAGLSEEEANKRFYTLDYRGLLTEDIEGILDFQKPYLRNADEVKDWKRDEKGQIPFDEVVRQAKPTILIGTSGVSGAFTEEIVKEMASHVDRPVIMPMSNPTHLAEAVPEDLFKWTDGKVLIATGSPFDNVEYNGVSYEIGQSNNAFAFPGLGLGSIVAEARIITPAMFAATADAIAEMVDLETPGAGLLPSIDKLQEVSIQVAIAVAEAAIKDGVANRQPEDVKQAVLDAMWTPEYKKVIAK

SEQ ID NO: 33478 - protein, 562 aa, Azoarcus sp. EbN1
MRTAGDNAGGRAWWKEAVVYQIYPRSFMDSNGDGIGDLNGITVRLDYLKSLGVDVIWICPVFSSPNDDNGYDISDYRAIMDDFGTMADFDCLLAEVHRRGMRLILDLVANHTSDLHPWFLESRASLNNPKRDWYLWRDGKDGREPNNWESIFKGSVWKYDDKTGQYFLHLFSERQPDLNWDNPEVRTAIYEMVRWWLDKGVDGFRLDAVSHKKKEPGLPDMPNPHGLDYVPSFEKHMNVDGVLDYLDELCRHTFDHYDVMTVGEANGVSPEQARAWVGEEHRRLNMIFQFEHSALWKKAPRNGLDLPALRAVLTKWQKSLDGTGWNALFLENHDLPRVVSRWGDTGRYWRESATALATMYFLMQGTPFIYQGQELGMTNSRFAALDDFNDVLTKNRFASMKREGLAEGDIIDLLSIVSRDNARTPMQWDGSANGGFSSGTPWLRVNPNFNEINAELQERNSASVLNHYRRLIALRKREPGLVHGHCELLMEDDAQIYAYSRTHGSQRYVIITNMTRDEARYHQPDLLLDGGGLLLANQPVEPHTPTDSLLLEPYEARVYRFR

SEQ ID NO: 33479 - protein, 220 aa, Capsicum annuum
MESEHEKSETPNFKRPLKKKCENAKRFTDEQVKLLESMFKLGTKIEPREKLQLARDLGLQPRQVAIWFQNKRARWKSKQLEHEYRILQSKFDHLNTQFESLKIEKERLLIELETLNDQLGNKLARGSKSQDSRDSELHTSPENGFTDLLELKHCAGCSNSRFGHKSVNEEDDETTEETDKYFTPKEEAEFWNLDELGDNNSLEHWCVGLGSISNSKLWDF

SEQ ID NO: 33480 - protein, 489 aa, Moorella thermoacetica ATCC 39073
MHSLRWKITLNFLTLLFFTLLGAYLYLHQAILKAMGLPWLPPFRAGFLAARLEGQLLAVMILVLIIMGIGTFILARGIITPLTALLPLTRRIAAGDLEQRVEIQSDDEVGLLSHHLNIMVETLRNNFREIADERNKMKAILASITDGLVAVDQVGRVIMLNPAAEKMFGKKGAEVEHKYLLKVVRNHEIDAMVKEILASGLPLENEVRLFPTTSQLFRIYGTPITSEQGRIIGAVLTIRDITDIRRLEQMRTEFVANVSHELRTPLTSIRGFVETLLEGALEDPEVSRRFLGIINHEAQRLQQLIEDLLSLSRLESQPKRQDAGRADLAATLDRVLTTVNQLAREKGVALEKEIPAEIPELAISESYLNQVLLNLIDNGIKYTPAGGRVTIRAARLGELVQVEVADTGIGIPPESLPRVFERFYRVDKARSREMGGTGLGLAIVKHIVESHGGSISVTSRPGQGSHFFFTLPIAAEEGGRSNYQEEPGT

SEQ ID NO: 33481 - protein, 218 aa, Rhodopseudomonas palustris CGA009
MFFMRKSTAMPSAAEALPGRPTPIPTARTHFVSGNRLQPPFPEGLQQAVFGLGCFWGAERKFWQLGDGVYSTAVGYAGGFTPNPTYEEVCSGRTGHTEVVLVVFDPARISYEALLKTFWESHDPTQGMRQGNDVGSQYRSAIYTFGDDQKRAAEASRVTYGDALKAKGYGPITTEIAASGPFYYAEDYHQQYLAKNPGGYCGLGGTGVSCPVGVRVTA

SEQ ID NO: 33482 - protein, 524 aa, Arabidopsis thaliana
MDLVKPEEISHPPMDQLQGLEYCIDSNPPWGEAIALGFEHYILALGTAVMIPSILVPMMGGDDGDKVRVVQTLLFLQGVNTLLQTLFGTRLPTVIGGSYAFMVPIISIIHDSSLTRIEDPQLRFLSTMRAVQGAIIVASSVQIILGFSQMWAICSRFFSPIGMVPVIALTGFGLFNRGFPVVGNCVEIGLPMFILFVIFSQYLKNFQFRQFPVVERFALIIALIIVWAYAHVLTASGAYKHRPHQTQLNCRTDMSNLISSAPWIKIPYPLQWGAPSFDAGHAFAMMAAVLVSLIESTGAFKAAARLASATPPPPHVLSRGIGWQGIGILLNGLFGTLSGSSVSVENIGLLGSTRVGSRRVIQISAGFMIFFSMLGKFGALFASIPFTIFAAVYCVLFGLVASVGLSFLQFTNMNSLRNLFIVGVSLFLGLSIPEYFRDFSMKALHGPAHTNAGWFNDFLNTIFLSSPMVALMVAVFLDNTLDYKETARDRGLPWWAKFRTFKGDSRNEEFYTLPFNLNRFFPPS

SEQ ID NO: 33483 - protein, 337 aa, Bacillus cereus ATCC 14579
MPDEKDKHEGTWLQWPHEYTYGEEYKKEVEPIWVKMASALTEGEKVHIVAYDQEEKERINNLLTDEGLNMEKIDFFIAPTDDVWARDSGPIFVYDSNKNLKILDPAFNGWGKKTPYKNDAQIRKNVSKQSGIERVDWGKFVLEGGAIELDSNGTALLTRSAVTNKNRNPDLSEKEIEKYISDLGVSNFIWLDGVPNLDITDFHIDGFAKFHNKSTIVTMKEDDLAEWGLSNKDMDTLLDAKNASGQKYKYEYLPLSKEKVALENGKTLDYKGSYINYYIGNTVVLVPNYNDPNDKIANDTIQKLYPDRKVVGIDVRELYKNGGMIHCVTQQQPIALK

SEQ ID NO: 33484 - protein, 330 aa, Cryptococcus curvatus
MVNNTEYYKTLGLSKDASEADIKKAYRKESLKWHPDKNPGDKRATAEEKFKKVGEAYEVLSDPEKRKIYDQFGEEGLKGGMPAGGGGGGPGFSSFGAGGAAPASPSTPTDPNDIFNAFFSQMGSGGGGGGDEYASFGGGGFPGGGTRRRAGRGGMGGMGGMGGMGGMPGMGGMGGMGGMPGGYARPEPPTPVAEIERPLPLSLEELYKGGTKRLKITRHMRNGRTNEKILEVAYKPGWKAGTKVTFAGAGNEDEYGRGQNIKFVIQEKEHPRFNAQGDDLVVQVNLTLSQALLGPEGGGPITKQIEQLDGRRIDVSIPADTSSSPERRPS

SEQ ID NO: 33485 - protein, 723 aa, Thermotoga sp. SG1
MWLLFLVPLVALGFAAANFAAVVKKPEGTDRMKEISSYIRSGADSFLAHETRAIFKVAIVIAILLMIFTTWQTGVAFLLGAVMSASAGIVGMKMATRANVRVAEAARTTKKIGPALKVAYQGGSVMGLSVGGFALLGLVLVYLIFGKWMGQLDNLNIYTNWLGINFVPFAMTVSGYALGCSIIAMFDRVGGGVYTKAADMAADLVGKTELNLPEDDPRNPATIADNVGDNVGDVAGLGADLLESFVGAIVSSIILASYMFPIYVQKIGENLVHQIPKETIQSLITYPIFFALVGLGCSMLGILYVIVKKPSDNPQRELNISLWTSAILTVVLTAFLTYFYLKDAQGLDVVGFRFGPISPWFSAIIGIFAGILVGFWAEYYTSYHYRPTQFLSRSSIEGTGMVISNGLSLGMKSVLPPTLTLVLGILFADYFAGLYGVAISALGMLSFVATSVSVDSYGPIADNAGGISEMCELDPEVRKITDHLDAVGNTTAAIGKGFAIGSAILAALSLFASYMFSQISPSDVGKPPSLILLLNMVDARVIAGALLGAAITYYFSGYLISAVTKAAMKMVDEIRRQAREIPGLLEGKAKPDYNKCIEITSDNALKQMGYPAFIAILTPLVTGFLLGPEFVGGVLIGTVISGAMLAILTANSGGAWDNAKKFLEAGNLEGYGKGSEPHKALVIGDTVGDPLKDTVGPSLDILIKIMSVVSVIAVSIFKHIHLF

SEQ ID NO: 33486 - protein, 356 aa, Cryptococcus neoformans var. neoformans JEC21
MLLSLRSSLSRNIIGQSRHLPTISFSVTSSRIRNMSSQAATSSATVAVCQLRSTSDPVHNLKISEKVIRNAVAAGAKACFLPEASDFINPSKTESRKFSHPLPKHEYTIGLQRLAKELGIVISVGVHEGPEDESEERVYNTHVLIGKDGGILASYRKIHLFDVELSKPPAPDGTPRPPQRTGESERILAGQAVTPPVEVEGIGNIGLEICYDIRFPELSIILTRLGAEVLLFPSAFTVKTGRDHWGTLCRATAIQYQSYLIASAQYGAHNSKRTSWGETLAFDPWGRQLGRLRSVDDTPPPKEGEEGDKGVEKLYEDSGEFFLCEIDGTKVKETRGQIPLAIQKRSDIYGVVGEGA

SEQ ID NO: 33487 - protein, 665 aa, Pseudomonas fluorescens Pf-5
MPSRRERANAIRALSMDAVQKANSGHPGAPMGMADIAEVLWRDYLKHNPSNPSFADRDRFVLSNGHGSMLIYSLLHLTGYDLSIDDLKNFRQLHSRTPGHPEFGYTPGVETTTGPLGQGLANAVGFALAEKVLAAQFNRPGHNIVDHHTYVFLGDGCMMEGISHEVASLAGTLGLGKLIAFYDDNGISIDGEVEGWFTDDTPKRFEAYNWQVIRNVDGHDPEEIKTAIDTARKSPLPTLICCKTTIGFGSPNKQGKEDCHGAPLGDAEIALTRQALNWNYGPFEIPADIYAEWDAKEKGRAAEAEWDQRFAAYSAAFPTEANELVRRLSGDLPADFAEKADAYIAEVAAKGETIASRKASQNTLNAFGPLLPEVLGGSADLAGSNLTLWKGCKGVSAEDASGNYMYYGVREFGMTAIMNGVALHGGLVPYGATFLMFMEYARNAVRMSALMKKRVIHVYTHDSIGLGEDGPTHQPIEQLTSLRTTPNLDTWRPADAVESAVAWKNALERKDGPSALIFSRQNLQHQTRDAGQIADISRGGYVLKDCAGEPELILISTGSEVGLAVQAYDKLTEQGRKVRVVSMPCTSVFDAQDAGYKQSVLPLQVSARIAIEAAHADFWFKYVGLEGRVIGMTTYGESAPASALFEEFGFTLDNILGQAEELLED

SEQ ID NO: 33488 - protein, 476 aa, Ehrlichia ruminantium str. Welgevonden
MRKFLLVISVLLLTTVPLVSSSSEDIEQYDPRSGFSRLIQDSSPAIVNVSIIQDSSSEQLSMLLNFEELLKSLVEGKSIKKAVPEEILSSGSGFVIDKSGIIVTNYHVVQNAKEIFVTFSDNKSVPAKLLGIDPQTDLAVLKVEVNQNLPYLSFGDSNSAKVGDWVVAIGNPFGLGGSASIGIISARARDLKIGATEFLQTDAAINSGNSGGPLFNIHGEVIGINTAMMSTQRGGGSIGVGFAIPSNSAIPIIKVLSQGKKVEHGWLGIVMQPVTEELIEPFKLKEVTGILVTTVVKDSPANKATILPGDVILEFNHNKVTTGSQLYQSVLRSKPGSDANILISRHGKLINLNVKMGKFEDPNLQDQSNEIYQNIKNVFQSPELGLTVGNIEPNMLPKCTEDTITGVIVLKAEHGNDAPSKNLRKGDVISQINQLAVANISDFKNAIKKTNRNKSVALLVHRNNFPSIFIPVKLKK

SEQ ID NO: 33489 - protein, 102 aa, Brassica napus
MEARPVQRSGSRELTNLARTSSIPSTPNPSSAPEAAFMRPDHKPLGQQTYHLLSSSNGGSVGHICSSSSSGFSTNLHYSSMEKHYAAASSNDDSSWCNGGFL

SEQ ID NO: 33490 - protein, 353 aa, Nostoc sp. PCC 7120
MQLFETVREMGHEQVLYCHGKNPDIRAIIAIHDTTLGPAMGATRLYPYINEEAALRDALRLSRGMTYKAACANIPAGGGKAVIIANPEDKTDEMLRAYGRFVESLKGRFITGQDVNITPQDVRTIKQETNYVVGVEEKSGGPAPITALGVFLGIKAAVEFRWQTKNIEGMTVAVQGLGNVGQNLCRHLHENGIKLIVADFSSEKTAEIKHLFGATVVEPDEIYSQNVDIFSPCAMGGIINSQTIPQLQAKIIAGAANNQLDNERLHGQRLVEKDILYCPDYVINAGGIINVYNEMIGYEEDKAFKQVNNIYDTLLAIFNIAQQQSITTNDASKRLADERIMKARINKNQLIAA

SEQ ID NO: 33491 - protein, 472 aa, Oryza sativa (japonica cultivar-group)
MAFFRGLTAVSRIRSRMAQEATTLGGVRWLQMQSPSDLDLKSQLQELIPEQQDRLKKLKSEHGKVQLGNITVDMVLGGMRGMIGMLWETSLLDPEEGIRFRGLSIPECQKVLPTAIKGGEPLPEGLLWLLLTGKVPTKEQVDALSKELVTRSSVPGHVYKAIDALPVTAHPMTQFTTGVMALQVESEFQKAYDKGMPKSKFWEPTYEDCLNLIARLPPVASYVYRRIFKDGKTIAADNALDYAANFSHMLGFDDPKMLELMRLYVTIHTDHEGGNVSAHTGHLVGSALSDPYLSFAAALNGLAGPLHGLANQEVLLWIKSVIGETGSDVTTDQLKEYVWKTLKSGKVVPGFGHGVLRKTDPRYTCQREFALKYLPEDPLFQLVSKLYEVVPPILTELGKVKNPWPNVDAHSGVLLNHFGLSEARYYTVLFGVSRSIGIGSQLIWDRALGLPLERPKSVTMEWLENHCKKAAA

SEQ ID NO: 33492 - protein, 1335 aa, Ralstonia metallidurans CH34
MKETLRHAASQCRRWTLSVLILGLSLMQPAMALPAKLTVGMLDNGWPPFTMLNAGRAEGIGMDFLHEALRGHQITYSVKGYPDMTALLAALCKGDVDVVLNVAITPARRRCLSFSEPYFDGDAVVVGRPSAALEEDLLASMQTGRFAIEPGYYMEGILRQRYPKARMVPIKDTTDGLRAIVNGRADYYATVQPVAEYAMVSPEFAGLKVLSRYREPTGAIHFAFRSNATELRDATDAGLAAIDPARRAALLAHWITSQVASPDKPQKFFLTDEERAFLKSLPTLTVGVDAGLAPYTYLDESGRASGIAIDYLSYLGETLGVRFRRQPTTDIQQTVEALHQGKIDLMAVAVPEDPTLRGLPVSRPYSTFPVVVAGRNSALPLAHLRDLTGKRVVVTDSGGVGDFTRHEVPGVKLVIAPNVHAGLDMVAQGKADAYVDDIVSTDIELRRNFAGKLRVIGSGEHMLNSGFAVNPALAGRLLPLINRALSVLPEDRRLDIQNRYAGTSYVLETSWLNALWRASPILIGMMVILLILLRSQRLYRKEASIRREAERELSTQLRFQSTLMDAIPLPIVVSNKDGRYLRLNAFSEWITGRSWADIVGHTTTEVHFWGEANSARVEEASQRAIDTGRLVQLQLQLQDKEGVERHFLLYIKPFVGENNVEGLINTGVDVTEIRQAELEAREAQGRLADVTRYLPIMVFQARQSGHLGRGPIWVSGNTTDLFGVDAETLAVNPPTIEACVHPDDRMSLRRAIARARRELQVLNHEVRLRKLEGFRWTRLQAVPRIEIDGSVLWNGYWRDTQAEHERAAALASAKESAEAASRAKDSFLAMMSHEIRTPMNGVLGLAELLSHTSLTPEQSATVGMMGDSASALLQILDDILDYSKIEAGRIDIESRPLDIRELCDCTIGVLATRAHEKGLHLRLHVGADVAAVVLGDSVRLRQVLFNLLSNAIKFTESGMVSVSAEVVQETETAQTLRWRVTDTGIGIEPQNQSRLFDPFVQADTSTTRRFGGTGLGLAICRRLVQLMGGRITLKSEPGIGTQVEVELSLPVKERRYSKPPLAGIQFGVRLRDCAVGQALTDFLSAAGATNSASQDERDKPQMLFLNDGEYAPPSPVGQASPIVVHVTEKPKLAGYRLTESDVRLSSNPVSWRAINAVTVAAMQGRAHTVATHAQAKPKPAAHAVTREQALASGRLILVAEDHETNRILLQHQLKLLGYACDAVVDGQQALEAAEKTAYAMLITDCHMPNVNGYELARQLRAREAEAKTEAGTDAHRLPIVAITASTEAEEVQRCREAGIDECMFKPTQLNALRACLQRWNPDNQDADGRKGSGKA

SEQ ID NO: 33493 - protein, 111 aa, Brassica napus
SSEARLADSLGHKSPVHDTIQNTHDCYNNCMTFLMEKASNGSGFGVVLATHNADSGRLASKKASELNIDKENGKIEFAQLYGMSDALSFGLKRAGFNVSKYMPFGPVETAI

SEQ ID NO: 33494 - protein, 189 aa, Arabidopsis thaliana
  misc_feature (71)..(71): Xaa can be any naturally occurring amino acid
  misc_feature (102)..(102): Xaa can be any naturally occurring amino acid
  misc_feature (135)..(135): Xaa can be any naturally occurring amino acid
  misc_feature (144)..(144): Xaa can be any naturally occurring amino acid
  misc_feature (157)..(157): Xaa can be any naturally occurring amino acid
  misc_feature (164)..(164): Xaa can be any naturally occurring amino acid
  misc_feature (166)..(166): Xaa can be any naturally occurring amino acid
  misc_feature (174)..(174): Xaa can be any naturally occurring amino acid
  misc_feature (179)..(179): Xaa can be any naturally occurring amino acid
  unsure (1)..(189): unsure at all Xaa locations
MKIQCDVCEKVPATVICCADEAALCPQCDIEIHAANKLASKHQRLHLNSLSTKFSRCDICQEKAAFIFCVXDRALLCRDCDESIHVANSRSANHQRFLATGXIKVALTSTICSKEIEKNQPEPSNNQQKVNQIPXKSTSQQQQXPSSATPLPWAADXFFHFSDXEXPTRKDSLXLGAGXGGFWFPHVPN

SEQ ID NO: 33495 - protein, 251 aa, Campylobacter jejuni
  misc_feature (1)..(1): Xaa can be any naturally occurring amino acid
  misc_feature (35)..(35): Xaa can be any naturally occurring amino acid
  misc_feature (116)..(117): Xaa can be any naturally occurring amino acid
  misc_feature (224)..(224): Xaa can be any naturally occurring amino acid
  unsure (1)..(251): unsure at all Xaa locations
XKRIVVKVGSHVISEENTLSFERLKNLVAFLAKLXEKYEVILVTSAAISAGHTKLDIDRKNLINKQVLAAIGQPFLISVYNELLAKFNKLGGQILLTGKDFDSRKATKHAKNAIDXXINLGILPIINENDATAIEEIVFGDNDSLSAYATHFFDADLLVILSDIDGFYDKNPSEFSDAKRLEKITHIKEEWLQATIKTGSEHGTGGIVTKLKAAKFLLEHNKKXFLASGFDLSVAKTFLLEDKQIGGTLFE

SEQ ID NO: 33496 - protein, 418 aa, Saccharomyces cerevisiae
MSATLFNNIELLPPDALFGIKQRYGQDQRATKVDLGIGAYRDDNGKPWVLPSVKAAEKLIHNDSSYNHEYLGITGLPSLTSNAAKIIFGTQSDAFQEDRVISVQSLSGTGALHISAKFFSKFFPDKLVYLSKPTWANHMAIFENQGLKTATYPYWANETKSLDLNGFLNAIQKAPEGSIFVLHSCAHNPTGLDPTSEQWVQIVDAIASKNHIALFDTAYQGFATGDLDKDAYAVRLGVEKLSTVSPVFVCQSFAKNAGMYGERVGCFHLALTKQAQNKTIKPAVTSQLAKIIRSEVSNPPAYGAKIVAKLLETPELTEQWHKDMVTMSSRITKMRHALRDHLVKLGTPGNWDHIVNQCGMFSFTGLTPQMVKRLEETHAVYLVASGRASIAGLNQGNVEYVAKAIDEVVRFYTIEAKL

SEQ ID NO: 33497 - protein, 547 aa, Listeria monocytogenes EGD-e
MTLKSGFDYMNNPLLNKGTAFSKEERASYQLDGLLPPIIETIEQQAVRIETQIENLETPLHKHRLLTNLYNENRTLYYYVVTKNVTDYLPIIYTPTIGDAVIQYHKDYTAPDEALFVDAFAPEKLSASIKNYAKNNPNIDMIVITDGEGVLGIGDWSVNGVKIAVGKLAVYTVAAGLAPDRVLPVVIDAGTNNETLLNDPLYLGNKRPRLSESEYDAFIASFVNVMKEVFPKAILHWEDFGRANASRILHNYRDKICTFNDDIQGTGAMVVAAVLATIQVSRIPLSEQKIIIFGAGTAGIGIADQLSAQLMRETGLPFEKAKKHFYLVDRKGLVLDNMTDLTTGQKKYAHPSAEWSNVPTDTLENLVEAVHPTMLIGCSGVTGAFKESIVKKMTQYTERPAILPLSNPTKLAEATASDLIQWTDGKALIVTGSPSKPVEYQNTTYEIGQANNALLYPGLGLGALVTRAKYITDDMLAAASMAVAEQISPNKAGAALLPHVRTLRETSRAVAIAVANQAIKENIHQVELTNVIEAIELEMWQPIYKGV

SEQ ID NO: 33498 - protein, 209 aa, Triticum aestivum
ARADPYIDGPIIQASVARALASGTTMDAVLEMLREVTPELSCPVVLLSYYKPIMSRSLAEMKEAGVHGLIVPDLPYVAAHSLWSEAKNNNLELVLLTTPAIPEDRMKEITKASEGFVYLVSVNGVTGPRANVNPRVESLIQEVKKVTNKPVAVGFGISKPEHVKQIAQWGADGVIIGSAMVRQLGEAASPKQGLRRLEEYARGMKNALP

SEQ ID NO: 33499 - protein, 512 aa, Arabidopsis thaliana
MEISVASVTVSVAVVVVSWWVWRTLQRVWLKPKMLESYLRRQGLAGTPYTPLVGDLKRNFSMLAEARSKPINLTDDITPRIVPYPLQMLKTHGRTFFTWFGPIPTITIMDPEQIKEVFNKVYDFQKAHTFPLGRLIAAGLVSYDGDKWTKHRRIINPAFHLEKIKNMVPAFHQSCSEIVGEWDKLVTDKQSSCEVDIWPWLVSMTADVISRTAFGSSYKEGQRIFELQAELAQLIIQAFRKAIIPGYRYFPTKGNRRMKAAAREIKFILRGIVNKRLRAREAGEAPSDDLLGILLESNLGQTKGNGMSTEELMEECKLFYFAGQETTTVLLVWTMVLLSQHQDWQARAREEVKQVFGDKEPDAEGLNQLKVMTMILYEVLRLYPPVVQLTRAIHKEMQLGDLTLPGGVQISLPILLIQRDRELWGNDAGEFKPDRFKDGLSKATKNQVSFFPFAWGPRICIGQNFALLEAKMAMTLILRKFSFELSPSYVHAPYTVLTTHPQFGAPLILHKL

SEQ ID NO: 33500 - protein, 273 aa, Pisum sativum
MDMEGSIGTKEHLAKGKRTKRGIRMLSPCTVANTTVTSSCSSAIGDGGRSFSSTTFDSTEQEEEADMANCLILLAQGRTGGQEETRCHNHRQQDGGYNNIVTEKATRNGFESYECKTCNRFFHSFQALGGHRASHKKPKMKEIISAGETEEQNNHIHNKNVSTISPLVPPHVSLELRCGGNLNFHGHGNNNKPNRSNKVHECSICGAEFTSGQALGGHMRRHRACTNKNNNNNVGDVHGKTRNILELDLNLPAPEEDLRDSTFQFPAMVGCHY

SEQ ID NO: 33501 - protein, 235 aa, Fragaria x ananassa
MKLRSQSNSSPSFVFFFVLFFSFIALSEMATLGGIRDSPAGSENSLETEALGRFAVDDHNQKQNGMLEFVRVVKAKEQVVAGTLHHLVVEAIDGGKKKLYEAKVWVKPWLNFKQVQEFKHAGEPETVSGTPSFTSSDLGVKQGGHAPGWQDVHPQDPQVQDAANHAVKSLQQKSNSLFPYELQEVVHAKSEVMEEHAKFNMLLKLKRGDKEEKYKVEVHKNNEGAYNLNQMEVEH

SEQ ID NO: 33502 - protein, 194 aa, Glycine max
  misc_feature (27)..(27): Xaa can be any naturally occurring amino acid
  misc_feature (55)..(55): Xaa can be any naturally occurring amino acid
  misc_feature (117)..(117): Xaa can be any naturally occurring amino acid
  misc_feature (129)..(129): Xaa can be any naturally occurring amino acid
  misc_feature (166)..(166): Xaa can be any naturally occurring amino acid
  unsure (1)..(194): unsure at all Xaa locations
DTSFILARDAIGDTYLFIAWRLNGSHXTPSYLNGDYDDCEHYESFPPGHLYSIKXRALLTIAQSLHGFCDAILLSHLMITLALRHAFEMAVVKRMMTDVPSAGSLSQGSYSTLSAVXLYLYLSGSRCSXQRASKLHSLCVCLEGAPDLMASLEVTYYIGTVHHEYXYSVQEGIYTIDDEIYHIYSSWVDTIRAS

SEQ ID NO: 33503 - protein, 191 aa, Glycine max
MVLSKTASETDVSVHSTFASRYVRTSLPRFKMAEESIPKEAAYQIIHDELMLDGNPRLNLASFVTTWMEPECDKLIMAAINKNYVDMDEYPVTTELQNRCVNMIAHLFNAPLEESETAVGVGTVGSSEAIMLAGLAFKRRWQNRRKLEGKPYDNPNIVTGANVQVCWEKFARYFEVELKEVKLRDGYYVMD

SEQ ID NO: 33504 - protein, 517 aa, Saccharum hybrid cultivar
MARGDGELELSVGVRGAGAAAADHVAPISLGRLILAGMVAGGVQYGWALQLSLLTPYVQTLGLSHALTSFMWLCGPIAGLVVQPLVGLYSDRCTARWGRRRPFILTGCILISLAVIVVGFSSDIGAALGDTKEHCSLYHGPRWHAAIVYVLGFWLLDFSNNTVQGPARAMMADLCGHHGPSAANSIFCSWMALGNILGYSSGSTNNWHKWFPFLKTNACCEACANLKGAFLVAVVFLVICLAVTLIFAKEVPYRGNENLPTKANGEVEAEPTGPLAVLKGFKNLPPGMPSVLLVTGLTWLSWFPFILYDTDWMGREIYHGDPKGSNAQISAFNEGVRVGAFGLLLNSIILGFSSFLIEPMCRKLGPRVVWVTSNFMVCVAMAATALISYWSLKDYHGYVQDAITASTNIKAVCLVLFAFLGVPLAILYSVPFAVTAQLAATKGGGQGLCTGVLNISIVIPQVIIALGAGPWDALFGKGNIPAFGVASGFALIGGVVGVFLLPKISKRQFRAVSAGGH

SEQ ID NO: 33505 - protein, 198 aa, Nicotiana tabacum
MSASRFIKCVTVGDGAVGKTCLLISYTSNTFPTDYVPTVFDNFSANVVVDGSTVNLGLWDTAGQEDYNRLRPLSYRGADVFILAFSLISKASYENVSKKWIPELRHYAPGVPIILVGTKLDLREDKQFFLDHPGAVPLTTAQGEELRKSIGASAYIECSAKTQQNVKAVFDAAIKVVLQPPKQKKKKKRKGQKACSIL

SEQ ID NO: 33506 - protein, 201 aa, Zea mays
  misc_feature (65)..(65): Xaa can be any naturally occurring amino acid
  misc_feature (84)..(84): Xaa can be any naturally occurring amino acid
  unsure (1)..(201): unsure at all Xaa locations
MVSLKVPKRLAASVLKCGKGKVWLDPNEVSEISMANSRHNIRKLVKDGFIIKKPQKIHSRSRARXAHEAKQKGRHSGYGKRRGXTREARLPTKVLWMRRMRVLRRLLRKYREAKKIDKHMYHDMYMKVKGNSFKNKRVLMESIHKSKAEKAREKTLSDQFEARRAKSKASRERKNARREERLAQGPREIPPPVSATAPTTG

SEQ ID NO: 33507 - protein, 493 aa, Chlamydomonas reinhardtii
MDPAKIRPSSAYNTPYWTTNSGAPVWNNNNSMTVGTRGPILLEDYHLVEKLAQFDRERIPERVVHARGAAAKGFFEVTHDISALTAADFLRAPGVQTPVIVRFSTVVHERGSPETLRDPRGFAVKFYTREGNFDMVGNNMPVFFIRDGMKFPDMVHAFKPNPKSHIQEAWRIMDFLSHHPESCHMLTFLLDDAGIPLNYRHMPGFGVHTMKLINKAGRETYVKFHWVPKCGEKYLLDDEAVMVGGANHSHATKDLFDAIAAGDYPEWALMVQTMDPADEDKFDFDPLDVTKTWPESLFPMQPVGRMVLNRNVDNFFNENEQVAFCPAIIVPGIGYSDDKLLQTRIFSYADTQRHRLGPNYLLLPVNAPRAPHHNNHHEGFMNFMHRDEEINYFPSRFDPVRNAERVAAVSSAPLSGRREKMVIAKENNFMQAGAAGRAFDAARQERFVVRVADMLADPRCTQEIRRIWVGYWSQADPQLGARIAAKLQGRGCL

SEQ ID NO: 33508 - protein, 404 aa, Azoarcus sp. EbN1
MFEHVDAYPGDPILSLVETFHHDPRPRKVNLGIGLYYDEEGRIPLLGSVEKAEAALAANPGPRPYLPMEGAADYRAAVQKLLFGPDSAALRAGRIATIQTIGGSGALKVGADLLKRYFPASEVWVSDPTWDNHRSIFEGAGIEVHDYPYYDAASGGVRFDEMIETLQSLPAQSIVLLHPCCHNPTGVDLSTAQWQEVIAVVASRGLIPFLDIAYQGFGDNLDDDAYAARAMADAGVSFFVSNSFSKNLSFYGERCGGLSVVCQDADEAERVLGQLKFTVRRNYSSPPVHGGRVAAAVMNDAGLHEEWVGEVRGMRERIKAMREKLHEVLSSTLPGRDFSYFVKQRGMFSYTGLTPEQVDRLREEFAVYVVQSGRMCVAGLNRGNVDYVAKAMAAVLQEAGTAAA

SEQ ID NO: 33509 - protein, 284 aa, Wolbachia endosymbiont of Drosophila ananassae
LEHRKGTRKIKNLPSVLGVEAVGVIEKLGKKISDGLKVGDRVGYCTAPPGAYCEKRIIHQKYLIKIPDDISDEVAAAVLFKGMTAHYLVNQSYKVRPGAFVLVHGANGGLGQIICQWAKDKKGVVIGSVSSDEKMKIALQSGCTYAINYNDKDFVSKIMEITQNRGVGAVYDPIGYATSKLSFESLGRFGIYVSYGQISGNAPISFSLLSSRSLFATGTLIYHYKHDRFTLVLTTMEIFEMIRKKLLTVRINKKYKFDEIIQAHRDMENRKTSGLNIIKISQIN

SEQ ID NO: 33510 - protein, 165 aa, Triticum aestivum
EPEAEAAAVPVGAAGGGQRKRRRKKNVYRGVRQRPWGKWAAEIRDPRRAVRKWLGTFDTAEDAARAYDLAALEFRGPRARLNFPCSDEPLRVHGSGNGGDGDAGAAPQNETLTTPSPCSTDAGQRTPGQWQLAADGAGDQLWEGLQDLMTIDGEGPWFAPFSSPA

SEQ ID NO: 33511 - protein, 535 aa, Bacillus subtilis subsp. subtilis str. 168
MTKYIFVTGGVVSSLGKGIVAASLGRLLKNRGLNVTIQKFDPYINVDPGTMSPYQHGEVFVTDDGAETDLDLGHYERFIDINLNKFSNVTTGKIYSTVLKKERRGDYLGGTVQVIPHITNELKDRVYRAGKETNADVVITEIGGTVGDIESLPFLEAIRQMKSDIGRENVMYIHCTLVPYIKAAGELKTKPTQHSVKELRSLGIQPNIIVVRTEMPISQDMKDKIALFCDIDTKAVIECEDADNLYSIPLELQKQGLDKLVCEHMKLACKEAEMSEWKELVNKVSNLSQTITIGLVGKYVELPDAYISVVESLRHAGYAFDTDVKVKWINAEEVTENNIAELTSGTDGIIVPGGFGDRGVEGKIVATKYARENNIPFLGICLGMQVASIEYARNVLGLKGAHSAEIDPSTQYPIIDLLPEQKDVEDLGGTLRLGLYPCKLEEGTKAFEVYQDEVVYERHRHRYEFNNEFRQQMEEQGFVFSGTSPDGRLVEIIELKDHPWFVASQFHPEFKSRPTRPQPLFKGFIGASVEAANQK

SEQ ID NO: 33512 - protein, 196 aa, Triticum aestivum
HDRTSLYKKAGWYRSGIPGISSTHASVYKGFEGLGTIVDVGGGVGATVGAITAAYPAIKGINFDLPHVISEAQPFPGVTHVGGDMFQKVPSGDAILMKWILHDWSDEHCATLLKNCYDALPAHGKVVLVECILPVNPEATPKAQGVFHVDMIMLAHNPGGRERYEREFEALAKGAGFKAIKTTYIYANAFAIEFTK

SEQ ID NO: 33513 - protein, 478 aa, Agrobacterium tumefaciens str. C58
MHTYPDIKLLIDGEWRDAVSGKTIAVSDPATDEIIGAIAHAEKEDLDLALAAAERGFKLWRDTSPYERSKIMRKAADILRERKDKIAYIMTREQGKPLAQSATEIMGAADTIDWFAEEARRTYGQVIPARATGVSQLAIKVPVGPVAAFTPWNFPLNQIVRKLSAALATGCSIIVKAPEETPASPAELIRAFVDAGVPAGVIGLVYGVPSEISEYLIPHPVIRKISFTGSTPIGKHLAALAGKHMKRATMELGGHAPVMIFDDADIEKAIEVTSLAKFRNAGQVCVAPTRFLVQDGVADRFLEGFVEATKAIKVGNGLEEGVIMGPLANERRIPALEGLINDAVSHGAELKTGGRRIGNKGNFFEPTVLANVPVTAKIMNDEPFGPVAIINRFSSFDDAITEANRLPFGLASYAFTGSVKTAHALGQQVEAGMLTINHNGLALPEVPFGGIKDSGYGTEGGSEAVQAYLETKFVSQMS

SEQ ID NO: 33514 - protein, 225 aa, Populus tomentosa
MAREKIKIKKIDNVTARQVTFSKRRRGLFKKAEELSVLCDAEVAVIIFSATGKLFEYSSSSMKGVLARYNLHSNNLDKINQPSLELQLENSNHMRLSKEVSEKSHQLRRMRGEDLQGLNIEELQQLEKALEVGLSRVLETKGERIMNEISTLERKGVQLLEENKQLKQKIATITRGKRPALVDLDTAVQEEGMSSESTTNVCSCSSGPPVEDDSSDTSLKLGLAI

SEQ ID NO: 33515 - protein, 120 aa, Brassica napus
MSPSDNSYTTMATNESQRTAPTPFLTKTFNLVEDPCTNGVISWNEDGSSFVVWNQTDFAKDLLPKHFKHNNFSSFVRQLNTYGFKKVVPDRWEFSNEFFRRGEKRLLRDIQRRKLTPQAA

SEQ ID NO: 33516 - protein, 185 aa, Burkholderia fungorum LB400
MNIELSKWNPFKFLRKAQNGREKPSSNPPTTKNWLTEWPDASRLFSSDPWRVMRELLHDPFAGGALERWFGDFSSSWFQPRIDVVDDGDVLRITAELPGMDRGDLQTSIEEGVLVLRGEKKQDTRSEENGCYRLERSYGAFTRTIPLPDGVDVDKVDAKFDKGVLTVRLPKTDSARPTIRKVEIK

SEQ ID NO: 33517 - protein, 286 aa, Zea mays
MHIREEEATPSTVTGIMSTLTSAGQQKLKEPISPGGGSASVAGSAAERNNGGRGKGKTEIKRIENTTNRQVTFCKRRNGLLKKAYELSVLCDAEVALIVFSSRGRLYEYANNSVKGTIERYKKATSDNSSAAGTIAEVTIQHYKQESARLRQQIVNLQNSNRALIGDSITTMSHKELKHLETRLDKALGKIRAKKNDVLCSEVEYMQRREMELQNDNLYLRSRVDENERAQQTANMMGAPSTSEYQQHGFTPYDPIRSFLQFNIVQQPQFYSQQEDRKDFNDQGGR

SEQ ID NO: 33518 - protein, 608 aa, Cryptococcus neoformans var. neoformans JEC21
MQVTSLLRFSGVCPFLGHSTPSSLRAMANTANSSVSALTATAMTCPMMGPKLASISAARTYASVAGAKEVQELHQNKNVTIDSTTTGAAAKCPHAKAARDVAVDAHRKAAAAGTFNYQGFYETELEKKHKDKSYRYFNNINRLAAKFPVAHTANTKDEVDVWCANDYLGMSRNPVVVGTMKRTLDRYGSGAGGTRNIAGNGALHLALEDEIASLHRKEAALVFSSCYVANDACLATIGAKLPGCVIFSDASNHASMIQGIRHSGAKKVIWKHNDLADLEAKLKTVPKEVPKIIAFESVYSMCGSVAPIEAICDLADKYGALTFLDEVHAIGMYGPNGAGVAEHLDFEAHHATRHSPEPVKGSVMDRIDIITATLGKAYGVVGGYIAGSADFVDVVRSYAPGFIFTTSLPPAIVAGAQASIAYQREFMGDRRLQQLNTREVKRQFNQLDIPVVPNPSHIIPVLVGDAALAKEASDMLLAKHKIYVQSINYPTVPVGEERLRITPTPGHTTEQIAHLVSSIDNVFNTLGLKRIREWKAAGGRAGVGMPNASAIEPVWSDKQLGLTDGSAPVALQQGAKSVVRDEAVEVAQKKLTHLLGADAGPALKVASL

SEQ ID NO: 33519 - protein, 81 aa, Gaertnera macrostipula
TPQDEMRAGMSYFHETIWKGVPKFLRRVDTALKNIGINERLPYNAPLIQFSSWMGGDRDGNPRVTPEVTGDVCLLARMMAA

SEQ ID NO: 33520 - protein, 180 aa, Hordeum vulgare subsp. vulgare
MFPMVSGFMSYGQQTIRATRYIGQSFITTLSHTNRLPITIHYPYEKSITPERFRGRIHFEFDKCIACEVCVRVCPIDLPVVDWRFEKDIKRKQLLNYSIDFGVCIFCGNCVEYCPTSCLSMTEEYELSTYDRHELNYNQIALSRLPISIMGDYTIQTIRNSSESKINEEKSSNSRTITDY

SEQ ID NO: 33521 - protein, 292 aa, Oryza sativa
MPFHFQFPWLPNNPTSSSSSPTKPPSPAIPNPFLPIQAGLASFLSSLPLPRAAFPPPPWARISSASASAASASALPVAEIEERLAGVPVYALANSSQEFVLVSSARGGGGGGGGARAAVPPPALGLLCFRREDADALLAQMDGDMAAGSTVVPVALNKVIQLKSDGVAFRFVPDSSQVANAMKLMENEGQYVNDGFPGVPVFQSRSLVLMSYNKRYRPVFFRKEDLDNSLHRASRDQQKPNPAVKMGDIQVSSLENIIKSMKDSSSSKWDDAVFIPPGFDLATSSKQSNHDN

SEQ ID NO: 33522 - protein, 431 aa, Streptococcus pneumoniae
MGSSHHHHHHSSGLVPRGSHMKLNRVVVTGYGVTSPIGNTPEEFWNSLATGKIGIGGITKFDHSDFDVHNAAEIQDFPFDKYFVKKDTNRFDNYSLYALYAAQEAVNHANLDVEALNRDRFGVIVASGIGGIKEIEDQVLRLHEKGPKRVKPMTLPKALPNMASGNVAMRFGANGVCKSINTACSSSNDAIGDAFRSIKFGFQDVMLVGGTEASITPFAIAGFQALTALSTTEDPTRASIPFDKDRNGFVMGEGSGMLVLESLEHAEKRGATILAEVVGYGNTCDAYHMTSPHPEGQGAIKAIKLALEEAEISPEQVAYVNAAGTSTPANEKGESGAIVAVLGKEVPVSSTKSFTGHLLGAAGAVEAIVTIEAMRHNFVPMTAGTSEVSDYIEANVVYAQGLEKEIPYAISNTFGFGGHNAVLAFKRWENR

SEQ ID NO: 33523 - protein, 1209 aa, Trichodesmium erythraeum IMS101
MGRKCILGFILFLLTLTLTILHGSVISKNTNDYQLSNQIKEVKTWQTSELEKEQYNFYQSSEEDFIKPQKFDHLQTVINKKDLPVYKNLSTSKPHSTYKVTDILWLLISSGLVFLMQPGFMCLESGLTRSKNNINVAFKNLTDFGISVFCFWSIGFAFMFGTSASGIIGHSNFFFATNVQPLDAAFFLFQVMFCGTATTIVSGAVAERMKFGTYLFVAFLVSGFIYPIFGHWAWNGIDTGVLRGWLGQRGFIDFAGSTVVHSIGGWVSLATLLVIGPRTGRFPRDRPPEKIHGSNLPLSILGVMLIWFGWFGFNGGSTLALNEQVPGIIVNTIFSSVAGMITGLSIGWSIRGIPGVDLIINGTLGGLVAITASCHAVTTLSAVIIGFIGGIVTILVEQILEKIRVDDAVGAIPVHLGAGIWGTLAVALFGKPEILGTGLSLSEQLTVQLLGVCTAFLLGFFVVYPILLITNKFFLLRVSTEDEHIGLNISEHHAKTEILDLFEIMSSQASTQDLTLRVPVEPFTLVGQIAERYNHVMDTLEEVTTRNDAIIKLATDAIITFNKSELEIISVNPSAEKIFSYKPQDLVGMPIYEILDFTINPLMREKIDSNDLITEGKKSTVEALKLWVNPSFISFPTREIINAYYTFNFQDIKPENLQSYFPNFIHLFDKNSADTQIELETEKKITQKKYYIERLISLIAETGNLYELVGIRKDGSLFPIEIAVREAKLNQKNFYTGTFRDISERKESEAKLKENEQRFRSLSTATFEGIIIYEQGKIVDANTAALQMFKYELSEIIGMNGLELIDSKYKNLVWKNMSSGYEKPYEVVGIRKDNSTFPIEIQAKTFFYCSYQHRVSAIRDITERKLAEKALRESEEKFRAVMEQAADAFIIHDLQGKIVDVNQSTCQTLGYTYEELLHLFIEDIEINFVLEYLYQKWQKLIPGIPITLQGTHKRKDGTTFPVEVRLGLLKAGNGNLVLALCRDITERKKVEQALLLEQGKSEKLLLNILPKPIADKLKENQDIIAEGFDEVTVLFADLVGFTQLASSVYPKRLVYWLNEIFSKFDLLAEKYGLEKIKTIGDAYMVVGGLPTPMENHAEAIALIAIDMREELAHFAHKSKQDFLIRIGINTGPVVAGVIGRKKFIYDLWGDTVNIASRMESQGIPGVIQVTEATYQILKHKFLFTERGLIHIKGKGYMKTYFLQGKKVIP

SEQ ID NO: 33524 - protein, 468 aa, Pseudomonas fluorescens Pf-5
MGLNNQWMQRDLAVLWHPCTQMKDHEQLPLIPIKRGEGVWLEDFEGKRYLDAVSSWWVNVFGHANPRINQRIKDQVDQLEHVILAGFSHQPVIELSERLVKITPEGLTRCFYADNGSSCIEVAMKMSFHYWINRGQPNKKRFVTLSNGYHGETIAAMSVGDVPLFTETYKALLLDTLKVPSPDCYLRPEGMSWEEHSRNMFAAMEQTLAEHHETVAAVIVEPLIQGAGGMRMYHPVYLKLLREACDRYGVHLIHDEIAVGFGRTGTMFACEQAGIRPDFLCLSKALTGGYLPLAACMTTDDVYSAFYDDYPTLRAFLHSHSYTGNPLACAAALATLDIFEQDNVVENNHALARRMASATAHLVDHPHVAEVRQTGMVLAIEMVQDKASKTAYPWQERRGLKVFQHALERGALLRPLGSVVYFLPPYVITPEQIDFLAEVASEGIDIATRDQVSVAVPKDFHPGFRDPG

SEQ ID NO: 33525 - protein, 321 aa, Brassica rapa
MLKEESNESGGTRACDTCRSAACTIYREADSTYLCTTCDARVHAAKRVRVCDSCESAPAAFFCKADAASLCTACDAEIHSANPLARRHQRVPITSNSCGSMATDGDNNVMMVSEEKEDADEVASWLMLNPGKNNQNNGFLFGVEYLDLVDYSSSIDNQFEDQYSKYHRSFGGGEDGVVPLQLEESSTSHMQQSQHNFHLGVNYGYSTEPQYSYVSVVPESLSDTTVQHAKETIDQVCGPPTQMVQQLTPADREARVLRYREKKKRRKFEKTIRYASRKAYAEVRPRIKGRFAKRIDMEADAEQLFSTSVMSNTSYGIVPSF

SEQ ID NO: 33526 - protein, 210 aa, Nicotiana tabacum
MASSASRFIKCVTVGDGAVGKTCMLICYTSNKFPTDYVPTVFDNFSANVVVEGTTVNLGLWDTAGQEDYNRLRPLSYRGADVFVLAFSLVSRASYENILKKWIPELQHYAPGIPVVLAGTKLDLREDKHFLADHPGLVPVTTAQGEELRKQIGAAYYIECSSKTQQNVKAVFDAAIKVVIKPPQKQKEKKKQRRGCLMNVMCGRKLVCLK

SEQ ID NO: 33527 - protein, 147 aa, Listeria monocytogenes EGD-e
MEQTYVMVKPDGVERGLIGEIVTRIEKKGLKIVAGKLMQIDRELAEKHYAEHIGKSFFEDLIGFITSGPVFAMVLEGDDAIATARRMMGKTNPLEADPGTIRADYAIHTNRNVIHGSDSPESAQREIQLFFAPDEILSYQKAVDTWI

SEQ ID NO: 33528 - protein, 213 aa, Nicotiana tabacum
  misc_feature (76)..(76): Xaa can be any naturally occurring amino acid
  unsure (1)..(213): unsure at all Xaa locations
CVFLETRRGGPGPLSTCILLSVLTRGDGAVGKTCMLICYTSNKFPTDYIPTVFDNFSANVAVDGSIVNLGLWDTAXQEDYSRLRPLSYRGADIFVLAFSLISRASYENVLKKWMPELRRFAPNVPIVLVGTKLDLREDNRYLADHMGSNIITPDMGEELRKQIGAAAYIECSSKTQQNVKAVFDTAIKVVLQPPRRKEVPRKKRRRSTGCSIV

SEQ ID NO: 33529 - protein, 252 aa, Kandelia candel
MPIRQIAVGHPHEATRPDVLKAALAEFISTLIFVFAGEGSGMAFNKLTDNGSTTPAGLIAASIAHAFGLFVGVSVSANISGGHVNPAVTFGAFIGGNITLLRGILYWIGQLLGSTVACLLLKFSTGGLTTSAFSLSSGVSVWNAFVFEIVMTFGLVYTVYATAIDPKKGNLGTIAPSPSVSLWVPSVWTGGAFDGASMNPAVSFGPALVSWTWENHWVYWAGPLIGSAIAALIYDSFFIGYGTHEQLPTADY

SEQ ID NO: 33530 - protein, 88 aa, Triticum aestivum
MSHRITAMRKALFDHLAQLQTPGTWHHITVQIGMFSFTGLKAPQVKVLKEKYSIYLTDNGRVSMAGLSSKNVEYFAKAIDDVVRNVSV

SEQ ID NO: 33531 - protein, 535 aa, Pseudomonas aeruginosa UCBPP-PA14
MLAAWVLLLLAACSQGPAPTPPASWGWQDASGERAIAPDEAYPELFQAVQESRLFSDQKHFVDALPLREPARIRADYLRERERPGFDLRAFVGRNFEESGSVETAPPEAGADLASHISDLWPALTRHYEQVPAHSSLLPLPKPYVVPGGRFREVYYWDSYFTMLGLAESGQHQRVRDMLDNFAYLIDTYGHIPNGNRSYYLSRSQPPFFAYMVDLQARREGDAAYRRYLPQLQKEYAYWMEGSAGLRHNEARLHVVKLADGSLLNRYWDNRDTPRQESFLEDRATAARAPQRPAGEVYRDLRAGAESGWDFSSRWLDDGRELASIRTTAIVPVDLNALLYHLERTIAKACASSALKACEQGYGARAEKRRQAIEDHLWHPAGYYADYDWQRRRPIERINAASLFPLFTGLASAERAGRTADSVAAQLLRPGGLATTTRASGQQWDEPNGWAPLQWVAVQGLRAYGRDALAEDIGRRFLAQVQQVYDREGKLVEKYDISGNQGGGGGGEYPLQDGFGWSNGVTLQLLRLYGPGAGR

SEQ ID NO: 33532 - protein, 473 aa, Nicotiana tabacum
MASRIVLQQQNRGEAVPGAVKQKRNMAPEGRNRKALGDIGNVATGRGVEGKKPLPQKPVAVKVKGAIVAKVPPVRKPAQKKATVKPNPEDIIEISPDTQEKLKENMQRTKADKDSLKQKATLTSTLTARSKAACGLSKKPKEQIVDIDAADVNNELAVVEYVEDVYSFYKLAENETRVHDYMDSQPEINDRMRAVLIDWLVEVHQKFELNPETLYLTINIVDRYLAVKTTSRRELQLVGISAMLIASKYEEIWAPEVNDFVCISNKSYTRDQVLAMEKEFLGQLEWYLTVPTPYVFLARFIKASPPDSEIKNMVYFLAELGLMNYATIIYCPSMIAASAVYAARHTINRTPFWNETLKLHTGFSESQLIECARLLVSYHSAAATHKLKVIYKKYSSPERGVVSLLTPAKSLLAASSSSVSSGRSDLAKSTKAAATSSSPMVVVGCQRCHMYVMVTEADPRCPQCKSTTTRKMT

SEQ ID NO: 33533 - protein, 476 aa, Streptomyces coelicolor A3(2)
MRRSKIVCTLGPAVDSHEQLVTLIEAGMNVARFNFSHGTHAEHQGRYDRVRAAAKETGRAIGVLADLQGPKIRLETFAEGPVELVRGDEFTITAEDVPGDRTICGTTYKGLPGDVTKGDQVLINDGNVELKVTEVEGPRVKTIVIEGGVISDHKGINLPGAAVNVPALSEKDVEDLRFALRMGCDLVALSFVRDAKDVADVHRVMDEEGRRVPVIAKVEKPQAVDNMEDVVMAFDGVMVARGDLAVEYPLEKVPMVQKRLIELCRRNAKPVIVATQMMESMITNSRPTRAEASDVANAILDGADAVMLSAESSVGAYPIETVKTMSKIVTAAEQELLSKGLQPLVPGKKPRTQGGSVARAAAEIADFLGGKGLVAFTQSGDTARRLSRYRAAQPILAFTTDESTRNQLALSWGVEPHVVPFVNTTDEMVDLVDQETARLGRFSDGDTVVITAGSPPGVSGTTNMVRVLHLGETRRG

SEQ ID NO: 33534 - protein, 876 aa, Vibrio fischeri ES114
MNEKYAALKSNVSMLGHLLGNTIRDAHGEELLAKVETIRKLSKTARAGSDEDRNALIEEIKSLPDDQLTPVARAFSQFLNLTNMAEQYHTISRHCEAHVCEPDAISTLFSKLSQSNVSKLDTAQAVRELNIELVLTAHPTEIARRTMINKLVKINECLSKLELGDISFSERDKTERRLEQLIAQAWHSDVIRQERPTPLDEAKWGFAVVENSLWQGIPEFLREFDQRLEGHLGEGLPIDARPVHMSSWMGGDRDGNPFVTHKITREVMLLSRWKAADLYLKDINELISELSMVKCTDEVRELAGDQHEPYRAILKQLRTLLGDTLESLDAQMKGELAPNKVILTDADQLWNPLYACYQSLHACGMGIIADGSLLDTLRRVKAFGAHLVRLDIRQESTRHSDVLSELTRYLGIGDYDQWSEQDKISFLVNELSSKRPLLPRKWEPSPEVQEVIDTCKVVAEQSKEALGSYVISMARTASDVLAVHLLLQEAGCPFRMDVCPLFETLDDLNRSKEVMEQLFSIDWYRGFIQNHQMVMIGYSDSAKDAGVMSAGWAQYSAMEALVEVCEKESIELTLFHGRGGTIGRGGAPAHAALLSQPPKSLKGGLRVTEQGEMIRFKLGLPEVAVNSFNLYASAILEANLLPPPEPKQEWRDLMEVLSEVSCEAYRNVVRGEKDFVPYFRAATPELELGKLPLGSRPAKRNPNGGVESLRAIPWIFSWSQNRLVLPAWLGAGEAIQYSIDKGHQALLEEMCREWPFFSTRLGMLEMVYTKCNPQMSEYYDQRLTDKSLWPLGERLRNQLQADIKAVLNVENNDHLMERDPWGSESIRLRNIYVDPLNMLQAELLFRTRQQEETSPELEEALMVTIAGIAAGMRNTG

SEQ ID NO: 33535 - protein, 210 aa, Magnetospirillum magnetotacticum MS-1
MSPIRAVLFDLDGVLVDAREWHWEALNQALRLFGYEIGREEHLTTFDGLPTRKKLAYLHEHRGFPKGLAGVINELKQVYTKQLIATHCFPVFHIEYAVSRLKTENYKLAVCTNSIRETCDMMLGQSGLLDYFDTTLSNQDCARPKPDPDIYVTAMSRLGVAPAETVIVEDNDYGVQAATASGAHVLRVADPSEVTYWNIRSRIRQVEAAS

SEQ ID NO: 33536 - protein, 492 aa, Triticum aestivum
  misc_feature (192)..(192): Xaa can be any naturally occurring amino acid
  unsure (1)..(492): unsure at all Xaa locations
MAAPSGKAAMERHQSIDAQLRLLVPGKVSEDDKLVEYDALLVDRFLDILQDLHGPHLREFVQECYELSAEYETDRDEARIAELGSKLTSLSPADSIVVSSSFSHMLNLANLAEEVQIAFRRRSKLKRGDFGDEASAPTESDIEETLKRLVSELGKSREEVFDALKNQTVDLVFTAHPTQSVRRSLLQKHREXSRNCPEAGCMPKDITADDKQELDEALQREIQAAFRTDEIRRTPPTPQDEMRAGMSYFHETIWKGVPKFLRRIDTALKNIGINERLPYNAPLIQFSSWMGGDRDGNPRVTPEVTRDVCLLARMMAANLYFSQIEDLMFELSMWRCSDELRVRADELHRSSKKSAKHYIEFWKQVPSNEPYRVILGDVRDKLYYTRERSRHILTTGVSDIPEESTFTNVEMFLEPLELCYRSLCACGDKPIADGSLLDFLRQVSTFGLALVKLDIRQESDRHTDVLDTITTHLGIGSYAEWSEEKRQEWLLS

SEQ ID NO: 33537 - protein, 228 aa, Zea mays
MDSEHWISRLAAAKRFYAAQLGHSDRAGMDELEMDEEVRPEFPCPYCYEDHDVGSLCAHLEEEHPFEPQAAACPVCSEMVTKDMVNHITTQHGYLFKNRRRLRRFIIPGSQALSLLSRDLREAHLQVLLGGGGQRSSDNSSSSATNISADPLLSSFGLGFPTSDAEQASKSTVSIPDDATTVKEAPAQARKLSIDSSLTSEERELKRKQARVRATFVQDLLLSTLFGD

SEQ ID NO: 33538 - protein, 588 aa, Legionella pneumophila str. Lens
MKNNLPIKSRLLYKRLLSYVKPFWPVLLLGVLANILYSGIDAGFTYMTKLFLDKSFITIDLDFVKQIPLIVLIGITLRGLVSSLGSYCMTWVARSVVKVLRQTVFSHIIHLPADYYDEATSGQLLSKILYDVEQVAQVSADALTDFIQNICLVIGLLTVMMVICWQLSLMFLLTIPFVGIIVNYTNKRVRRISHKVQKTMGEVTEIASEAIEGYRVVRIFGGERYEITKFNKATEYSRKNDMKVAISKAINVSGVQLVIAIGIAMIIMAAIHLSTVITISAGSFLAIIAAMLQLIKPMKTLTTLNATIQRGLAGAESVFNLLDLPLERNNGLILKDKIRGEIEFKHVYHAYRQGQNILHDVNFVIEAGTSVALVGHSGSGKTTIASLLPRFYELSQGMITLDGMPIQQLSLESLRKQMSLVSQNVTLFNDTLANNIAYGRFDASREQIITAAKLAYADEFIKQLPDGYDTRVGENGVLLSGGQRQRIAIARAILKDAPILILDEATSALDSESEHYIQAALEQVMNGRTTLIIAHRLSTIKHAHKIIVMQHGRIVEQGSHQELLDMDGHYAQLYKVQQFGRVNEEVVV

SEQ ID NO: 33539 - protein, 286 aa, Agrobacterium tumefaciens str. C58
MSFKAAAIQMRSGVDPVRNAADMERLVRAAAAEGAVYVQTPEMTGAIQKDRQALRAQLRDDDGDIIVATAARLARELGIHVHIGSTAIARPDGKIANRGFLFAPDGSRICSYDKIHMFDVDLDNGESWRESAAYQPGEVARIAELPLAKFGFAICYDVRFPQLFRAEALAGAEVLTVPAAFTRQTGEAHWEILLRARAIENGAFVIAAAQAGVHEDGRETFGHSIIIDPWGKVLALAGGAGEEIIFAEIDTSLVAAARGKIPNLRNAREFGLDTVIPLKPAGGEAA

SEQ ID NO: 33540 - protein, 220 aa, Pyrococcus abyssi GE5
MMGLNEVLLTKLKDMLRPVNGFHMHSSLTCLSILQAVLEVKRSDDVVILSKGHSAPAFYVMLWKLGLLRDEDLEKFADIDGLPSHVTRGLPFIEVSSGSLGQGLSVANGIAMAKRIDGKSGRVFVILGDGELDEGQIWEAAMTASHYGLDNVIAIVDRNYGQLSGNTERIMSKEPLADKWKAFGWKVREVKNEVESLKEVINELDGVKGKPKVIIAKWSY

SEQ ID NO: 33541 - protein, 356 aa, Burkholderia mallei ATCC 23344
MPFIADSSRAALRGVLYVALSAVAFGAMAIFGRYAYAGGADVLGLLIVRFSIAGALLVAVARRRRVRWPRGRALAAIVGMGALGYVGQSLCYFSALQHAQASLVALLLYLYPAFVTLLAAWWLGERLTRAKAVALALCVAGSALMVGGGRGEPLGIALALGAAVVYSLYIVVGAKAARGVDPLATVAVICCAAAAMLAMLALARAAAFDAPPHWPRAAAGWAALVAIALVSTVAAMLAFFAGLARLGAARTSMLSTLEPVVTVALAAELFGETLTPLQWAGGVAILAAVLWLVRAGDAADSRGAGDDRERRRLGRRDDEPSAPGGSGAGGGLAGFVDPNECGIRRVRSADENARPM

SEQ ID NO: 33542 - protein, 223 aa, Glycine max
MAALLARQAAMALRARQTARLGPSATAMQGHLRTYMDAGAPKRFKEDEEKEQLAKELAKDWSAVFERSINTLFLTEMVRGLMLTLKYFFERKVTINYPFEKGPLSPRFRGEHALRRYDTGEERCIACKLCEAICPAQAITIEAEEREDGSRRTTRYDIDMTKCIYCGFCQEACPVDAIVEGPNFEFSTETHEELLYDKEKLLENGDRWETEIAENLKSEALYR

SEQ ID NO: 33543 - protein, 371 aa, Yersinia pestis biovar Medievalis str. 91001
MSVQDTMLQQQALPGTPRQDGFFMPAEWAPQDAVWMLWPYRQDNWRGKAIPAQQTFAKVAEAISRATPVFMGVPAEFMAQAKATMPANVTLVEMASDDAWMRDTGPTMVINGAAERRAVDWQFNAWGGLNGGLYADWQQDEKVAVQVSDFLKNAHYSAPLILEGGSIHTDGEGTLLTTAECLLNPNRNPHLNQAQIEQLLCDYLGVTHFIWLQDGVYNDETDGHIDNMCCFVRPGEVALHWTDDQQDPQYARSVAAFEVLSNTVDAKGRKLKIWKLPAPGPLYNTEEETFDVLTSDAVPRTAGERLAGSYVNFLISNQQIIFPLLDSRTDGQANDLLQQMFPGYAIVGVPAREILLGGGNIHCITQQIPAA

SEQ ID NO: 33544 - protein, 84 aa, Oryza sativa
  misc_feature (8)..(8): Xaa can be any naturally occurring amino acid
  misc_feature (50)..(50): Xaa can be any naturally occurring amino acid
  unsure (1)..(84): unsure at all Xaa locations
MSCFGGKXGFGNGCQCGGGCGGCKMFPYVEAPAPPKTFVLAAPSNKASFXGMEMPVENGQNGGFGCNTCKCGPSCSGCSCCSCN

SEQ ID NO: 33545 - protein, 329 aa, Corynebacterium glutamicum
MKLLVTGGAGYVGSVRAAVLLEHGHDVTIIDNFSTGNREAVPADARLIEGDVNDVVEEVLLEGGFEGVVHFAARSLVGESVEKPNEYWHDNVVTALTLLDAMRAHGVNNLVFSSTAATYGEPDVVPITEDMPTQPTNAYGATKLSIDYAITSYAAAFGLAATSLRYFNVAGAYGNIGENREVETHLIPLVLQVATGHREKIFMFGDDWPTPDGTAVRDYIHILDLAKAHVLALESNEAGKHRIFNLGSGDGYSVKQVVEMCREVTGHPIPAEVAPRRAGDPATLIASSEKAKQELGWTPEHTDLRTIVEDAWAFTSALGDRSHAAKKKA

SEQ ID NO: 33546 - protein, 81 aa, Gaertnera vaginans
TPQDEMRAGMSYFHETIWKGVPKFLRRVDTALKNIGINERLPYNAPLIQFSSWMGGDRDGNPKVTPEVTRDVCLLARMMAA

SEQ ID NO: 33547 - protein, 392 aa, Arabidopsis thaliana
MAFAGVLPIVFLLILSSADLAASQSQPGPTNQPYNYGRLSPAMAVIVVILIAALFFMGFFSIYFRHCSGVPDAGVSPAGGARSRATVNAAARGLDVSVVETFPTFLYSDVKTQKLGKGELECAICLNEFEDDETLRLLPKCDHVFHPHCIDAWLEAHVTCPVCRANLAEQVAEGESVEPGGTEPDLELQQVVVNPEPVVTAPVPEQLVTSEVDSRRLPGVPVDLKRVKFSRSHTTGHSVVQPGECTERFTLRLPEDVRKRIMKDWKLNRTNSLLVLPRGGSSRRGKPIDRSRARSDRWLFRKTPSFLWRSRDDGSIRLGATGSVRASAVPNSTGSDSVRAGDRWAFLRNASFLWRNSSVHVPRGGVNKDGEGTSVKSTGASGSTSGSVRLPV

SEQ ID NO: 33548 - protein, 366 aa, Oryza sativa (japonica cultivar-group)
MASKAGGGGVARRGGGRMRSLGRQGSMYSLTLDEVQSQLGEPLHSMNLDELLRSVFPDGLAIADGAGATTSSQQHQPGSGLLRQGSITMPPELSKKTVDEVWKGIQAAPKRNAETGGGGGGGRRRRERQPTLGEVTLEDFLVKAGVVTQGSLKELSDVGNVDPVGRGVTATGTVDLAPGSHWIEQYKQQIASTDAHHHGQQGVQGAYFPNRLVPQPLNVGPGAILEPSYSDGQTSSGMIGGMSDSQTPGRKRGMSGDVADKLMERRQKRMIKNRESAARSRARKQAYTNELENKVSRLEEENVRLKRQKESDYLHYTRSNLVMENIEIHRSLINSNIIIWYDELYYFIGSVSSYNQEVFVMVIVCV

SEQ ID NO: 33549 - protein, 450 aa, Oryza sativa
MGKDKQHLSLVVIGHVDAGKSTATGHLIYKCGGIDKRTIEKFEKEASEMGKASFKYAWVLDKLKAERERGITIDIALWKFESPKSVFTIIDAPGHRDFIKNMITGTSQADAAVLMIASPQGEFEAGISKDGQTREHALLAFTLGVKQMIVCTNKMDDKTVNYSEARYEEIKKEVGSYLKKVGYNVDKVRFVPISGWAGDNMIEKSDNMPWYKGPTLLEALDLLEPPSRPVDKPLRLPLQDVYKIGGIGTVPVGRVETGVMKPGDVVTFAPSGVTTEVKSIEMHHEALPEAVPGDNVGFNVKNISVKDIRRGFVCSNTKNDPAKECETFQAQVIVLNHPGQITNGYAPVLDCHTCHIACKFGTLESKIDRRSGKEIEKEPKAIKSGDAAIVTMVPSKPMCVETFTDYPPLGRFAVRDMRQTVAVGIIKSVAKKEATSAKVTKAAVKAGAKK

SEQ ID NO: 33550 - protein, 449 aa, Haemophilus influenzae R2866
MSKVASLDAFLTKVAQRDGYQPEFLQAVREVFTSIWPFLEANPKYRSEALLERLVEPERAFQFRVAWTDDKGQVQVNRAFRVQFNSAIGPFKGGMRFHPSVNLSILKFLGFEQIFKNALTTLPMGGAKGGSDFDPKGKSDAEVMRFCQALMTELYRHVGADTDVPAGDIGVGGREVGYLAGYMKKLSNQSACVFTGRGLSFGGSLIRPEATGYGLIYFAQAMLAEKGDSFAGKVVSVSGSGNVAQYAIEKALSLGAKVVTCSDSSGYVYDPNGFTTEKLAALFDIKNTKRGRVKDYAEQFGLQYFEGKRPWEVQVDIALPCATQNELELSDAQRLIKNGVKLVAEGANMPTTIEATEALLAADVLFGPGKAANAGGVATSGLEMAQSSQRLYWTAEEVDAQLHRIMLDIHANCKKYGTIEGQENINYVVGANVAGFVKVADAMLAQGVY

SEQ ID NO: 33551 - protein, 170 aa, Glycine max
MGLGTLPLTPSYSGFSSNSGLIHDTTNHRRVNRSMKFRVSAKQEKQEEKKKQSLFSSVTEALDFSQVRSAEDAQLIEEAREATKSGERMSREQYGALRRKIGGTYKDFFKSYVEVDGAYVEEGWVDKTCKVCKKDTKGEARQVDKFGRYVHVACLEKANTGNFFTRLFSR

SEQ ID NO: 33552 - protein, 224 aa, Streptococcus pneumoniae
MPKTLTEKLNAIKATGKGIFVPYIMAGDHEKGLDGLAETIHFLEDLGVSAIEVGIPFSDPVADGPVIEEAGLRSLAHGTSTQALVETLKTIETEIPLVIMTYFNPLFQYGVENFVKDLADTAVKGLIIPDLPHEHANFVEPFLADTDIALIPLVSLTTGIERQKELIEGAEGFIYAVAINGVTGKSGNYRADLDKHLAQLHQVADIPVLTGFGVSSQADLERFN

SEQ ID NO: 33553 - protein, 425 aa, Saccharophagus degradans 2-40
MLDPNSRYVSRLTRDTVALVLAGGRGSRLHELTDWRAKPALHFGGKFRIIDFPLSNCVNSGIRRIGILTQYKAHSLIRHVIRGWSSFKKEFGEYVEILPASQRYSPNWYQGTADAIYQNLDILQAEAPKYILVLSGDHVYQMDYGAIIAHHVETGADLTVSCIEVPIEEAAGSFGVMTVDDDNRIIRFDEKPQRPTELANKPGYTLASMGNYVFNTEFLFDQLRKDAADPDSEHDFGKNIIPNIIAEKLVSAYRFRDHDTNETAYWRDVGTLDSFWEANMELVSPNPSLNLYNHDWPIWTYQTQLPPAKFVFDDDSRRGYAVDSMVSGGCIVSGGKVKSSLLFSDVHIHSYAEIEESVLLPEVEVHRSAKIKKAIIDSACVIPEGMIIGHDHEHDKARGFRVTKKGVTLVTREMLGQQPAGTSAK

SEQ ID NO: 33554 - protein, 134 aa, Burkholderia fungorum LB400
MEDFVHDPFAARGALERWFGDFSSSRFQPRIDVVDEGKILRVTIELPGMEREDLSVSVEDGALVLRGEKKQDVHSEEDGCYRLERAYGVFTRTIPMPDNADPDHALAKFDKGVLTLTVPKREQLRSASRTIDIG

SEQ ID NO: 33555 - protein, 723 aa, Thermotoga sp. KOL6
MWLLFLVPLIALGFAAANFSAVVKKPEGTDRMKEISSYIRSGADSFLAHETKAIFKVAIVIAILLMIFTTWQTGVAFLIGAVMSASAGIVGMKMATRANVRVAEAARTTKKIGPALKVAYQGGSVMGLSVGGFALLGLVLVYLIFGKWMGQLDNLNIYTNWLGINFVPFAMTVSGYALGCSIIAMFDRVGGGVYTKAADMAADLVGKTELNLPEDDPRNPATIADNVGDNVGDVAGLGADLLESFVGAIVSSIILASYMFPIYVQKLGERFVHQIPKETIQSLISYPIYFALVGLGCSMLGILYVIVKKPSDNPQRELNISLWTSAILTVVLTAFLTYFYLKDAQGLEVVGFRYGPISPWFSAIIGIFAGILVGFWAEYYTSYHYKPTQFLSRSSIEGTGMVISNGLSLGMKSVLPPTLTLVLGILFADYFAGLYGVAISALGMLSFVATSVSVDSYGPIADNAGGISEMCELEPEVRKITDHLDAVGNTTAAIGKGFAIGSAILAALSLFASYMFSQISPSDIGKPPSIVLLLNMVDARVIAGALLGAAITYYFSGYLISAVTKAAMKMVDEIRRQAREIPGLLEGKAKPDYNKCIEITSDNALKQMGYPAFIAILTPLITGFLLGPEFVGGVLIGTVISGAMLAILTANSGGAWDNAKKFLEAGHLEGYGKGSDPHKALVIGDTVGDPLKDTVGPSLDILIKIMSVVSVIAVSIFKHIHLF

SEQ ID NO: 33556 - protein, 224 aa, Streptococcus pneumoniae
MPKTLTEKLNAIKAAGKGIFVPYIMAGDHEKGLDGLAETIHFLEDLGVSAIEVGIPFSDPVADGPVIEEAGLRSLAHGTSTQALVETLKTIETEIPLVIMTYFNPLFQYGVENFVKDLADTAVKGLIIPDLPHEHANFVEPFLADTDITLIPLVSLTTGIERQKELIEGAEGFVYAVAINGVTGKSGNYRADLDKHLAQLHQVADIPVLTGFGVSSQADLERFN

SEQ ID NO: 33557 - protein, 576 aa, Debaryomyces hansenii CBS767
MSYRGESNNEFSPLANSGFLYDATRNEDLDESEVITYIQKRRASIASCGTDKIPSSLILTQGGTKHHLERGNEEMMTMSRSNASFVGDVLSHASGLLAEPETDIKTEITVLFEYSIPLIITFLLQYSLTVASVFSVGRLGLKELAAVSLSSMTANISGYAIIQGVSTCLDTLCAQAYGRKEFNAVGVHFFKCNYLLFLLCIPMFLLWVFGSKPILLIIIGNEKEELCTFASQYLRVLSLGLPAFILFENGKHFLQAQGISHASTYVLAICAPLNAYLNYLLVWNKSIGMGFVGAPISVSITNWLMCILLYSYIWLVKGKECWPNTGLLSPVLFRNWSRMINLSIPGVLMVEAEWLAFEIITFTASKFGTDVLAAQSIVSTTCVLLYQIPFAISIAISTRVAWYIGAAAKKPAKCATTVAIYVSLLLGFINGSFLFWFRDVLASLYTTDSHVIKLTSKVLIIASIYQINDFLSCSTGGILRGQGRQKIGGILNLISYYCIALPCAFTFAFYFKLELVGLWLGMIIALFFVSTLQYYFVLASDWDYIISECISESVFDDGFNTDVHSMVPSMSSSRFA

SEQ ID NO: 33558 - protein, 224 aa, Streptococcus pneumoniae
MPKTLTEKLNAIKAAGKGIFVPYIMAGDHEKGLDGLAETIHFLEDLGVSAIEVGIPFSDPVADGPVIEEAGLRSLAHGTSTQALVETLKTIETEIPLVIMTYFNPLFQYGVENFVKDLADTAVKGLIIPDLPHEHANFVEPFLANTDIALIPLVSLTTGIERQKELIAGAEGFVYAVAINGVTGKSGNYRADLDKHLAQLHQVADIPVLTGFGVSSQADLERFN

SEQ ID NO: 33559 - protein, 253 aa, Zea mays
MDASLAGVVLRRGHMISIGHRKIRSIHYLHRPHPPVRGYSSHHYKERIVTHREFVMDQDDYLSLCLAAALVAASQQAAGDAPPLRARAAASELRPLHFRCPICGKAFASYQALGGHKASHRKPAAAAAAYDGKAPSSPSSSGQHQKGAVAAGIGGASAGGRHVCTVCHRYFATGQALGGHKRFHYLHGPSVPASSLPPSTAGAAAGVGWLDLNLTPLAPDVSFAGVRRRRGEDDEVQSPLPLPAKKHRASTSA

SEQ ID NO: 33560 - protein, 248 aa, Pyrococcus abyssi GE5
MFRDGSLIPYLTAGDPSAKATLRFLLAIEEYSGAIELGIPFSDPIADGKTIQQSHFRALKGGFKLEHAFNIVREFRKHSDVPIVLMTYYNPVFRVGLREFIGKAKDSGVDGMLIVDLPVMHASEFLEVAREEGIKTVFLAAPNTPDERLKEIDKASTGFVYLISLYGTTGARDKIPETAFNLLKRAKRICKNKVAVGFGVSKREHVEMLLNAGANGVVVGSALINIIAEHGENAEEKLREKVRELAGL

SEQ ID NO: 33561 - protein, 452 aa, Triticum aestivum
  misc_feature (300)..(300): Xaa can be any naturally occurring amino acid
  misc_feature (362)..(362): Xaa can be any naturally occurring amino acid
  misc_feature (437)..(437): Xaa can be any naturally occurring amino acid
  unsure (1)..(452): unsure at all Xaa locations
MNALAATSRNFRQAARLLGLDSKLEKSLLIPFREIKVECTIPKDDGTLASFVGFRVQHDNARGPMKGGIRYHPEVDPDEVNALAQLMTWKTAVAAVPYGGAKGGIGCSPGDLSRSELERLTRVFTQKIHDLIGTHTDIPAPDMGTNSQTMAWIFDEYSKFHGHSPAVVTGKPIDLGGSLGRDAATGRGVMYATEALLAEYGKSISGSTFVIQGFGNVGSWAAQLIHEKGGKVIALGDVSGTIRNKAGIDVPALMKHRNEGGQLKDFHGAEVMDASELLVHECDVLLPCALGGVLNRENAXPDVKAKFIIEAANHPTDPEADEVRVLYHQTTYDKFSSLRNIKSTTIVQFCFLNVSLLLYVLXILTKKGVVVLPDIYANAGGVIVSYFEWVQNIQGFMWEEEKVNMELHKYMNSAFQNIKAMCKSQDCNLRMGAFTLXVNRVARATILRGWEA

SEQ ID NO: 33562 - protein, 597 aa, Ustilago maydis 521
MAASLESFAAQLEHAATQPNSSRLAFYESLISDLLQQASNKLNRNDLLEATSAYLRHAVFSEQNSTGGGLVIGRQALTALEHHAGRIAEQYETQRRDKEIMQDDQDESVPAIADRDTRRQLLENALEQLQPRVLSFEEQASNLRMQLASLLEAEEDWNEAARVLLAIPLDSGHRNISDHLKLSIYVRIVRLLLEGDDPVAADMYLKRASMIIHNVPGALPSQYQQQQQQQLQEEQHVAASTTAGHGDDAHEASAASGSKFKLEDPKVLGLQYRLSQARIYDSQRRFAEAAIRYHELSYVAEIDEDDRAMMLSAAVTAAILSPAGPQRARTLAMLMRDERTPSLPQYTILSKVFLDRVIRPDEIASFEKLLSPHQIAKLAPSSAPGATSTSSTTMAAGKGSKSVRHAPSTVLDRAMIEHNVLSASRLYDNITLAGLGALVDLSPAGAEDIARKMIMQGRLKGWIDQVGDANTQGGDGVLFFVDQYRRGEGETTAGGLEATKVDSSGGDGSGGGRGAAEGDVDGGACAGDVDTKWTRRWDQQIAQVTGALEDVCQRNQSDLYSLGVGNDRRRCCLSPSSLACNAMQCTASPLFVLRLRL

SEQ ID NO: 33563 - protein, 324 aa, Arabidopsis thaliana
MQIFVKTLTGKTITLEVESSDTIDNVKAKIQDKEGIPPDQQRLIFAGKQLEDGRTLADYNIQKESTLHLVLRLRGGMQIFVKTLTGKTITLEVESSDTIDNVKAKIQDKEGIPPDQQRLIFAGKQLEDGRTLADNIQKESTLHLVLRLRGGMQIFVKTLTGKTITLEVESSDTIDNVKAKIQDKEWIPPDQQRLIFAGKQLEDGRTLADYNIQKESTLHLVLRLRGGMQIFVKTLTGKTITLEVESSGTIDNVKAKIQDKEGIPPDQQRLIFAGKQLEGGPGGGGGSRASRHFQKAEALAFLADYNIQKESTLHLVLRLRGGSF

SEQ ID NO: 33564 - protein, 447 aa, Desulfotalea psychrophila LSv54
MELSLVQTELKEKLLETGKKEGCISFDALNKLIPDDVKDPTAIEKIFNFLGAHGIEIVTIEKSGEKRTLSGEIWEKSEVDLELEIEDGAALSGDEESHESEETTTTYLREMGRFDLLTPEEEAKYSKTIRQGFEAIIFAIRGDRSGVQEMVVLCERIDLWEKRDPTLKPKKQQLNFMRYSVTSASKKYPEIRELFELQAKLEAYSRSIEVAKDTMIRANLRLVVSIAKRYMHQGLTLADLIQEGNLGLMRAVFRFDYTKGNKFSTYASWWIRQAITRAILDKTRTIRLPVHFLELRSQFFKAFYALFKELGREPTPLEISKTTNLPMDKILSILEASREPISLETPVGDDDSTLGDFLENQESQSPYEAVQNRELSGRVTEILSTLSDREEKIIRLRFGIGEKAEYTLEEIGKRFNVSRERIRQIEKKALNRLRHSSRRDKLKFFVD

SEQ ID NO: 33565 - protein, 1177 aa, Methylococcus capsulatus
MSEDLTSPPAMRQRFLRSLGSICLIVILAEVIVMTLLGAFHRGGLELVRWQESALDGLLLGLFSAPLLWIMALRPLAQQIARESQRNKELLDALDAHALVSITDLQGRILYANDNFCAVSRYGREELVGQDHRIVNSGYHGKAYIRDMWRTISRGNIWQGEFCNRRKDGTRYWVDSTIVPLMDNAGKPRQYISIRRDITAQKEAEAQLARLKQAMDANSEMILLTDRAGRIIYANPALCRFSGMAEGELLGQSPSILDSPLADQETLAAMQEALQAGQPWSGRLLNRRRTGPAPHDAEDYWAEISTTPIHTDGNGLVGYVQIQHDVSARVERERALAMEQEDTAARLRITETLQQSAPLDERCRQVLRILFELGTFGLQRKGGIFLKAEHGNCLKLFVLEGKFCDEFVRREQTIPMGACLCGRSAVSGEILVSDDCFQDHRHEHRFEDMESHGHYIVPIASGGDLLGVLFLYTDPNPTRSEARMVMLRQVGEMLALAILEDRAKASLKAAHDAAVDAAQAKSAFLANMSHEIRTPMNGVLGMLELLKDTDMSREQWDLVETASNSAESLLEIINSILDFSKLEAGKVEIERTEFNLPDLVEEVCALLAGRAHDKGLELNCFLPADLPRMWIGDPTRIRQILTNLLGNSVKFTERGEVSVKVMQGEAGAKRTDLSFEIRDTGIGIAPDVQARLFQPFTQADGSTSRRFGGTGLGLSICRNLVELMGGTIGLESAPGRGSRFWFTLPLEPLPGASAPALPDFSHRRVLVVDDNATNRVILSHYLTHWGLEVDEAERGDTALNRLRTALHESRPYDIVLLDLHMPYMDGHELARAMNAEPGLKDTPRLLLSSGGLTGEAELRALGIARSLLKPVRQSLLFNAIAEVLAAKATVQRRPAAKTETVLPAYEGRRVLVVEDNRVNQKVIVAMLGKFGIVPDVADNGQAALELLARSSYDLVLMDCQMPVLGGYEATGELRAREMSAGGRRTPVVALTAHAATGEREKCLAAGMDDYLSKPISRDRLAEALERWLGHPAAPASAETGQGAVNDDGGDRPAGLSWNREETLARLDHDEALLAEMIALCIEELPRHLAALQEAGAANDIAALADAAHAIKGMAGHFCAGSVRDLAARLEDQARKAGSMPDAASIGALETAAARLLEDLHGGSPAGDPAKGTNDAAQ

SEQ ID NO: 33566 - protein, 555 aa, Glycine max
MEGIISGVWNVLLQYFRSYKVAKTAVLNYITPFTDKFDLVDILLVWTVIVVIGTVIYRNVNYARKHGFRKTVTAWFFRRLKRISFITNKIDGEISKLASSLEADIQKHRDASKTTHIPTTGLSEEALVKKLAQWQKIDHKIYGEKKITGCIYYNEGEKLQTIVKDVAKEYFYINPLHFDLFPTANQMEGEVIYMVKNLYNGDDKSCGILSSGGTESIMIAMLAYREQGRINGIFEPEIVAPITAHVAFENAAFYYGMRMKWVPVDIKTGVVSPHDIKKAISKDTVCVIGSYPNYPYGTCDPIEQLAAIAKKKKVGFHTDCCLGGFVAPFAEKFGAMSEVFDFRVPGVTSISVDPHKYGLAPKGVSVVLFRDRKLRGGSFFSCTTWPGGIYSTPTHAGSRGHAPVAGAWVALQYTGYNGYMDKAGKIIEATRRVAKKISEIPELQVVGNPQLGSVAFVTKTNKLSIYDLVDKIGQRGWKLAALQLPPAVHLSITNYNIGQIEDFIASVKWGVTELLKAGPPKVQGELAQIYGSNAKLPESIMQDGAKVILEGLLKP

SEQ ID NO: 33567 - protein, 170 aa, Campylobacter jejuni
MINSPYIIWLTGLAGSGKTTIGQALYEKLKLKYKNLIYLDGDELREILGHYAYDRQGRIDMALKRAKFAKFLNNQGMIVIVTTISMFNEIYDYNRKQLKNYYEIYIECDMHELMQRDQKGLYTKALNKEIDNVVGVDIEFDKPEADLVINNSCRNNLEEKVEFIIKKLAL

SEQ ID NO: 33568 - protein, 193 aa, Trichodesmium erythraeum IMS101
MENNNQTGVTVWFTGLSCAGKTTLSFAIAEELQSLNYTVEILDSTIVRQNIGKSLGFNKADRDENIRRISFLAHLLTRNRVIVLVSAISPYNQIRCEAKKRIGNFIEVYVNAPLEICEARDKKGLYQLARAKKIKEFTGIDLPYEAPLNPDVECRTDLETVAESKEKVILKMVNLGYLKPRNFSHSSAYFFDI

SEQ ID NO: 33569 - protein, 596 aa, Listeria monocytogenes EGD-e
MKIWNSIVGKIWSTIILLLIGILVISGFLVAMIYEKNNITRITNELEDKTASIITVMQENNEVISAENNNDSALILLDDTMGVIIEQNGKSVYQSQSPDTISSASANKLIQDKTLDKALEKDNSVTMKYNFKTEKSSLPVEISAQKFKLANGETGVVYVYQSYHDILKVNEKTMSTLIISGIIAIVITSILSFVFSSRMAFPLREMKKIAIAVSKGNFDNRVPTYTHDEIGELGVAFNDMAKQLKYNVSALRQEKEQLSNILVGMADGVIKFSVDKTIILSNPPAEEFLHNWFFSPENTEKVLIPVALNELLNDTLEKKESQVGEITFADHTYVAILTLLYTGEHVRSIVAVIRDMTEEKQLEKMKSDFVNNVSHELRTPISMLQGYSEAIIDGVAQSDEEVREFAQIIYDESLRIGRLVNDMLDLARMEAGFNQMDNQKLPLAPLLRKVISNFDVLAKENFVELGLELETPDLEYSYDPDRMEQVLINLIMNAIRHTGKEGYDGKVILKQTIDVARSNLVITVSDNGSGIAEEDIPYLFERFYKVDKARKRGKAVGTGIGLAIVKNIVEAHNGKISVESELGKGSDFIITLPLYK

SEQ ID NO: 33570 - protein, 219 aa, Arabidopsis thaliana
  misc_feature (178)..(178): Xaa can be any naturally occurring amino acid
  misc_feature (186)..(186): Xaa can be any naturally occurring amino acid
  misc_feature (192)..(192): Xaa can be any naturally occurring amino acid
  unsure (1)..(219): unsure at all Xaa locations
MLREAATGRGVVFATEALLAEYGKSIQGLTFVIQGFGNVGTWAAKLIHEKGGKVVAVSDITGAIRNPEGIDINALIKHKDATGSLNDFNGGDAMNSDELLIHECDVLIPCALGGVLNKENAGDVKAKFIVEAANHPTDPDADEILSKKGVIILPDIYANAGGVTVSYFEWVQNIQGFXMWGEGKVXLELQKXMTRAFHNIQGNGAQHPLEPPGASTLGG

SEQ ID NO: 33571 - protein, 492 aa, Chlamydomonas reinhardtii
MDPAKIRPSSAYNTPYWTTNSGAPVWNNNNSMTVGTRGPILLEDYHLVEKLAQFDRERIPERVVHARGAAAKGFFEVTHDISALTAADFLPAPGVQTPVIVRFSTVVHERGSPETLRDPRGFAVKFYTREGNFDMVGNNMPVFFIRDGMKFPDMVHAFKPNPKSHIQEAWRIMDFLSHHPESCHMLTFLLDDAGIPLNYRHMPGFGVHTMKLINKAGRETYVKFHWVPKCGEKYLLDDEAVMVGRSNHSHATKDLFDAIAAGDYPEWALMVQTMDPADEDKFDFDPLDVTKTWPESLFPMQPVGRMVLNRNVDNFFNENEQVAFCPAIIVPGIGYSDDKLLQTRIFSYADTQRHRLVPNYLLLPVNAPRAPHHNNHHEGFMNFMHRDEEINYFPSRFDPVRNAEGWLPCRVPLSGRREKMVIAKENNFMQAGARWRAFDAARQERFVVRVADMLADPRCTQEIRRIWVGYWSQADPQLGAGIAAKLQGRGCL

SEQ ID NO: 33572 - protein, 528 aa, Cryphonectria parasitica
MMHDQASNGGDQAAPIKTQETPVPMSSSNSVPIMNAPAPLLRPAIPGSRGGARTPRLGLAIPPSPNVKPVTNPAGGAPQPQKASRPAPPTLSIATPMGSIGPPQEQQPGRSVAQPGHSASSGSEISAAHSRTDSFGGRGSNPTSAGSQYSNLSFVSQYGLGGKPHGTPDPQSAAGSMYSNASEGGLDMSRQDSMHGLERAMDEVTLERVRNLDVEDLDDEGWRIASQENRIVELGGLGEGAGGAVTRCQLKGGKTIFALKVITTNPDPDVKKQILREINFNKGCASDHICRYYGGFLEPSTATISIAMEFCEGGSLDSIYKEVKRLGGRTGEKVLGKIAEGVLQGLTYLEAKRILHRDIKPSNILLCRNGEVKLCDFGVSGDFGTKGEANTFIGTSYYMAPERITGQTYTITSDVWSTGVTLLEVAQHRFPFPADGTEMQPRAGLIDLLTYIVQQPIPKLKDEPEAGIFWSDNFKHFIESCLEKNPKRRGMPWKMLEHPWMIELKTKRVNMGKYLSQVWGWDDPKHSK

SEQ ID NO: 33573 - protein, 270 aa, Glycine max
  misc_feature (102)..(102): Xaa can be any naturally occurring amino acid
  misc_feature (248)..(248): Xaa can be any naturally occurring amino acid
  misc_feature (259)..(259): Xaa can be any naturally occurring amino acid
  misc_feature (263)..(263): Xaa can be any naturally occurring amino acid
  unsure (1)..(270): unsure at all Xaa locations
VLAATQTPGEAGKKWFQGTADAVRQFIWVFEDAKNKNVEHILILSGDHLYRMDYMDFVQRHVDTNADITVSCVPMDDSRASDYGLMKIDKTGRIIQFAEKPXLQLLRWKCSSCNDFGSEIIPSAVNEHNVQAYLFNDYWEDIGTIKSFFDANLALTEQQPPKFEFYDPKTPFFTSPRFLPPTKVEKCKIVDAIISHGCFLRECSVQHSIVGVRSRLESGVELQDTMMMGADYYQTEYEIASLVAEGKXPIGVGQILNQXLHNXKNAKIGM

SEQ ID NO: 33574 - protein, 405 aa, Saccharophagus degradans 2-40
MKRVVVTGMGIASCIGTDLDTVLAALREGKSGIRFNESYKEQGFRSHVSGSVDMDLSEHIDRKMYRFMGDAAGYAYVSMKQAIEDSGLTEEQVSNERTGIIMGSGGASTKSVVECADTIRDRGVKRAGPYRVTQTMGSTASACLATPFKIKGINYSISSACATSAHCIGNAMELIQLGKQDVVFAGGGEEEHWTLTGMFDAMGALSSKYNDTPEKASRAYDADRDGFVIAGGGGCMVIESLDHALARGAKIYGELVGYGATSDGYDMVAPSGEGAARCMRQAMAQAGVSTIDYINSHGTSTPVGDLAELKAVKEVFGENVPAISSTKSLTGHSLGATGVQEAIYTMLMMNNNFIAGSANVETIDPAAEGMPIVTASKDANIESAMSNSFGFGGTNATLVFKKYSA

SEQ ID NO: 33575 - protein, 224 aa, Streptococcus pneumoniae
MPKTLTEKLNAIKVTGKGIFVPYIMAGDHEKGLDGLAETIHFLEDLGVSAIEVGIPFSDPVADGPVIEEAGLRSLAHGTSTQALVETLKTIETEIPLVIMTYFNPLFQYGVENFVKDLADTAVKGLIIPDLPHEHANFVEPFLADTDIALIPLVSLTTGIERQKELIEGAEGFVYAVAINGVTGKSGNYRADLDKHLAQLHQVADIPVLTGFGVSSQADLERFN

SEQ ID NO: 33576 - protein, 540 aa, Burkholderia fungorum LB400
MSAKDVKFHDSARSRIVKGVNVLADAVKVTLGPKGRNVLIERSFGAPTITKDGVSVAKEIELKDRFENMGAQVVKQVASKTADVAGDGTTTATVLAQSIVQEGMKHVAAGMNPMDLKRGIDKAVAAVLDELHRLSKPIKTSREIAQVGAISANADEAIGKIIADAMDKVGKEGVITVEDGKSLENELEVVEGMQFDRGYLSPYFINDPDKQVAHLDDPLILLHDKKISSIRDLLPVLEAAAKAGKPLLIIAEDVEGEALTTLVVNSMRGVLKVAAVKAPGFGDRRKALLEDIAILTGATVISEETGKQLEKATLEELGRAKRVEVQKENTIIIDGAGDQTRIDARVKAIRAQIEEATSDYDREKLQERVAKLAGGVAVIKVGAATEVEMKEKKDRVDDALHATRAAVEEGIVPGGGVALLRARSAISSLTGANADQDAGIRIVLRALEAPLRVIAANAGDEPSVVVAKVLSGKGNYGYNAATGEYGDLVETGVVDPTKVTRTALQNAASIAGLILTTDATVAEAPKEEKAVPAPAPELEY

SEQ ID NO: 33577 - protein, 483 aa, Methylobacterium extorquens
MMEAPLKRSRRTKIVATLGPASDTPEMIEKLFHAGADVFRINMSHLAREKLPERIEVIRTIEREGKRPIGILVDLQGPKLRLGTFVGDAAVLENGQTFVLDSDPTPGDTDRVFLPHPEILSALEPSHGILIDDGKLRLIVTEVSEGRAVTRVEVGGRISNRKGVSLPHTALPVPAMTEKDRGDLEAGLAAGADWIAVSFVQRPEDVAEVKKVAAGRALVMAKIEKPQALTRLDEIIEISDGIMVARGDLGVEMPLEQVPGVQKRITRVARRLGKPVVVATQMLESMITSPVPTRAEVSDVATAVYEGADAVMLSAESAAGDFPVEAIGTMNRIAEQVERDALYWSILMAQRSEPEPTASDAIAAAAHQIVEALSLRSIMAWTHSGSTVLRLARARPNASVIALTPKRETARRLTMAWGVHPIVTKDASDVDDMAFRAAKFAVRERFAEIGDRVIIVAGVPFGIPGATNMVRIAFVTREHAERA

SEQ ID NO: 33578 - protein, 424 aa, Comamonas testosteroni
MNKEMSETLTRVGPNTRMGNLLRRYWVPALMSSEIAEADGPQVRVQLLGEKLLAFRNTDGKACLISEFCSHRGVSLYFGRNEENGIRCAYHGVKFDGDGQCVDVPSSPQSCARMHIKGYPCVERGGIVWTYMGPEEHKPSPPELEWCTLPPEHVFVSKRLQYSNWLQAMEGGIDTAHVSYVHRFEVDTDPMHQGVKALDYIKADGNVKFEIEQTPFGLSLFGRRNGEPDSYYWRITQWLFPWFTLIAPFGNHALGGHVWVPIDDHNCWAWSINWQPDQPLTEEERTSMEEGKGIHVEYEAPGSFIPKANRNNDYGMDRVAQREERSYSGIFGFSAQDYSLQESMGSIQDHAAERLLPTDKAIVMARRMLNEAALGLEQGETPPALDASEQHVRPAGVLLPREQDPVAWAREELADATKKPVFSL

SEQ ID NO: 33579 - protein, 224 aa, Streptococcus pneumoniae
MPKTLTKKLNAIKAAGKGIFVPYIMAGDHEKGLDGLAETIHFLEDLGVSAIEVGIPFSDPVADGPVIEEAGLRSLAHGTSTQALVETLKTIETEIPLVIMTYFNPLFQYGVENFVKDLADTAVKGLIIPDLPHEHANFVEPFLADTDIALIPLVSLTTGIERQKELIEGAEGFVYAVAINGVTGKSGNYRADLDKHLAQLHQVADIPVLTGFGVSSQVDLERFN

SEQ ID NO: 33580 - protein, 371 aa, Malus x domestica
MGKGGMSDGDHADRCYGEAINGDVQQENMAAWLLGVKNLKIQPYKLPNLGPHDVRVRLKAVGICGSDVHHFKNMRCVDFIVKEPMVIGHECAGIIEEVGSEVEDLVPGDRVALEPGISCKRCNLCKQGRYNLCRKMKFFGSPPNNGCLANQVVHPGDLCFKLPDNVSLEEGAMCEPLSVGIHACRRANVCQETNALVVGAGPIGLVTLLAARAFGAPRIVIADVNDERLLIAKSLGADEVVKVSTNIEDVAEEVAKIQKVLENGVDVTFDCAGFNKTITTALSATRPGGKVCLVGMGQREMTLPLATREIDVIGIFRYQNTWPLCLEFLRSGKIDVKPLITHRFGFSQKEVEEAFETSARGGNAIKVMFNL

SEQ ID NO: 33581 - protein, 401 aa, Cytophaga hutchinsonii
MELKQRIHQLAAAISTEVIGYRRHIHANPELSFEEYNTCRYVSGLLTSFGVKHETGIAGTGVVALIEGKNPTSKVIALRADMDALPIEEKNDVPYKSTNIGVMHACGHDVHTSSLLGTAKILSQVTDQFEGTIKLIFQPGEEKFPGGASLMINEGVLENPAPANIIGQHVMALIPAGKVGFREGMYMASADEIYITVKGKGGHAAMPDKNVDPILIASHIIVALQQVISRNCDPRIPAVLSFGKITGMGATNVIPDEVKIEGTFRTLNEEWRAEAKQRIKKMAEGIAESMGATCEIDIKDGYPFLKNAPALAKRMREAAIDFLGSENVLDLDLWMAAEDFAYYSQKIDACFYRLGIRNDERGITSGVHTPTFDIDETALQTGTGLMAWLALEELKVNNANL

SEQ ID NO: 33582 - protein, 372 aa, Thermotoga sp. KOL6
MKEMSILIVEDDDITREAMAQYLKLSGFEVLETNSGEKAIDFSNMIDVALIDVKLPGMSGIEVVSEIKSRNPSCVVFVITAYDDKETIKKCVEAGADDFIKKPVNLELLKLKITHAIRNKIFHLYRSSYMKSLKERLEIIEKTAEEFFTEYEDFMFEILDILNMLSEYRDVETYRHTERVGWLSGRIAEVMGLDELLVTEIQFSAPLHDIGKIGIPDKVLLKPGILTPEEFEIMKQHTIIGFRILSRSSSPILQMGAEISLTHHERWNGSGYPRGLKRKEIPISGLIVAVADSFDAMVTERPYKRAKTLDEAFQEIELLSGKLYSPEVVEAFLSLEKEIREVYRREKDENSSHQSGGSHKSSSGEGLEGLRE

SEQ ID NO: 33583 - protein, 224 aa, Streptococcus pneumoniae
MPKTLTEKLNAIKATGKGIFVPYIMAGDHEKGLDGLGETIHFLEDLGVSAIEVGIPFSDPVADGPVIEEAGLRSLAHGTSTQALVETLKTIKTEIPLVIMTYFNPLFQYGVENFVKDLADTAVKGLIIPDLPHEHANFVEPFLADTDIALIPLVSLTTGIERQKELIEGAEGFVYAVAINGVTGKSGNYRADLDKHLAQLHQVADIPVLTGFGVSSQADLERFN

SEQ ID NO: 33584 - protein, 619 aa, Exophiala dermatitidis
MFNATQHRGNPNMGPAPPGQPNHRLNEIMDSLRAEFENQSRASEQVENQVAQQIQEMELIRNKVYQLEQNQLKMKQEYEAEIRMLRHELELRGGPQVQSHLTGPPQHGGPAQAPPSLGHGQGGLFSGIMANQGQGGPGLAPPPEQPPQQQQHPLQPPPAAGQPQGPPQPPNSFPGYQQGPTLNGYAPQPQPPTNSPGLGKNRTMAARGGPGPATPQQHPNQPQPMPYQNDRGRHPRIPRPVPPGGDMQHGHRHQMPGLPNVGNVLADLNPDDLPEHLKRTGPNGEWHAVFNPNVPRTLDIQLLHNLVHESVVCCVRFSNDGKYVATGCNRSAQIFDARDGRKVCELLDESVQDKDGDLYIRSVCFSPDGKLLATGAEDKRIRVWDIENKRIRTTFDGHEQDIYSLDFSRTGRLIASGSGDKTVRLWDIESNQQVMVLSIEDGVTTVAMSPDGRFVAAGSLDKSVRVWDCSTGYLIERLEGPQGHKDSVYSVAFSPSGRELVSGSLDKTIKMWELTPQRNLIPSTAKDGKCIRTFEGHKDYVLSVCLTPGGEWVMSGSKDRGVQFWDPTTGNAQMMLQGHKNSVISVAPCPTGQLFATGSGDMKARIWQYTTWRGAHQGI

SEQ ID NO: 33585 - protein, 232 aa, Zea mays
MGSKAPFCLTLLLLLAAACGPAAHANDAVLKEHISSTKIPARLKRGSGLCSACENFTSEAVTYLGKEQTQDRIVEFLHDACSQSFSFEQKCVELMDSYATLLFAKITEIRPEAFCKRYGLCRDTALLSGVGSDSTCVFCHHLLDEIMSKLKDPDAEFEIIQILVKECNKIEGHVQQCKRLVLQYIPLILVNGEKFLEKNDVCALAQACPASSRKTFSSMLKGALWSDAWLEG

SEQ ID NO: 33586 - protein, 224 aa, Streptococcus pneumoniae
MPKTLTEKLNAIKAAGKGIFVPYIMAGDHEKGLDGLGETIHFLEDLGVSAIEVGIPFSDPVADGPVIEEAGLRSLAHGTSTQALVETLKTIETEIPLVIMTYFNSLFQYGVENFVKDLADTAVKGLIIPDLPHEHANFVEPFLADTDIALIPLVSLTTGIERQKELIEGAEGFVYAVAINGVTGKSGNYRADLDKHLAQLHQVADIPVLTGFGVSSQADLERFN

SEQ ID NO: 33587 - protein, 97 aa, Brassica napus
  misc_feature (11)..(11): Xaa can be any naturally occurring amino acid
  misc_feature (70)..(70): Xaa can be any naturally occurring amino acid
  misc_feature (82)..(82): Xaa can be any naturally occurring amino acid
  unsure (1)..(97): unsure at all Xaa locations
MESFPGSEESXVDHMKRKGMLSNTESARRSRMKKQKLLDDLTAHVNRLKKQNNQILTSVNMTTQHYLTVXAENSVLKAQLDXLKHRLESFNGIIVFL

SEQ ID NO: 33588 - protein, 257 aa, Arabidopsis thaliana
  misc_feature (172)..(172): Xaa can be any naturally occurring amino acid
  misc_feature (181)..(181): Xaa can be any naturally occurring amino acid
  misc_feature (241)..(241): Xaa can be any naturally occurring amino acid
  unsure (1)..(257): unsure at all Xaa locations
MAVSLLSKLRCITVDVTGTLIAYKGELGDYYCMAAKAIGLPCPDYKRVHEGFKLAYTDMAQKYPCFGFHAKMPNIVWWKTCVRDSFVKAGYEYDEETFEKIFRRIYSTFGSAAPYSVFQDSQPFLRWARRKGLIVGLVSNAEYRYQEVILPSFGLSKAEWDFGVFSGICKGXEKPDPRIFXVALERAGNNIAPEEVLHIGDSMRKDYVPAKSIGMHALLVDRFKTEAAKDWIEAGAIVLPXYLVAVQQLLESDKLKC

SEQ ID NO: 33589 - protein, 81 aa, Gaertnera fractiflexa
TPQDEMRAGMSYFHETIWKGVPKFLRRVDTALKNIGINERLPFNAPLIQFSSWMGGDRDGNPRVTPEVTRDVCLLARMMAA

SEQ ID NO: 33590 - protein, 309 aa, Glycine max
  misc_feature (42)..(42): Xaa can be any naturally occurring amino acid
  misc_feature (61)..(61): Xaa can be any naturally occurring amino acid
  unsure (1)..(309): unsure at all Xaa locations
LWRKILLFCFYCLIHCLFFCNIIQDLLKLEKIQEDLAERFGXQPTFAQWAAVAGVDQKTLXRNRLNYGIFCKDKMIKSNIRLVISIAKNYQGSGMNLQDLVQEGCRGLVKGAEKFDGTKGFKFSTYAHWWIKQAVRKSLSDQSRTIRLPFHMVEATYRVKEARKQLYSENGRQPDDGEVAEANWLSMKRLNAVLMTPKASRSLEQKIGINQNLKPSEVISDPDAETAEEQLLKQFMKKDLEEALDSLNARERQVVRWRFGMDDGRTKTLQEIGEMLGVSRERIRQIESRAFKKLKNKKRTNHLQQYLVS

SEQ ID NO: 33591 - protein, 368 aa, Geobacillus stearothermophilus
GVKTFQFPFAEQLEKVAEQFPTFQILNEEGEVVNEEAMPELSDEQLKELMRRMVYTRILDQRSISLNRQGRLGFYAPTAGQEASQIASHFALEKEDFILPGYRDVPQIIWHGLPLYQAFLFSRGHFHGNQIPEGVNVLPPQIIIGAQYIQAAGVALGLKMRGKKAVAITYTGDGGTSQGDFYEGINFAGAFKAPAIFVVQNNRFAISTPVEKQTVAKTLAQKAVAAGIPGIQVDGMDPLAVYAAVKAARERAINGEGPTLIETLCFRYGPHTMSGDDPTRYRSKELENEWAKKDPLVRFRKFLEAKGLWSEEEENNVIEQAKEEIKEAIKKADETPKQKVTDLISIMFEELPFNLKEQYEIYKEKESK

SEQ ID NO: 33592 - protein, 327 aa, Brucella suis 1330
MGLLVDGKWHDVWYDTGSTQGRFERSKAQFRNWVTQDGSAGPTGEGGFKAEPGRYHLYVSYACRWAHRTLIFRALKKLEKIISVSVVDFLMAEEGWTFYGTTGSTGDALYGAKRLYEIYTRADPAYSGRVTVPVLWDKQRETIVSNESAEIIRMLNHAFNEFGDATLDFYPAALRNQIDTLNDFIYPNINNGVYRAGFATTQEAYEEAFQQVFAALDALEQKLSQQRYLAGSSLTEADWRLFTTLVRFDPVYVGHFKCNHRRLADYPNLWNYTRDLYQTPGVAETVNMEHIKGHYYRSHKTINPTGIVPAGPEIEYTAAHDRGRFTG

SEQ ID NO: 33593 - protein, 456 aa, Glycine max
LKFEIGKEVGRGHFGHTCYAKGKKGELKDQPVAIKIISKAKMTTAIAIEDVRREVKILKALSGHKHLVKFHDAFEDANNVYIVMELCEGGELLDRILSRGGKYSEEDAKVIVLQILSVVAFCHLQGVVHRDLKPENFLYTSRSEDADMKLIDFGLSDFIRPDERLNDIVGSAYYVAPEVLHRSYSLEADIWSIGVITYILLCGSRPFYARTESGIFRAVLRADPNFDDLPWPTASAEAKDFVKRLLNKDYRKRMTAVQALTHPWLRDDSRPIPLDILVFKLVKAYLHATPFKRAAVKALSKALPEDQLPYLSAQFRLLEPNRDGHISLDNFKMALVRNATDAMRESRVLEIINAMEPLAYRKMDFEEFCAATISTHQLEAHDRWEDIASTAFEHFEREGNRLISVEELARELNLGPSAYSVLKDWIRNTDGKLSLLGYTKFLHGVTLRSSNPRQHR

SEQ ID NO: 33594 - protein, 601 aa, Vibrio fischeri ES114
MKTITTDIAVIGAGGAGLRTAIAAAEANPELEIALISKVYPMRSHTVAAEGGSAAVTKEEDTLDNHFNDTVGGGDWLCEQDVVEYFVENAYREMTQLEQWGCPWSRKENGEVNVRRFGGMKVERTWFAADKTGFHMLHTLFQTSMKYPQINRFDEYFVVDLLVEEGQVQGLIAIHMAEGELICIKAKSVVLATGGAGRVYHCNTNGGIVTGDGMAMAFRHGVPLRDMEFVQYHPTGLPGTGILMTEGCRGEGGIIVNKNGYRYLQDYGMGPETPVGEPKNKYMELGPRDKVSQAFWHELQKGNTIKHPLGDVVHLDLRHLGEEYLHERLPFICELAKAYVNVDPAKEPIPIRPTVHYTMGGIETDKNNETSIKGLFAVGECSSVGLHGANRLGSNSLAELVVFGRLAGEKAAERAAEFTSWNEESIQKQITEVQARIDALMAQEGDENWATIRTEMGHSMEAGCGIYRKEHEMQDTIDKLAELKERYKKISIKDKGKVFNTDLLYAIEVGYGLEVAEAMAHSAILRKESRGAHQRLDEGCTERDDENFLKHSLAFYNKDAAPTIKYSDVTITKSQPKARLYGEAAEKAAAEEAAKNAEEHA

SEQ ID NO: 33595 - protein, 456 aa, Haemophilus influenzae 86-028NP
MTKHYDYIAIGGGSGGIASLNRAASYGKKCAIIEAKHLGGTCVNVGCVPKKVMFYGAHIAEAINNYAPDYGFDVEVKKFDFSKLIESRQAYISRIHTSYNNVLAKNNIDVINGFGKFVDAHTIEVTLADGTKEQVTADHILIATGGRPYRPNIKGQEYGIDSDGFFALTELPKRAVVIGAGYIAVELSGVLNSLGVETHLLVRRHAPMRNQDPLIVETLVEVLAQDGIQLHTNSTPSEIVKNADGSLTVKCDGQSDVTVDCVIWAAGRVPTTDKIGLENAGVETNEHGYVKVDKYQNTNVKGIYAVGDIIENGIELTPVAVAAGRRLSERLFNNKPTEYLDYSLVPTVVFSHPPIGTVGLTEPQAIEQYGAENVKVYKSSFTAMYTAVTQHRQPCKMKLVCVGKDEKVMGLHGIGFGVDEMIQGFAVAIKMGATKADFDNTVAIHPTGSEEFVTMR

SEQ ID NO: 33596 - protein, 636 aa, Debaryomyces hansenii CBS767
MAPVITRLQSYTSIEEYDEQIPLGEYLFLRVCQINPRLKSVFGIPGDFNLNLLEHLYADSLVNGKGVKFVGLCNELNASYTADGYSKIIQGLSVLITTFGVGELSALNGIAGAFAEYAPVLHIVGTTSTKRAAYARTCGVQGIQNFHHLVQNKNPLIAPDHDVYKPLVEPFSVIQESLTMDGFDNEENLKKIDRVLIKICQENRPGYLFVPCDIPDITVSRARLAEEISIQELAEDDAESKQLMENIADRILNKLYQSQKPSVIGDALVSRFHQDEVFTKFISKLPSNFVKLFTANMARNIDETLPNFVGTYFGKVSPTKELQNNLEQESDLLIDFGYYNAETNTAGYTRDYSNIKDYIEIHPDYVLMDNEYVAVKDFATDKRRFSMGDLIQSLNDKIDSTRFIHNNKLVNNITYKFTPYKWHTDDTTVNQCVVPQSKLIDFFNNYLQPNDILMVETCTFLFAVPDLKFPPGVTFLSQSFYGSIGYAIPATLGVSLAEKDLGSNRRIILVQGDGSAQMTIQELSTFLRHDLVNPKIFLINNEGYTVERIIKGPTRSYNDIQGCWKWTELLKIFGDEHGARHVTATIKNAAELDNFRSLLNNNKIEFIELIMGKLDAPERFSYISGHKQPIPSVPLH

SEQ ID NO: 33597 - protein, 472 aa, Mycobacterium intracellulare
MSRRGKIVCTLGPATNSDELILALVEAGMDVARLNFSHGDYADHKAAYERVRVASDATGRAVGVLADLQGPKIRLGRFATGPTYWADGETVRITVADCEGSHDRVSTTYKKLAEDAAVGDRVLVDDGKVCLVVDGIEGDDVICTVVEGGPVSNNKGISLPGMNVSAPALSEKDIEDLTFALDLGVDLVALSFVRSPADVELVHEVMDRVGRRVPVIAKLEKPEAVDNLETIVLAFDAIMVARGDLGVELPLEEVPLVQKRAIQMARENAKPVIVATQMLDSMIENSRPTRAEASDVANAVLDGADAVMLSGETSVGKYPMAAVRTMSRIICAVEDNSTAAPPLTHVPRTKRGVISYAARDIGERLDAKALVAFTQSGDTVKRLARLHTPLPLLAFTAWPEVRSQLAMTWGTETFIVPMMTSTGGMIRQVDKSLLELGRYKRGDLVVIVAGAPPGTVGSTNLIHVHRIGEDDV

SEQ ID NO: 33598 - protein, 170 aa, Glycine max
  misc_feature (3)..(4): Xaa can be any naturally occurring amino acid
  misc_feature (16)..(17): Xaa can be any naturally occurring amino acid
  misc_feature (27)..(27): Xaa can be any naturally occurring amino acid
  misc_feature (36)..(37): Xaa can be any naturally occurring amino acid
  misc_feature (41)..(42): Xaa can be any naturally occurring amino acid
  misc_feature (48)..(49): Xaa can be any naturally occurring amino acid
  misc_feature (77)..(77): Xaa can be any naturally occurring amino acid
  unsure (1)..(170): unsure at all Xaa locations
RSXXVFHYGSISLIVXXCRSAHLKAMXVAKESGCLXXYDPXXRLPLWXXAEEARKQILSIWEKADLIKVSDAELEFXLGEHGSRYYTKSFKGSVDAFHVNTVDTTGAGDSFVGALLAKIVDDQSILEDDPRLREVLKFANACGAITTTQKVAIPALPKEEVALNLIKGGS

SEQ ID NO: 33599 - protein, 373 aa, Saccharophagus degradans 2-40
MSKRQLVKQSRRWVIKIGSALLTNNGRGLDREEMAVWVKQMAALSKRGYEVVLVSSGAVAAGMTRLGWAERPKALHELQAAAAVGQSSLIQAYEQEFQKYSIKTAQILLDHDDLSNRQRYLNARSTLRTLTKLGVIPIVNENDTVVTDEIRFGDNDTLGALVANLIEADTLCILTDQKAMFDSDPRQNALAKMLIERSAFDPGLDAMAGDGGALGRGGMISKVRAARLAARSGANTIVVGGKVFDVIPRVASGEILGTLLYSESQPIAARKRWLAGNMQPRGRLTLDDGAVKVLREQGKSLLPVGVRAVEGYFTRGELVLCEDTAGREIARGLVNYSSDETNKIKGASSSRIDSLLGYKDYDELIHRDNLVLV

SEQ ID NO: 33600 - protein, 380 aa, Zymomonas mobilis
MNLEEKLISLRRELHQHPELSGEEFQTTQKLTAWLKEAGIRILPYDLKTGVVAEIGHGSPVIALRADIDALPIEENSEAVCPSLEKGKMHACGHDFHATVLLGAALLLKQNESRLVGTVRLFFQPAEENYSGALQLIKAGVLNDVDVVFGFHNAPKMPVGEFGTCHGAIMANVDRFEINLAGVGAHAAYPENGTDVIVAASEIINSLQTIVSRNISSHDSAIVSVTRINAGSGWNILPEKAELEGTVRTFDASIRKEIQRRMRDLVYYLAKAMDVGAQFLWHEGPPAVINTPYWSDFSAKIARQFGYVTHNVTPQNGGEDFAHYLHHRPGVFFHIGTGSPQSLHHPGFNIDEKAIFPAAEYYALLAEEALKDLKNTQASA

SEQ ID NO: 33601 - protein, 361 aa, Pyrococcus abyssi GE5
MQAVLLAGGMGTRLLPLTIYRPKPMIPFFNKPLMEYMVNNLVEVGVDEIIVLVGYLKEKIIEHFGDGKEFGVEIKYSNGENVKFGTAGALKRAEKFIEGTFIVASSDVLTNLDFKSLLEFHAKKGGIATMALTKVEDPSPYGVAVLDDEGKILYFKEKPRREEAPSNLVNAGIYVFEPEILDLIPKGKPFDFSLNLFPKMLEEGIPIYGFPFDEYWNDVGRPSTYLQATEDVFLGKLKLPQISVGRLKGNVERGGSLFTGSRCILRNPKVSGFAVLGDNVEIGRDVKIERSVIFSNVTIEDGAEIREAIIGENVYIGKGVTIEPGSVIGDNSIIEEHSRIGANVKIWADSRVGRESIILPD

SEQ ID NO: 33602 - protein, 180 aa, Glycine max
NHHLNACVRSHRFSLWSKNLARTLQFKVRVDIQRTKLKLTFELQRSPTEEDFVERVRISPERYHDVMKASKPILSLHSRHTTTQEEFINGIVDDDGVNGDNRKPPALLRLALDDVLDSLKPKESLVIRQRFGLDGKGHRTLGEIAGNLNISREMVRKHEVKALMKLKHSARLDYLRRYVV

SEQ ID NO: 33603 - protein, 144 aa, Triticum aestivum
  misc_feature (100)..(100): Xaa can be any naturally occurring amino acid
  unsure (1)..(144): unsure at all Xaa locations
AVTRLYEALDKCEEILGKQRYMCGNQLTEADVRLFVTLIRFDEVYAVHFKCNKKLLREYPNLFNYTKDMYQIPGISSTVNMEHIRKHYYGSHPSINPYGXIIPRGPNIDYNAPHDKRKAVPVKKNTVCLCVLEGAVIYFACVRR

SEQ ID NO: 33604 - protein, 251 aa, Zymomonas mobilis
MRFQDKIVVITGGGNGMGKAAAERFSSEGAIVVLADWQIKDAEEVAASLPKDRAWPYKIDVSDPDAVKKMMDDIAAKYGKIDVLVNNAGILIPGKIMDASIEDWKKISSVNIDGVIYCAKFAMPYLVKSKGCIVNTASVSGLGGDWGMVYYCTTKGAVVNFTRALALDSGVNGVRVNSVCPCIVKTKMAANWPESAQAQFKNRVSLGRIPEAEEIASVMAFLASDDARFITGVNLPVDGGATASDGQPHLG

SEQ ID NO: 33605 - protein, 344 aa, Methanopyrus kandleri
EQQDIHPTVIARGYRMAVEKAEEILEEIAEEIDPDDEETLKKIAKTAMTGKGVEKARDYLAELVVKAVKQVAEEEDGEIVIDTDHIKLEKKEGGGLEDTELVKGMVIDKERVHPGMPRRVENAKIALLNCPIEVKETETDAEIRITDPEQLQAFIEEEERMLSEMVDKIAETGANVVFCQKGIDDLAQHYLAKKGILAVRRVKKSDMQKLARATGARIVTNIDDLSEEDLGEAEVVEEKKVAGDKMIFVEGCKDPKAVTILIRGGTEHVVDEAERAIEDAIGVVAAALEDGKVVAGGGAPEVEVARQLRDFADGVEGREQLAVEAFADALEIIPRTLAENSGLD

SEQ ID NO: 33606 - protein, 356 aa, Glycine max
MGLPSTQTSTGSKRQPETSMAKPKPHTEAAAAPEPPKAVKREGNLKGTTSSSEQEAPKTPDPKTLRRLAQNREAARKSRLRKKAYVQQLESSRIKLNQIEQELQRARAQGILMGGGNALLGGEQGFHMAMSGISSEAAIFDVEYARWLEEHHRIVCELRAVLQEHLHENELRLYVDNCLAHYDQVMNLKSMVAKTDVFHLVFGVWKTPAERCFMWIGGFRPSELIKIILGQIEPLTEQQILGICGLQQSTQEAEEALSQGLDALNQSLSETITSDSLWCPPNMTNYMGQMAVAINKLSTLESFVRQADNLRHQTIHRLHQLLTTRQAARCLVAISEYFHRLRALSSLWSTRPRQDQ

SEQ ID NO: 33607 - protein, 143 aa, Ehrlichia ruminantium str. Welgevonden
MLERTLSILKPDVVKRNIAGQVNSYIENSGLKIIIQKMCLLTRYQAEKFYEIHKSQVFFVPLINFMISGPVVVQVLEGENAISLYREIMGATDPKKANSGTIRGDFAENIDANCVHGSDSLENAIREIRFFFSEYELLSLYEC

SEQ ID NO: 33608 - protein, 298 aa, Glycine max
MEFDEHEDQEQEEEEEEEEMGFSVAAAASYDSLGNAAVRSKISGGDGVAATVNSGRKGTVRYRECQKNHAVSIGGHAVDGCCEFLAAGEEGTLEAVICAACNCHRNFHRKEIDGETSPYQHRSQPQPQPLHPQYHHQFSPYYHRAPPPSAAGYLHHHLVTPPVSQHRPLALPPLASGGVFSREEEDMSNPSSSGGGGGGGFSGGGGSGSGTKKRFRTKFTQEQKDKMLAFAEKLGWRIQKHDEAAVEQFCAETCIKRHVLKVWMHNNKHTLANSEQHSAGNGSNHLNSTTIIENSQFS

SEQ ID NO: 33609 - protein, 81 aa, Gaertnera longifolia
TPQDEMRAGMSYFHETIWKGVPKFLRRVDTALKNIGINERLPYNAPLVQFSSWMGGDRDGNPRVTPEVTRDVCLLARMMAA

SEQ ID NO: 33610 - protein, 578 aa, Lolium perenne
MAMAISSLLRPWPLAMATMMVLIIQAQGITRHYDFNVQMANVTRLCGTKSIVTVNGQFPGPELIAREGDRVHVRVTNHVAHNMSIHWHGIRQLTTGWADGPAYVTQCPIQTGQTYVYKFTVTGQRGTLWWHAHISWFRATVYGAIVILPKLGVPYPFPAPHEEVPVIFGEWWAADTEDIMSKALKVGGAPNISDAYTINGLPGPLYNCSAKDTFKLKVTPGKTYLLRLINAALNDELFFSVANHTLTVVEVDAVYVKPFTVKTLVISPAMTTNVLLTTSPVYPNANFYMAAAPYSVIRPGTYDNTTVAGILEYHKPGSPSTPGLDKTLPLFKPTLPFFNDTKFVTSFTTKLLSLASKQYPAAVAQSVDRRFFFTIGLGTLPSPKNMTCQGPNGTQFAAAVNNVSLVLPSMALLQSHFTGLSRGVYASNSPAMPLSPFNYTGTPPNNTHVATGTRLLSLPYTTSVELVMQDTSVLGIESHPLHLHGYNFFVVGQGFGNYDPTNDPAKFNLVGPVERNTVGVPAGGWVAIRFLADNPSVWFMHCHLEVHTTWGLRMAWPVQTGPKPNEKLLPPPSDMPKC

SEQ ID NO: 33611 - protein, 291 aa, Arabidopsis thaliana
MSPATYLETSNWLFQENRGTKWTAEENKKFENALAFYDKDTPDRWSRVAAMLPGKTVGDVIKQYRELEEDVSDIEAGLIPIPGYASDSFTLDWGGYDGASGNNGFNMNGYYFSAAGGKRGSAARTAEHERKKGVPWTEEEHRQFLMGLKKYGKGDWRNIARNFVTTRTPTQVASHAQKYFIRQVNGGKDKRRSSIHDITTVNIPDSPDAAAADNATANAPCSPPSVGGNQRETSEWEGQTLYDETAAAFYNQNAFSETLLGMSSTPYMAKLQEQSFLNASQFESYNAYLQM

SEQ ID NO: 33612 - protein, 324 aa, Magnetospirillum magnetotacticum MS-1
MPVVIYPGSGTGAWEATIVNTLSSGDRVLMFETGHFATLWRQMAARWGIEVEFVPGDWRHGVDPALVEAKLAEDRSHAFKAVMVVHNETSTGVTSRIPAIRKAIDAAGHPALLLVDTISSLGSVDYRHDEWGVDVTVSGSQKGLMLPPGLGFTAISDKARAAGRSNTLPRSYWDWEEMLKPNANGYFPYTPATNLLYGLREAVAILLEEGLDAVFARHQRLAAATRAAVEAWGLEVLCRNPDEYSPVLTAVMMPDGKGADAFRALVLEKFDMSLGAGLSKLSDTIFRIGHLGETNDLTLMGALSGVEMGLAAAGVPHRRGGVLA

SEQ ID NO: 33613 - protein, 81 aa, Gaertnera lowryi
TPQDEMRAGMSYFHETIWKGVPKFLRCVDTALKNIGINERLPYNAPLIQFSSWMGGDRDGNPRVTPEVTRDVCLLARMMAA

SEQ ID NO: 33614 - protein, 458 aa, Eremothecium gossypii
MGKEKTHVNVVVIGHVDSGKSTTTGHLIYKCGGIDKRTIEKFEKEAAELGKGSFKYAWVLDKLKAERERGITIDIALWKFETPKYHVTVIDAPGHRDFIKNMITGTSQADCAILIIAGGVGEFEAGISKDGQTREHALLAYTLGVKQLIVAINKMDSVKWDESRYQEIVKETSNFIKKVGYNPKTVPFVPISGWNGDNMIEATTNAPWYKGWEKETKAGAVKGKTLLEAIDAIEPPVRPTDKALRLPLQDVYKIGGIGTVPVGRVETGVIKPGMVVTFAPSGVTTEVKSVEMHHEQLEEGVPGDNVGFNVKNVSVKEIRRGNVCGDSKNDPPKAAESFNATVIVLNHPGQISAGYSPVLDCHTAHIACKFDELLEKNDRRTGKKLEDSPKFLKAGDAAMVKFVPSKPMCVEAFTDYPPLGRFAVRDMRQTVAVGVIKSVVKSDKAGKVTKAAQKAGKK

SEQ ID NO: 33615 - protein, 368 aa, Geobacillus stearothermophilus
GVKTFQFPFAEQLEKVAEQFPTFQILNEEGEVVNEEAMPELSDEQLKELMRRMVYTRILDQRSISLNRQGRLGFYAPTAGQEASQIASHFALEKEDFILPGYRDVPQIIWHGLPLYQAFLFSRGHFHGNQIPEGVNVLPPQIIIGAQYIQAAGVALGLKMRGKKAVAITYTGDGGTSQGNFYQGINFAGAFKAPAIFVVQNNRFAISTPVEKQTVAKTLAQKAVAAGIPGIQVDGMDPLAVYAAVKAARERAINGEGPTLIETLCFRYGPHTMSGDDPTRYRSKELENEWAKKDPLVRFRKFLEAKGLWSEEEENNVIEQAKEEIKEAIKKADETPKQKVTDLISIMFEELPFNLKEQYEIYKEKESK

SEQ ID NO: 33616 - protein, 81 aa, Gaertnera junghuhniana
TPQDEMRAGMSYFHETIWKGVPKFLRRVDTALKNIGINERLPYNAPLVQFSSWIGGDRDGNPRVTPEVTRDVCLLARMMAA

SEQ ID NO: 33617 - protein, 282 aa, Arabidopsis thaliana
MAYEEHFQQTSEAKYDCLLFDIDDTLYPLSSGLAMEVKKNIQEYMVQKLGIEEDKVQELCLSLYKIYGTTMAGLKAVGYDFDYDDFHRFVHGRLPYSTLKPDPILRNIILSLPIWKVVFTNADKAHAAKIIARLGLEGCFEKIISFETLNPITKTESPVDTKTREIFDIISYMANPDSSIELPKTSVVCKPSEGAFEQVFKMANINPKKTLFFDDSIRNIQTGKRVGLHTVWVGTSHREEGVDIALEHIHNIREALPQLWDAVDDKAKEIRTRQKVAIETIA

SEQ ID NO: 33618 - protein, 349 aa, Mesembryanthemum crystallinum
QNLNISEVSEKIIAEYIWIGGSGMDMRSKARTLNGPVDDPKKLPKWNYDGSSTGQAPGQDSEVILYPQAIFRDPFRRGNNILVMCDAYTPQGEPIPTNKRYHAEKIFSNPEVAAEEPWYGIEQEYTLLQKEVNWPLGWPIGGFPGPQGPYYCGVGADKAFGRDIVDAHYKACLYAGVTISGTNGEVMPGQWEFQVGPSVGISAGDEIWIARYILERITEIAGVVVSFDPKPIPGDWNGAGAHTNYSTKSMREDGGYEVIKKAIEKLGMRHKEHIAAYGEGNERRLTGKHETANIETFLWGVANRGASVRVGRDTEKEGKGYFEDRRPSSNMDPYVVTAMIADTTLLWKP

SEQ ID NO: 33619 - protein, 170 aa, Campylobacter jejuni
MINSPYIIWLTGLAGSGKTTIGQALYEKLKLKYKNLIYLDGDELREILGHYAYDRQGRIDMALKRAKFAKFLNDQGMIVIVTTISMFNEIYDYNRKQLKNYYEIYIECDMHELMQRDQKGLYTKALNKEIDNVVGVDIEFDKPEADLVINNSCRNNLEEKVELIIKKLAL

SEQ ID NO: 33620 - protein, 172 aa, Zea mays; identical to SEQ ID NO: 1195

SEQ ID NO: 33621 - protein, 462 aa, Mesembryanthemum crystallinum
MGEQELLLQQQIKEDRNVSRETEMKHPALQGKYELGRVLGQGTFARVYHARNLVTGNSLAIKVVAKDKVIKVGMMEQMKREISVMKRVKHPNIVQLHEVMASKSKIYLAMDLVRGGELFSKVSKGGKLDEDVARSYFKQLISAVDFCHSRGVYHRDLKPENLLLDEHGNLKITDFGLSASFENEDHHQTLLRTSCGTPHYVAPEVISRKGQQGYHGAKSDIWSCGIILFVLLAGFLPFHDDNIIRMYRKVFKGDFTCPSWLSSQARDLITRLLDINPATRITVSEIMQSDWYCMDTSSMTAVTTDEFDLDHNNNNNNNSNYNNIHHHKKEPEMLNAFHIISLSQGFDLSPLFEEKHREERQDMRFATTKSASTVVSRLEEVAAKAGKFIVKKFCGDSVVRLQGQERGRKGKLAIAAEIMSVSPSLLVVEVKKDNGDTLEYNQFCTKQLRPALKDIVWTCPSS

SEQ ID NO: 33622 - protein, 915 aa, Raphanus sativus var. sativus
MFWVLALLSCLIVVLSSGDGIVSEGRRPHDINVGAIFSLSTLYGQVADIALKAAEDDVNSDPTFLPGSKLRILMYDAKRNGFLSIMKALQFMETDSVAIIGPQTSIMAHVLSYLANELNVPMCSFTALDPSLSPLQFPFFVQTAPSDLFLMRAIAEMITYYGWSDVIALYNDDDNSRNGVTSLGDELEGRRCKISYKAVLPLDVVIKTPREIVRELVKIQKMESRVIIVNTFPKTGKMVFEEARRLGMTGRGYVWIATTWMTSLLDSADPLSLPKVAESLRGVLTLRIHTPVSRKKRDFAARWNKLSNGSVGLNVYGLYAYDTVWIIARAVKNLLDSRANIPFSGDSKLDHLKGGSLNLGALSMFDQGQQFLDYIVKTKMSGVTGPVQFLPDRSMVQPAYDIINVVGGGLRQIGYWSNHSGLSVIPPELLFSKPSNRSSSNQHLENVTWPGGGSVTPRGWVFPNNGRRLRIGVPNRASFKDFVSRVNGSSSSHIDGYSINVFEAAIKLLSYPVPHEFILFGDSLKNPNYNDLVNNVTTGVFDAVVGDIAIVTKRTRIVDFTQPYIESGLVVVAPVTKLNDTPWAFLRPFTPPMWAVTAAFFLIVGSVIWILEHRINDEFRGPPRRQIVTILWFSFSTMFFSHRENTVSTLGRIVLLIWLFVVLIITSSYTASLTSILTVQQLNSPIKGVDTLISSSGRVGFQIGSYAENYMIDELNIARSRLVPLGSPKEYATALQNGTVAAIVDERPYVDLFLSEFCGFAIRGQEFTRSGWGFAFPRDSPLAVDMSTAILGLSETGKLQKIHDKWLSKSNCSNLNGSESDDDPEQLKLRSFWGLFLLCGVACFIALLFIYFKIVRDFCNHHHNKPEEEEATVPSPEVSRSKTLQTFLAYFDEKEAESSRRLKRKRSDDLSLKSS

SEQ ID NO: 33623 - protein, 334 aa, Pseudomonas sp. M18
MALKKEGPEFDHDDEVLLLEPGIMLDESSADEQPSPRATPKATTSFSSKQHKHIDYTRALDATQLYLNEIGFSPLLTPEEEVHFARLAQKGDPAGRKRMIESNLRLVVKIARRYVNRGLSLLDLIEEGNLGLIRAVEKFDPERGFRFSTYATWWIRQTIERAIMNQTRTIRLPIHVVKELNVYLRAARELTHKLDHEPSPEEIANLLEKPVAEVKRMLGLNERVTSVDVSLGPDSDKTLLDTLTDDRPTDPCELLQDDDLSESIDQWLTELTDKQREVVIRRFGLRGHESSTLEEVGQEIGLTRERVRQIQVEALKRLREILEKNGLSSDALFQ

SEQ ID NO: 33624 - protein, 149 aa, Aegiceras corniculatum
MADQLTEDQISEFREAFSLFDKDGDGCITTKELGTVMRSLGQNPTEAELQDMINEVDADGNGTIDFPEFLNLMAKKMEDTDSEEELKEAFRVFDKDQNGFISAAELRHVMTNLGEKLTDEEVDEMIREADVDGDGQINYEEFVKVMMAK

SEQ ID NO: 33625 - protein, 183 aa, Aegiceras corniculatum
SKIEKAEYSCPPWFPVGAKSLIQQILDPNPGTRIRIEEIRNDEWFSRGYVPVKLIEYEDVNLDDVNSFFDDPETGEERTEQLYKNEDMGPLSLNAFDMIILSEGLNLSALFDRRQDPVKKQTRFVSQKPAKVVLSSMEVVAQSMGFKTHIRNFKMRIEGLSANKTSHFSAMLEVFQVAPTFYI

SEQ ID NO: 33626 - protein, 243 aa, Zea mays
MATNSALAKLAPLEAILFDIDGTLCDSDPIHFCAFRELLQQAGFNGGVPITEEFYSANISGGHNDDLARSLFPGMDHQKAMRFMDDKEAMFRKLAPGQLKPVDGLQELCGWMEGRDMKRAAVTNAPRANAELMLSLLGLTDFFPVLVIGSECDRAKPFPDPYLKALQLIDASPQHTFIFEDSASGVRAGVAAGVPVVGLTTRNPGKVLKDAGASLLVKDFQDPELLSVLQQVEVEPAAENAQG

SEQ ID NO: 33627 - protein, 176 aa, Petunia x hybrida
MVALSTKREREEDNFYSITTMANYLMLLSRQANEHFDKKMNNSSTSRVFECKTCNRQFSSFQALGGHRASHKKPRLMGELHNLQLFHELPKRKTHECSICGLEFAIGQALGGHMRRHRAVINDKNLQAPDDQHAPVVKKANGRRILSLDLNLTPLENDLEFDLRKSNTAPMVDCFL

SEQ ID NO: 33628 - protein, 499 aa, Trametes versicolor
GIGPVADLTITNAAVSPDGFSRQAVVVNGGTPGPLITGNMGDRFQLNVIDNLTNHTMLKSTSIHWHGFFQKGTNWADGPAFINQCPISSGHSFLYDFQVPDQAGTFWYHSHLSTQYCDGLRGPFVVYDPNDPAADLYDVDNDDTVITLVDWYHVAAKLGPAFPLGADATLINGKGRSPSTTTADLSVISVTPGKRYRFRLVSLSCDPNYTFSIDGHNMTIIETDSINTAPLVVDSIQIFAAQRYSFVLEANQAVDNYWIRANPNFGNVGFTGGINSAILRYDGAAAVEPTTTQTTSTAPLNEVNLHPLVATAVPGSPVAGGVDLAINMAFNFNGTNFFINGASFTPPTVPVLLQIISGAQNAQDLLPSGSVYSLPSNADIEISFPATAAAPGAPHPFHLHGHAFAVVRSAGSTVYNYDNPIFRDVVSTGTPAAGDNVTIRFRTDNPGPWFLHCHIDFHLEAGFAVVFAEDIPDVASANPVPQAWSDLCPTYDARDPSDQ

SEQ ID NO: 33629 - protein, 492 aa, Candida albicans SC5314
MNVNPHLQYLQQQQQQQQQQQQQQQQSQPSQSNQSQSNQSPQFSQLQLQQLQRQQLLNQHLQQQQSQSQSSQVPPQLTQQSMGTPTSTNPLLAVLNGGANSNATSTGNGSLSSNPVLQQLQLQQLQQQVQLQQLQAQQQQQQQQQQQQQAIPIIKEVWSSNLEHEFQALRTFINDKTSKVFIAIHQEIPGIVARPVGTFKSSSDYHFQTLRANSDLLNLIQLSLCVIKISKNETISTPVIWQFNFLYDLTKEMYNEEHLAMLAQTSQINFQLLSTHGIPHFEFAELMIESGLILDDNINWVSFHAGYDLGFFVSLLSNDDLPVDEPDFYWWCAKYFPNFYDLKYIGNQILNKSTTNGAGGTNSNTLDEKTNKPSIEYLAEELHLLPISPAIRQHFTNSTFHSQQLTSTLHAYLSMECFKELLRRSNMTLLSSFKGTIWGLGTFSGGTSINNTNNNGVTEDEIVASRINGISTPSTPVGIISKSGMVHFGGRV

SEQ ID NO: 33630 - protein, 534 aa, Streptococcus thermophilus LMG 18311
MTKYIFVTGGVVSSIGKGIVAASLGRLLKNRGLKVTIQKFDPYINIDPGTMSPYQHGEVYVTDDGAETDLDLGHYERFIDINLNKYSNVTTGKIYSEVLRKERKGEYLGATVQVIPHITDALKDKIKRAATTTDSDVVITEVGGTVGDIESLPFLEALRQMKADVGSDNVMYIHTTLLPYLKAAGEMKTKPTQHSVKELRGLGIQPNMLVIRTEEPAGQGIKNKLAQFCDVAPEAVIESLDVEHIYQVPLNMQAQGMDQIVCDHLKLNAPAADMTEWSAMVDKVLNLKKTTKIALVGKYVELHDAYLSVVEALKHSGLANDTAIDIDWVNANDLTAENVASRLADADGIIVPGGFGQRGTEGKIQAIRYARENDVPMLGVCLGMQLTCIEFARHVLHLDGANSAELDPETQYPIIDIMRDQIDIEDMGGTLRLGLYPCKLKPGSKAAAAYGNQEVVQRRHRHRYEFNTKFREQFEAEGFVFSGVSPDNRLMEVVELPDKKFFVAAQYHPEYHSRPNHAEELYSAFVTAAVENAK

SEQ ID NO: 33631 - protein, 282 aa, Triticum aestivum
  misc_feature (121)..(121): Xaa can be any naturally occurring amino acid
  unsure (1)..(282): unsure at all Xaa locations
LAWSRPRWGAQHMVPPYGTPPPPYMMYPPGTVYAHPTTPGVHPFHYPMQTNGNLEPAGAQGAAPGAAETNGKNEPGKTSGPSANGVTSNSESGSDSESEGSDANSQNDSHSKENDVNENGXVPVQSGAVIGGVAGPATNLNIGMDYWGATGSSPVPAMRGKAPSGSARGEQWDERELKKQKRKLSNRESARRSRLRKQAECEELGQRAEALKSENSSLRIELDRIKKEYEELLSKDTSLKAKLGETGGGDSVPDMNERGDTNGAPHKLTDDAALHLLHTRDD

SEQ ID NO: 33632 - protein, 358 aa, Thiomicrospira crunogena XCL-2
MTSKTALNIISGQLGAGKTTLLQQLLRQRPTHETWVLLVNEFGAVGIDGPILSSQNDHTLVKQLPGGCICCTAQGELEAAVLDIIQTQQPDRILIEPTGLGEPESLVDLFKQAKLQSLCEVHSLFSVLDMAHTQLEELQTLSILQSMLTMADVIVLNKVDLVSPEQIRLFKDYIDTLYPPKKAVIVTEQADVSSSYLNHPHFHTPAYVAAPSSSHTLARHSQPMTSISTQEPSYTPIELPGLLERRFQTHLKTESIGWVFNDDVCFEWSKLLALFENLSAGTFTHQSNIIATPIKRAKGIFRVGHTARMLFQLVHNTLTRELIAYRKDSRLELLLDISADFDYEAFEKALLDCIQRPS

SEQ ID NO: 33633 - protein, 334 aa, Schizosaccharomyces pombe
MTLSGKPAALLVGTLKHAHKEWEALGKYAELKTYSDGTREDFLAKCKTEFQNVKAICRTYNSKFYMGIFDKEIIDNLPPSVKFICHLGAGYETVDVAACTARGIQVSHVPKAVDDATADVGIFLMLGALRGFNQGIFELHKNNWNANCKPSHDPEGKTLGILGLGGIGKTMAKRARAFDMKIVYHNRTPLPEEEAEGAEFVSFDDLLAKSDVLSLNLPLNAHTRHIIGKPEFQKMKRGIVIVNTARGAVMDEAALVEALDEGIVYSAGLDVFEEEPKIHPGLLENEKVILLPHLGTNSLETQYKMECAVLMNVKNGIVNDSLPNLVPEQRGDIE

SEQ ID NO: 33634 - protein, 215 aa, Aspergillus oryzae
MSSTSPSKEPEVEPEVQSGEEQEQMDKEQQDQAQNQGEFEVKEQDRWLPIANVARIMKLALPDNAKIAKEAKECMQECVSEFISFITSEASEKCQQEKRKTVNGEDILFAMTSLGFENYAEALKIYLSKYRETQSARGEHQNRPTSSGYASGGPVGGVSSAPGGRPATAGGFPDAADNTNSIMNPSLDPTEQDPSAYGYPPMVGQPHNGTAGDSY

SEQ ID NO: 33635 - protein, 178 aa, Sorghum bicolor
MYASLSLSLSLSLSLSLSLSLSLYAVFDAFALNQLWFSCMHVCDARRGSGGGGERNQREEDEAAAAAAAEAGYGRQLVMPEDGYEWKKYGQKFIKNIQKIRSYFRCRHKLCGAKKKVEWHPRDPSGDLRIVYEGAHQHGAPAAAAPPGPGGQHHGGGASDFNRYELGAQYFGGAGRSH

SEQ ID NO: 33636 - protein, 1599 aa, Trichodesmium erythraeum IMS101
MSNSGNIEKLLRGLKMSKGRFSPFLARYSYVSQRDRLIENFRASFPGVLKVLALDESVTQIYTTVRKYLEGKELDVLMVCGWESLRNINELLVAMGYVREEFRKHCPLPIVFWVDGNVSRKFIRLIPDFYNWVSLTVFESANDELIDFIQQTSENVYQKVLESGVGIFLDYTDLGLPESSYQDLLEARQELANRGITLEAELEASLEFVLGRLTDDFEETARDHYQRSLELWQQLKNPLRVAHTYYYLGLWWQSYGVTHRTEKKIADKNAGDYFQQSVEGFEAIKRLDLVAKFINGWGEVLQVLESWEQLETVANRAIEVLDTSQPSFRLARAYDFLAECELAKGNYKQAKQLAETAIEIFNNTQSAASVLTSEKDQKTLDREKYYHRGRYLFSLAKAEKGSGKIKSAIDTLEKAKKRTKPEYNPDFYINIIEKLREIYYQEKEYLKAFKLKQERQRIEQLFGFIAFVGAKTLGSIKSNIHLALPYLKPNNNQQKITQEIAASGREFDVKILLERLSQPQHKLIVLYGESGVGKSSTLQAGLIPVLEKKSIDTRDVVVVLQRVYVNWICQLGKGLAKQLETTKNLAVNSEKLTSIEGIFAQLKKNEQLNLMTVIIFDQFEEFFFVNRELQDRREFAQFLQNCLEIPFVTIILSLRKDYIHYLLDFSRWANLEVINENILDKNILYYLGNLRPSQAKIVIEKLTANSQFKIDSALTEKLVENLAQELGEVRPIELQVVGAQLQEDQITTLAKYQELGNIPQVELVERSLKSVVKDCGEENEKFAWVVLWLLTDENNTRPLKTQAELVKESDFNPEKLELVLNIFVGSGLVFLLPEKPAARYQLVHDYLVWFIRQRKGNKIQEELKQEREKRQQLQTWLVRGSVAVSLVMAILVGAIYMSVREEHKEKIISQANESRALSISGQRWDGLMTAMNVRQKQIDAKIKPIGKASKITNALRVAVYSYDKDDEFREINRTQAHENWVNGIAFSPDEETIASGSYDNTMKLWNHQGNLLQTLKGHENWVNGMAFSPDGGTVKLWNHQGKLLQTLKGHENSVYGIAFSFDGETIATAGADKTVKLWNPQGKLLQTITGHDNWVYGIAFSPDGETIASASWKTVKLWNRQGKLLQTLTGHENWVYGVAFSPDGKTIATAGGDKTVKLWNRQGKLLQTIIGHENWVYGVAFSPDGKTIATASGDKTVKLWNRQGKLLQTLKDHDNWVYGVAFSLDGKTVATASGDKTVKLWNRQGKLLQTLKGHDNWVYGVAFSPDKETIATASGDKTVKLWNRQGKLLQTLTGHENSVYGVAFSPDGKTIATASGDQTVKLWTNWRIEDLTKHGCERLNNHLVAHPQKLEELRICQTDERKKLAASSWVIEGEKLAREGKVKEAVATFKKAAKWNSDININSNFLVWAKLLAEAETLMEEGTELAKEEKIEAAVEKYQRAKELDQVAFTPTWQNVDPEAKAKYQAVDALLNKGDELLRKRKVKEAIASYEKAERIDSTQISAFNWNKLCRDGSLDQKAADVMFACEKAVAMSPQDGKIIDSRGLARALTGNIEGAIADFQVYVEWTRNEEKKAQRQQWIKALQAGENPFTDKLLEELR

SEQ ID NO: 33637 - protein, 81 aa, Morinda royoc
TPQDEMRAGMSYFHETIWKGVPKFLRRVDTALKNMGINERVPYNAPLIQFSSWMGGDRDGNPRVTPEVTRDVCLLARMMAA

SEQ ID NO: 33638 - protein, 286 aa, Triticum aestivum
  misc_feature (87)..(87): Xaa can be any naturally occurring amino acid
  misc_feature (208)..(208): Xaa can be any naturally occurring amino acid
  unsure (1)..(286): unsure at all Xaa locations
HYRTSLYKKAGWYRSGIPGISSTHASVLLLGGSRFVRGSPAAAAAAMARKRKTDAAPRLDEADRTLYSSFCGAANSLSQLYSQAMAXQQKLSFQAGERHALEKLHQWILRKHDEESRLTVADIMSHIQHEIDYGGTDAHVSPRVHQHPMSVNPFTSIQPSAGSYAQATSGHAPRPSLSDQSKNTIFSNALSSPVRRSLQTYHLTPGAXGNGGRNTETNSARPKRRGNSGSSNDTSVELVSNSAGKGGLLNSVWGKQFCWHNQETVKGQYFLRGLERKGFFPQSPCA

SEQ ID NO: 33639 - protein, 914 aa, Trichodesmium erythraeum IMS101
MMKIYKWHPILALFLWLSIIISPELLDRKKITPALAETTLQDIKNHFAQGCIDSLLDKKIILGDYKNKTFRANTPVTRAEFAAMITQAFPDTKIVRNPINFVDIPQDYWGYDAIKKSYEMGFLSAYIGKTFNPTFKIKRWQVLTALSRGLNYQASSSSTQKLNKIFDDAAEIPEEVKKSIAAATEKGIVVNYPNVRLLNPNENATRSDVATFLCQAIVNNQKNSNEVIVQVPSEYIASFDKNTQLKTRDTLPKNTIETIKNRENSNLKTTGETSLENTNIPGIVERFDDGNLQAEIIYRQANNTDLVSDLYLKIIRGGKTILNQPIPVESLASASDSTMALLAGRFVKVQLLDLDGDKESEVLVDLFTINNSNAPFIGGTYSFIYRYEPKENQYTMLRHYWGNINYRVTDLDNDNIPEFKSFDSRFANVFSNLNDSFFPVRIFQYYQGEILDVTKKYPVQINSDASEMWLEFYRRLNKKQNIKGVLAAYLANKYMLGEKEEGWKSIESAYQGSDRSTYFANLRNFLTEKGYDTNQQIQPQTMLENFNPESQDNVSSFTNKTSPKVTTNNTENTEIKIKRPPQSSYSRTIPAIPKTLSPTENSVNSETLRQADITNNIVLAPKLVTSISNKQPDSILSLTISFNGKILASSSGKNIQLWNLETAKLLDTLSSHTTNVRSVAISPDGKTLASGSEDGTVKLWDISTGKVLTSFDHSGLITAVGFTADGRAVIGCSSDSGMKLWDIETGELLHRMNGTQPIAFGVDGLQMAASGGPRYIRLWNVAEGQLLKNLPIPSRNNNQGIQAIAFSQDGQTLAHAMRGESQVLVWNVETWEVRHTLKEHSQAIQAIAISPDGKILASSGEDGKIYLWDMASGKLLRSIKGYGAIVFSPDSQQLVSVTEDNMIQLWQIYGSARE

SEQ ID NO: 33640 - protein, 119 aa, Arabis alpina subsp. caucasica
PGSFNKILISYESGTVNGQWSAVGRTAVTTTLAGCTAALTTLFGKRLLSGHWNVTDVCNGLLGGFAAITGGCSVVEPWAAIICGFVAACVLLGCNKLAEKLRYDDPLEAAQLHGGCGAW

SEQ ID NO: 33641 - protein, 224 aa, Zea mays
MEEDYVFKIVVVGDSAVGKTQLLGRFTRDEFFLDSKSTIGIEFQTRTVDIARHRVKAQIWDTAGQERYRAVTSAYYRGALGAMLVYDVTSRRTFDHATRWVAELRAHADKSIVVMLVGNKADLARDAGRRAVDADEAAAFAEEQGLFFSEASALSGDNVERAFLTLLREIHAIVSRKTLDAAAETGGTTDVLALKGTKLSLADEISIMETSALRTASGGSCSCT

SEQ ID NO: 33642 - protein, 497 aa, Triticum aestivum
  misc_feature (261)..(261): Xaa can be any naturally occurring amino acid
  misc_feature (294)..(294): Xaa can be any naturally occurring amino acid
  unsure (1)..(497): unsure at all Xaa locations
MARKMLKDGEAPLVADDGGTYDYDLFVIGAGSGGVRGSRTAAGFGAKVAICELPFHPISSEWLGGHGGTCVIRGCVPKKILVYGASFRGEFDDAKQFGWEINGDINYNWKKLLENKTQEIVRLNGVYKRILGGSGVTMIEGAGSIVDAHTVEVTQPDGSKQRHTTKHILIATGSRATLVDIPGKELAITSDEALSLEELPKRAVILGGGYIAVEFASIWKGLGAEVDLFYRKELPLRGFDDEMRTVVASNLEGRGIRLHPXGTNLTELSKTADGIKVVTDKGDELIADVVLFAXGRAPNSNRLNLEAVGVEVDQIGAIKVDEYSRTSVPSIWAVGDVTNRINLTPVALMEATCFAKTVFGGQTVKPDYKDVPCAVFCIPPLSVVGLSEQEALAEAKNDLLVYTSSFNPMKNSISKRVEKSTMKLVVDADTDKVLGAAMCGPDAAEIMQGIAVSLKAGATKATFDSTVGIHPSAAEEFVTMRTLTRRVSPPSKPKTNL

SEQ ID NO: 33643 - protein, 256 aa, Triticum aestivum
MGSMDGHPLQGNHGYAHVPAGSNNDEDDASPPPSAGGGSSGSGRRPRGRPPGSKNKPKPPVVVTRESPNAMRSHVLEIASGADIVEAIAAFSRRRQRGVSVLSGSGAVTNVTLRQPAGTGAAAVALRGRFEILSLSGAFLPAPAPPGATGLAVYLAGGQGQVVGGSVMGELLASGPVMVIAATFGNATYERLPLDQDAEEGAVLSGSEGAATQLEQQGSGGAAVPPPMYAVPQTPPGDMFGQWGQAAVARPPPTSF

SEQ ID NO: 33644 - protein, 148 aa, Debaryomyces hansenii CBS767
AEKLSEQQIAEFKEAFSLFDKDGDGKITTKELGTVMRSLGQNPSESELTDMINEVDVDSDGSIDFPEFLTMMARKMKDTDSEAEIAEAFKVFDRNGDGKISAAELRHVLTSIGEKLSDADVDQMIREADVNNDGEIDIQEFTQLLSTK

SEQ ID NO: 33645 - protein, 208 aa, Zea mays
  misc_feature (63)..(63): Xaa can be any naturally occurring amino acid
  unsure (1)..(208): unsure at all Xaa locations
MVSLKLQKRLAASYLKCGKGKVWLDPNEVSEISMANSRQNIRKLVKDGFIIKKPHKIHSRSRXARRAHEAKQKGRHSGYGKRRGTREARLPTKILWMRRMRVLRRLLCKYREAKKIDKHMYHDMYMKVKGNMFKNKRVLMESIHKSKAEKAREKTLSDQFEAKRAKSKASRERKIARREERLAQGPREITPPVSSTAPATGAPKKAKK

SEQ ID NO: 33646 - protein, 109 aa, Cryptococcus gattii
NHLDEGQGIHWHGMRQKNTPYMDGVPGITQCPIPPGGSYTYNFTISDQSGTYWWHSHYSNAMADGLWGPLIVHSVDEPIQRGRDYDEDRIVFVTDWMHDDSEIIIAALA

SEQ ID NO: 33647 - protein, 393 aa, Debaryomyces hansenii CBS767
MDRYEENYLDGSEIATLQHQEQEEQEEQIPSHPAPTQNIVDEEELLAAQAAAEAAAAAQLQQPGGAFNNVGQGLTGVYRDMMMQYWQETINSIEHDEHDFKNHQLPLARIKKVMKTDEDVRMISAEAPILFAKGCDVFITELTMRAWIHAEENKRRTLQKSDIAAALTKSDMFDFLIDIVPREEEKPKKSYSSLSRSGSYANIPPNSNPTLSNASQQQIPTSQPKNISHIPGNINEDQDIKNDDRQINDPQILHQQMLQQQMLQQQQQQQQQQQQPPPPPQQPQHQQQAQHQQHQQQLEQQQLEQQQLEQQQLEQQQQQQQQQQQQQQQQQQQQQQQQKDQSQAEQPEPQLPPQQIKLEQNYSEMPQFPEGTTQPPQISNRNEFQNFNFQVYE

SEQ ID NO: 33648 - protein, 256 aa, Oryza sativa
MDGGYGSVTIVHDARSPEDVFQDFCGRRSGIVKALTIEVEKFYKQCDPEKENLCLYGLPNGTWAVTLPADEVPPELPEPALGINFARDGMQEKDWLSLIAVHSDSWLLSVAFYFGARFGFDKKARERLFMMTSSLPTVFEVVSGGVNTQSKTANGSSKNKSGSKPPKRPNSDSKPQKQVQAKYEEENGGRGNGGDEDQAETICGACGEAYANGEFWICCDICETWFHGKCVRITPAKAEHIKHYKCPGCSNKRTRE

SEQ ID NO: 33649 - protein, 109 aa, Cryptococcus gattii
NHLDEGQGIHWHGMRQKNTPYMDGVPGITQCPIPPGGSYTYNFTISDQSGTYWWHSHYSNAMADGLWGPLIVHSVHEPIQRGRDYDEDRIVFVTDWMHDDSEIIIAALA

SEQ ID NO: 33650 - protein, 109 aa, Cryptococcus gattii
NHLDKGQSIHWHGMRQKDTPYMDGVPGITQCPIPPGGSYTYNFTISDQSGTYWWHSHYSNAMADGLWGPLIVHSVDEPIQRGRDYDEDRIVFVSDWLHDDSEIIIAALA

SEQ ID NO: 33651 - protein, 944 aa, Schizosaccharomyces pombe
MGRILIAHLFLPSSVGFSFDTVPHDEVGSKFMQKEESKDWIADTPLDESAIVSEEESDDDSLLSDLPEEIDSTNAQSNIATPSPGTVAAAISGIQPPPKTPSSDSPSLENSLSNLNDLFKSRGRHMAFSKNDGTNLSLPPSRHQSPPPSSVLASQRHHRRHDSELEEFARRASRSLSFSMNGTPQRRMTFDAEAWKNVIFKIKPSSFGNASFYNAISAATRSKQFDDHLFVGTCGIPTDSLPDSLKERISHDYITEHSSLVVYPTDTDFVGHYNHYCKNILWPTFHYQIPDNPKSKAYEDHSWANYVKVNKAFADTIVDNYEQDDMIWINDYHLLLVPEMVRERLPRAKIGFFLHIPFPSSEVFRCLATRQEILKGMLGANILGFQIPEFAYHFLQTCSRLVNIDIRKNGVVSFENRQIDVIALPISIDPGFIDRCLASPPVEHWAKVLQDRFRGKHIILSHDKLDPIRGLRSKLISFERFLQKYPEYRENTILLQVAPESLQDSEHLPHISDIVTRINSAYSNIASRHVPVILLRQKLGYAQFLALMMISDALIDNSLREGISLTSHQFIYVQRKRHRPLILSEFVGSASILNDNAIIVNPWDYSKTAEAFRTALTMSEEECQKRNKAMCNLILRHDAASWAVTFQSLIKESWKEQIDMQRIPAFTAQLIKEPYQNAQKRLILLYFEGTISTWGSQYHNVMTSLQRTINLLNMLTSDPKNTVYVFSALSCQELEQLFQRVPKLGIVAENGCFVRSPPKGDATMPVSKKEIAELWKNKVLGTDLTWMKTVSEIFEYYAERTTGAYVENKDATVILHLREAEDDEAAMWAAKECCESVNNFNVPCSATIQNDMVVCRSNKVSKRLAAEDIYSANGGDYDFIFAASNDPDDDTVFSWMKNFKQSKKEVVPFTFSVCVSEHGNSTNADAESSGVFGFLQALEKVYSA

SEQ ID NO: 33652 - protein, 481 aa, Triticum aestivum
  misc_feature (41)..(41): Xaa can be any naturally occurring amino acid
  unsure (1)..(481): unsure at all Xaa locations
MAIASRITKRALSTFAAAAKLPEAAVAAAGAEAVPAPSSAXAQQQQQVLEFEDTERLFTGEPSTALVRTLAALQLMSAGPLVDVGLAALRSPAVAASPVVQAAARATAYKHFCAGETADEAAARVQRLWRGGMGGILDYGIEDAEDGAACDRNVAGFLAAVDVAAALPPGSASVCIKITALCPIALLEKTSDLLRWQHKNPSVHLPWKQHAFPILSDSSPLYLTPSEPAALTAEEERELQLAHDRLLAVGARCAEHDIPLLVDAEYASVQPSIDYFTFVGALACNGGGRPIVHGTVQAYLRDARDRLEAMVRAAEEERVCLGVKIVRGAYLTREARLAESLGVPSPIHGSIQDTHDCYNGCAAFLLERVRRGSASVMLATHNVESGQLAAARAQELGIGKGDRNLQFAQLMGMADGLSLGLRNAGFQVSKYLPYGPVEHIIPYLIRRAEENRGLLSASAFDRQLLRKELVRRFKNAVMGRE

SEQ ID NO: 33653 - protein, 654 aa, Cryptococcus neoformans var. neoformans
MEDVKMSGPVGVGVPMGVVDPREKELPREPGSAAMGGRSRSGTGRSSKDKKSMFGFVSDLLGKDKPPVISKPYDPVHVTHVGFDFQTGKYTGMPPKWQQVLDDNGITQDEQERNPNGVMAVVQYLKHQDEGEDEEEEVWAKMKNAQPPAFPPPSAAPSQPTTPGGGVGSREMSREPSNEALGAAGTQVVDFTCPRMAPAPPTKPSLNRMLSERHAPASHRPAELTTPAPLAAAPRVTQAYSSALSHSPHLPPPHPTSSAPPTAPAPHLDRSYSQRAPVSGTKTKVLDRANTTRSPGSSAGIAQGAGTGVGLTKSQSQSGHKSRDPSREPKDSASSSGGLSRNQTTTRQQQGATPRRREKEKKENEDVIRQLRMICTPGDPNLVYKNFRKIGQGASAGVYTAIDRQTLPVAIKQMSLEKQPKQDLIINEILVMRESAHPNIVNFKDSYLWQGDLWVVMEYMEGGSLTDVVTAHCMSEAQIASVSREVCEGLRHLHSKGVIHRDIKSDNILLSLNGDVKLTDFGFCARIADPTTTKRTTMVGTPYWMAPEVVLRKEYGPNVDIWSLGILAIEMLEGEPPYLTENPVRALYLIATNGTPKIKDWDKLSTVFRDYFKVTLQVDPAKRPTAAAILKHEFFKHTAPLISLAPMIRSSRKS

SEQ ID NO: 33654 - protein, 191 aa, Glycine max
MSKLQSDAVKDAITQIVGEAREKKRKFTETVELQIGLKNYDPQKDKRFSGSVKLPHIPRPKMRVCMLGDAQHVDQAEKMGLDYMDVESLKKMNKNKKLVKKLAKKYHAFLASEAIIKQIPRLLGPGLNKAGKFPTLVSHQESLEAKVNETKATVKFRLKKVLCMGVAVGNLLMDEKQIQQNIQMSVNFLVS

SEQ ID NO: 33655 - protein, 351 aa, Zea mays
AETGTGKQEEGDGVAPLARQGSVYSLTFDRSQSTLGGAAASCGGSRGIPKGFGSVNMDELLRSIWTAEETQAKASASIAGASAGMPPTPMQRQGSSLTLPRMLSTKTVDEAWRNLVRDEPPQGADGGGHQPPHRQSTLGEMTLEEFLVRAGAVKENPASAPPAPPPMVPPRPVPVAPKSSAFFGDLPGADDDAATAAVGFAPVGMVDLALIPPRAAGMGGSAMAVQTAVSQLDSVGKGYSDLSSLTEPQTFSFERMIRGRRHGGGVEKVVERRRRRMIKNRESAARSRARKQAYTMELEAEVQKLREQNQELERKQAEIMEMQNNEVSEMLKDPFGRKKRLCLRRTLTAPW

SEQ ID NO: 33656 - protein, 150 aa, Medicago sativa
MVPQNMKEQLALAVRSIQWSYVIFWSESVNQPGGLSWGEGYYNGEIKTRKTSQGVELSSDEIGLQRSEQLRELFRSLKTVDANPQIKRPSAALSPDDLTDTEWYYLVCMSFVFNIGQGLPGRALENGQPIWLIDADSVDCKVFSRALLAK

SEQ ID NO: 33657 - protein, 119 aa, Barbarea verna
PGSFNKIAVTYATGTYNGQWSAVGRTAVTTTLAGCTAALTTLFGKRLLSGHWNVTDVCNGLLGGFAAITGGCSVVEPWAAIICGFVAALVLLGCNKLAEKLKYDDPLEAAQLHGGCGAW

SEQ ID NO: 33658 - protein, 760 aa, Sorghum bicolor
MASHIVGYPRMGPKRELKFALESFWDGKSSAEDLEKVATDLRSSIWKQMSEAGIKYIPSNTFSYYDQVLDTTAMLGAVPERYSWTGGEIGLSTYFSMARGNATVPAMEMTKCHFIVPELGPSTKFTYASHKAVSEYKEAKALGIDTVPVLVGPVSYLLLSKPAKGVEKSFSLLSLLGSILPIYKEVVAELKAAGASWIQFDEPTLVKDLDAHELAAFSSAYAELESAFSGLNVLIETYFADIPAESYKTLTSLSGVTAYGFDLIRGAKTLDLIRSSFPSGKYLFAGVVDGRNIWADDLAASLSTLQSLEAVAGKDKLVVSTSCSLMHTAVDLVNETKLDDEIKSWLAFAAQKVVEVNALAKALAGQKDEAYFAANAAAQASRRSSPRVTNEEVQKAAAALKGSDHRRATTVSSRLDAQQKKLNLPVLPTTTIGSFPQTPELRRVRREYKAKKISEEEYISAIKEEISKVVKIQEELDIDVLVHGEPERNDMVEYFGEQLSGFAFTANGWVQSYGSRCVKPPIIYGDVSRPNPMTVFWSKTAQSMTARPMKGMLTGPVTILNWSFVRNDQPRFETCYQIALAIKKEVEDLEAAGIQVIQIDEAALREGLPLRKSEHAFYLDWAVHSFRITNCGVQDTTQIHTHMCYSNFNDIIHSIIDMDADVITIENSRSDEKLLSVFREGVKYGAGIGPGVYDIHSPRIPTTEEIADRVNKMLAVLDTNILWVNPDCGLKTRKYTEVKPALTNMVSATKLIRTQLASAK

SEQ ID NO: 33659 - protein, 350 aa, Frankia sp. EAN1pec
MIAARLHGPGDLRVEEVDEPEAAAGEVKIAVAHNGLCGTDLTEIFSGPRACTTVPHPLTGGVLPQIVGHEFAGVVAAVGAGVTDVAVSERVSVEPLYSCGDCDRCQASLPELCRQVMTHGICSNGGGLAQFTTVPRAMVHRLPASMSLAEGALVEPMAVAFNGVLRSGVEAGGSALVFGAGPIGMGVVFGLRAVGVADILLVEPASARRAAAERLGVADVLDPNTTDVADEVRRRTGGRGVDVVLDAAGAPGTFGLAPAVLRARGRYVGIAVAERPVEFAPWVLARGEIELTGSLGYGPGVFTRVIDLIAGGAYPTAGWVDHVGLSDLHDALQDLRDGRRMKVLVDLPAG

SEQ ID NO: 33660 - protein, 119 aa, Crambe cordifolia
PGSFNKILVTYESGSMNGQWSAVGRTAVTTTLSGCTAALTTLFGKRLLSGHWNVTDVCNGLLGGFAAITGGCSVVEPWAAIICGFIAALVLLGCNKLAERLRYDDPLEAAQLHGGCGAW

SEQ ID NO: 33661 - protein, 482 aa, Ralstonia eutropha JMP134
MLKLQDPSLLRQQCYIDGRWTDGERRIDVTNPATGELVAQVPQFGVAETRHAIEAANRALPAWRARLAKERSALLRKWFELILANQDDLARIMTAEQGKPFAEAKGEIAYAASFIEWFAEEGKRVYGETIPAPVSSQRIVVTKEPIGVCAAITPWNFPAAMITRKAGPALAAGCTMVVKPASQTPLTALALAVLAERAGIPAGVLSVVTGSAGAIGGELSSNPLVRKLTFTGSTEVGRVLMAQTASTIKKVSMELGGNAPFIVFDDADLDAAVEGAIISKYRNAGQTCVCANRIYVQDKVYDAFAQKLVAAVAQLKVGNGMEDGVRIGPLIDEKAVAKVEEHIADALGKGARVLEGGHRHGLGHTFFQPTVLADVAPNMLVAREETFGPLAPLFRFKTEDDVVAMANDTEFGLASYFYARDLGRVWRVSERLEYGMVGVNTGLISNEVAPFGGVKQSGVGREGSHYGIEDYLVIKYTCMAGI

SEQ ID NO: 33662 - protein, 230 aa, Alkaliphilus metalliredigenes QYMF
MKNHISIVIPAYNEEKRIIKTLTTLKKSKMVDEIIVVDDGSTDKTYEYASKVEGIQLLKQLKNRGKGYALTVGINEALKNSNIILLLDADLEESVIDFSKLILPISEGRADVTIGKFPPSKKKGGFGFVKKLAKYGVYIHTGHKLDTVLSGQRALKSNVLKNINTNFQGYGVELGMTIDILKKGYHIEEVEVNMLHNETGRNLTGFIHRGKQFWQILCVLLKHSFKEKQR

SEQ ID NO: 33663 - protein, 119 aa, Lunaria rediviva
PGSFTKILVTYQTGTINGQWSAVGRTAITTTLAGCTAALTTLFGKRLLSGHWNVTDVCNGLLGGFAAITGGCSVVEPWAAIICGFVAALVLLGCNKLALKLRYDDPLEAAQLHGGCGAW

SEQ ID NO: 33664 - protein, 119 aa, Ptilotrichum spinosum
PGSFTKIMVTYESGTANGQWSAVGRTAVTTTLAGCTAALTTLFGKRLLSGHWNVTDVCNGLLGGFAAITGGCSVVEPWAAIICGFVSALVLLGCNKLAEKLKFDDPLEAAQLHGGCGAW

SEQ ID NO: 33665 - protein, 447 aa, Corynebacterium glutamicum
MTVDEQVSNYYDMLLKRNAGEPEFHQAVAEVLESLKLVLEKDPHYADYGLIQRLCEPERQLIFRVPWVDDQGQVHVNRGFRVQFNSALGPYKGGLRFHPSVNLGIVKFLGFEQIFKNSLTGLPIGGGKGGSDFDPKGKSDLEIMRFCQSFMTELHRHIGEYRDVPAGDIGVGGREIGYLFGHYRRMANQHESGVLTGKGLTWGGSLVRTEATGYGCVYFVSEMIKAKGESISGQKIIVSGSGNVATYAIEKAQELGATVIGFSDSSGWVHTPNGVDVAKLREIKEVRRARVSVYADEVEGATYHTDGSIWDLKCDIALPCATQNELNGENAKTLADNGCRFVAEGANMPSTPEAVEVFRERDIRFGPGKATPEAVEVFRERDIRFGPGKAVNVGGVATSALEMQQNASRETCAETAAEYGHENDYVVGANIAGFKKVADAMLAQGVI

SEQ ID NO: 33666 - protein, 449 aa, Haemophilus influenzae 86-028NP
MSKVASLDAFLTKVAQRDGYQPEFLQAVREVFTSIWPFLEANPKYRSEALLERLVEPERAFQFRVAWTDDKGQVQVNRAFRVQFNSAIGPFKGGMRFHPSVNLSILKFLGFEQIFKNALTTLPMGGAKGGSDFDPKGKSDAEVMRFCQALMAELYRHVGADTDVPAGDIGVGGREVGYLAGYMKKLSNQSACVFTGRGLSFGGSLIRPEATGYGLIYFAQAMLAEKGDSFAGKVVSVSGSGNVAQYAIEKALSLGAKVVTCSDSSGYVYDPNGFTTEKLAALLEIKNVKRGRVKDYAELFGLQYFEGKRPWEVQVDIALPCATQNELELSDAQRLIKNGVKLVAEGANMPTTIEATEALLAADVLFGPGKAANAGGVATSGLEMAQSSQRLYWTAEEVDAQLHRIMLDIHANCKKYGTIEGQENINYVVGANVAGFVKVADAMLAQGVY

SEQ ID NO: 33667 - protein, 203 aa, Mycobacterium tuberculosis
MGHHHHHHHHHHSSGHIEGRHMTSNQKAILAGGCFWGLQDLIRNQPGVVSTRVGYSGGNIPNATYRNHGTHAEAVEIIFDPTVTDYRTLLEFFFQIHDPTTKDRQGNDRGTSYRSAIFYFDEQQKRIALDTIADVEASGLWPGKVVTEVSPAGDFWEAEPEHQDYLQRYPNGYTCHFVRPGWRLPRRTAESALRASLSPELGT

SEQ ID NO: 33668 - protein, 137 aa, Streptococcus suis 89/1591
MERTFFIIKPDALKRGLAGQILSRIERRGFQIRDLKMVTATEELISQHYDHLTDKPFFPQLVQYMTSGPMIAGIIEGPEVIKSWRDMMGATNPVNALPGTIRGDFATAPVEGIVANVVHGSDSAEAAEREIGLWLGK

SEQ ID NO: 33669 - protein, 909 aa, Pseudomonas tolaasii
MLRRMGIKGRVLLLTLLPTTLMALLLGGYFTWMQLSELQTQLLQRGEMIAEQLAPLVAPALSTRNTDLLERIATQSLEQPDVRAVSFLAPDRSPLAHARPTMLNQPPVGNSSHLVAASGNDATRYLLPVFGRHRNLAGELIPDEADRLLGWVEVELSHNGMLLRGYRSLFASLLLIAIGLICTAALAVRISRTINSPIGQIKQPVAQLKDGNLETCLAPLGSQELDQLASGINRMAETLQNAQEELQHSIDQATEDVRQNLETIEIQNIELDLARKEALEASRIKSEFLANMSHEIRTPLNGILGFTHLLQKSELSPRHVDYLGTIEKSADNLLGIINEILDFSKIEAGKLVLDSVPFNLRDLLQDTLTILAPAAHAKQLELVSLVYRDTPLAVVGDPLRLKQILTNLISNAIKFTREGTIVARAMVEDEEEDSVQLRISVQDTGIGLSNQDVRALFQAFTEADNSLSRQPGGTGLGLVISKRLIEQMGGEIGVDSTPGEGSEFWISLNLPKTRDDVDDLPSAPLLGRRVAVLENHDVARQALQHQLEDCGLEVTPFNTLESLTNGITSTHQTEQAIDLAVLGVTANDIPPERLNQHLWDLEHLGCKVLVLCPTTEQMLFNQSVPNPNSQLQAKTPCTRKLRRALADLISPPVAQRTREPLSSRAPRVLCVDDNPANLLLVQTLLEDMGAKVLAVESGYAAIDAVKQETFDLVLMDVQMPGMDRRQSTEAIRQWESERHGTPLPVVALTAHAMANEKRALLQSGMDDYLTKPISERQLAQVVLKWTGLALRNQGPERGNDNLGHGVQLLVLDHEEGLAAANKADLAADMLAMLLASLEADRLAITVAREAKDNNALIERIHRLHGATRYCGVAELRAACQRAETLLKQDDAQGHGALDELDMAIGAAGQ

SEQ ID NO: 33670 - protein, 214 aa, Clostridium perfringens str. 13
MNSFMMDIKNNSNDLHAVAEKTGFLKRLLEGKASTESYAEYLYNLYEVYNAIEVNLEKCKDNKVVKDFVLPEIYRAEAILKDLKFLLEENLNTMKPLASTRAYVARINEIGETAPELLVAHAYTRYLADLFGGRTIYGMVKDLYKIDEEGLNYYKYETLSDGSEMKGFVMNYHNKLNNIELNEEMKERFINEVANSYVYNIAISNELAFIRFNR

SEQ ID NO: 33671 - protein, 358 aa, Oryza sativa (japonica cultivar-group)
MSAYCGKYKDELIKNAAYIGTPGKGILAADESTGTIGKRFASINVENVEENRRSLRELLFTTPGALQHLSGVILFEETLYQKTKDGKPFVDVLKEGGVLPGIKVDKGTVEVAGTNKETTTQGHDDLGKRCAKYYEAGARFAKWRAVLKIGPNEPSQLSIDLNAQGLARYAIICQENGLVPIVEPEILVDGSHDIERCAYVTEKVLAACYKALNEHHVLLEGSLLKPNMVTPGSESKKVSPQLIAEYTVRALQRTVPAAVPAIVFLSGGQSEEEATVNLNAMNKLSTKKPWALSFSFGRALQQSTLKAWGGKTENVVKAQKAFITRCKANSEATLGTYQGDAVLGEGASESLHVKDYKY

SEQ ID NO: 33672 - protein, 145 aa, Vibrio fischeri ES114
MSSNKHPIIGVPTNIITGFLGVGKTSTILNLMANKPKDERWAILVNEFGEIGIDGSLMQGQHTTNPQGAEQQIFVREVPGGCMCCAAGLPMQIALNQLLSEAKPDRLLIEPTGLGHPKEVLQILSSEHYRQVLTLQKNITFSRCS

SEQ ID NO: 33673 - protein, 490 aa, Nitrosomonas europaea ATCC 19718
MDNLFDVAVIGAGPGGYVAAIRCAQLGLNTVCIDDWKNEQGKPSLGGTCLNVGCIPSKALLESSENFERAGHKFAEHGIKVDGLSIDVPAMIARKNKIVKAFTGGIGMLFKKNKVTALHGRGTLQKHDQARDGGDDSWEIQVSADGKEQSVHARHVIIATGSTPRTLKVAPVDGNNVLDNAGALALQQTPGKLAIIGAGVIGLELGSVWRRLGAEVTLLEAQADFLPAADEQVAKEAYKALTRETGLTIHTGVEIKSTRASENGVEIDYVDRDKNAQNLKVDKLIVAVGRVPNTSGLGAEAAGLKLDERGYISVDEFCQTSLQNVYAIGDVVRGPMLAHKASEEGVAVAERIASGRQGATDSSGHVDLGMMPWVIYTAPEIAWVGKTEQTLKAEGVAYKAGQFPFMANGRARALGETTGFVKILADAESDRILGVHMVGPYVSEMIAEAVVAMEFSASSEDLARIVHAHPSLSESLHEAALGVDKRAIHI

SEQ ID NO: 33674 - protein, 509 aa, Legionella pneumophila str. Lens
MQRVLIYIIFFSYFKLGFTHPQMEFQSNMQEINQYIEKTWSILTRDNTNLLADSDEKLPHTQSIIYLPPEENLNKIKNKVTQNWPEWKKKKVIFKYIPQDISTIKQHGLLYLPHPYIVPGGRFNEMYGWDSYFIELGLIEHNRLTMARHMIDNLIYEINHYGTILNANRTYYLQRSQPPLLTAMILAYYDKTQDKKWLASTLPAIKKLHTYWTIPPRLIPDLGLSRYYAGGQGKPPEESAVYYEKVLNYFKTHEIDDYDKSLFYSEASNQLTELFYIADRTVRESGFDITAKFGPFSAGILDYAPVDLNVLIYQMENDLGIIYKILDNKENADIWTQKAQVRAALINHYLWDNKAGYYFDYNFKTKQLRPYIYATTFYPLWAGIASKDQAQSIVNNLPVLLTRGGLLTSCYIQGVQWDAPFGWAPLQYFAVLGLNRYGYKELALDIANRFVSTIHKGFQEAHTLFEKYDVQKMSIHTENKIQYSYSTNVVGFGWTNGVYLVFMRLINAS

SEQ ID NO: 33675 - protein, 109 aa, Cryptococcus gattii
NHLDEGQSIHWHGMRQKNTPYMDGVPGITQCPIPPRGSYTYNFTISDQSGTYWWHSHYSNAMADGLWGPLIVHSVDEPIQRGRDYDEDRIVFVSDWMHDDSEIIIAALA

SEQ ID NO: 33676 - protein, 433 aa, Psychrobacter arcticus 273-4
MSQMNTADITAYMQNVGKEARAASRALAAANTGDKNAALMAIHDVLKNAKQDILSANKIDMDNGQKNDLDAALLDRLELNDARFDGMLQGLKDVAALPDPIGEVTDMTYRPSGIHLGKMRVPLGVVGMIYESRPNVTLEAASLALKSGNAIILRGGSEAFESNQAIAKCILEGLKKVGMSEYSVQVLETTDRAAVGELITMTDYVDVIVPRGGKGLIERISRDARVPVIKHLDGNCHTFIDSDADPEIAIKVSVNAKTHRYGTCNTMETLLVDEAIANELLPKIAEAIVKADDAMQLRLDDKAQAILNDNTTLKGHLSAATAEDWDTEYLAPILAIKILSGIDEAIEHINTHGSHHTDVIITDNYTKSQRFIREVDSASVMINASSRFADGFEYGLGAEIGISTDKIHARGPVGLEGLTSQKWIVYGHGETRA

SEQ ID NO: 33677 - protein, 109 aa, Cryptococcus gattii
NHLDEGQGIHWHGMRQKNTPYMDGIPGITQCPIPPGGSYTYNFTISDQSGTYWWHSHYSNAMADGLWGPLIVHSVDEPIQRGRDYDEDRIVFVSDWMHDNSEIIIAALA

SEQ ID NO: 33678 - protein, 141 aa, Brassica napus
MAVHIHNPNFLHTHQLRSSLTSASASPASYHFTRYSPAKHPGFICKSNNKDDYLIDAPVSAGDGFSFSGGKYSDQPSPSDEWLKQGKWVKAHRVGGSGEEAKDPIFGLTMGSSSQASKDVFRWFCVESGKVDSPPVILIHG

SEQ ID NO: 33679 - protein, 165 aa, Arabidopsis thaliana
MNREKLMKMANTVRTGGKGTVRRKKKAVHKTTTTDDKRLQSTLKRVGVNSIPAIEEVNIFKDDVVIQFINPKVQASIAANTWVVSGTPQTKKLQDILPQIISQLGPDNLDNLKKLAEQFQKQAPGAGDVPATIQEEDDDDDVPDLVVGETFETPATEEAPKAAAS

SEQ ID NO: 33680 - protein, 460 aa, Candida albicans SC5314
MIRSTTATTTTSRYCARIFRNLSRSYSTENSQPNPNEQPPLEHTLSHKELREQAIAEALAREEEAILKTKKLRELTQESQNLISALNKTPTTLINERLNKLHEDLSKLSQDKIKQLDEELKDYLNQNMILPDHLKANRPWLRSSDNNEDISKKLKSSINSASSSDSNHTSTTTTSSRYTEQFPNLKPTPDYKPYSEQELYIRQLNHTRINGRIGSRLTQVYKPQRDINNPPKFDNTTIAKLMAAGCHLGHSTSSFRPSMQPFIYGIYDKVHIIDLNKTLEKLTLACKVIEGVVEKGGVVLYVGTHKNNSSIQEALVKASERSHGYYVNKRWIPGTITNYTEVTKQYGQIKTKMEVDMKDQKITTKNSNKIIKPDLVVLLNPVENRNCIKECISAGIPTIGLCDTDMEPSLLTYPIPCNDDSVRSVNLMLGIMSKSAESGLQKRISAVKKLEENDGKVVKA

SEQ ID NO: 33681 - protein, 489 aa, Yersinia pseudotuberculosis IP 32953
MPAQNPLQHQRQHDGIYHIGYFVGGKWSQAQEQFDVCNPATGELVARVAKSGKQETEAAIKAASEAFPAWRKTPAKQRAEILQRWYLLIMEHQQSLAELMVSEQGKPLKEALVEVAYAASFIQWFSEQAKRANGEIIPSAKEGARILATREPIGVVAAITPWNFPLAMLTRKLGPALAAGCTGLIKPANNTPLSAFALLALAEQAGVPAGVLNGVVGDTHAISDAIMASSDVRKISFTGSTNVGKTLMRNAAATMKRISMELGGNAPYIVFDDADLEAAVAGAMACKFRNAGQVCVCVNRFYIQDAIYDEFVNRLAAEVKKLKVGNGMDKDVNMGPLINLAGLEKVEEHVKDALEKGGRLLAGGHRHALGGNFFQPTVIADANEQMKVASEETFGPLAACFRFSTEAEVIQRANNTPFGLAAYFYTQNLQRVFRVSEALESGMIGVNECSVSTELAPFGGVKESGLGREGSVLGLDEFMEVKTLHLGNL

SEQ ID NO: 33682 - protein, 327 aa, Chlamydophila pneumoniae J138
MSNQFDQLKKLSTIVCDSGDPELVKASGSQDATTNPSLILKVAQEPKFQELLNEAVVWGIRQNGDDLQTLSFILDKIQVNFALEIIKNIPGRISLEIDARLSFNVEAMVQRAVFLSQLFEAMGGDKKRLLVKIPGTWEGIRAVEFLEAKGIACNVTLIFNLVQAIAAAKAKATLISPFVGRIYDWWIAAYGDEGYSIDADPGVASVSNIYAYYKKFGIPTQIMAASFRTKEQVLALAGCDLLTISPKLLDELKKSQHPVKKELDPAEAKKLDVQPIELTESFFRFLMNEDAMATEKLAEGIRIFAGDTQILETAITEFIKQIAAEGA

SEQ ID NO: 33683 - protein, 465 aa, Oenococcus oeni PSU-1
KKEQETNMTKKILVSSDNTVAELQSALEKVDVKFLKKDKKEELLRLAKNYNRRVDRAEKKSEGNDGLSIKKDDLKKGKSKDNSKSGEKSSSAATAFDEKAYAKSLKAFIKKNKKSGQVVYDDLENKMAKPFALNADQIDKLIEKVEDAGISIVDEDGNPSEKSLKTKSNNPSQEELSQASSAPKGVKINDPVRMYLKEIGRVSLLNADQEVAIAKRIEKGGSDGERARQELAEANLRLVVSIAKRYVGRGMHFLDLIQEGNMGLMKAVEKFDYTKGFKFSTYATWWIRQAITRAIADQARTIRIPVHMVETINKLIRIQRTLIQDLGRDPMPEEIGAEMELTADKVREIQKIAQEPVSLETPIGEENDSHLGDFIEDNEGESPIESTSDQMLKDQLEEVLGTLTEREENVLRLRFGLEDGKTRTLEEVGRVFGVTRERIRQIEAKALRKLRHPSRSKQLKDFMEE

SEQ ID NO: 33684 - protein, 588 aa, Pseudomonas aeruginosa PAO1
MPAILSSRQRIALRLAWRFMAPYRWRMLGALVALLFTAAITLSLGQGIRLLVDQGFLTASPELLNRYILLFFVLVLGLAVGTFVRFYLVSWIGERFVADIRKRVFDHLIELHPGFYETNRSSEIQSRLTADTTLLQTVIGSSLSMALRNALMLVGGVLLMFVTNAKLTSIVVLALPLVIAPILLFGRRVRSLSRESQDRVADVGSYVGETLGQIKTVQAYNHQAQDRQRFAGTVERAFDTARKRIAQRAWLITVVIVLVLGAVGIMLWVGGRDVIAGSISAGELAAFVFYSLIVGMAFGTLSEVIGELQRAAGAAERIAELLRARSEIRPPAQPRKLAARVSGRIELQAVRFAYPTRPEHWAIDDISLAVEPGETLALVGPSGAGKSTLFDLLLRFFDPQQGRLLLDGQPIVELDPADLRRSFALVSQNPALFFGSVEENIRYGRPHASAAEVEAAARAAHAHEFILGLPQGYATHLGEGGIGLSGGQRQRLAIARALLVDAPVLLLDEATSALDAESEHLIQQALPGLMSGRTTLVIAHRLATVQSADRIAVIDQGRLVAIGSHARLIAENPLYARLAELQFAAGGR

SEQ ID NO: 33685 - protein, 168 aa, Oryza sativa (japonica cultivar-group)
MAAVMVARQGRELQRYSDNTGGRMVVGCIPYRVRGDGGGVEVLVISSQKKGAAAGDVVMFPKGGWELDESVDEAARREALEEAGVLGEIGASLGRWCYRSRRYDATYEGFVFPLRVTDELDRWPEMAARRRSWVSPQQAMDRCPHWWMREALQRFADLFPQPTPLSLL

SEQ ID NO: 33686 - protein, 323 aa, Lycopersicon esculentum
MAPGILYGGSSNFDGVFTQKQRDVFSSSTAPKGHLGSLFAPASSSSNFLGSSSMVSFRGVNGGKRSFFDSFDQDDNEADELGEYLHQAEKKRRLTDNQVQFLEKSFGEENKLEPERKVQLAKELGLQPRQIAIWFQNRRARWKTKQLEKDYDELRNRYDTLKSNYNNLLKEKEDLRTEVFRLTGKLFIKEKGNGQLDLRDEHKHSNALAKETVVDPMSNVPALVVKHQQEDLSSAKSDVFDSESPRYTSRMHSSVVDQDDSARAFETDQSDSSQDDDENFSKNMLSTANLLGKDADDDYPATSSNLSYFGFPVEDQGFGFWTY

SEQ ID NO: 33687 - protein, 429 aa, Thiomicrospira crunogena XCL-2
MTESGIKMSEKEMDVKAYMQKLGQQAREASRQLMVATTRQKNTALLNIATALEEQAETLKTENAKDLEQGKANGLDAAMLDRLALTDKVINGMATGLRQIAALNDPIGEISDMNYLPSGIQVGKMRVPLGVVGIIYESRPNVTIDAAALCLKSGNAALLRGGSEAAYSNRALAKCIQSALHESGLLPTAVQVVETTDRAAVGEMIAMPEYVDVIIPRGGKGLIERISEGAKVPVIKHLDGICHVYIDDDADADKATRVAFNAKTHRYGVCNAMETLLIADSRAAEILPGLVELYEEKGVELRGCEQTRAICDMKAATEEDWATEYLAPILSIKVVDDVDEAIDHITQYSSGHTESIITENLTTSRQFLARVDSSSVMVNASTRFADGFEYGLGAEIGISTDKFHARGPVGLEGLTSQKYIVLGDGTIRE

SEQ ID NO: 33688 - protein, 545 aa, Frankia sp. EAN1pec
MPKIIAFDEEARRGLERGMNQLADAVKVTLGPKGRNVVLEKKWGVPTITNDGVSIAKEIELEDPYEKIGAELVKEVAKKTNDVAGDGTTTATILAQALVREGLRNVAAGANPIGLKKGIEAAVERVSEELSSVAKDVETKEQIASAASISAGDPAIGAMIAEAMDKVGKEGVITVEESNTFGLELELTEGMRFDKGYISPYFVTDTDRMEAVLDDPYILITNSKISAVKDLLPILEKVMQAGKQLVILSEDVEGEALATLVVNKIRGTFKSAAVKAPGFGDRRKAMLTDIAVLTGGQVISEDIGLKLEGTTVDLLGRARKVVITKDETTIVEGAGDADQIAGRVNQIRNEIEKSDSDYDREKLQERLAKLAGGVAVIKVGAATEVELKEKKHRIEDAVSNAKAAVEEGIVAGGGVALLQASTSAFEKLDLSGDEATGALIVERALAAPLRQIATNAGLEGGVVVEKVRGLPTGHGLNAATGEYVDMIAAGIIDPVKVTRSALQNAASITGLFLTIEVVVADKPEPAGAGGGADAAAMGGMGGMGF

SEQ ID NO: 33689 - protein, 834 aa, Triticum aestivum
  misc_feature (392)..(392): Xaa can be any naturally occurring amino acid
  unsure (1)..(834): unsure at all Xaa locations
QVCTKKQAGTGPEFPGISSTHASADGAWEFSWDQDSLLRQLKEALRAHQGRAHMDFVYIGGLRDDIPAEEQDKVALELYDRFRCVPAFLPDDLRSRFYHGFCKQQLWPLFHYMLPLSPELGGRFDRDLWKAYLSVNKIFSDKILEVINPEEDFVWVHDYHLMVLPTFLRKKFNRVRLGFFLHSPFPSSEIYKTLPVREEVLRALLNADLIGFHTFDYARHFLSCCSRMLGMKYESQRGYIGLEYYGRTVTVKILPVGIHLTQLQAVLNLPETGLKVAELMKEFPDRHRIMMLGVDDMDIFKGISLKLLAFEELLTQHPEYRGKVVLVQIANPARGKGKDVKEVQDESYAMVKRINEAFGQPDYQPVILIDRPLHFYERMAYYVVAECCLVTXAVRDGMNLIPYEYIIARQGNEKIDRILGLSPFTRKKSMLVVSEFIGCSPSLSGAIRVNPWNIESVAEAMDKALHTGEGEQALRHEKHHKFVSTHDVGYWANSFLQDLARTCQDHNKRRCWGIGFGLRFRVVALDTSFKKLAAEQLISAYRKASTRAILLDYDGTLMPESSFRKMPSSKTINMLNSLCRDEKNLVLIASTKTRATLSEWFSACEDLGLAAEHGYFIRLERDAEWETCGLATDFSWKQIAEPVMKTYTETTDGSIIEDKETAIVWCYKDADRDFGSCQAKELHDHLESVLSNEPVSVKADLNYVEVKPQGVSKGLVAKRMLSTMQELGLPPDFVLCVGDDRSDEDMFEVITTAVDGPYLSPSATVFACTIGQKPSKAKYYLDEPADIKRMIRALASVSDQELALEEGEELEEGEDPPYPFLAGDGTSSDDTWLD

SEQ ID NO: 33690 - protein, 314 aa, Methanococcus voltae
MNKIKIDVISGYLGCGKTTFIQKLIKATENERIVIIENEFGDIGIDGDILRDKGLDVVELEKGCICCTLKLNFLKSLKDIVEYMKPTRIIVEPTGMALLSQILGIVLDENNKEIQDNCKLNSVITVVDGENYLDQVELFGDFFNDQIRNADKLIISKSQYITQNELDNIVNSLKELNDNAILISENWDSIDSDKFLKIIDDNKETISKELYIGDVHKAMQGVSSVLVNFNNPLNVEAFKNAVESLKSNNYGLIMRGKGYINYMDDKNPEVRRYAEFNYVGNNYELENLNTKKSSEICIIGKDLKEKEILDLFKF

SEQ ID NO: 33691 - protein, 90 aa, Borrelia burgdorferi
MKNIKPLADRVLIKIKEAESKTISGLYIPENAKEKTNIGTVIAVGSNKEEITVKVGDTVLYEKYAGAAVKIENKEHLILKAKEIVAIIEE

SEQ ID NO: 33692 - protein, 340 aa, Xanthomonas oryzae pv. oryzae
MKALVKRETNKGIWLEQVPVPTPGPNEVLIKLEKTAICGTDLHIYLWDEWSQRTIKPGLTIGHEFVGRVAELGSAVTGYQVGQRVSAEGHIVCGHCRNCRGGRPHLCPNTMGIGVNVNGAFAEYMVMPASNLWPIPDQIPSELAAFFDPYGNAAHCALEFDVIGEDVLITGAGPIGIIAAGICKHIGARNVVVTDVNDFRLKLAADMGATRVVNVSKTSLKDVMADLHMEGFDVGLEMSGNPRAFNDMLDCMYHGGKIAMLGIMPRGAGCDWDKIIFKGLTVQGIYGRKMYETWYKMTQLVLSGFPLHKVLTHQLPIDDFQKGFDLMEAGKAGKVVLSWN

SEQ ID NO: 33693 - protein, 488 aa, Mycoplasma mobile 163K
MSEKNASDFKSIINALKKDLERINKKNGIEKKNLSQQEVFDFLISKNIDVDEADTDDLFNALIEAKVLSNVADDGDLEEIDMDDFLGEVNGTKKAKIVKDLDEIDDDDIDLSSLEQDEDDEEDNDDDSWLDEDLDKTEDYDSAELSSDDENFSLDEISDDEIVLDDLDEFIDLEYSANAKKGAKSKVKKSGNREIVIREIVKWYMSWVGKHGKVLDKEEEIKYSKQIEEDRNGRKGKKAFNALIHHNLRLVINNAKKYKNRGLSFIDLISEGNAGLIKAATKYDYRRGFKFSTYATWWVRQAITRAVADQARIVRVPVHMVETINKIIKIERELHQELGVPPTDKQIAEKYGNNFTAEKVQYIRKINIDPISLDKSIGKDDDSSFSDFVKDESVVSPLEFASQNELSGILTDILEKHLDEAERDLIKKRFGIGVDKDGNRISSHSLEELAAELQISKEKVRSLESKILRKLKHPQKRKKLKEFYKNNV

SEQ ID NO: 33694 - protein, 496 aa, Nitrosomonas europaea ATCC 19718
MADIISRNNFHSGIGSRFLINTVTVADIWRKGIFAICLLVAAFMLSASLHAKDLPDFTDLVEKHGQAVVNISTVQTQQIDANHFFPGIPNIPEDSPFYEFFRRHMQPFSGPRKYESRSLGSGFIISKDGYILTNAHVVESANEITVRLTDKREFGAKVIGTDRKTDIALLKIDADDLPVVTQGSPDQLKVGEWVIAIGAPFGFENTVTAGIVSAKGRSLAQENYVPFIQTDVAINPGNSGGPLFNMKGEVVGINSQIYSRTGGFMGLSFAIPIDVAMEITSQLKAYGKVSRGKIGVMIQEMTDELAESFNLDKSRGALVVSVEKDGPADKAGIKIRDVILRFDGKGIDTSSDLPRIVGNTKPDARVSVEVWRNGSVKKLTVTVGEMPGDDSSTTVQKQSKSGDATSRLGLALRELSASQKNELGIDSGLLVEEVYDGIASSAGIRPGDVILGFNNQDIKSIQQFNKLLDDAKKGRNIALLIKRGDITTFITIKING

SEQ ID NO: 33695 - protein, 458 aa, Mycoplasma mobile 163K
MSKNNKLVNLINHLKTQGFVYQGSEIYGGLANTWDYGPLGSLLLNNIKNEWIKYFIHNEENNFLIDAKILMNPEVWKTSGHVGNFSDPLIENKINNKRYRADHLIEEFDPLMKIETLSEIEMENFIKRNITKYEGVATDWTSIRKFNLMFETYQGILEDSKNKIYLRPETAQAIFVNFKNILRTTRTKIPFGVGQIGKSFRNEVTPGNFIFRTREFEQMELEYFVHPNDSDKAFEYYLKKCYEFLIFLGIKKDLLKIRKHAKEELSHYSSATSDIEFKFDFGWGELLGVANRGDFDLSSHSKATNEELSYFDSIENITYIPHVIEPSMGLDRLALAILTSSYEEETLEVDSRVVLKLNKFLVPYQIAVLPLVKKFSEESKELVKWLKQHNFRTTYDESASIGKRYRRQDAIGTFFALTYDYQSAENQSFTIRNRDTMEQIRINKIDLISYLTKELNGI

SEQ ID NO: 33696 - protein, 500 aa, Triticum aestivum
  misc_feature (117)..(117): Xaa can be any naturally occurring amino acid
  misc_feature (126)..(126): Xaa can be any naturally occurring amino acid
  misc_feature (170)..(170): Xaa can be any naturally occurring amino acid
  misc_feature (251)..(251): Xaa can be any naturally occurring amino acid
  misc_feature (280)..(280): Xaa can be any naturally occurring amino acid
  misc_feature (403)..(403): Xaa can be any naturally occurring amino acid
  misc_feature (414)..(414): Xaa can be any naturally occurring amino acid
  misc_feature (429)..(429): Xaa can be any naturally occurring amino acid
  unsure (1)..(500): unsure at all Xaa locations
MVLSHAASAGSSDDSVHSTFASRYVRASLPRFRMPENSIPKEAAYQIINDELMLDGNPRLNLASFVTTWMEPECNKLMMDSINKNYVDMDEYPVTTELQNRCVNMIAHLFNAPLGEXETAVGVGTXVGSSEAIMLAGLAFKRRWQNKMKAAGKPCDKPNIVTGANVQVCXWEKFARYFEVELKEVKLSEGYYVMDPEKAVEMVDENTICVAAILGSTLNGEFEDVKMLNDLLVKKNEETGWDTPIHVDAAXSGGFIAPFLYPELEWDFRLPLVKSINVSXGHKYGLVYAGIGWCIWRSKEDLPDELIFHINYLGADQPTFTLNFSKGSSQVIAQYYQLIRLGFEGYRNIMDNCQENAMVLKEGLERTGRFNIVSKDQGVPLVAFSLKDSSRHDEFEISEFLRXRFGWIVPPYTXPPTRKHVTVLRVRLXRRTFSRTLAERLVLDVEKVLHELDALPARVVANGGDAAAASASEREMEKQREVISLWKRAVLAKKKTNGVC

SEQ ID NO: 33697 - protein, 256 aa, Mycoplasma mobile 163K
MNNLGIFFGAEFIGTLILILIGNGVVASIALKKTKATGQGFLYASFGWMTAVFLGVMVSTSVASLGNINVPNGMINPVFVIINMINKNLPIEFGFIAILAEFLGAGAAQLIVISLYWNHYKATEDADAVGATFFTSPAIKSKWNNFYVEIIATFILVLILSFTSSVTSPTTTIGIITGALPGAFNVGWIIFGIAVSLGSTTGYSLNPARDLIPRILHSILPIPNKGSSNWSYSWIPSVGPIVGGLVGMLVTPGLFY

SEQ ID NO: 33698 - protein, 238 aa, Arabidopsis thaliana
MKIQCDVCEKAPATLICCADEAALCAKCDVEVHAANKLASKHQRLFLDSLSTKFPPCDICLEKAAFIFCVEDRALLCRDCDEATHAPNTRSANHQRFLATGIRVALSSTSCNQEVEKNHFDPSNQQSLSKPPTQQPAAPSPLWATDEFFSYSDLDCSNKEKEQLDLGELDWLAEMGLFGDQPDQEALPVAEVPELSFSHLAHAHSYNRPMKSNVPNKKQRLEYRYDDEEEHFLVPDLG

SEQ ID NO: 33699 - protein, 621 aa, Citrus unshiu
MKTKVWALCLILVVHSSWLASANMEGDALHSLRSNLIDPNNVLHSWDPYPCQSLHMVSCYMQMNNSVILVDLENAALSGQLVSQLGLLKNLQYLELYSNNITGPIPSDLGNLTSLVSLDLYLNSFTGPIPDTLGKLSKLRFLRLNNNSLSGPIPMSLTNISSLQVLDLSNNRLSGVVPDNGSFSLFTPISFANNLDLCGPVTGRPCPGSPPFSPPPPFIPPPPISSPGGNSATGAIAGGVAAGAALLFAAPAIAFAWWRRRKPQEFFFDVPAEEDPEVHLGQLKRFSLRELQVATDSFSNKNILGRGGFGKVYKGRLADGSLVAVKRLKEERTPGGELQFQTEVEMISMAVHRNLLRLRGFCMTPTERLLVYPYMANGSVASCLRERPPSQLPLDWPTRKRIALGSARGLSYLHDHCDPKIIHRDVKAANILLDEEFEAVVGDFGLAKLMDYKDTHVTTAVRGTIGHIAPEYLSTGKSSEKTDVFGYGIMLLELITGQRAFDLARLANDDDVMLLDWVKGLLKEKKLEMLVDPDLQNNYVEAEVEQLIQVALLCTQGSPMDRPKMSEVVRMLEGDGLAERWDEWQKVEVLRQEVELAPHPNSDWIVDSTENLHAVELSGPR

SEQ ID NO: 33700 - protein, 232 aa, Lycopersicon esculentum
DGKDQNTSKKLKGCSGGKAGESGKAASGSGNDGGATRSAESESRVTKDENDENDNHEFSADKNRSFDLMLANGANAQTNPATGNPVAMPAFNLNIGMDLWNAPSGGPGMIKMRSNQSGVSPAPGMGREWIQDERELKRQKRKQSNRESARRSRLRKQAECEELQHKVETLSNENHGLKEELRKVSEECEKLTSENNSIKDELTRLYGARAVSKLESNANAMALQSNVEEAKS

SEQ ID NO: 33701 - protein, 1043 aa, Vibrio vulnificus CMCP6
MFTATDVLKPEFVAQPLDKLWALISPLYMVDESQWLEQLLPLATPSAEEKQAIASRTTQLIEAIRADKKSIQLIDALLLEYSLDTHEGILLMCLAEALMRIPDAATADALIKDKMSVADWKSHLKNSESVFVNASTWGLMLTGKVVGLGDDETQSASQALNRLVNKLSEPVIRKAMYQAMKIMGHQFVRGRTIEEAQKNGRPMRDKGFTYSFDMLGEAALTTADANKYFKDYLMAIEAVGRETYGNDTSPAPSVSIKLSALHPRYEVANEHRVMSELFDTLAQLLKRAVELDVAITIDAEEADRLELSLKLFEKLYRSETVKGWGKFGLVVQAYSKRALPVLVWLNALAKEQGDLIPLRLVKGAYWDSEVKWSQQRGYDNYPVYTRKEATDVAYLACARFLLSDDVRGNIFPQFASHNAQTVSSIATMATHSDYEFQRLHGMGDSLYNHVMEQYRQPVRIYAPVGSHKDLLPYLVRRLLENGANSSFVHRLVDARCPVAELTKHPVEALTSFETLNNTKIPLPAAIFPERKNSYGVNVDIESEAKPFEAQVESFLSKQWLAGPIINGASLAESMIKDGQAESVTAPYDRRIQVGQIAFANLDHVSQAIDIAQAAFADWNRTPLVEKARCLDNLADLMEANLAELVALCHQEAGKTLHDSIDEVREAVDFCRYYAKQAQNLQPFELEGFDGVKRVASREGLGVFVCISPWNFPLAIFLGQVTAALVAGNTVVAKPAEQTSLIAVRAVELMLQAGFPAGVVQLIPGRGADIGSALTSHPAIAGVAFTGSTATAQRINVTLAQREAKPVPFIAETGGQNAMIVDSTALPEQVVRDVIRSAFASAGQRCSALRVLFVQQDIADRVIGLIQGAMNELSVGVPHRHKTDVGPVIDARAKEKLLLHIEQMNQTQRPIAQLTLADDCQHGDFVAPTAFEISGIDVLKEEQFGPILHIVRFKASELTRVVEQINQTGFGLTMGIHSRNETTYRWIEKHARVGNCYINRDQVGAVVGVQPFGGQGLSGTGPKAGGPHYLYRFTQVQFNQTENA

SEQ ID NO: 33702 - protein, 247 aa, Mycobacterium bovis AF2122/97
MSSSIEIFPDSDILVAAAGKRLVGAIGAAVAARGQALIVLTGGGNGIALLRYLSAQAQQIEWSKVHLFWGDERYVPEDDDERNLKQARRALLNHVDIPSNQVHPMAASDGDFGGDLDAAALAYEQVLAASAAPGDPAPNFDVHLLGMGPEGHINSLFPHSPAVLESTRMVVAVDDSPKPPPRRITLTLPAIQRSREVWLLVSGPGKADAVAAAIGGADPVSVPAAGAVGRQNTLWLLDRDAAAKLPS

SEQ ID NO: 33703 - protein, 283 aa, Lycopersicon esculentum
MPPYGTPVPYPALYPPAGVYAHPNIATPAPNSVPANPEADGKGPEGKDRNSSKKLKVCSGGKAGDNGKVTSGSGNDGATQSDESRSEGTSDTNDENDNNEFAANKKGSFDQMLRDGASAQNNPAKENHPTSIHGICTMPATNLNIGMDVWNASAAGPGAIKIQQNATGPVIGHEGRMNDQWIQEERELKRQKRKQSNRESARRSRLRKQAECEELQRRVEALSHENHSLKDELQRLSEECEKLTSENNLIKEELTLLCGPDVVSKLERNDNVTRIQSNVEEAS

SEQ ID NO: 33704 - protein, 406 aa, Lycopersicon esculentum
KGVKGDEDSNSQEQASSTATGTANPEWPGFQGYSPMPPHGFMASSPQAHPYMWGVQHLITLWYSTTSLCHYVSHGGIYAHPSMPPGSYPFSPFAMPSPNGVAEVAVNTSSNTELDGKSSEVKEKLPIKRLKGSLGSLNMITGKNTELGKTSGASANGVYSKSAESGSEGSSEGSDANSQNESPMKSAGRQDSAEERSQNRNSAHSSQMRTSAPHSLSTKLCNHANVSCGCWRYSWPHNQLEYWYGLLECRSFADIPAIHGKVPSASVAGGIGNAGSRDIVQSQMWIQDERELKRQRRKQSNRESARRSRLRKQAECDELAQRAEVLKEENASLRAELSCLRSEHDQLASQNASLKERLGEVSGRDDPRPSRKYIHLNKDTQTSSQTEPTGVSEVLARLCDEMAYYN

SEQ ID NO: 33705 - protein, 349 aa, Bradyrhizobium japonicum USDA 110
MTSTALAATLFGPEDLRMIEHPLDKLASGMVRIRFGAGGICGSDMHYFRHARTGDFVVKSPLVLGHEISGEVVEISGSAANLKVGDRVAVNPSRWCGHCVACREGRPNLCENIYFMGSASKTPHMQGGFANYFDAIPAQCVKIPDHVSYQAAALAEPLAVCLHAVARAGNIEGKRGIIFGAGPIGLLTMLAAHRAGMADITVADIAPAPLAFASRLGASHVENVSGGEEGLKAQAAARPYDVAFEVSGTAAGLASAIGIVRRGGVVVQIGNLPGGQIPTPSNAVMAKEIDLRGSFRFGFEFMTAVELISAGSVDVLSLVTAERPLSTAPDALRLALDRSQSVKVVLTAN

SEQ ID NO: 33706 - protein, 459 aa, Bacillus cereus G9241
MNEHYDKQRQSLLGRDFNDNGERNEQAILHSQTVGSRGPVLEQDSVLHEALQEFIHEKILERPVHVKGFGAFGYFQTIYPMPEHTKLNFLQNANEKVPIMVRFSLAVSTKGTPDTARNVRGFSTKFYTKEGIFDLLCNHIPVFSVRDPMRFPETIQALSPSPKNNLIDPNRFWSFVARAPESIHFVVRLYSDNGTVKSLRHMPGHSVNTYVWRNAEGNRKYVKYHWYPFEGVQFITSEEANKLAAENPDYSGKDLYDAIANGKPVEYGLYVQLMDPKDEAHLSYDPLDDTKIWDEKVYPLIPVGKMVLNKNPENYMEQVEKVAFSPSNLLDGAELSDDKMLQGRANIYSDSQRRRIGPEFRKLAINQQQDWAPANQITSGDGRYVEGKLERTSITKQDDFTQAGEFYTKLKPIEKEHLAENLASDLKVISDDIRKVVLGYFHNVSADLVKKIESAMQKL

SEQ ID NO: 33707 - protein, 270 aa, Frankia sp. EAN1pec
MRVVLLQIACPDDESPADRGARVLADLRGLGAGEADLVVLPELWRTGYFHFDRYPGDAEELAGPTVGALREVAAERDLHIVTGSIVERAPGGALHNTTALVGPDGALLGRYRKIHLFGHESAEATLLTAGDDVFAAPTPLGAVGLATCYDLRFPELFRLLVDRGAEVVVVVSAWPLARLEHWELLVRARAVENQVFVVACNAAGRHGGVELAGTSLVVDPWGTVLARAGTGPQTLRAVLDRARLAAVRADFPVLASRRLASPDVGRPRLM

SEQ ID NO: 33708 - protein, 237 aa, Zea mays
  misc_feature (163)..(163): Xaa can be any naturally occurring amino acid
  unsure (1)..(237): unsure at all Xaa locations
MAGADVDVGTELRLGLPGGGADAAKAAKRGFEDTIDLKLKLPTAGMEEAAAAAAAKPEPAAEKAKRPADAPAADAEKPPAPKAQAVGWPPVRSYRRNVMTVQSVKSKKEEEPEKQQSAANAGGNGSAFVKVSMDGAPYLRKVDLKMYNSYTELSVALKKMYPXSILPGNNMNEGKLVDPVSGADVVTTYEDKDGDWMLVGDVPWEMFVESCRRLRIMKSSEAIGLAPRTKDKCKNRS

SEQ ID NO: 33709 - protein, 800 aa, Glycine max
  misc_feature (441)..(441): Xaa can be any naturally occurring amino acid
  unsure (1)..(800): unsure at all Xaa locations
MYKLSSIQCVAPFTISLCTLSFSSSSLRFSVRATSSRAMASHIVGYPRMGPKRELKFALESFWDGKSSADDLQKVAADLRSAIWKQMADAGIKYIPSNTFSLYDQVLDTTAMLGAVPSRYNWNGGEIGFDVYFSMARGNASVPAMEMTKWFDTNYHYIVPELGPDVKFSYASHKAVDEYKEAKVLGVNTVPVLVGPVSYLLLSKPAKGVEKSFSLLSLIDKILPVYREVVAELKAAGATWIQFDEPTLVKDLNAHQLQAFTHAYAELESSLSGFNVLIETYFADVPAEAYKTLTSLKAVTAYGFDIVRGTKTLDLIKQGFPSGKFLFAGVVDGRNIWANNFASSLNTLQALGDIVGNDKVVVSTSCSLLHTAVDLVNETKLDQEIKSWLAFAAQKVVEVNALAKALSGQKDEVFFSANAAALASRKSSPRVINEAVQKAAXAALKGSDHRRATNVSARLDSQQKKLNLPVLPTTTIGSFPQTADLRRVRREFKANKISEEDYIHFIKEEINNVVKLQEELDIDVLVHGEPERNDMVEYFGEQLSGFAFTANGWVQSYGSRCVKPPIIYGDVSRPKPMTVFWSSTAQSLTKRPMKGMLTGPVTILNWSFVRDDQPRFETCYQIALAIKDEVEDLEKAGITVIQIDEAALREGLPLRKSEEAFYLNWAVHSFRITNCGVEDTTQIHTHMCYSNFNDIIHSIIDMDADVITIENSRSDEKLLSVFREGVKYGAGIGPGIYDIHSPRIPPTEEIADRINKMLAVLESSILWVNPDCGLKTRKYTEVKPALTNMVAAAKLIRNQL

SEQ ID NO: 33710 - protein, 605 aa, Fragaria x ananassa
MDTKIGSIDVCKTENHDVGCLPNSATSTVQNSVPSTSLSSADATLGRHLARRLVQIGVTDVFTVPGDFNLTLLDHLIAEPGLTNIGCCNELNAGYAADGYARSRGVGACVVTFTVGGLSVLNAIAGAYSENLPVICIVGGPNSNDYGTNRILHHTIGLPDFSQELRCFQTVTCFQAVVNNLEDAHEMIDTAISTALKESKPVYISIGCNLAGIPHPTFSREPVPFSLSPKLSNKWGLEAAVEAAAEFLNKAVKPVMVGGPKLRSAHAGDAFVELADASGFALAVMPSAKGQVPEHHPHFIGTYWGAVSTAFCAEIVESADAYLFAGPIFNDYSSVGYSLLLKKEKAIIVQPDRVTIGNGPTFGCVLMKDFLLGLAKKLKHNNTAHENYRRIFVPDGHPLKAAPKEPLRVNVLFKHIQNMLSAETAVIAETGDSWFNCQKLKLPPGCGYEFQMQYGSIGWSVGATLGYAQAVPEKRVISFIGDGSFQVTAQDVSTMIRNGQRTIIFLINNGGYTIEVEIHDGPYNVIKNWNYTGLVDAIHNGEGKCWTTKVRCEEELIEAIETANGPKKDSFCFIEVIVHKDDTSKELLEWGSRVSAANSRPPNPQ

SEQ ID NO: 33711 - protein, 587 aa, Oryza sativa
MSRVLLLRVRLTAGNRAVTGLTARVRKGGWVLDLRGLESRGDLLVGSALSPEEEEEEEGFLLRCGGRVVCGFSPCVWDLRAMAAAGGGGDAKYNSYKAAGLRGAILEAAHVSCLEDRYALGPQLGWGQFGVIRSCSDMVTGEALACKSIAKDRLVSPDDVRGVKLEIEVMARLSGHPNVVDLKAVYEDEASVHLVMELCAGGELFHRLEERGCFSEHEAAALFRYLMEVVAHCHSKGIVHRDLKPENILLVSKSPSSPIKLADFGLATYIQPGRSLSGMVGSPFYIAPEVLAGGYNEAADVWSAGVILYILLSGIPPFWGKTKSKIFECIRSTELRFPSDPWDKVSDSAKELITEMLRRDPRQRLTAKQVLEHSWIQDHADQSQDSCGHCHEINLRGEDAGSCSFSTPLASCSRDVSFNTGGPVACQSMSEEACSPTFACRSSFSAFVAENAPSCALSGFSFGGVCEPCNAVFPSPVASMPSFSFFCGQEPGEPESSPDGDALGEKAHCDATVVALVSSSAPRTAEVLRAAVRANPSRAIGMNSRRNHTIGAGEREHLDVAVAESVIRWASCTNLSTTHSLRASLVC

SEQ ID NO: 33712 - protein, 2223 aa, Streptomyces nanchangensis
MVSEEKLVEYLRRVTTELHDARTRLRELEEGEQEPVAVVGMACRFPGGVRSPEDLRRLVLSGGDAIGDFPTDRGWDLDGLFHPDPAHFGTSYVSQGGFLYDVDRFDAGFFGISPREALAMDPQQRLLLELSWEALESAGVVPGALRASRTGVYVGVSSEDYISGLPQIPEGFEGYATTGSLTSVISGRVAYTFGFEGPAVTVDTACSSSMVAIHLAGQALRQGECSLALAGGVTVLSTPLMFTEFCRQRALTPDARCKPFAAAADGTGFSEGAGLLLLERLSDARRNGHEVLAVLRGSAINQDGASNGLTAPNDVAQESVIRDALARAGLSGADVDMVEAHGTGTRLGDPIEAEALIATYGADRPADRPLYLGSIKSNIGHTHAAAGVAGAINTVMALRDGKLARTLHIDEPTRHVDWSAGTVRLLTDPYDWPVADRPRRAAVSSFGVSGTNAHVILEQAPDAGAQQDARQRGGDTFHGVVPWPVSGRTEAALRDQAARLGAFLTADGATANGAATGGVADVGWSLAMRRTAFEHRAVVVGRDRSDLLAALEGLAADEPGPAVVRGVAADVGAGPVMVFPGQGSQWLGMGVELLDSSPVFAARIAACERALAAHVDWSLTDVLRGARGAADIGRVDVVQPVLWAVMVSLAAVWEAHGVRPSAVVGHSQGEIAAACVAGAMTLEDGARVVALRARALRALAGYGAMASLGCGVEETERLTAVHAPDVAVAAVNGPSSTVVSGPSEQVEKLVAAVRADGLRARAIDVDYASHGPQVDRIADELADVLAGVSGAATDTAFYSTVTGARMDASGLDAGYWFTNLRQPVRFAEAVQALLDADYRVFIEVSAHPVLLLGLQECFEAAGRPAVAIGTLRRDEGGPERLCRALAEAHVAGVAVDWASWYADGPAPAAVPLPAYAFQRERYWLPAGAGSGPGDVAGAGLTAVGHALLPVSVRLADGSLVLTGRLPEAARAGWLAEHLVADLPLLPGTVLVEWVLRAADEAGCGGVEELALQVPVALPVSGGLVIQVVVDAAEGDGRRPVRVHSRPEEDSGAPDAWVCHVSGTLLPGVAGPVPPSGPGGAWPPPGARPAAIDGFYERAEAAGYGYGAFFRGLTNVWHDGEDTLAEVVLPKEAAEQAGGFGIHPALLDAAMQPVLLAGQLRQCAAAAGADTASGTVLLPFTWSGVRLWAGGATRLRVRLSPRPEGLRVLLADATGAPVLTADAVALRETGVQQLRASSRVRGSHGLFAVEWVPPLSATAGGTAPATLAVLGDDAPDLADADRYPDLDALFRAVADGAPAPDVVIASVRTGNDPAGSDTGLATARRTLTLAQEWLAGSGADGARLAVVTRSAIRTGDDGQERVVPSAAAVWGLMRSAQTEHPGRFVLIDEDTDSTENILEAVRTDEPQLALRGGRALVPRMARVDAEPELTAPSGERAWHVAAGKTGPDDLTAVPSPRASAPLAPGQVRIAVRAAGLNFRDALIALDMYPDASASIGSEGAGVVLEVSEGVAGVAVGDRVMGLFNDAFGPVAVADARMVAPVPDGWSFREAAAAPVAFLTAWYGLVDLGGLSSGETVVIHGAAGGVGMAAVQVARHLGAEVFATASPAKHPVLEGMGVDAAHRASSRDLGFEAAFSSATGGRGVDVVLNSLAGEFTDASLRLLAPGGRLIEMGKTDVRDPDQVAREHSVAYRAFDLIADAGPERIGQLLAALGERFADGAFTPLPVTGWRLGQARQALRQLSQARHTGKLVLDVDPAPDPDGTVLITGGTGTLGGLIAEHLVRSRGVRHLLLLSRRGPDAPGAEELTARLTELGARVRVAAVDVGDATALGEAVAGVDPAHPLTGVVHAAGVVADAMLPSQDDERLVAAWSAKAAAAARLHDATAGLPLGMFVLFSSFASTLGTAGQANYAAANAYCDALVERRHAEGLPGVSVSWGLWSAASGLTGGLTEADVARIARQGIVPNSTEQGYDLFDAALGHGRPALLALNLDTRALAAQPVAALPAPLRALAADAQAAGARSGGAAARPTAAAAEEPADWAARLRALAPAEQRRLLTDLVRRHAATVLGHADPEAVPADAAFKELGFDSLTAVELRNRVTAATGLRLPATVIFDYPEPGALAERLRTELAPEEGASATAPDLYAPVLSRLTGLEETLAALASSGVNGGVNGGVADPGAVTARLESLLADWKAAHAPSRNGGTAAERLEAATTDQVLDFIDKELGVQ

SEQ ID NO: 33713 - protein, 4032 aa, Streptomyces nanchangensis
MSGGAVTTETNEERLVDYLKRVAADLHDTRARLREVEDGQREPVAIVAMACRYPGDVASPEDLWDLVAARRHAMTAFPDNRGWDLERLFHPDPDHPGTSYAREGGFLHDADLFDPEFFGISPREAAAVDPQQRLLLEVAWEALERAGIAPGSLKGAPVGVYAGTALPGFGTPHIDRAAEGYLVTGNAPSVLSGRVAYTLGLEGPAVTVDTACSSSLVAMHLAAQALRQGECELALAGGVTVMTTPYVFTEFARQRGLAADSRCKAFSKGADGTAFAEGAGLLVLERLSDAQRNGHQVLAVMRGSAINQDGASNGLTAPNGLAQQRVIRQALAGARLSPADVDVVEAHGTGTTLGDPIEAQALLATYGQERPEGRPLWLGAIKPNLGHTQGAAGVAGVIKMVMALRNASLPALLHADRPTSVVDWDGGAVRLLAEPVAWPAGDRRRRAGVSSFGISGTNAHLILEEAPPRPDTELPASVPQRPEGTVVPWVVSARGAVSLRTQAAALAEHMAAHPDTPVDAIGWSLATTRSPLDHRAVVLGADRGELSARLADLAEGRTHPDVTRASAPARLGGSAFLFTGQGSQRPGMGAQLYRAYPAFAAAFDEACAALDPHLGRSLLELVFAPADTDGDGDADRASALDATEVTQAALFAVEVALYRLVESFGVVPGYLAGHSVGELVAAHIAGVLSLPDAARLVAARGRLMQALPEGGAMVALEAAEEEVALLLAGRADQVALAAVNAPTSVVVSGDEEAVEEIARTIRERGHRTRRLRVGHAFHSPRIDPMLEEFRQVAASLTYSQPRIAVVSNVTGALAGAEQLCDPDYWVRHARQPVRFRDGIAALRAEGVTRFLELGPDAVLTAMARDCLTSEAAPEVAAGESAQDAGTASGPSAPVLATVLRKGRDEPRTLLTALAQLHVDGESVDFSASFPATTQATDLPTYRFDRRRYWRDAPQAEADVRAAGLEASDHPLLRAALEPADGGLLLTGRLSLRGQPWLADHAIVDAVPLPGTLFVELALQAGERVGCDLIDDLTLEAPLLLPPVGAVDLQVAVGATDAAGRRAVTVYSRPSGGGSEGWESSADPGVADEPGDGPYGPWRRHATATLGTAPTGVPEPAASPAQWPPAGAEAIDVAGLYERLAAEGYRYGPAFTGLRTAWRVGEEMFAEVGLAPGQRGDGGAYAVHPALLDAALHPIGALFTGEDQAGGAPGTVRLPFSFGGVRLLARGASRLRVRITPTGPDTVTMRLSDDTGAEVVAVDSLTLRTVSAQRWRSGAVPADRPLYRLDWDAFALPAAATTAPDRWAVLAADDTNATDTATASLPAEHVARHPDLAALSASVAAGAPAPDLVVMACLGAPYDTSDDGDEPPSQVRTATHRVLARLREWLTDDALAASRLVVLTAKAVAADPADAPPDLAGAAVLGLLRAAQAEHPGRIVLVDTDGISASRDALAAAVAAAVAAGEWQLALRDGRALVPRLILAHPDPDAAPVVLDPDGTVLVTGGTGSLGRLLARHLVEHHGARHLLLVSRSGPAAEGIEAFAAGLAADVRIESCDTTDPEALAALLATVPGEHPLTAVVHTAGVLDDGVVTSLTPEQLDTVLAPKVDAAWQLHRLTRGADLASFVLFSSAASVLGSGGQGNYGAANAFLNALAEHIRAAGGPATSLAWGLWGVDEGMTEHLATADRARMARSGTAAMSGEAGLARFDAALATALPVLVPARFDLAVLREQAAGGALPPLLRRLVRLPVRTAAAVEASPSWAGRLAGLPETEQDRVIGELIRDRIAAVLAHPEPETLELGRTFAQLGLDSLTALELRNAIHEATGVRLPATAIFDYPTPETLVSHLRTELLGATATTAATAPLPPGAGAPARSGSADDPVVIVGMACHYPGDVHSPDELWRLVADGVDAIGPFPEDRGWDVAGLYDPDPERTGKSYTREGGFLPEAALFDAEFFGISPREALATDPQQRLLLETAWQAFEHARIDPAALRGSRTAVVTGIMYDDYGARFLGRIPEGYEGQIMTGSTPSVASGRVAYTFGLEGPTLTVDTACSSSLVAMHLAAQALRQGECDLALAGGVTVMATPNTFIEFSRQRGLAPDGRCKPFAAAADGTGWSEGAGLLVLERLSDARRNGHRVLAVLRGSAVNQDGASNGLTAPNGPSQQRVIGQALAAAGVDPAGVDVVEAHGTGTMLGDPIEAQALLATYGRNRPAEQPLWLGSIKSNIGHTQAAAGAAGIIKMVMALRHGRLPATLHVDEPSPHVDWASGSVRLLTEATDWPEADRPRRAAVSSFGISGTNAHLILEQAPDQPEPLPEQSESATAGGIVPFVLSARTAEALRAQAANLAARLPSAGVAEVGWSLATTRSAFEHRAVIVAEDRDALLAGLEKLAADEPDPAVVAGTATTAAAGPVFVFPGQGSQWRGMGVELLDTSPVFAARIAECERALAPYVDWSLTAVLRGSDTTTDPHRVDVVQPTLWAVMVSLAALWQHLGIAPAAVIGHSQGEIAAACVAGALTLDDAAKVVALRSQALRALAGHGTMASLTLGADDTAGLLEELGERADDVTVAAANGPVTTVISGAVEQIATVLAAAEAHGARTRTIDVDYASHGPHVDRIREDIVSALSGLAPTASEVAFYSTVTAERLDTAGLDADYWFTNLRRPVRFADTLATLLAHGHRHFIEVSPHPVLIPGMQDGFEAADAAATAVPTLRRDQGGPHQLAQAVARAYTAGLAIDWAPWYPARPYTTDLPTYPFQRRRYWLGMDGGPGDLRSAGLVSVSHAQIGAAVELADGGLVMTGRLPAAGSGGWLDDHVVADTPLVPGTALVEWVLRAADEAGCGGIEELALHVPMTLPASGGLRIQVVAYAPDGDGRREVRVHSRPDAEDGSSPWTCHATGHLSPTAPGAADPAPAGVWPPRDAEQVDVADFYGRAEAIGYGYGPAFRGLTAAWRQGDDLLAEVVLPEAAHEGADGFALHPALLDAALHPLALDGQGEDGRMRLPFAWSGVSLWATGARAARVRMSPLEHGFRLVVADAAGRPVLSAESVVVRPTSARQLRDAGARRVDGLYEVAWVALPPSSDTVAETETRGVEGWALLDGGPLPFDPSKAGSLPRHADIDALLTAPALPSTVLVGVSGPVGAAGDENSAEGALAVTTGVLTSARRWLETPELADARLVLVTRGAVAAAETDDGPDPAAAAVWGLLRSAQAENPGRFLLCDIDDGAGPDDVLGAVTRAVALDEPQVAVRGERVLTPRLERAGAAELVPPPGEPAWRLSADDTGTIDSVSVVACPEVLEPLAPGQVRIAVRAAGINFRDVLIVLGMYPDEGVFRGSEGAGVVLDVADDVTSVAVGDRVFGLFEGAFGPVAVADARAVVPVPPDWTDQQAAAVPTTFLTAWYGLVDLAGLKAGESVLIHAATGGVGTAAVQIARHLGAEVYATAGPGKHAVLEAMGIDEAHRASSRDLDFEDAFRTATGGRGVDVILNSLAGEYTDASLRLLTGGGRFIEMGKTDKRDAEQIADTYSGVRYRFYDLVPDAGLDRVAEMLTTLAGHFAQGVLAPPPVRAWPLTEARQALRQMSQARHTGKYVLDMPRTLDPDGTVLITGGTGTLGALVAEHLVTNHHISHLHLLSRRGPDAPGSADLAARLTELGATVRITATDTTDPQALRQALDTVDRDHPLTGVIHAAGALDDAVLTAQTPERLASVWAAKATAAANLHRATKDLPLAMFVIFSSAAGTLGTPGQANYAAANAYCDALAVRRRRAGLPATSIAWGLWAATSEMTGHLADADLARMSRTGFTPLATPMALALFDAAGRHGAATPLALDLDPRTLGAQPSDAVPAVLRTVAAAGAPVRRTAAVAQSTDWAGRLAALSAAERHRELVNLVRTHAATVLGHSDPAALRADTSFKELGFDSLTAVELRNRLSAATGLRLPAALVFDYPDAETMARFLDQKLAPGDRTEAAAVDHLAPVLNDLARLESTLGSHDVDGKARETVAGRLHALLSRLEGSTASAADIDGEALESASDDEMFALIDQQLGSS

SEQ ID NO: 33714 - protein, 472 aa, Escherichia coli
  misc_feature (450)..(450): Xaa can be any naturally occurring amino acid
  unsure (1)..(472): unsure at all Xaa locations
MVTINTESALTPRSLRDTRRMNMFVSVAAAVAGLLFGLDIGVIAGALPFITDHFVLTSRLQEWVVSSMMLGAAIGALFNGWLSFRLGRKYSLMAGAILFVLGSIGSAFATSVEMLIAARVVLGIAVGIASYTAPLYLSEMASENVRGKMISMYQLMVTLGIVLAFLSDTAFSYSGNWRAMLGVLALPAVLLIILVVFLPNSPRWLAEKGRHIEAEEVLRMLRDTSEKAREELNEIRESLKLKQGGWALFKINRNVRRAVFLGMLLQAMQQFTGMNIIMYYAPRIFKMAGFTTTEQQMIATLVVGLTFMFATFIAVFTVDKAGRKPALKIGFSVMALGTLVLGYCLMQFDNGTASSGLSWLSVGMTMMCIAGYAMSAAPVVWILCSEIQPLKCRDFGITCSTTTNWVSNMIIGATFLTLLDSIGAAGTFWLYTALNIAFVGITFWLIPETXNVTLEHIERKLMAGEKLRNIGV

SEQ ID NO: 33715 - protein, 544 aa, Providencia stuartii
MTPGEIKRLYFIIRVFLSYGLDELIPKVKLTLPLRIGRFGFFWIKNQHKGKELGERLRLALQELGPVWIKFGQMLSTRRDLFPLAIADQLSLLQDKVASFDGKLARRYIEESLGGPLEQWFDDFDEKALASASIAQVHTAKLKENGKEVVLKVIRPDILPVIKADVKLMYRIANWVPLLPDGRRLRPKEVVREYEKTLIDELNLLRESANAIQLRRNFENSSMLYVPEVYADYCRENVMVMERIYGIPVSDIAALKAQGTNMKILAERGVKVFFTQVFRDSFFHADMHPGNIFVSYEHPEDPLYIGIDCGIVGSLNKEDKRYLAENFIAFFNRDYRKVAELHVDSGWVPADTNVEDFEFAIRTVCEPIFEKPLAEISFGHVLLNLFNTARRFNMEVQPQLVLLQKTLLYIEGLGRQLYPQLDLWKTAKPFLEDWVHSQVGIPAITQALKEKAPYWAEKMPEIPDLIYGALRQHKFLQSNIEQLSEQLKQQRNKQRKSQYLLGIGATLILCGSLFFISASNRMAIAFMSAGALSWIIGWYKSGKS

SEQ ID NO: 33716 - protein, 3979 aa, Streptomyces nanchangensis
MPDEERLVDYLKRVATDLHDTRRRLREVEERHQEPIAITAMTCRFPGGVDSPEALWDLVASGGDVIGPFPADRGWDLEGLYHPDPDHPGTTYTREGGFLRDADTFDSGFFEISPREALVMDPQQRKLLEVTWELFERAGLDATSLRGSRTGVFIGAATMGSGTPSGPARKESEGYVGVAPSMLSGRLSYTFGLEGPSLTVETACSASLVAMHQGIHALRQGECGLAVVGGVTIMSSPAVFIGFARQRGLAPNGRCKPFAAGADGTGWGEGAGLVLLERLSDARRNGHQVLAVIRGSAVNQDGASNGFSAPNGPSQQRVIRQALLNARLSSAEVDAVEAHGTGTRLGDPIEADALHATYGQRRPADRPLLLGSVKSNIGHPQAAAGVAGVIKTVMAIRHGLFPATLHIDEPTPHVDWGSGAIRLVTEPVEWPETDHPRRAGVSSFGVSGTNAHVIIEQAPDPDTSETDAGETDAGETARDAEGAAPARQAVVAGGVVPWMLSARDEAALARQALRLAEVAEGDPAADVTDMGWSLATTRARFEHRAVVVGTDRATLLDGLAKLAADEPDPAVVTATAGPIGAGPVFVFPGQGAQWPGMARELLDSSPVFAARIAECERALGPYVDWSLTEVLRGTDPATDPGRDDVIQPVLWAIHVSLAAVWQSFGITPAAVVGHSQGEVAAACVAGALTLDDAAKVIALRVQALRPLIGHGAMASLSLGAEDTARLLAELGAAAGDVAVAAVNGPHATVVSGSPDHLDAVLETARERGARTRTIDVEYASHGPHVDRIRDDIVSALRDVTPVESEIAFYSTVTAERLNTAELGTEYWFDNLRRPVRFADAVGRLLADGYRAFIQCNPHPILSTSLQDIFEESGTRAASLATLRRDHGGAHQLALALAQAHAAGVEVDWRPWFPADRTPRTVELPTYPFQGKRYWIPVGGSGAGDVSAAGLRAVDHPLLAAAVSLPDGGMVLTGRLSATTGAGWLADHVVGDTTLLPGAAMVEWALQAAHEAGCAAVEELALQTPFVLPASGALRVRVAVGPADDEGRRTVDVYSRPDELDTETPDGWVCHAMGVLAPEAPEDRTAPPDAPAAPWPPRGAEPLDVTDFYERAAAGGYGYGPAFRGLTAAWRDGADLLAEIALPEAAGEGADRFGIHPALLDAATHPTILGGGREDGSDAGQVWLPFAWSGVSLWATGARRVRVRIFPEDNGQRISLTDETGAPVLEAASVAARPTGLAELRALGARAAEGLFVVDWVPARGGTGDAPPPDDGGWATVGGGGVRLAGVADHADLGALLAAVDDGAPVPTVVLHPVPATATPDDGLAAVGGVLALIREWLAEPRWLDSRLVLVTSDAVSAGDDEGAVDPGGAAVWGLVRSVQAEHPGRFTLLDVGGDTDADAGGGESLAEAVRRSIDADEPQVVVRAAGTLVPRLVRTAPAAEADTPELSGGTVLVSGGTGVLGGAAAEHLVRAHGVERVLLLSRRGPNAPEAAELVRRLTALGAQVDVAAVDVADRAALAETLRTIPDSHPLLGVVHSAGVTDDALVESWDADRLTRVWEPKATGAWHLHTLTRDLPLRMFVVFSSAAGVVGNSGQAGYAAANACTDALIAHRRAAGLPGTSVAWTLWEQASAMTEHLTEADLSRLGTLGMRPLATSRALGLLDAALHVTHPVVVAADLDATRLGPDSPAMLRALARPARRRAMEHHATGPALAGRLAGLDATARRDLLLQTVRQMVTVVLGHSSDAAIRAEAAFKELGFDSLTAVELRNRLAGATGLRLPATLVFDYPTPLALADHLLERLTATASPASPRAVPSRAGAADEPIAVVSMACRFPGGVTTPEELWDLVAADRHVLGPFPTNRGWDLANLFHPDPDHPGTTYASEGAFMYDADGFDAAFFGINPREALAMDPQQRVLLETSWELLERAGIDPHTLKDSLTGVYAGVMYHDYGNGLPPGDPRLDGYAGLSGTSSIIAGRVAYTLGLQGPAVTVDTACSSSLVTMHLAAQALRQGECDLALAGGVTVLATPDVFTGFSRQRGLAPDGRCKPFAAAADGTGFGEGVGLVLLERLSDAHRNGHRVLAVLRGSAVNQDGASNGLTAPNGPAQQRVIRQALAGAELDPADVDAVEAHGTGTTLGDPIEAQALLATYGQDRPTDRPLWLGSIKSNIGHTQAAAGVAGVIKMIMAMDHGRLPTSLHIDEPSPHIDWTTGNVRLLTEPADWPATDRPRRAAVSSFGASGTNAHLILEQAPDRPGDGPAGDRPAPVAVAWPLSARTDEALRTVATALADRLGADDTTPVTDVGWSLATARATFERRAVIIGSDRQEMTAALDALARDLPHPNLVAPLPVAPPAGDTVWLFSGQGSQRPGMGAELHERFPAFADTFDEICALIDPHLDHPLRDIVFATHPDHTDLLNHTTYTQAGLFAVQVALARLLEHCGLRPDTVIGHSIGEITAAHIAGVLSLQDACHLVANRATLLGKLPPGGAMTAIEATAEEITQTLTPYHGQVTIAALNAPTSTVISGPEELVAQLTRRWKERGRRTKTLTVSHAFHSPLMEPALNDFRHAIDHLTYHQPTIPLISNLTGEPATQDIATPDYWVRHIRQPVHFHPAITHIAPHTAAFLEIGPDATLIPATQNTLDTLENQPTSAPQLIPTLTRKQPDTQALAHALARLHTLTPLNWHPWYTDQPTPTTIDLPTYPFQHERYWLTPTHAGPTTPGATPLTHPFLAATAPLADGGLLLTGQVPSADHAGWHTEHTIAGATLLPATALLEIALHAADHTTTPHIDELILQHPLTLDPSHPLALQAIVSPADDSGHRALHIYTRAPSSPTAEWTHHATATLGGEPTAERPTTEAEAAWPPPGAKAVDITGFYDRAAADGYHYGPSYQGLQTVWRQGEDLLADITLPTAGTPDHTTDSLAIHPALLDAALHPLLATADNPDGEIWLPFTWSGVTLHATGATHVRARITPQGDNDYRLTLTDATGQTVLTAGTIASRPLDTARLRTRGPGDGLYQVRWTAMPIPAGSATAVADDWAMLGDAGLRDGGLADAVAPLASYPDVAALVAAMDDGTPVPSVVLTGLAPADGGDADVVVEVLTTAREWLAEPRLAESRLVVVTHDAAVAEDTDSGPDGGDVDPVAAGVWGLIRSAQSENPGRFTLLDLTRRDAGTAPDVVEVLRAAMDADEWQVAVRGGRALVPRLTAADAAAGIVLPVGAPAWQLVMADERAGTVDGLAPEECPEVLEPLAPGQVRIAVRAAGVNFRDVMVTLGVVPDRRGLGGEGAGMVLDVAPDVTSVAVGDRVMGLFQGSFGPIAVADARALVPVPPGWTDRQAAAVPIAFLTAWYGLIDLAGLKAGESVLIHAATGGVGTAAVQIARHLGAVIYATASPGKHPMLEAMGVDETHRASSRDLDFEHIFRAATGSEGMDVVLDCLAGEFVDASLRLLGQGGRFIEMGKTDIRDPEQIADTHPGVHYRSYDLVSDAGLDRLSEMLGTLADLFAQGVLTPPPVQAWPLARARQALRHMSQAKHTGKLVLDIPPALDPDGTVLITGGTGTLGALIAEHLVTNHHITHLHLLSRRGPDAPGAAELTAHLTELGATVHITATDTTDPHALRQALDTVDPRHPLTAVIHTAGIVDDAVITAQTADSLHRVWAAKATSAANLHQATEHLPLAMFVIFSSAAGTFGSPGQANYAAANAYCDALATRRRHAGLPATSIAWGLWAATSGMTGGLTEIDHARMSRSGMAPLPSEHALALFDAAHGLGAARVLAARLDLARLSAQPTEALPPLVRSLTGTGPRTARRSAAAPVADLSGRLASMAPAGQLALLLDLVRTHAATVLGHMDSGTVSADTPFKDLGFDSLTAVELRNRLTTVTGLRLSAASVFRYPTATAMAEHLRGELCPTGDDTAQPVLRELARLEAAVGESKPEGETSAQLVKRLQTLLWRLGDEAAAVDHTVDGEELESASDDEMFALIDQQLGSS

SEQ ID NO: 33717 - protein, 456 aa, Haemophilus influenzae Rd KW20
MTKHYDYIAIGGGSGGIASLNRAASYGKKCAIIEAKHLGGTCVNVGCVPKKVMFYGAHIAEAINNYAPDYGFDVEVKKFDFSKLIESRQAYISRIHTSYNNVLAKNNIDVINGFGKFVDAHTIEVTLADGTKEQVTADHILIATGGRPYRPNIKGQEYGIDSDGFFALTELPKRAAVIGAGYIAVELSGVLNSLGVETHLLVRRHAPMRNQDPLIVETLVEVLAQDGIQLHTNSTPSEIVKNADGSLTVRCDGQSDVTVDCVIWAAGRVPTTDKIGLENAGVETNEHGYVKVDKYQNTNVKGIYAVGDIIENGIELTPVAVAAGRRLSERLFNNKPTEYLDYSLVPTVVFSHPPIGTVGLTEPQAIEQYGAENVKVYKSSFTAMYTAVTQHRQPCKMKLVCVGKDEKVVGLHGIGFGVDEMIQGFAVAIKMGATKADFDNTVAIHPTGSEEFVTMR

SEQ ID NO: 33718 - protein, 373 aa, Mycobacterium bovis AF2122/97
MTAQNPNLAALSAAGVSVWLDDLSRDRLRSGNLQELIDTKSVVGVTTNPSIFQKALSEGHTYDAQIAELAARGADVDATIRTVTTDDVRSACDVLVPQWEDSDGVDGRVSIEVDPRLAHETEKTIQQAIELWKIVDRPNLFIKIPATKAGLPAISAVLAEGISVNVTLIFSVQRYREVMDAYLTGMEKARQAGHSLSKIHSVASFFVSRVDTEIDKRLDRIGSRQALELRGQAGVANARLAYAAYREVFEDSDRYRSLKVDGARVQRPLWASTGVKNPDYSDTLYVTELVAPHTVNTMPEKTIDAVADHGVIQGDTVTGTASDAQAVFDQLGAIGIDLTDVFAVLEEEGVRKFEASWNELLQETRAHLDTAAQ

SEQ ID NO: 33719 - protein, 700 aa, Mycobacterium bovis AF2122/97
MTTLEEISALTRPRHPDDWTEIDSAAVDTIRVLAADAVQKVGNGHPGTAMSLAPLAYTLFQRTMRHDPSDTHWLGRDRFVLSAGHSSLTLYIQLYLGGFGLELSDIESLRTWGSKTPGHPEFRHTPGVEITTGPLGQGLASAVGMAMASRYERGLFDPDAEPGASPFDHYIYVIASDGDIEEGVTSEASSLAAVQQLGNLIVFYDRNQISIEDDTNIALCEDTAARYRAYGWHVQEVEGGENVVGIEEAIANAQAVTDRPSFIALRTVIGYPAPNLMDTGKAHGAALGDDEVAAVKKIVGFDPDKTFQVREDVLTHTRGLVARGKQAHERWQLEFDAWARREPERKALLDRLLAQKLPDGWDADLPHWEPGSKALATRAASGAVLSALGPKLPELWGGSADLAGSNNTTIKGADSFGPPSISTKEYTAHWYGRTLHFGVREHAMGAILSGIVLHGPTRAYGGTFLQFSDYMRPAVRLAALMDIDTIYVWTHDSIGLGEDGPTHQPIEHLSALRAIPRLSVVRPADANETAYAWRTILARRNGSGPVGLILTRQGVPVLDGTDAEGVARGGYVLSDAGGLQPGEEPDVILIATGSEVQLAVAAQTLLADNDILARVVSMPCLEWFEAQPYEYRDAVLPPTVSARVAVEAGVAQCWHQLVGDTGEIVSIEHYGESADHKTLFREYGFTAEAVAAAAERALDN

SEQ ID NO: 33720 - protein, 405 aa, Pasteurella multocida subsp. multocida str. Pm70
MNDNVNKDGWKALLGSAVGYAMDGFDLLILGFMLSAISADLALTPAQSGSLVTWTLIGAVAGGIIFGALSDKYGRVRVLTWTIVLFAVFTGLCAFAQGYWDLLIYRTIAGIGLGGEFGIGMALAAEAWPARHRAKASSYVALGWQVGVLGAALLTPLLLPHIGWRGMFLVGIFPAFVAWYLRAKLHEPEIFVKKQTALERQKTSRLEPFRLLIKDKATAKISAGIVVLTSVQNFGYYGIMIWMPNFLSKQLGFSLTKSGVWTAVTICGMMFGIWLFGQLADRIGRKPSFLLFQFGAVISIFTYSQMSDPTYMLFAGAVLGMFVNGMMGGYGALMSEAYPTQARATAQNVLFNLGRAVGGFGPIVVGALVSTYSFQLAIAFLASIYIIDMIATIFLIPELKGKQLD

SEQ ID NO: 33721 - protein, 328 aa, Mycobacterium bovis AF2122/97
MHAIEVTETGGPGVLRHVDQPQPQPGHGELLIKAEAIGVNFIDTYFRSGQYPRELPFVIGSEVCGTVEAVGPGVTAADTAISVGDRVVSASANGAYAEFCTAPASLTAKVPDDVTSEVAASALLKGLTAHYLLKSVYPVKRGDTVLVHAGAGGVGLILTQWATHLGVRVITTVSTAEKAKLSKDAGADVVLDYPEDAWQFAGRVRELTGGTGVQAVYDGVGATTFDASLASLAVRGTLALFGAASGPVPPVDPQRLNAAGSVYLTRPSLFHFTRTGEEFSWRAAELFDAIGSEAITVAVGGRYPLADALRAHQDLEARKTVGSVVLLP

SEQ ID NO: 33722 - protein, 128 aa, Oryza sativa
  misc_feature (1)..(1): Xaa can be any naturally occurring amino acid
  unsure (1)..(128): unsure at all Xaa locations
XQVWPIEGIKKFETLSYLPPLTVEDLLKQIEYLLRSKWVPCLEFSKVGFVYRENHRSPGYYDGRYWTMWKLPMFGCTDATQVLKELEEAKKAYPDAFVRIIGFDNVRQVQLISFIAYKPPGCEESGGN

SEQ ID NO: 33723 - protein, 535 aa, Spinacia oleracea
MADERNTYGGPAPSMETTDRGMFDFMKKNNKGEDHKPSEADVIASGGIGKLPVSEPAHYDHDDKEHVGLLEKKHIGLVEQFHRSDHASDERHHDEEQNKGGVFGKIKEKLPGQHDSDTTTHTQQLYPASDHNYNTHHVHQDDEKKDNILDKIKDKLPGKHEDKKQDYHQHQEEEKKGGALDKIKDKLPGQGNAGHTQQLYPAPDHNYNTHHVHQDEENKDSVLDKIKDKLPGQHEDKKNDYHHHQEEEKKDSVLDKIKDKMSGQHEDKKNDYHHHQEEEKKGGVLDKIKDKLPGQHDADTARHTQQLYPAADHNYNTHHVHQDEENKDSVLDKIKDKLPGQHDDKAAYSQHDHHKHHQEEENKGGVLDKIKDKLPGVYMVVKHDGDIVEHTQQLYPAPDHNYNTHYVHEDEKKKDSVLDKIKDKLPGQHEEKAAAYSEPSYDSHPTPAKHHDYFPQEEEKKGGVMDKIKDKLSGQHKDKADEHELVAPLVTVEPHSEGDKEKKGFLEKIKDKIPGLHSKNDAEEKKTHEEKKEGY

SEQ ID NO: 33724 - protein, 419 aa, Sulfolobus solfataricus P2
MEELLTSNLLVQQVKKLYKVGELLGLDSETIDVLSQPERVMQVKIQIRSSDGKLRTFIGWRSQHNSALGPYKGGVRYGPNVTQDEVIALSMIMTWKNSLLLLPYGGGKGGIRVDPKKLTLKELEDLSRKYVQLIHKYLGSDVDIPAPDINTNPQTMAWFLDEYIKITGKVDFAVFTGKPSELGGIGVRLYSTGLGVATIARDAANKFIGGIEGSRVIIQGFGNVGFFTAKFLSEMGAKIIGVSDIGGGVINENGIDVNRALEVVQSTGSVVNYLEGKKVTNEELLISDCDILIPAAVENVINKFNAPKVRAKLIVEGANGPLTADADEIMKQRGVIVIPDILANAGGVVGSYVEWANNRSGGIISDEEAKKLIVDRMINAFNTLYDFHKRKFADQDLRTVAMALAVDRVVGAMKARGLL

SEQ ID NO: 33725 - protein, 449 aa, Yarrowia lipolytica CLIB122
RAGYKLNSKRVLFVILSAIGFQTSTTTERTVFWPLFFAFEPNSAPVFIAMPSESTPLIGRRLQPSDHTYVQKVRIVLGSSYVNILLIFVPLGLLSGILGWGATWTFSLNFLAIVPLAALLSFATEELSAKVGQTLGGLLNATFGNAVELIVSVIALYQGQIRIVQASMLGSILSNMLLVLGCCFVAGGWGRVQQKFNMTVAQTMSSLLALGVTSLLIPAAFHASLPNSGKPGEDTDPSVVDPTLAVSRGTSIVILSIYTLFLYFQLGSHSGLFEDAESEAVDATEGEDEHEGSTLTPWESIFALVVITVMVSFCADYLVESIDDIVASSGLSKTFIGLILLPIVGNAAEHVTAVVVAIKDKMDLAIGVAIGSSLQIALFLTPFLVILGWIIDQPMSLYFSTFETAVLFVGVFVCNYLLQDGESNWLEGVMLLGTYFIAAIAFFYYPSDM

SEQ ID NO: 33726 - protein, 222 aa, Streptomyces hygroscopicus subsp. ascomyceticus
MANQITLSDTLLAYVRKVSLRDDEVLSRLRAQTAELPGGGVLPVQAEEGQFLEFLVRLTGARQVLEIGTYTGYSTLCLARGLAPGGRVVTCDVMPKWPEVGERYWEEAGVADRIDVRIGDARTVLTGLLDEAGAGPESFDMVFIDADKAGYPAYYEAALPLVRRGGLIVVDNTLFFGRVADEAVQDPDTVAVRELNAALRDDDRVDLAMLTTADGVTLLRKR

SEQ ID NO: 33727 - protein, 515 aa, Daucus carota
MENGTKELNKPQPPSSAAMQLQTPVQKIPTATWKLVLVAAIAAGVQFGWALQLSLLTPYVQLLGIPHKWAAYIWLCGPISGMLVQPIVGYYSDHCQSSFGRRRPFIASGAGCVAISVILIGFAADISYKAGDDMSKTLKPRAVTVFVIGFWILDVANNMLQGPCRALLADLCSGDTRRMRSANAFYSFFMAVGNILGYAAGSYNNLYKLFPFSKTHACDLYCANLKSCFIISIALLIIITVVALSVVRENSGPPDDADAAEEPPSSGKIPVFGELLGALKDLPRPMLLLLIVTCLNWIAWFPFILFDTDWMGREIYGGTAGKGKLYDQGVRAGALGLLLNSVVLGLTSIAVEYLVRGVGGVKILWGFVNFILAIGLVMTVVVSKVAQHQREHSANGQLLPPSAGVKAGALSLFSILGIPLSITYSIPFALASIYSSGSGAGQGLSLGVLNLAIVVPQMIVSVLAGPFDSLFGGGNLPAFVVGAISAAISGVLAIVLLPKPSKDAASKLSLSGTYH

SEQ ID NO: 33728 - protein, 391 aa, Arabidopsis thaliana
MSDLPRDLLAEILSRVPLASLRSVRFTCKKWNDLSKDRSFLKKQIVEAKKKQLKSKEFEVIMMRNFRVYLTSVDLHNDVNPSFTPKGTLTSFSDDANQHQVDNVSSVFHCDGLLLCITKDLNFRLVVWNPYFGQTRWIQPRNSYHIKDIYAIGYDENKNHKILRLKDQYYDYDSHPRARICEFELYSFESNSWKVVLDVSPDWYIHSYHRGLSVKGNTYWYATEKHGYVNFLICFDFTTEKFGPRLPLPFNATESFTYDDVVTLSSVGEEQLALLFQSDATLMMEIWVTSKVDPTEVLWNKLFLAVDHDMIEFDYELKFVADAGSFFIDQKKNVVVVFDKDMNEHTHRGMAYIVGKNGYFKRVDIGEEAYTSCFPLVCSYVPSSVQIRQLT

SEQ ID NO: 33729 - protein, 521 aa, Lycopersicon esculentum
MGICASKGKPNNANNGHHGSGSGGVPIHRNEIQYTKSPGPEAQLHVRPPPSPKPAVRYDTILGKPYEDVKLHYTLGKELGRGQFGVTYLCTEIATGQQYACKSISKKKLVTKADKDDMRREIKIMQHLSGQPNIVEFKGAYEDKGSVYLVMELCGGGELFDRIIAKGHYSERAAATMCRAIVNVVHVCHFMGVLHRDLKPENFLLSDKSENAALKITDFGLSVFIQEGKSYKDIVGSAYYVAPEVLRRCYGKEIDIWSAGVMLYILLSGVPPFWAETEKGIFDAILKGTIDFESKPWPSVSSSAKDLVQKMLTKDPKKRITAAQVLEHPWLKEGGVASDKPLDGAVLSRMKQFRAMNKLKKLALKVIAENLSAEEIHGLKAMFHNIDTDNSGTITYEELKSGLAKLGSKLTEAEVKQLMEAADVDGNGSIDYTEFITATMHKHRLERDENLYTAFQYFDKDSSGFITRDELEAAMEEHGIGDPSCIREIISEVDTDNDGRINYEEFCTMMRSGAKQPGKVF

SEQ ID NO: 33730 - protein, 187 aa, Glycine max
MGASESVPETSVHEFTVKDCNGKEVCLDTYKGKVLLIVNVASKCGFTETNYTQLTELYQKYREKDFEILAFPCNQFLRQEPGSDQQIQDFACTRFKAEYPVFQKVRVNGPDAAPLYKFLKASKPGLFGSRIKWNFTKFLVDKNGKVINRYATATTPFSFEKDIQKALEEEPSDSQTKKEEESSDSQK

SEQ ID NO: 33731 - protein, 470 aa, Escherichia coli CFT073
MVDQVKVVADDQAPAEQSLRRNLTNRHIQLIAIGGAIGTGLFMGSGKTISLAGPSIIFVYMIIGFMLFFVMRAMGELLLSNLEYKSFSDFASDLLGPWAGYFTGWTYWFCWVVTGMADVVAITAYAQFWFPGLSDWVASLSVIILLLVLNLATVKMFGEMEFWFAMIKIVAIVSLIVVGLVMVAMHFQSPTGVEASFAHLWNDGGWFPKGLSGFFAGFQIAVFAFVGIELVGTTAAETKDPEKSLPRAINSIPIRIIMFYVFSLIVIMSVTPWSSVVPEKSPFVELFVLVGLPAAASVINFVVLTSAASSANSGVFSTSRMLFGLAQEGVAPKAFAKLSKRAVPAKGLTFSCICLLGGVVMLYVNPSVIGAFTMITTVSAILFMFVWTIILCSYLVYRKQRPHLHEKSIYKMPLGKLMCWVCMAFFVFVLVLLTLEDDTRQALLVTPLWFIALGLGWLFIGKKRAAELRK

SEQ ID NO: 33732 - protein, 109 aa, Glycine max
MDGLQRSEVSFRRQGSSGLVWDDKLLSGELNKVNNNEDQKGGGSGGDLNLKVRTTPPNTTIQRSRSNGGYRTGKVSPAIEPPSPKLSACGFCSAFGKTREKGRAKHRSR

SEQ ID NO: 33733 - protein, 629 aa, Novosphingobium aromaticivorans DSM 12444
MCGIAGIVHTEGPKPVDPDRVRRMCDAIAHRGPDGEGVWTAPGIGLGHRRLSIIDLAGSPQPMKAAEGDAVIVFNGEIYNFRDLRKELQALGAQFRTDGDTEVILQAWRQWGTACLPRLHGMFAFALYDLRQRTTLLARDRLGVKPLFTARLADGAVIFGSELKALLAHPSLRREIDPLAVEDYLAWGYVPDHRSMLKGVEKLPAGHYQLLRHDAPPAAPVQWWDVSFADRANGSAEDLGAHLLHHMRDAVTSRMVADVPLGAFLSGGVDSSSVVALMAEASATPVKTCSIGFDVAALDETAYADRIAARFATEHRKRLVSPDDFSLVDRLAGMFDEPFADASALPTFRVCELAREHVTVALSGDGADEAFAGYRRQTFQHREEQARALLPSALRKPLFGTLGRLWPKADWAPRPLRAKTTLLSLAASGEEGYARALSVTSPELRETLYTPDFKRLRGDYRAEQPLIELMRKAPARSGLDRAQYADLKFYLPGDILTKVDRTSMAVGLEAREPLLDHRLVEFGASLPERLRVRGATGKWLIKQTMRRYLPEDVLFRPKMGFVTPLAQWLRGPLAHEARALASDGLLARTGWLDAARIDALADAHVSGRADHSRLIWQLLMLRKSLQLLG

SEQ ID NO: 33734 - protein, 503 aa, Sinorhizobium meliloti
MSKRPEFFRGLVLAAATALIFTNATLAQTATSRPPAGPPSVADLAEGLLDAVVNISISQNVKSDDDNAPMPQVPEGSPHQEFFDEFFRGQGGEGGRPRTVNSLGSGFIIDPAGYIVTNNHVIQDADDIEINFSDGSKLKAKLVGMDTKTDLALLKVEPKKPLKAVSFGDSRKIRIGDWVMVVGNPFGLGVSVSVGVVSARGRNINAGPYDSFIQTDAAINRGNSGGPLFNMQGEVVGINTAILSQTGMSVGIGFAVPAELAVNVVNQLKEFGETRRGWLGVRIQPVTDDIAESLKMELPRGALVSGIIEGGPITKGEIKPGDIIIRFDGTDIAEIRDLMRTVGESPVGKAVDVVIIRDGKEQTVRVTLGRLEDGEQLANAKPGEVLPNGGEAKPGEPPAAQLPASDTVLGMKLAELDADSRQSFGIAESVKGVVITEVQPNSPAAERRVEPGEVIVELGQEAMETPEDVTSRVTELKADGRRNALLMIANKSGELRFVTVRME

SEQ ID NO: 33735 - protein, 193 aa, Arabidopsis thaliana
  misc_feature (139)..(139): Xaa can be any naturally occurring amino acid
  misc_feature (142)..(142): Xaa can be any naturally occurring amino acid
  misc_feature (149)..(149): Xaa can be any naturally occurring amino acid
  misc_feature (155)..(155): Xaa can be any naturally occurring amino acid
  misc_feature (157)..(157): Xaa can be any naturally occurring amino acid
  misc_feature (160)..(160): Xaa can be any naturally occurring amino acid
  misc_feature (166)..(166): Xaa can be any naturally occurring amino acid
  misc_feature (170)..(170): Xaa can be any naturally occurring amino acid
  unsure (1)..(193): unsure at all Xaa locations
FISQLLYRKFSGNFFVNLLGQWKESEYSGQSIPVSGLAYLITAPASFSDMAAHPFHALFYIVFMLTACALFSKTWIEVSGSSARDVAKQLKEQQMVMPGHRESNLQKELNRYIPTAAAFGRSLYPVHLPVLADFMGAIXGSXTGILVGXTIIYQXFXTFXKGKASXPGFXGKVPKEGETLPEKYPKILGWLFF

SEQ ID NO: 33736 - protein, 770 aa, Silicibacter sp. TM1040
MKAPLRKLLQSKGILSQIVVSMSLAALLVVVAVGGVARRYEVERVSEQLSEQANLTVSLLSGLMLEAIIVEDVPVLETGLVEAITRYPKILSINIENSEGEVIAEASNSAADEAEGYVMYRRPVEFEGFVFGTMVVQWSTAEGREIVLDKVRQTITWTVLAVIAMSLLMLYLVYRLALNPLQIVHARMSNAVAGAKTGHFSLPWYSSREFQALNVSVGVLEDSFAERDEREKALEHAREQAEIASRAKSEFLANMSHEIRTPMNGVIGMAEVLRETELTPDQELYTETIVKSGNALLSIINDILSFSKIEAGKLELTQATFNLRTVIEDVIMLLAPKAAEKWVQLTLRYDPDLAEFYDGDAGRIRQIVTNVVGNAVKFTSRGSVHIDVTGVARGQLMDLRISVVDTGIGIPAEKLDRIFHAFEQVDGAATRNFEGTGLGLAISTRLLQMMKGRIHVTSSEGKGSVFTIDISLPTSDRAPVAFLPEQPVSGLHALIVDDLELNRRILGERLRSWGLRVTEAASAMEAMLHLDEMRDATDTCDLIFLDYNMPDCDGYELALRIRGLPNTASVPIIVISSVDPALSQSMLADIEVCHQVLKPVRADDLRGVISQALGAGSAVEERAPSGSEDAKIMQRIKVLMAEDNRTNQVVVTRMLKSESVDIIIASNGQEAIEMYLRERPDVILMDMMMPVMDGLDATKAIRKIENETGVRQVPIIALTANALQSHEEACLEVGMDDFLSKPIRKQALLDALHQWTEDRDSAEPQNKLEA

SEQ ID NO: 33737 - protein, 166 aa, Triticum aestivum
MARFFGRLWDRAQGKLDVVRICEKVFDELAVLNAEKNAKLLDVKNLHVATLMVYNSINKQLVGPHKDPPCMQVVKEKAEGFRDKGITQQEFRELIMEWVRIDLRLVLANKAAVAVLAAPLLAVTAKNAGRQVPRMRDAVDKVPTPLLFVVFSAGLMLLQDIRAGKQ

SEQ ID NO: 33738 - protein, 342 aa, Silicibacter pomeroyi
MKALEKSKPEEGLWMVQAPVPEIGPDDVLIKIKKTGICGTDIHIWNWDEWAAHTVPVPMITGHEFAGEIVELGRDVTGLSIGQRVSGEGHLIGTESRQSRAGKFHLDPGTRGIGVNVQGAFAQYLRLPAFNVVPLPEDIPDEIGAILDPLGNAVHTALSFDLLGEDVLITGAGPIGIMAAAVAKHAGARHVVITDINADRLKLAQHVVPRARTVDVTREDLGDVVHELGLKQGFDVGLEMSGSQAALDQMVEALVMGGKIALLGIPPGKSPVDWSRIVFKAITIKGVYGREMFETWYKMIAMLQNGLDVSRVITHRFGVDEFREGFAAMKSGLSGKVVLDWT

SEQ ID NO: 33739 - protein, 538 aa, Wolinella succinogenes
METSKRLRILYVEDDALIREATLPVLERFALEVFSAQNGEEALKFFREKRPNIIITDIRMPVMDGLAMARLIKTESPYVPIIFVSAHNDTDQLMEAIDLGADAFLVKPFSLQKLREILRKFDRYIAEQEETKRSQRLLEEYKKAVDASAILSISDLSGNIIFANEKLCEITGYTREELLGHPHSMFRHPDTPKEVFERLWSTILEGKIWKGMLKNRKKNGEPYYVDATVVPLMDENNQITQFLGLCYEITSLIRAQNALRVALKRAEEADRVKGVFLANMSHEMRTPLNGIIGFGRLLLEENLNQEQREYVEIIDKSGEHLLGIINDILDLSKIESGKFELESLPMKLSEELRAVADFCEVKAREKGVKLLCLFKEIEGLIIQGDVMRLKQVTANLLGNAIKFTPEGGEVRLGVEVLEEREEAIALDFSVSDTGIGIAPEYLEKIFRPFEQAESSTARNYGGTGLGLSISQELVRLMGGEMRCQSEEGKGSRFSFTLTLPKAKGLTQAEREIPKEAFLMARCWWRRTILPIKSLFASF

SEQ ID NO: 33740 - protein, 99 aa, Cryptococcus gattii
FNDQEIVALSGAHAMGRCHTTRSGFDGPWTFSPVTFSNQYFALLRDEPWQWRKWNGPAQYEDKKTKTLMMLPTDMALVKDKSFKKYVDIYANDEEKFFN

SEQ ID NO: 33741 - protein, 177 aa, Mycobacterium leprae TN
MARTNTRKAILAGGCFWGIQNLFRRQPGVISTRVGYTGGGTPNATYRNHGMHAEAVEIIYDPAITDYRTLLEFFFQIHDPTTRNRQGNDQGTSYRSAIFYLDDEQKKVALDTIAAVEASSLWPGKVVTEVSLAEDFWEAEPEHQDYLQHYPNGYTCHFVRPNWKLPRRAPADAKADS

SEQ ID NO: 33742 - protein, 531 aa, Emiliania huxleyi
MGVKTILYQEDARKALERGMDILAEAVSVTLGPKGRNVVLEKKFGTPQIVNDGVTIAKEINLQDTLENTGVSLIRQAASKTNDVAGDGTTTATVLAYAIIKQGMRNVAAGANPIVLKRGIEKATQFVVRKIMDYARPIENLTDITQVAQISAGNDAEVGSLIANAIDKVGREGLISLEESKSTATELEITEGMGFDRGFISGYFVTNTERMEVVLDNPYILLTDKKITVVKQDLVPTLELVSKTNQPLLIISDNVEKEALATLIVNKLRGILNVVAVRAPGFGDRRKAILQDLAVLTGGDVITADAGLSLERMDIENLGVARRVVVGKENTTIISDSNKQEVLARCEQLRRQMETSDSTYEKEKLQERLAKLTGGVAVIKVGAATETEMKDRKLRLEDAVNATKAAVEEGIVPGGGTTLIHIAAELLEWVKETLTGDELLGGLIVEKALQAPLKKIALNAGENGSIIVERIKESDFEIGYNAATNEIVDMYEAGIIDPAKVTRSTLQNAASIASMILTTECIIVDKNKETK

SEQ ID NO: 33743 - protein, 564 aa, Bacillus licheniformis ATCC 14580
MRRTKEGHLETSLRGKDVLSIPTLNKGVAFSLEERKNLGLEGLLPPTVLSLDQQAERAYEQFSRQPDRLRQNVYLNDLQNRNEVLFYKLLQNHLREMLPVVYTPTVGEAIQEYSHEYRRPHGVYLSIDDMDGIETAFKNLQASADDIDLIVATDSESILGIGDWGVGGINIAIGKLAVYTAAAGIDPSRVIPVVLDVGTNNEKLLNDPLYIGNRHPRVEGERYEQFIDAYVETALKLFPNALLHWEDFGNKNARNIMSKYNHKIATFNDDIQGTGAITLAAILAAVKKTGTSLKDHRVVIFGPGSAGIGIADQIRDTMVLEGLSEEEANRAFWTVDYRGLLTTGMDQIMDFQEPYLRDTEEVKDWKRNEKGEISFEEVIRQVKPTILIGTSGVAGAFSEEIIKEMAAHTERPVILPMSNPTHLAEAVPEDLFKWTDGKALVATGSPFEAVEYNGVKHEIGQSNNAFVFPGLGLGTIVAKAKVITNGMFAASANAVANMVDHEKPGAGLLPKIDDLQDVSVQVAIDVVKAAIKDGVAQVQPEDVEKAVREAMWRPEYKTIVAKQD

SEQ ID NO: 33744 - protein, 256 aa, Arabidopsis thaliana
MEGITHPIPRTVEEVFSDFRGRRAGLIKALTNDMVKFYQTCDPEKENLCLYGLPNETWEVNLPVEEVPPELPEPALGINFARDGMQEKDWVSLVAVHSDSWLLSVAFYFGARFGFGKNERKRLFQMINELPTIFEVVSGNAKQSKDLSVNNNNSKSKPSGVKSRQSESLTKVAKMSSPPPKEEEEEEDESEDESEDDEQGAVCGACGDNYGTDEFWICCDACEKWFHGKCVKITPAKAEHIKHYKCPTCSNKRARP

SEQ ID NO: 33745 - protein, 581 aa, Pyrobaculum aerophilum str. IM2
MDILKYDLVIIGSGIAGLRAATAAAWASGGKISIAILSKIQAMRSHSLSAEGGMSAVLYPDKTKDSLDLHAYDTVKGSDFLADQDAVEILVEYAPKEVRYLERIGVPWTREPDGRISQRPFGGMSIPRTTFAADKTGFFIMSTLFSETRRFDNIHVYHEHFVTKFIIEDGVFKGVTAYDLKRGEFKLFYAKAGIIATGGAGRLYRFTTTAHSTTGETLGYALRAGLAIKDMEFVQWHPTALVPSGILVSEAARGEGGYLINKEGERFMKRYAPQRMELAPRDIVSRAILTECMEGRGFQHESGMCYVGLDLRHLGEEKINKRIPFIRELAHKYAGIDVLSEPIPVRPAVHYTMGGIHTDTWGRVLTADGRWVRGLWAAGEAAAVSVHGANRLGSNSLSECSVWGRLTGEQAAKYILETPPLSSPDGKLIEAAEKEESRVFDRLLHKEVNSISPYEVKRKLNDIMEEHFGPFRHGSSMAEGLAKLKKLREITSFRVEDSSRVYNQNLKDALEIDGMLDLALVLGIGAYARTESRGAHYRLDFPKRDDVNWLKHTVAYLHGGEIKLTYTPVTITKWQPEERKY

SEQ ID NO: 33746 - protein, 422 aa, Thiomicrospira crunogena XCL-2
MKYYCETKSATDLTRKTLALVLAGGEGSRLKDLTKWRAKPAVPFGGKYRIIDFVLSNCVNSGIRKIGVLTQYKSHSLIRHVQRAWSFMRYEVGEFVELLPAQQRVDKGWYKGTADALYQNLDIMRRHTPDYVLVLGGDHIYSMDYSKMLYEHAESGADVTIGCIEVPRMEATGFGVMSVDECFKITKFTEKPANPDAMPHKPDKALASMGIYVFSTEFLFQKLIEDADNPNSSRDFGKDIIPSIIEDWQVRAFPFEDETGLPVYWRDVGTIESYWKASLDLCSITPDLNLYDEDWPIWTYQAQMPPAKFIFDDEGRRGEAIDSLVAGGCIISGARIKRSVISSGGHVHSFCLVKDSVLLPRVKVERNCRIQNAVIDKGCVIPEGTVIGEDLEADRKRFYVEEASGIVLVTPDMLGQRLHITR

SEQ ID NO: 33747 - protein, 965 aa, Flaveria trinervia
MANRNLEKLASIDAHLRLLVPGKVSEDDKLIEYDALLLDKFLDILQDLHGEDLKETVQECYELSAEYEGKRDPKKLEELGSVLTSLDPGDSIVIAKAFSHMLNLANLAEEVQIAYRRRIKLKKGDFADEAHATTESDMEETLKKLVYKLNKSPEEVFDALKNQTVDLVLTAHPTQSVRRSLLQKHGRIRNCLAQLYAKDITPDDKQELDEALHREIQAAFRTDEIRRTQPTPQDEMRAGMSYFHETIWKGVPKFLRRVDTALKNIGINERVPYNAPLIQFSSWMGGDRDGNPRVTPEVTRDVCLLARMMAANMYFSQIEDLMFEMSMWRCTDELRVRAEELFRTARRDVKHYIEFWKQVPPTEPYRVILGDVRDKLYNTRERARHLLAHDISDIPEEAVYTNVEQFLEPLELCYRSLCACGDRVIADGSLLDFLRQVSTFGLSLVKLDIRQESDRHTDVLDAITQHLEIGSYREWSEEKRQEWLLAELSGKRPLFGSDLPKTEEIKDVLDTFNVLAELPSDCFGAYIISMATSPSDVLAVELLQRECHVKQPLRVVPLFEKLADLEAAPAAMARLFSIDWYKNRINGKQEVMIGYSDSGKDAGRFSAAWQLYKAQEELKNVAKEFGVKLVMFHGRGGTVGRGGGPTHLAILSQPPDTIQGSLRVTVQGEVIEQSFGEEHLCFRTLQRFCAATLEHGMNPPISPRPEWRELMDQMAVVATEQYRSIVFKEPRFVEYFRLATPELEYGRMNIGSRPSKRKPSGGIESLRAIPWIFAWTQTRFHLPVWLGFGAAFKQAIQKDSKNLQMLQEMYKTWPFFRVTIDLVEMVFAKGDPGIAALNDKLLVSEDLWPFGESLRANYEETKDYLLKIAGHKDLLEGDPYLKQRLKLRDSYITTLNVCQAYTLKRTRDPNYHVTLRPHISKEYAEPSKPADELIHLNPTSEYAPGLEDTLILTMKGIAAGMQNTG

SEQ ID NO: 33748 - protein, 426 aa, Oryza sativa
MAKYGEGDARWIVQERADGTNVHNWHWAERDCLEWSRSRLTSLLAGLPVLSGEGGLALRTTALDKLDGEAYVNIRKGKVIPGYELSLTLAWEAEATTESGVVKVSGAAEVPYLADENADEDPELRVTVRGDDGPVARRAKDAFLTKGKPLVLEKIREYVAAMAKGGPAKDELDSKKTPTKAAAVEAGGAATAPAPAAEKKEEAPAVKEKKAKAKDKEGFKTIEMTEKFYCRAKDMYEILMDENRWKGFTQSNARISREVGGQFSLFDGSISGVNEELQEGKLIVQKWRFGSWPDGVHSTRLELTSSNSLSDHVIPDLAFGGCCDFAAFQAAACTTSALGTRQWGAVFMVGDSAPGTWHYATVFLGGSIFTCHLSMDGVGAGAAPVGGVCECRLSLRLPLLRAHSGEVSFKLSLHDLSVLPNCLSKE

SEQ ID NO: 33749 - protein, 400 aa, Thiobacillus denitrificans ATCC 25259
MEALQSGSDVLFVLLGGIMVLAMHAGFAFLELGTVRKKNQVNALVKILTDFSVSTIAYFFIGYGIAYGVSFFSGAAALSAQNGYALVKFFFLLTFAAAIPAIVSGGIAERARFNPQLAATFALVGFVYPFFEGMVWNGNYGVQDWLAAATGAKFHDFAGSVVVHAVGGWIALPAVLLLGARRGRYKGDGMMSAHPPSNIPFLALGAWILTVGWFGFNVMSAQLIAAVSGLVAVNSLMAMVGGTLAALIVGRNDPGFIHNGPLAGLVAVCAGSDLMHPLGALATGAIAGALFVGMFTVTQNRWKIDDVLGVWPLHGLCGAWGGVAAGIFGAQALGGLGGVNLGAQLVGTLGGVGIALAGGALVYGALKLGVGLRLDPEAEFTGADLSIHKVSATAERETNW

SEQ ID NO: 33750 - protein, 967 aa, Flaveria trinervia
MANRNLEKLASIDAQLRLLVPGKVSEDDKLIEYDALLLDKFLDILQDLHGEGLKETVQECYELSAEYEGKHDPKKLEELGNVLTSLDPGDSIVIAKAFSHMLNLANLAEEVQIAYRRRIKLKKGDFADEASATTESDIEETFKKLVHKLKKSPEEVFDALKNQTVDLVFTAHPTQSVRRSLLQKHGRIRDCLAQLYAKDITPDDKQELDEALHREIQAAFRTDEIRRTPPTPQDEMRAGMSYFHETIWKGVPKFLRRVDTALKNIGINERVPYNAPLIQFSSWMGGDRDGNPRVTPEVTRDVCLLARMMAANMYFSQIEDLMFEMSMWRCSDELRVRAEELHRSSSKRDVKHYIEFWKQVPPTEPYRVILGDVRDKLYNTRERARHLLAHDVSDIPEESVYTNVEQFLEPLELCYRSLCACGDRVIADGSLLDFLRQVSTFGLSLVRLDIRQESDRHTDVLDAITQHLEIGSYREWSEEKRQEWLLSELSGKRPLFGPDLPKTEEIADVLDTFHVLAELPADCFGAYIISMATSPSDVLAVELLQRECHVKQPLRVVPLFEKLADLEAAPAAVARLFSIEWYKNRIDGKQEVMIGYSDSGKDAGRLSAAWQLYKAQEELINVAKKFGVKLTMFHGRGGTVGRGGGPTHLAILSQPPETIHGSLRVTVQGEVIEQSFGEEHLCFRTLQRFCAATLEHGMNPPISPRPEWRALMDEMAVYATEQYREIVFKEPRFVEYFRLATPELEYGRMNIGSRPSKRKPSGGIESLRAIPWIFAWTQTRFHLPVWLGFGAAFKYAIEKDIKNLHMLQEMYKTWPFFRVTIDLVEMVFAKGDPGIAALNDKLLVSEDLWSFGESLRANYEETKNLLLKIAGHKDLLEGDPYLRQRLRLRDSYITTLNVCQAYTLKRIRDPNYHVTFRPHISKEYSEPSSKPADEYIKLNPKSEYAPGLEDTLILTMKGIAAGMQNTG

SEQ ID NO: 33751 - protein, 789 aa, Ralstonia eutropha JMP134
MARTHILGFPRIGARRELKFAQESFWRGESTEADLRAVAATLRSRHWQLQADSGLDTVATGDFAYYDQVLSLTALLGALPRRFGFEPAALTLAQYFELARGNREQPAMEMTKWFDTNYHYLVPELDSATRFDGGPDWFFDELEEALALGLKARPVLIGPVTYLWLSKTHEAGFDKLSLLPQLAQAYQRILTRLKARGIDWVQIDEPALSLDLDAAWLDAYDRAYATLAQSGVKLLLATYFDSAADHAERAAALPVHGFHIDVVRAPAQLVAWRQALPPEAVLSVGVIDGRNIWRTDLRRALDTLKPLHAELGDRLWLAPSCSLLHVPVSLEHEVRLDAELKSWLAFATEKLGELCVLATVLNQGETAVAAQLVASDAVQASRRQSRRVVNPRVQQRLAAVTPDMADRDSAFDVRIERQREALQLPLLPTTTIGSFPQTAAIRQTRAAYKRGDLGALDYLHRIRGEIELAVRKQEALGLDVLVHGEAERNDMVEYFGEQLCGYAFTENGWVQSYGSRCVKPPVIYGDVYRPEPMTVDTARYAQSLTERPMKGMLTGPVTMLQWSFVRDDQPRADTARQLALAIRDEVCDLEQAGIRVIQIDEPALREGLPLRRADWDAYLAWAVNAFRLSAAGVADQTQIHTHMCYAEFNDILPSIAAMDADVITIETSRSAMELLEGFGDFDYPNEIGPGVYDIHSPRVPSVEAMEKLLDRACEVVPPQRLWVNPDCGLKTRGWDETEAALANMVSAARKLRGRLAGQDTLTWKRVARPQASQAAHRHGAECACSTRAA

SEQ ID NO: 33752 - protein, 491 aa, Thiomicrospira crunogena XCL-2
MKILFATSEAHPLIKTGGLADVSGSLPDAYHHLKQKVRMVMPAYGDIWEKVSGVKQLSELSIAACGRQLHVRIHVASAEGIDVPIWLVDIPELFHRPGNPYLALDGKDWWDNGERFAVFSKVVAEIAMNRAGLKWQPDLVQTNDWQTGLVSALLTLEAERPKTVFTIHNMAYAGLFPKSLFEGLGLPWSWWEPHDGIEFYDNMSMLKAGIQMADWVTTVSPTYAKEITFPEYAYGLEGVLIKRLDEGRLVGILNGIDHDVWNPKTDPFIRYHYSVDKGRVAAKKRNKKDMLDFWDLPKAVVDADDPVIGLVGRLVPQKGIDLVLEVLPELIEQTNVRFVIVGTGDSLFEYQLTELAHQYPERLMIYIGYSESLAHKVEAGADLFLMPSRFEPCGLNQLYSLAYGTPPIVHSTGGLSDTVVNATKENLATGQATGFVFYDPSRHALKSTILHALHLFSKKGTWQKLQKNGMRQDFSWTRSAKQYLALFKAMV

SEQ ID NO: 33753 - protein, 395 aa, Piptocephalis freseniana
KRTIEKFEKEAAELGKGSFKYAWVLDKLKAERERGITIDIALWKFETPKYQVTVIDAPGHRDFIKNMITGTSQADCAILIIAGGTGEFEAGISKDGQTREHVLLAFTLGVRQLIVAVNKMDTTKWSEDRFNEIVKEVSNYVKKIGYNPKSVPFVPISGWHGDNMLEASVNMPWFKGWTKEGKTGAKTGKTLLEAIDAIDPPSRPTDKPLRLPLQDVYKIGGIGTVPVGRVETGVIKAGMVVTFAPAAVTTEVKSVEMHHEQLVEGVPGDNVGFNVKNVSVKDIRRGNVCSDSKNDPAKEAGSFLAQVIVLNHPGQISAGYAPVLDCHTAHIACKFTELIEKIDRRSGKSIEDSPKFVKSGDAAIVKMTPSKPMCVEAFTEYPPLGRFAVRDMRQT

SEQ ID NO: 33754 - protein, 297 aa, Rhodospirillum rubrum
MTASSLRSPQAPKNQAKPIEQLIPILDETASFLAALKGRTPVVFLDFDGTLAPIAERPEAVVFSAARREAVRKLAGKLPVAIVSGRDRADVEKQVGLPGLTYAGGHGFDIRLAPSGSASEVAPDDADPLAAELDGGLAGLVERLDAMEAALHAGLDGIAGALIERKRFSVAAHDRMVAPADRPAFAAALEAARRDLRGLREKAGKRLVEFLPDIDWDKGKAVLHLRRALGVDGEGYVAVFFGDDLTDEDAFRVLPEIDGIGVLVAGADEDGRGRTSHAFFRVADPDGVCRLLNDMVA

SEQ ID NO: 33755 - protein, 395 aa, Smittium culisetae
KRTIEKFEKEANEMGKGSFKYAWVLDKLKAERERGITIDIALWKFETPRYVVTVIDAPGHRDFIKNMITGTSQADCAILIIAGGVGEFEAGISKDGQTREHALLAFTLGVRQLIVAVNKMDTTNYSEARFTEITKEVCNFIKKVGYNPKSVPMVPISGFHGDNMIEATTNMPWYKGWTKETKAGNAKGMTLLDAIDAVEPPVRPSDKPLRLPLQDVYKIGGIGTVPVGRIETGILKAGMVVTFAPTGVTTEVKSVEMHHEVLSQGNPGDNVGFNVKNVSVKDIRRGNVCGDSKNDPPKEAGNFTAQVIVLNHPGQISNGYCPVLDCHTAHISCKFTQIKEKMDRRSGKTLEAEPKFIKSGDAAMVVLTPSKPMCVETFSEYPPLGRLAVRDMRQT

SEQ ID NO: 33756 - protein, 432 aa, Neisseria gonorrhoeae FA 1090
MPSETALPLYADTRAAHTLVWFRQNLRIRDNAALCAAVAEGSPVIGIWIDDAETDNPRRAAFYRQSAAELAQGLARRGIPLYTAASPAGLVRLAVRLNIRAVIADESHTFADKLADNALWHELDKHGIALTFVNDRSVFGKTDLTPDNGTAHTDFNRYREVWLDRFSKQPPAGSDLFAAYRQPFPENLPAPPPAALSDGIFLPQNGGETAAWRQWRRFLEQAASYSVLKDFPSRKNTSLMGAYLSVGCISPRLLARESLERRLNAWADNIIRRDFFLQLALQHADDDPSDGNPEHTLRLTLWQQGRTGIPIIDAAMRCLHKTGSLHPALRRLSADFFCHVLNLPRREGEIWFARQLTDFDAAINQGNWRLAASRHTCPDIAAASYRTDPDGTFIKRHIPELAHLSADTVHTPWRFACSVDTHGYPARPVAGV

SEQ ID NO: 33757 - protein, 257 aa, Brucella suis 1330
MSDQAPQIDLNFPLSEKVAIVTGGASGIGAAISKAFIAKGAKVAVLDISADIAKAKAEELGENAKPFVCDVSSQQSVNDAITAVISQFGKIDIAVNSAGVVYLAPAEDISLDYWDKTININLKGSFLVTQAVGRAMIAAGNGGKIINLASQAGTVAIEEHVAYCASKFGVIGMSKTFAAEWGKYGICVNTLSPTIVLTELGKKAWAGEKGEAAKKRIPAGRFAYPEEIAAAAVFLASAGADMITGADLLIDGGYTIL

SEQ ID NO: 33758 - protein, 332 aa, Magnaporthe grisea 70-15
MWRGEFTMSSPKVVIIGATGAHGREIIKGLLESPTKFDINTISRKASVDKPQNAALREKGVKVFGVDMLGPREELVNVLRGADAVVAPIDFDNFEEQKALVDACKEAGVKRLTPSNFAPVMPAYNVMGMRETKEATINYIKEQRVPYTIIDVAWWYQNLPFKIPSGRTDYMSEILNDDARIIGTGDVPIAFSNLRSIGTHVARILADPRTINKYVHIWDEVLTMHQVVETLEEVSGEKVERVYNTQKDMEETMAKCKAKLAADPKDQDAGMELTVTQYFYSMGVRGDSTPEVADYLGYLDSRRLYPDIKASTLREYYKTVLEGKEANPYASS

SEQ ID NO: 33759 - protein, 753 aa, Escherichia coli
MSQHNEKNPHQHQSPLHDSSEAKPGMDSLAPEDGSHRPAAEPTPPGAQPTAPGSLKAPDTRNEKLNSLEDVRKGSENYALTTNQGVRIADDQNSLRAGSRGPTLLEDFILREKITHFDHERIPERIVHARGSAAHGYFQPYKSLSDITKADFLSDPNKITPVFVRFSTVQGGAGSADTVRAIRGFATKFYTEEGIFDLVGNNTPIFFIQDAHKFPDFVHAVKPEPHWAIPQGQSAHDTFWDYVSLQPETLHNVMWAMSDRGIPRSYRTMEGFGIHTFRLINAEGKATFVRFHWKPLAGKASLVWDEAQKLTGRDPDFHRRELWEAIEAGDFPEYELGFQLIPEEDEFKFDFDLLDPTKLIPEELVPVQRVGKMVLNRNPDNFFAENEQAAFHPGHIVPGLDFTNDPLLQGRLFSYTDTQISRLGGPNFHEIPINRPTCPYHNFQRDGMHRMGIDTNPANYEPNSINDNWPRETPPGPKRGGFESYQERVEGNKVRERSPSFGEYYSHPRLFWLSQTPFEQRHIVDGFSFELSKVVRPYIRERVVDQLAHIDLTLAQAVAKNLGIELTDDQLNITPPPDVNGLKKDPSLSLYAIPDGDVKGRVVAILLNDEVRSADLLAILKALKAKGVHAKLLYSRMGEVTADDGTVLPIAATFAGAPSLTVDAVIVPCGNIADIADNGDANYYLMEAYKHLKPIALAGDARKFKATIKIADQGEEGIVEADSADGSFMDELLTLMAAHRVWSRIPKIDKIPA

SEQ ID NO: 33760 - protein, 285 aa, Triticum aestivum
  misc_feature (97)..(97): Xaa can be any naturally occurring amino acid
  unsure (1)..(285): unsure at all Xaa locations
LQHMVPPYGTPPPPYMMYPPGTVYAHPTAPGVHPFHYPMQTNGNLEPAGAQGAAPGAAETNGKNEPGKTSGPSANGVTSNSESGSDSESEGRDANSXNDSHSKENDVNENGTFGDAGSAQNGVSHSSSHGTFNKPMPLVPVQSGAVIGVAGPATNLNIGMDYWGATGSSPVPAMRGKVPSGSARGEQWDERELKKQKRKLSNRESARRSRLRKQAECEELGQRAEALKSENSSLRIELDRIKKEYEELLSKNTSLKAKLGESGGGGGSDAVPDMNERCDTNGGSH

SEQ ID NO: 33761 - protein, 395 aa, Rhizophlyctis sp. C-10
KRTIEKFEKEAADIGKGSFKYAWVLDKLKAERERGITIDIALWKFETPKYYVTVIDAPGHRDFIKNMITGTSQADCAILIIAGGVGEFEAGISKDGQTREHALLAFTLGVRQLIVAVNKMDTNKWSEDRFNEIVKELSGFIKKVGYNPKSVPFVPISGWHGDNMLEVSENMPWFKGWTKETKAGNSTGKTLLQAIDAIEPPTRPTDKPLRLPLQDVYKIGGIGTVPVGRVETGVIKPGMVVTFAPANVTTEVKSVEMHHESLTEGLPGDNVGFNVKNVSVKEIRRGMVASDSKNDPAKEAASFNAQVIVLAHPGQIAAGYSPVLDCHTAHIACKFAELVEKIDRRSGKKLEDAPKFIKSGDAAIVKMIPSKAMCVEAYTDYPPLGRFAVRDMRQT

SEQ ID NO: 33762 - protein, 234 aa, Escherichia coli CFT073
MCANTPLVTTLTPMTDFRESDTMSLFDKKHLVSPADALPGRNTPMPVATLHAVNGHSMTNVPDGMEIAIFAMGCFWGVERLFWQLPGVYSTAAVYTGGYTPNPTYREVCSGDTGHAEAVRIVYDPSVISYEQLLQVFWENHDPAQGMRQGNDHGTQYRSAIYPLTPEQDAAARASLERFQAAMLAADDDRRITTEIANATPFYYAEDDHQQYLHKNPYGYCGIGGIGVCLPPEA

SEQ ID NO: 33763 - protein, 396 aa, Arabidopsis thaliana
MALLLNSTMTVAMKQNPATAVSFMQTTCLGSSFSPPRHLQVSKTFRPIKEVSNQVTHTITQEKLEIFKSMENWAQENLLSYLKPVETSWQPQDFLPETKDEDRFYEQVKELRDRTKEIPDDYFVVLVGDMITEEALPTYQTVMNTLDGAKDETGVSLTPWAVWLRAWTAEENRHGDLLNKYLYLSGRVDTRHVEKTIQYLIGSGMDTKYENNPYNGYIYTSFQERATFISHANTAKLATTYGDTTLAKICGTIAADEKRHEMAYTRIVEKLFEIDPDGTVQALASMMRKRITMPAQLMHDGRDDNLFDHYAAVAQRIGVYTATDYAGILEFLLRRWEVEKLGMGLSGEGRRAQDYLCTLPQRIRRLEERADDRVKRASKSKPSVSFSWIYGREVEL

SEQ ID NO: 33764 - protein, 354 aa, Schizosaccharomyces pombe
MNHGTKIPVDPFRIIKETARDGSTGEVKQLSYTSSKVVGSGSFGVVMQVHLIESDSKAAIKRVLQDKRFKNRELQIMRIMNDPNIVDLIAYYYTTGDNSDEVYLNLVLEFMPETIYRASRLYTRQKLSMPMLEVKLYIYQLLRSLAYIHASGICHRDIKPQNLLLDPENGILKLCDFGSAKILVAGEPNVSYICSRYYRAPELIFGATDYTHAIDIWSTGCVMAELMLGHPLFPGESGIDQLVEIIKILGTPSREQIKTMNPNYMEHRFPQIRPQPLSRVFSRSVPLDALDLLSKMLQYTPTDRLTAAEAMCHPFFDELRDPNTKLHNSRNPDASPRHLPELFNFSPFGTIHSS

SEQ ID NO: 33765 - protein, 753 aa, Escherichia coli
MSQHNEKNPHQHQSPLHDSSEAKPGMDSLAPEDGSHRPAAEPTPPGAQPTAPGSLKAPDTRNEKLNSLEDVRKGSENYALTTNQGVRIADDQNSLRAGSRGPTLLEDFILREKITHFDHERIPERIVHARGSAAHGYFQPYKSLSDITKADFLSDPNKITPVFVRFSTVQGGAGSADTVRSIRGFATKFYTEEGIFDLVGNNTPIFFIQDAHKFPDFVHAVKPEPHWAIPQGQSAHDTFWDYVSLQPETLHNVMWAMSDRGIPRSYRTMEGFGIHTFRLINAEGKATFVRFHWKPLAGKASLVWDEAQKLTGRDPDFHRRELWEAIEAGDFPEYELGFQLIPEEDEFKFDFDLLDPTKLIPEELVPVQRVGKMVLNRNPDNFFAENEQAAFHPGHIVPGLDFTNDPLLQGRLFSYTDTQISRLGGPNFHEIPINRPTCPYHNFQRDGMHRMGIDTNPANYEPNSINDNWPRETPPGPKRGGFESYQERVEGNKVRERSPSFGEYYSHPRLFWLSQTPFEQRHIVDGFSFELSKVVRPYIRERVVDQLAHIDLTLAQAVAKNLGIELTDDQLNITPPPDVNGLKKDPSLSLYAIPDGDVKGRVVAILLNDEVRSADLLAILKALKAKGVHAKLLYSRMGEVTADDGTVLPIAATFAGAPSLTVDAVIVPCGNIADIADNGDANYYLMEAYKHLKPIALAGDARKFKATIKIADQGEEGIVEADSADGSFMDELLTLMAAHRVWSRIPKIDKIPA

SEQ ID NO: 33766 - protein, 149 aa, Silicibacter sp. TM1040
MRPPYSYRDDSNVPLFSDNTPIAVMDGECALCSWGARMIHRLDRSGRVRICPVQSPLGRALLKHYGLCAEDPTSWLYLDAGQAYMDFEGMIHAGRSFGGWGHLVVALRLLPRPVRNWLYRRLARNRYMLFGKGDICALPDPEFRKRLIE

SEQ ID NO: 33767 - protein, 2187 aa, Streptomyces nanchangensis
MANQEQLVDYLKRVATDLHDTQQRLREVEARDRQPIAIVGMACRFPGGTDTPEALWDLVSEGRDVISPMPDDRGWDPGMFNDSGETGTSYVREGGFVHDIADFDADFFDINPREALAMDPQQRLLLETSWEAIERARIDLTSLRGSKTGVFVGGSTVYYAGNAAGVPQDVAGYLATGLAASSMSGRISYTFGFEGPSFTVDTACSSSGVALHLAVQALRKGECSLALAGGVCVMATPGTYLEFSKLNGLAADGRCKAFAAAADGFGPAEGVGVLLVERLADAERLGHPVLAVIRGSAINQDGASNGLTAPHGPAQERVIRAALADAQLSARDIDVVEAHGTGTSLGDPIEAQALIAAYGRRRADGGPLWLGSVKSNIGHTQAAAGMAGVIKMVHALRHGLLPRTLHVDEPTHQVDWSEGTVRLLTEARPWPEAGGPRRAGVSSFGMSGTNTHVILEQAPPAEEPAPAAESPVVPWLVSGRGEAALRAQAARLRDFLAERPEASPTRVGFALAGSRAAQSHRAAVVAADRDTLLAGLGSLAEGTPAGHVVTGSVSPGATAFVFPGQGSQWVGMALALADASPVFAEHFRRCAEAVERHTDYTVESVLRADPGAPSLDRVDVVQPVLWAVMVALAELWRSHGVEPAAVVGHSQGEIAAACVAGVLSVDDAARVVVLRSQVLPELSGRGGMASVAQPVGLVEKHLERWDGRLSVAAVNGPSSTVVSGDADALEELLEGYEADGVRARRVPVDYASHCAHVDALRGPLLDALSGIEPKAGTVPLYSTVTGRRIDGTTMDAGYWYTNLRQQVRFQEATEALLADGHGVFIECSPHPVLTIGVQETMDQSGANATALGTLRRDEGGWDRFLLALGQAHTHGVAVDWSRVFPDGTSPADLPTYAFQRRRYWLDATAGAAGDPASLGLTPADHPLLGAVTLLAEGDEVVMTGRLGLDTHPWLADHAVAGAVLVPGAVFVELAVRAGDEVGCDHLEEMVLASPLVLPEQGGFDLQLVVGGAAEDGRRTLGGYARPSGSDRPWVQHVTGTLAPGGAARPFDLAQWPPEGARPVPVEGCYDQLAEGGFRYGPAFRSLRAVYRRETEVFAEVVLPEEQRGKAAAFGIHPALLDGALHASGLSAVRGDSGGRMALPFAWNGVSLAATGAELLRVRLAPVGDDGMSVHATDASGHPVISIESLVTRPFTAGQLPSDGDETRDGLFRVAYTPLTDPEPGTATDDWTAVATGSEPTYYGVRRYGDLDALAAAVDGGLPAPPVTLLPCEPAPDDGDLPGALRRRLGEVLHTVQRWLADERFAASRLVVVTRGAVAAFEGDDVTDLVHAPVWGLIRSAQSEHPDRLALVDLDGPELPKAVAAAVAVAVAAGEKQIVVRDGTVRVSRLVPAVSGGALALPETPHWRLDIAAPATLDNLGLVAAEEPGPPAPGHVRVQVRAAGVNFRDVLIALGMYPGDGAFRGSEGAGVVLEVAEDVTSVAVGDRVMGMFQGAFGSTAVADARSVVPIPPGWTDEQAAAVPIAYVTAWYGLVDLAGLKAGESVLIHAATGGVGTAAVQIARHLGAEVYATAGPGKHHVLEAMGIDEAHRASSRDLDFEDAFRAATGGRGVDVVLNSLTGDHTDASLRLLAEKGRFVELGMTDVRDPEQLAEPYPGLRYRVLDLREPGEDGIGRMLTEILGRFAGGELTHPAVRAFDIRRARDAFRLMSRAAHIGKIVLTLPRPLDPDGTVLVTGGTGTLGGLIARHLVTRHGVRHLLLTSRRGPEAPGAPALREDLAALGATVTVTACDAGDRERLAEVLAGVPDAHPLTGVVHCAGVLDDGMVDALTPEQLARVLRPKAEAALHLHELTQDADLALFVLFSSIVGVYGNPSQANYAAASTFLDALAQHRQAGGLPAQSLAWGMWEETSALTGELDDGVRQRISQAGMDPLPTEQALALFDRSYAVGDALLVPIRQSTAASRGGPAAGRTRARRVADSGVAGTGGPSLTDRVTALPEAERDSCVLEAVRAHMAAVLGHDSADEIAPDRTFKELGFDSLTAVELRNRLSAATGLRLPATFVFDFANPVALAEHLREQIAPPTELGPPTDPSTPADPSPPPGLPEGPSTDPRESRVRQVLAAIPLRRLEESGLLETLLRLGEGPGEADTTGARPVEGTRDETHTPDSADIASMDLEELVNAALRNDES

SEQ ID NO: 33768 - protein, 483 aa, Kluyveromyces lactis NRRL Y-1140
MVPGEDSSLIAHRGGDSGYNTVESLKKDGETSLEYEFWYMTKTSIPLIITFLLQCSLSSSALVFAGRVGTLEVGGISIGNVTFAVTSAIFIGIATCLDTVCPQAYGAGKYNMVGLYFQRGVAISFLFAVPVIAFWYNSEYVLSFLVEDADVVHIAAVYLRIMILSLPGYIIFECGKKYLQAQGDFVTGQNILFVCAPLNILLNYLFVLKYKFGYIGSPISMVLSYTLMGLTIVAYICRQIYFGNSSCWHPITGNFSAIFKNWGPLIALALPGLIMIEAEFFAFEIITVLSAKFGTEVLAAQSIVATLQTFFFQLPFSCSVAASNRIAYHIGSGITENCKTATKATMFGVGPAAGIINFTVLYFGRYKLCSLFNADPVLVNKAAGLLCVVALNQIYDCFNVMAAGVLRAQGRQRIGGYLNIMAYYLVGLEVGILLAFKFKMEVLGFWIGIGVGVLFLAIGENYFVYISNWRNIISKSQDLRHEA

SEQ ID NO: 33769 - protein, 364 aa, Novosphingobium aromaticivorans DSM 12444
MNDKSSDNFPPPGYTDQAHTAFDPAVARFRAQHPEDTFEGASGVLFEQAMAQTRMAICLCDPHEKDLPIVFANRAFRHLTGYDEHEVVGRNCRFLQGPGTDPAAVARIKAALEREDVIVVELLNYRKDGTAFWNALHLGPVYDADGRLIYFFGSQWDVSDVRAVRADERHARQLARELSHRMKNMFAVIGSIVNFTGRVRGIEVEAREINDRIQALGRAYETTLDDSHRETVEVGQAIRAVLAPYDPDGTRIAFEGNGLRSDFASVSVLGLSLHELAVNAIKHGALSADSGKITVAWRKNGSTEGPAIRIDWVEQSASPRVSLDTGNDGIVDRMLDMARGGIVREWHQDGLRARLNIPLRENAE

SEQ ID NO: 33770 - protein, 483 aa, Mycoplasma mobile 163K
MNVLEKEKGVNLTDKRSKMIATIGPSSQNKEILKQMMLKGMTTVRANFSHGDHAEQLNKFVLAKEVAKELNLPMSLMLDTKGPEIRVGKMKDGSQKIEVGKIITVLTDEVSYKTFEGIPTKFTVSHRMDKDVKVGSYILFDDGKLTTIVTGVKSGIVEVKTINSHVLKSNKRINIPGAQLSLEFLSKKDKEDIIFGIKNDVNYIAASFVNSKQDVLDLRKLLKDNNGEHIQIISKIESVFGIENIDEIIEASDGIMIARGDLGLEIPYFEVPFYEKQIIRKCRNVGKPVIVATQMLDSMEKLPQPTRAEVSDVYWATELGADATMLSGESANGDFPVESVEVMSTINRRAEKEFYNKLYYPAHLETLIQNPVGVHSKLASEVALKVMNGDYKFSVILSETGRLLKEIARFRPNTVIIGVINNDKLIHGFGITHSVFMSVDSKAVKSEIEKNLTKAREVLKPFFPKKGDKYLVVENNKISEYIY

SEQ ID NO: 33771 - protein, 354 aa, Mycobacterium leprae TN
MSRQPHRSLWRSWLVSTLAALGLSLAVVPGSATPSGPSTLALDRFSNRPPLPLNPAAMVAPQVVNISTRLGYNSAVGAGTGIVIDSSGVVLTNNHVISGATDISAFDVGNGKTYGVDVVGYDRTQDVAVLQLRGASNLPTAVIGGDVAIGEPIVALGNTGGQGGLPSVLPGRVVALNQTVQASEPLTGAQETLSGLIQVDAPIKPGDSGGPVVNSRGQVVGMNTAATDNYKMLGGQGFAIPIGQAMEVVGAIRSGAGSNTVHIGPTAFFGLGVLDNNGNGARVARVVATGPAAMAGISVGDIITSVDGVPISEATAMTNVLVPHHPGETVAVNYRSAGGGDLTANVTLAEGPPA

SEQ ID NO: 33772 - protein, 376 aa, Frankia sp. CcI3
MPEIHIKNQKPRLEPPADPVPKELAASWYVALASGELRGQPKAFQLFGRDVVAWREASGRPAVAGRYCPHQGASLALGAVVDGCLRCPFHGWRFDSSGACVEVPRSQRIPTTARLDSYPTIERFGYIWVWYGTRTPLFELPGFPALEEEQEHYLGFRYTDWTAGHPRQLLENAFDYFHFQTLHSLPLDRAEFRVLSDPEQAADNGPPIDREAYLGGWMEGVVTPGHPLRRPRHWLVAAGATFFTGDAFQLLIDGWPGGQRYTGYVGGREIFKYLMGITPTANGSTIQHAWTGVRRSDRRWRTWLNVAMLIGQSRAGTLQDMPIYDYTQAHVGTARMFYDTNLIRFRRYYRSWVDRVAEGQGEPQPAMARIPGAGAS

SEQ ID NO: 33773 - protein, 535 aa, Bacillus licheniformis ATCC 14580
MTKYIFVTGGVVSSLGKGITASSLGRLLKNRGLNVTIQKFDPYINVDPGTMSPYQHGEVFVTDDGAETDLDLGHYERFIDINLNKYSNVTTGKIYSTVLKKERRGDYLGGTVQVIPHITNEIKDRVFRAGKETHADVVITEIGGTVGDIESLPFLEAIRQIKSDVGRDNVMYIHCTLVPYLKAAGEMKTKPTQHSVKELRSLGIQPNVIVVRTEMPISQDMKDKIALFCDIDPKAVIEAGDADTLYSIPLDLQKQGLDSLVCSHLKLDCREADMEEWKELVKKVKNLSKTVTIALVGKYVELPDAYISVVESLRHAGYAFDADIQVKWINAEEVTEDNVADLVQNADGILVPGGFGDRGVEGKITTVKYAREQKIPFFGICLGMQVASIEYARNVLGLEGAHSAEIDPSTPYPIIDLLPEQKDIEDLGGTLRLGLYPCKLQEGSKAYQAYENEVVYERHRHRYEFNNEFRQQMEEAGFVFSGTSPDGRLVEIIELKDHPWFVASQFHPEFTSRPTRPQALFRDFVHASLKTSEKL

SEQ ID NO: 33774 - protein, 523 aa, Hordeum vulgare subsp. vulgare
MSSMQFSSVLPLEGKACVSPVRREGSACERLKIGDSSSIRHERASRRMCNGGARGPAATGAQCVLTSDASPADTLVLRTSFRRNYADPNEVAAVILGGGTGTQLFPLTSTRATPAVPIGGCYRLIDIPMSNCFNSGINKIFVMTQFNSASLNRHIHRTYLGGGINFTDGSVEVLAATQMPGEAAGWFRGTADAVRKFIWVLEDYYKHKSIEHILILSGDQLYRMDYMELVQKHVDDNADITLSCAPVGESRASEYGLVKFDSSGRVIQFSEKPKGDDLEAMKVDTSFLNFAIDDPAKYPYIASMGVYVFKRDVLLNLLKSRYAELHDFGSEILPRALHDHNVQAYVFTDYWEDIGTIRSFFDANMALCEQPPKFEFYDPKTPFFTSPRYLPPTKSDKCRIKEAIISHGCFLRECKIEHSIIGVRSRLNSGSELKNAMMMGADSYETEDEISRLMSEGKVPIGVGENTKISNCIIDMNARIGRDVVISNKEGVQEADRPEEGYYIRSGIVVIQKNATIKDGTVV

SEQ ID NO: 33775 - protein, 167 aa, Candida albicans SC5314
MTDIAPPSAATPNDYILSLSPEQIEHDQKIGIKAIRLFLQSKTSYDVLPVSYRLIVLDTSLLVKKSLNILLQNNIVSAPLWNNQTSRFAGLLTSSDFINVIQYYLQFPEKFELVDQLTLGGLREIEKAIGVDQIETASIHPFKSLYEACVKMLESKARRIPLIDEHE

SEQ ID NO: 33776 - protein, 141 aa, Candida albicans SC5314
MLLKPLKNLSGLGDVKKLSTCTMDTPVIEVIHLLTENSVSSIPIVDGQGKLINVYEAVDILALVKGGMYTDLDLSVGDALLRRSEEFEGVHTCTLNDRLSTIMDTIRKSRLHRLFVVDDEGKLVSVITLSDILNYILFGED

SEQ ID NO: 33777 - protein, 239 aa, Pseudomonas fluorescens Pf-5
MHPQVPAPTIRIALVGDYDPQITAHQAIPLALERAAQEGAGPMEYQWLATADLHQEKDLEGFHGIWCVPGSPYRNIEGALLAIRVAREQQRPFLGTCGGFQHAVLEYARNVLGWADAEHGETAPDAERVLLTPLSCALVEARESIQLRANSRIARAYGTTCIEEGYRCRYGVNPDFADALLSGTLLPTGHDSAGDLRSLELDEHPFFVATLFQPERAALQDRTPPLVRALLTACRECQA

SEQ ID NO: 33778 - protein, 174 aa, Synechococcus sp. CC9605
MYGRYSRLTSALHPCFTMAISVSAVSVTTPDGSSKSLGDYAGKVLLIVNVASRCGFTKQYAGLQALNEAYAAKGLAVLGFPCNDFGAQEPGSLDEIKSFCSTTYGADFELFEKVHAKGSTTEPYTTLNQMEPSGDVEWNFEKFLVGKNGTVIARFKSGVTPEDLKSAIEAALAA

SEQ ID NO: 33779 - protein, 335 aa, Synechococcus sp. CC9605
MAPAATAASKPKTSVKTAKAVTADVDLVRSYLRDIGRVPLLTHEQEITLGRQVQELMDLESLESELKSKAGEKPSRDQLAKASGLSSIQLKRKLQHGRRAKERMVAANLRLVVSVAKKYTKRNMELLDLIQEGTIGLVRGVEKFDPTRGYKFSTYAYWWIRQGITRAIAEKSRTIRLPIHITEMLNKLKKGQRELSQELGRTPTVTELAEFVELPEDDVKDLMCRARQPVSLEMKVGDGDDTELLELLSGDGDLPSDQVEEDCLKGDLRSLLGQLPHLQEQVLRMRYGMDGEDPMSLTGIGRILGMSRDRVRNLERDGLAGLRRVSDQVEAYVAC

SEQ ID NO: 33780 - protein, 701 aa, Glycine max
MKEGEKVLDPQLWHACAGGMVQMPQMNSKVFYFPQGHAEHAHTNIHLRLPPFILCNVEAVKFMANPETDEVFAKLSLLPLRNSELGADSDGAGGDDVAEPSCCEKPASFAKTLTQSDANNGGGFSVPRYCAETIFPRLDYTAEPPVQTVVAKDVHGETWRFRHIYRGTPRRHLLTTGWSSFVNQKKLVAGDSVVFLRAENGDLCVGIRRAKKGISEGSGSGSSSVWSSASGSGNGNCGIGPYGPFSFFLKEENKMLRNGCGGNLSGRVKVRAEDVVEAVTLAASNKPFEVVYYPRASTPEFCVKASAVRAAMRIQWCSGMRFKMAFETEDASRISWFMGTIASVQVVDPIRWPNSPWRLLQVTWDEPDLLQNVKRVSPWLVELVSNIPLINFTPFSPPRKKLRPQHPDFPLDVQFPIPMFSGNQLGPNSPLCGFSDNAPAGIQGARHAQFGKSLSDLHLNNKLQLGMLPTNIHQLGVYNEISNGNMMTNHDKSKESLSCFLTMGKSTKSLEKSDDVKKHQFLLFGQPILTEQQISSCSGDVLSHRKRSVSDDKDKAKCLMDDSQSTLSQQFSPGKASSAEFSWQLGLDTGHCKVFLESEDVGRTLDLSLFGSYEDLYRRLAIMFGIERSEILNHVLYHDAAGAAKKTGEEPFSDFMKTAKRLTILTDSSSKNIKRAFITGTRNGEHGLDASNKTGPLSIFA

SEQ ID NO: 33781 - protein, 300 aa, Synechococcus sp. CC9605
MSPSHNLWSWNERSIGWSLMGDPNAEVAVLLIHGFGANTNHWRFNQPVLAELLPTYAIDLLGFGRSDQPRARLKDESVSADAVHYGFDLWGQQVADFCRQVIDRPVRLVGNSIGGVVALRAAQLLGERCRGVVLIDCAQRLMDDKQLATQPAWMAWIRPLLKTMVRQRWLSTALFRNAARPGVIRSVLKQAYPSGANIDDDLVNLLFQPTQREGAAEAFRGFINLFDDYLAPQLMEELKLPVDLIWGELDPWEPIAEAERWAQTLNCVQSLSVVQNAGHCPHDEAPDKVNPVLQRLINKN

SEQ ID NO: 33782 - protein, 960 aa, Arabidopsis thaliana
MEGGRGGGDGNFLPNSNFGVFSDSAMDMDFMDELLFDGCWLETTDGKSLKQTMGQQVSDSTTMNDNNNNSYLYGYQYAENLSQDHISNEETGRKFPPIPPGFLKIEDLSNQVPFDQSAVMSSAQAEKFLLEESEGGRRYWIAPRTSQGPSSSVKERLVQAIEGLNEEVQDKDFLIQIWLPIQQEGKNFLTTSEQPHFFNPKYSSLKRYRDVSVAYNFLADEDSKESVGLPGRVFLKKLPEWTPDVRFFRSEEYPRIKEAEQCDVRGSLALPVFERGSGTCLGVVEIVTTTQKMNYRPELDNICKALESVNLRSSRSLNPPSREVYNEFYYAALPEVSEFLTLVCRVYDLPLALTWAPCARQGKVGSRHSDENFSECVSTVDDACIVPDHQSRHFLEACSEHHLLQGEGIVGKAFNATKLFFVPEVTTFSKTNYPLAHHAKISGLHAALAVPLKNKFNSSVEFVLEFFFPKACLDTEAQQDMLKSLSATLQQDFRSLNLFIDKELELEVVFPVREEVVFAENPLINAGTGEDMKPLPLEEISQEDSSWISHMIKANEKGKGVSLSWEYQKEEPKEEFMLTSGWDNNQIGSGHNNFLSEAEQFQKVTNSGLRIDMDPSFESASFGVGQTLLGSRRPGEKRRTKTEKTIGLEVLRQYFAGSLKDAAKSIGVCPTTLKRICRQHGITRWPSRKIKKVGHSLKKLQLVIDSVQGVQGSIQLDSFYTSFPELSSPHMSGTGTSFKNPNAQTENGVSAQGTAAAPKSPPSSSCSHSSGSSTCCSTGANQSTNTGTTSNTVTTLMAENASAILKRARSEVRLHTMNQDETKSLSRTLSHKTFSEHPLFENPPRLPENSSRKLKAGGASKVKATFGEAKVRFTLLPTWGFRELQHEIARRFNIDNIAPFDLKYLDDDKEWVLLTCEADLEECIDIYRSSQSRTIKISVHEASQVKLGGSFGSIGLGPSL

SEQ ID NO: 33783 - protein, 753 aa, Escherichia coli
MSQHNEKNPHQHQSPLHDSSEAKPGMDSLAPEDGSHRPAAEPTPPGAQPTAPGSLKAPDTRNEKLNSLEDVRKGSENYALTTNQGVRIADDQNSLRAGSRGPTLLEDFILREKITHFDHERIPERIVHARGSAAHGYFQPYKSLSDITKADFLSDPNKITPVFVRFSTVQGGAGSADTVRQIRGFATKFYTEEGIFDLVGNNTPIFFIQDAHKFPDFVHAVKPEPHWAIPQGQSAHDTFWDYVSLQPETLHNVMWAMSDRGIPRSYRTMEGFGIHTFRLINAEGKATFVRFHWKPLAGKASLVWDEAQKLTGRDPDFHRRELWEAIEAGDFPEYELGFQLIPEEDEFKFDFDLLDPTKLIPEELVPVQRVGKMVLNRNPDNFFAENEQAAFHPGHIVPGLDFTNDPLLQGRLFSYTDTQISRLGGPNFHEIPINRPTCPYHNFQRDGMHRMGIDTNPANYEPNSINDNWPRETPPGPKRGGFESYQERVEGNKVRERSPSFGEYYSHPRLFWLSQTPFEQRHIVDGFSFELSKVVRPYIRERVVDQLAHIDLTLAQAVAKNLGIELTDDQLNITPPPDVNGLKKDPSLSLYAIPDGDVKGRVVAILLNDEVRSADLLAILKALKAKGVHAKLLYSRMGEVTADDGTVLPIAATFAGAPSLTVDAVIVPCGNIADIADNGDANYYLMEAYKHLKPIALAGDARKFKATIKIADQGEEGIVEADSADGSFMDELLTLMAAHRVWSRIPKIDKIPA

SEQ ID NO: 33784 - protein, 261 aa, Acinetobacter sp. ADP1
MSKQLDTKVAFITGSASGIGLEIAKKFAAEGAKVVISDVNAEKCEDAVKQLKQQGFDALAAPCDVTDEQAYQAAIELTQKHFGTVDILINNAGFQHVAAIEDFPTEVFQKLIAVMLTGAFIGIKHVFPIMKAQKSGRIINMASINGLIGFAGKAGYNSAKHGVIGLTKVAALESAKDGITVNALCPGYVDTPLVRGQIADLAKTRNVSETTALEDVILAMVPQKRLLTVEEIADYAIFLCSDKAGGVTGQAVVMDGGYTAQ

SEQ ID NO: 33785 - protein, 122 aa, Glycine max
MLESEENYNLELEVPVTNRPYPHHHHRKKVLAKDIPKGFLPIKVGQGEEQQIIVMPIMYLNHPLFSQLLKEAEEEYGFDQQGTIIIPCHVKDFRYVQGLIDKEKCSEHQHQHHVISCFRPSH

SEQ ID NO: 33786 - protein, 233 aa, Pisum sativum
MNQEMNGVEAEKLQEKIDYVFKVVVIGDSAVGKTQILSRFTKNEFCFDSKSTIGVEFQTKTVTINGKLIKAQIWDTAGQERYRAVTSAYYRGALGAMLVYDITKRQTFDHVARWVEELRSHADGSIVIMLIGNKGDLVDQRGVQTEDAVEFAEDQGLFFSETSAFSGENVNSAFLKLLQEINKVVSKRSLECNNGIKGNGNHDVAALKGEKIDIISASELEISEIKKLHSCSC

SEQ ID NO: 33787 - protein, 451 aa, Triticum aestivum
  misc_feature (217)..(217): Xaa can be any naturally occurring amino acid
  unsure (1)..(451): unsure at all Xaa locations
MREIISIHIGQAGIQVGNACWELYCLEHGIQQDGTMPSDTTVGVAHDAFNTFFSETGAGKHVPRAIFVDLEPTVIDEVRTGAYRQLFHPEQLISGKEDAANNFARGHYTVGKEIVDLCLDRVRKLADNCTGLQGFLVFNAVGGGTGSGLGSLLLERLSVDYGKKSKLGFTIYPSPQVSTAVVEPYNSVLSTHSLLEHPDVAVLLDNEAIYDICRRSXLDIERPTYTNLNRLISQIISSLTTSLRFDGAINVDVTEFQTNLVPYPRIHFMLSSYAPVISAEKAYHEQLSVPEITNAVFEPSSMMAKCDPRHGKYMACCLMYRGDVVPKDVNAAVATIKTKRTVQFVDWCPTGFKCGINYQPPSVVPGGDLAKVQRAVCMISNNTAVAEVFSRIDHKFDLMYAKRAFVHWYVGEGMEEGEFSEAREDLAALEKDYEEVGAEGADDEGDEGDDY

SEQ ID NO: 33788 - protein, 342 aa, Gluconobacter oxydans 621H
MKTLLPTSTAGSLPKPSWLAKPETLWSPWKLQGEELVEGKQDALRLTLDDQDRAGIDIVSDGEQTRQHFVTTFIEHLGGVDFENRQTVKIRNRYDASVPSVVGAVTREKPVFVEDAKYLRALTKKPIKWALPGPMTMIDTLYDDHYKSREKLAWEFAKILNQEARELEAAGVDIIQFDEPAFNVFFDEVNDWGIATLEKAVEGLKCETAVHICYGYGIKANIDWKNALGAEWRQYEEIFPKLQKSSIDLISLECQNSRVPMDLIELVRGKKVMVGAIDVATNTIETPEDVASTLRKALQFVDADKLYPSTNCGMAPLSRRVARGKLNALGAGAEIVRKELSA

SEQ ID NO: 33789 - protein, 753 aa, Escherichia coli
MSQHNEKNPHQHQSPLHDSSEAKPGMDSLAPEDGSHRPAAEPTPPGAQPTAPGSLKAPDTRNEKLNSLEDVRKGSENYALTTNQGVRIADDQNSLRAGSRGPTLLEDFILREKITHFDHERIPERIVHARGSAAHGYFQPYKSLSDITKADFLSDPNKITPVFVRFSTVQGGAGSADTVREIRGFATKFYTEEGIFDLVGNNTPIFFIQDAHKFPDFVHAVKPEPHWAIPQGQSAHDTFWDYVSLQPETLHNVMWAMSDRGIPRSYRTMEGFGIHTFRLINAEGKATFVRFHWKPLAGKASLVWDEAQKLTGRDPDFHRRELWEAIEAGDFPEYELGFQLIPEEDEFKFDFDLLDPTKLIPEELVPVQRVGKMVLNRNPDNFFAENEQAAFHPGHIVPGLDFTNDPLLQGRLFSYTDTQISRLGGPNFHEIPINRPTCPYHNFQRDGMHRMGIDTNPANYEPNSINDNWPRETPPGPKRGGFESYQERVEGNKVRERSPSFGEYYSHPRLFWLSQTPFEQRHIVDGFSFELSKVVRPYIRERVVDQLAHIDLTLAQAVAKNLGIELTDDQLNITPPPDVNGLKKDPSLSLYAIPDGDVKGRVVAILLNDEVRSADLLAILKALKAKGVHAKLLYSRMGEVTADDGTVLPIAATFAGAPSLTVDAVIVPCGNIADIADNGDANYYLMEAYKHLKPIALAGDARKFKATIKIADQGEEGIVEADSADGSFMDELLTLMAAHRVWSRIPKIDKIPA

SEQ ID NO: 33790 - protein, 356 aa, Frankia sp. CcI3
MTGSIVTGDLVTAETEPPQPGLAAGWYIALPSEELGKRRGQPLTLFGRELVAWRDGTGRPVIMRRHCPHLGASLAFGKVVDGTLRCPFHHWHFDAAGACTHVPGTDRLPRRVARRSYPTDERYGYVWVWYGNPEPSYPVPAVPALAEGREAYLGYQFSHVTTASPRRVLENAFDCAHFGTLHRVRSGGGLKINILTEPSATAENGPPIGGDASIAAAMETDILDLPPTVRALGIRARKFTLLIDGWPGGQRLTFLLDGHVLAKELLGITPTSDGRTVLQGWSLIRRTGNRALDHLIRLAYRAQHEWGTREDLRIYRHASDVDGTVPVTADHGVLKFRKHYQRWVDAALPDDRACMS

SEQ ID NO: 33791 - protein, 83 aa, Picea abies
MADKGVGSRLSAIFLLVLLVISIGMMQLELAEGRTCKTPSGKFKGVCASSNNCKNVCQTEGFPSGSCDFHVANRKCYCSKPCP

SEQ ID NO: 33792 - protein, 609 aa, Idiomarina loihiensis L2TR
MQQNRQSQLKVLIAKGKEQGFLTFAEVNDHLPQEIVDSDQVEDIIRMINDMGIRVFESAPDADDLMMAESAADEDAAEEAAQALASVDGEIGRTTDPVRMYMREMGTVELLTREGEIDIAKRIEEGINQVQCSVAEYPEAINFLLEQWDSYEAEELRLTDIISGFIDPDEVDEAPVAATNVGSELPSEELEKSDDDDDEDEEEADTGIDPEFARSKFNALREQYEATRQAIAKHGRDGAGARVEIDKLSDLFKQFRLVPKQFDRLVKDMRAMMQRVRVQERIIMKISVEQGEMPKRNFMKAFATHENNMAWVDKEIDSGASYSDTLKEVRGEIERCVNKLVDVERETGLTIGKVKEINRRMSIGEAKARRAKKEMVEANLRLVISIAKKYTNRGLQFLDLIQEGNIGLMKAVDKFEYRRGYKFSTYATWWIRQAITRSIADQARTIRIPVHMIETINKLNRISRQMLQEMGREPLPEELAERMMMPEDKIRKVLKIAKEPISMETPIGDDEDSHLGDFIEDNTLDLPIDSATSESLRNSVRDVLGGLTAREAKVLRMRFGIDMNTDHTLEEVGKQFDVTRERIRQIEAKALRKLRHPSRSEQLKSFLDE

SEQ ID NO: 33793 - protein, 552 aa, Wolinella succinogenes
MSESKKNPETKYIFVTGGVLSSLGKGITSSSVATLLKHSGFNVGILKIDPYINVDPGTMSPFEHGEVFVTYDGAETDLDIGHYERFLNTNFSSKHNFTTGQVYLSVIERERRGGYLGKTIQVIPHIVDEIKHRVRLAGEGKEFLVVELGGTVGDIEGLPFLEAMREMKHELGLERVISVHVTLIPLIKAAGELKTKPTQHSVQELRRIGITPQIIIARSEKPLPKELKKKLSLGCDVDYDSVIVAEDAPTIYQVPLNFMKEDILTPIARRFNMPKIEPKMEEWNRLVKQILAPKDEVTIAFVGKYLSLKESYKSLIEALTHAGANLDTKVNIKWCDSEEIESSGVEPLRYVDGILVPGGFGERGVKGKMEAIRFARENKIPFLGICLGMQLAMIEFARNVLGIAEANSMEFDPQTPEPIIYLIEDFIDQQGNKQVRTHTSPMGGTMRLGEYECGLKEGSQTKAAYQGESLIKERHRHRYEANPKYRERIEQAGLIVSGESEGLIEALELVDHPWFIGVQFHPEFTSRLQNPNPVILTFIQKSLELKKVDRDS

SEQ ID NO: 33794 - protein, 515 aa, Oryza sativa (japonica cultivar-group)
MEKRKRIASKEDLHGQMMKRKKWRLQLSNLPEDILCTIVSKLPLREAARTSILSSQWNRTWCSHTNLNLSYRSIMSRRYIERDIRPEGRKLNAEEFIRRVDAILQQHNGGGVEKIEVIGLLENENAYHINGWVNFAIKSKTKQLVLDFRSFHWPIDEPYNFAFQIFDAANMENLQSLKLGSISLKPPADFKGFQNLKRLKLLDVGITDEDLQLLLSNCNCLEFLGIYCCKLITSLRTTHLSTQLKHLYVYECPCLKEIELNSGLTTLEYIGPLIPLAPPGIYVLTNLRIKSLDISDSLQYIFTELPSTLPRLEMLTLQCRELERITLPDKPIKFIYLKHLRLELAFSGPRKWDADILDFACILEAAPLMEKLEFHMWMNCRDHLRYRKAHGKLRTLPPCPHYHLKEVNIAGFYGQKDQLELAHHILRNSVVLQAMNIDPRPIAACDPSRMAILEAFNFVDGSKVAMKYLCKADHRNVVHVSDVSRKDVENVPAYRLVSPFWIEFDKTKRSGLLIR

SEQ ID NO: 33795 - protein, 414 aa, Staphylococcus aureus subsp. aureus MSSA476
MSQNKRVVITGMGALSPIGNDVKTTWENALKGVNGIDKITRIDTEPYSVHLAGELKNFNIEDHIDKKEARRMDRFTQYAIVAAREAVKDAQLDINENTADRIGVWIGSGIGGMETFEIAHKQLMDKGPRRVSPFFVPMLIPDMATGQVSIDLGAKGPNGATVTACATGTNSIGEAFKIVQRGDADAMITGGTEAPITHMAIAGFSASRALSTNDDIETACRPFQEGRDGFVMGEGAGILVIESLESAQARGANIYAEIVGYGTTGDAYHITAPAPEGEGGSRAMQAAMDDAGIEPKDVQYLNAHGTSTPVGDLNEVKAIKNTFGEAAKHLKVSSTKSMTGHLLGATGGIEAIFSALSIKDSKVAPTIHAVTPDPECDLDIVPNEAQDLDITYAMSNSLGFGGHNAVLVFKKFEA

SEQ ID NO: 33796 - protein, 408 aa, Nitrosomonas europaea ATCC 19718
MQPIKKSSKLDNVCYDIRGPVLDRARQMEDEGQRVIKLNIGNPASFGFEAPDEILQDVIRNLSAASGYCDSKGLFAARKAIMHYTQEKNIANVQMDDIYIGNGVSELIMLATQALLENGDEILVPSPDYPLWTAAISLAGGVARHYTCDEQSSWLPDPENIKAQVSSRTRAIVIINPNNPTGALYPDDLLREIIEIARRNNLIIFADEIYDKILYDSASHTSVASLADDVLFVTFNGLSKNYRAAGFRSGWVVVSGNKTHARDYITGLNMLASMRLCANVPAQFGIQTALGGYQSIHDLTMPTGRLKRQRDLAWKLLTDIPGVTCFKPQSALYLFPRLDPDYYPVKDDEQFALDLLLEEKVLVVQGTGFNWSQPDHFRIVFLPNSDDLTEAIGRIAKFLDRYRTRHGS

SEQ ID NO: 33797 - protein, 449 aa, Haemophilus influenzae Rd KW20
MSKVASLDAFLTKVAQRDGYQPEFLQAVREVFTSIWPFLEANPKYRSEALLERLVEPERAFQFRVAWTDDKGQVQVNRAFRVQFNSAIGPFKGGMRFHPSVNLSILKFLGFEQIFKNALTTLPMGGAKGGSDFDPKGKSDAEVMRFCQALMAELYRHVGADTDVPAGDIGVGGREVGYLAGYMKKLSNQSACVFTGRGLSFGGSLIRPEATGYGLIYFAQAMLAEKGDSFAGKVVSVSGSGNVAQYAIEKALSLGAKVVTCSDSSGYVYDPNGFTTEKLAALFDIKNTKRGRVKDYAEQFGLQYFEGKRPWEVQVDIALPCATQNELELSDAQRLIKNGVKLVAEGANMPTTIEATEALLAADVLFGPGKAANAGGVATSGLEMAQSSQRLYWTAEEVDAQLHRIMLDIHANCKKYGTIEGQENINYVVGANVAGFVKVADAMLAQGVY

SEQ ID NO: 33798 - protein, 427 aa, Nitrosomonas europaea ATCC 19718
MPPQNVATLSPGKGKQEIELPIVSGNEGPDVVDIRSLYAQSGMFTYDPGFVSTASCKSAITFIDGDKGVLLYRGYPIEQLATRCDFMEVSYLLLNGELPTPDQKAKFVDNIKNHTMLHEQLIKFLSGFRRDAHPMAVMVGVVGALSAFYHDAMDVSDAQHREQSAFRLIAKLPTITAIAYKYNIGQPFIYPHNDLGFTENFLHMMFATPAEQYTPNPVIVRALDRILILHADHEQNASTSTVRLAGSSGANPFACISAGITCLWGPAHGGANEACLNMLEQIGDVSRINEYIARAKDKNDPFRLMGFGHRVYKNFDPRATLMRETCHEVLDELGLHNDRLFKLALELEKIALEDDYFITKKLYPNVDFYSGIVQRALGIPTSMFTAIFATARTVGWVAQWNEMISDPEQKIGRPRQLYVGAPRRDVP

SEQ ID NO: 33799 - protein, 250 aa, Solanum commersonii
  misc_feature (231)..(231): Xaa can be any naturally occurring amino acid
  unsure (1)..(250): unsure at all Xaa locations
MGRGRVQLKRIENKINRQVTFSKRRSGLLKKAHEISVLCDAEVGLIVFSTKGKLFEYATDSCMERLLERYERYSFAEKQLVPTDHTSPGSWTLENAKLKARLEVLQRNEKLYVGEDLESLNMKELQNLEHQLASALKHIRSRKNQLMHESISVLQKQDRALQEQNNQLSKKVKEREKEVEQQNQWDQQNHEINSSTFVLPQQLDSPHLGEASQNTNVVDNGEVEGGNSSQXQGAANNTVMPQWMVRHLNG

SEQ ID NO: 33800 - protein, 184 aa, Emiliania huxleyi
MKVLLNWLLVASLFAASPKAAFADVSGLTPCKDSAVFKKRLDGSVKKLQARLANYTEGTPAYLALEQQIDQTKARFAKYGDKGLLCGADGLPHLIADGRPDHAGEFVIPAFGFLYIAGWIGWAGRSYLQFSKKTDKPNENEIIINVPVALGMMSGAFLWPLAAWKELINGQLLVPGDEVTVSPR

SEQ ID NO: 33801 - protein, 205 aa, Macadamia integrifolia
SSFDFMDGHEKPVEGRKINWMKAGILESDRVVTVSPYYAQELISGEQKGVELDNIIRKTGITGIVNGMDVQEWNPSMDKYIDVKYDATTVFEAKPLLKEVLQAEVGLPVDGKIPVIGFIGRLEEQKGSDILAKAISQFIGENVQMVVLGTGKKNMEKQIEQLEIKYPEKVRGVAKFNVPLAHMIIAGADFVLIPSRFEPCGLIQL

SEQ ID NO: 33802 - protein, 582 aa, Pasteurella multocida subsp. multocida str. Pm70
MQDKDLSTVQTFKRLWPIISPFKLGLVVSGIALVINALADAGLISLLKPLLDEGFGKADVSFLRTMSYVVVLVIFLRGISNFISSYCLSWVSGKVVMIMRRRIFKHLMFMPVPFFDQNSSGRLLSRITYDSELVANSSSGALITIVREGAYIISLLAVMLYTSWQLSIVLFLIGPIIAVLIRFVSKRFRELSKNMQNSMGELTSTAEQMLKGHKVVLSFGGQIVEEERFNHVSNDMRRKGMKMAVADAISNPVVQIIASFALAAVLYLATVPTIMDQNLTAGSFTVVFSSMLAMMRPLKSLTNVNAQFQKGMAACQTLFALLDLETEKDLGTHKGENVQGYLSFKNVTFTYQSRDEPALRNLSFDVEKGKTVALVGRSGSGKSTIANLVTRFYDVDQGEITLDGINIQDYRLSSLRKNCAVVSQQVHLFNDTIANNIAYAAKDKYSREEIIKAAKDAYAMEFIEKLEHGLDTVIGENGVNLSGGQRQRLAIARALLRNSPVLILDEATSALDTESERSIQLALEKLQKERTVIVIAHRLSTIENADEILVIEHGEIKERGSHSELLALNGAYKQLHHIQVNH

SEQ ID NO: 33803 - protein, 292 aa, Arabidopsis thaliana
MGVIINHHFLAFIFGILGNVISFLVFLAPVPTFYRIYKRKSTESFQSLPYQVSLFSCMLWLYYALIKKDAFLLITINSFGCVVETLYIAMFFAYATREKRISAMKLFIAMNVAFFSLILMVTHFVVKTPPLQVSVLGWICVAISVSVFAAPLMIVARVIKTKSVEYMPFTLSFFLTISAVMWFAYGLFLNDICIAIPNVVGFVLGLLQMVLYLVYRNSNEKPEKINSSEEQLKSIVVMSPLGVSEVHPVVTESVDPLSEAVHHEDLSKVTKVEEPSIENGKCYVEATRPETV

SEQ ID NO: 33804 - protein, 205 aa, Hakea victoria
SSFDFMDGHEKPVKGRKINWMKAGILESDRVVTVSPYYAQELISGVKKGVELDNIIRKTGIAGIVNGMDVQEWNPSTDKYIDVKYDATTVLDAKPVLKEDLQAEVGLPVDGNIPVIGFIGRLEEQKGSDILAAAISQFVGENVQIVILGTGKKAMEKQIQQLETKYPEKAIGIAKFNVPLAHKIIAGADFMLIPSRFEPCGLIQL

SEQ ID NO: 33805 - protein, 563 aa, Zea mays
MDDPSSASNKHKRKRGRKPKASPPSPDRSSPSPSAAPAPAGRRGRKPRRHEAPADADATRPPSPPRRGEPKPVANGGDVVAVAESGPASWDEVVRVVPCMDAVVKVFCVHTEPNFSLPWQRKRQYSSSSSGFIISGRRVLTNAHSVEHYTQVKLKKRGSDTKYLATVLAIGTECDIALLTVNDDEFWEGVSPVEFGTLPALQDAVTVVGYPIGGDTISVTSGVVSRIEILSYVHGSTELLGLQIDAAINSGNSGGPAFNDRGKCVGIAFQSLKHEDAENIGYVIPTPVITHFIEDYKNSGEYTGFPILGVEWQKMENPDLRKAMGMKPDQKGVRVRRVEPTAPESGCLRPSDIILSFDGVDIANDGTVPFRHGERIGFSYLVSQKYTGEKALVKVLRDSKVHEFKIRLATHKRLVAAHVKGRPPSYYIVAGFVFAAVSVPYLRSEYGKDYEYDAPVKLLVKHLHAMAESPDEQLVVVSQVLVSDINIGYEEIVNTQVLAFNGQPVKNLKNLATMVENCKDEFLKFDLEYDQIVVLETKTAKSATQDILTTHCIPSAMSDDLKA

SEQ ID NO: 33806 - protein, 223 aa, Capsella bursa-pastoris
MNSSSFSAFSEMFGSDYESPGSSGGGDYCPTLATSCPKKPAGRKKFRETRHPIYRGVRQRNSGKWVSELREPNKKTRIWLGTFQTAEMAARAHDVAAITLRGRSACLNFADSAWRLRIPESTCAKEIQKAAAEAALAFQDEMGDTTTAATTTTDHGLDKEETMVEATVTPEQSDSLYIDEEAMFGMPSFLDSMAEGMLLPPPSVQWNTNYDVDGDDDLSLWSY

SEQ ID NO: 33807 - protein, 666 aa, Arabidopsis thaliana
MQDFFGSVRRSLVFRPSSDDDNQENQPPFPGVLADKITSCIRKSKIFIKPSFSPPPPANTVDMAPPISWRKGQLIGRGAFGTVYMGMNLDSGELLAVKQVLIAANFASKEKTQAHIQELEEEVKLLKNLSHPNIVRYLGTVREDDTLNILLEFVPGGSISSLLEKFGPFPESVVRTYTRQLLLGLEYLHNHAIMHRDIKGANILVDNKGCIKLADFGASKQVAELATMTGAKSMKGTPYWMAPEVILQTGHSFSADIWSVGCTVIEMVTGKAPWSQQYKEVAAIFFIGTTKSHPPIPDTLSSDAKDFLLKCLQEVPNLRPTASELLKHPFVMGKHKESASTDLGSVLNNLSTPLPLQINNTKSTPDSTCDDVGDMCNFGSLNYSLVDPVKSIQNKNLWQQNDNGGDEDDMCLIDDENFLTFDGEMSSTLEKDCHLKKSCDDISDMSIALKSKFDESPGNGEKESTMSMECDQPSYSEDDDELTESKIKAFLDEKAADLKKLQTPLYEEFYNSLITFSPSCMESNLSNSKREDTARGFLKLPPKSRSPSRGPLGGSPSRATDATSCSKSPGSGGSRELNINNGGDEASQDGVSARVTDWRGLVVDTKQELSQCVALSEIEKKWKEELDQELERKRQEIMRQAGLGSSPRDRGMSRQREKSRFASPGK

SEQ ID NO: 33808 - protein, 119 aa, Triticum aestivum
MRAISSAAGGMLRARLSAAARLRGGHGDGGGRWTTPGHEVRPKGYPMNRTPPPPGESRKWEDWELPCYVTSFLTVVILGVGLNAKPDLTLETWAHHKALERLQQQELAAASASADALSE

SEQ ID NO: 33809 - protein, 318 aa, Synechococcus sp. CC9605
MALGSVVVCLGEALIDRLGPPGGDPAVDHPLDDRLGGAPANVACGLARLGTPVAFAGRLGQDAIGEAFSSLFAKRGVDTTLLQRDAKCPSRIVLVRRSLDGERQFQGFAGDEGAGFADQALEPVALPEVQWLLIGTLPLASTASAAALFSAARQARSQGTALALDVNWRPTFWDATADAEAGPSSAAKDAIQPLLEQAALIKLAREEALWFFNTDDPGSIQQSLSQRPDVVVTDGASPVLWQLGDESGQQAAFQPPSVVDTTGAGDAFTAGLLHRWAAAPQERVRFAAACGALVCGGAGGIDPQPTQAQVEAFLGGVS

SEQ ID NO: 33810 - protein, 344 aa, Oryza sativa (japonica cultivar-group)
MSRSGAMDLASGLGGKITKDEVKSAVDEYEKYHGYYGGKEEARKSNYTDMVNKYYDLATSFYEYGWGESFHFAHRWNGESLRESIKRHEHFLALQLGVKPGMKVLDVGCGIGGPLREIAKFSLASVTGLNNNEYQITRGKELNRVAGVSGTCDFVKADFMKMPFSDNTFDAVYAIEATCHAPDPVGCYKEIYRVLKPGQCFAVYEWCITDHYEPNNATHKRIKDEIELGNGLPDIRSTQQCLQAAKDAGFEVIWDKDLAEDSPVPWYLPLDPSRFSLSSFRLTTVGRAITRTMVKALEYVGLAPQGSERVSNFLEKAAEGLVEGGKKEIFTPMYFFLVRKPISE

SEQ ID NO: 33811 - protein, 452 aa, Onion yellows phytoplasma OY-M
MQHLDKVISLAKQTGFVFAGSEIYGGLANSWDYGPLGSLLKNNIKKAWLQKFVQEQPNNVLLDGSILLNSTVWKASGHLDSFSDPLTENQDTNKRFRADKLIESHNPQLDISGWSYEQMHDYLVKNQVLGTSNWTPIRPFNMLFKTHQGVILENSKPLYLRPETAQGIFIQFKNILKTTRKKLPFGVCQIGKVFRNEVTPGNFIFRTCEFEQMELEFFCQPGTEAHWFKHWKNLMYDFLITLGMNPQNLTFKDHKKENLSHYSQQTCDILFKFPWGFDELWGIASRTNFDLKTHQQHSKKDLTYFDETTKQKILPYVIEPSLGIERLFFAFLINNYHEESTSNETRQILTFHPFLAPYKVAVLPLIKKTHSAKAQEIHQYLAKHFDVCYDETQSIGKRYRRQDMIGTPFCLTVDDQTLTHNTVTLRNRDTTQQQTFLLAEAKKYIQEKIILK

SEQ ID NO: 33812 - protein, 584 aa, Glycine max
MGDNKRKRGRKAKTPASETLDHPAPVTTTAPNSTSTAMDDVFSVGNVELIDTTASPHHRRLRARPNHSEKPHALPTGRRHARPLDNGGGDFSVPSDVVGVSPAVAMEADPAAWVARALPAMDSVVKVFCVHTEPNFSLPWQRKRQYSSSSSGFVIGGRRVLTNAHSVEHYTQVKLKKRGSDTKYLATVLAIGTECDIAMLTVDDDEFWQGMSPVEFGELPTLQDAVTVVGYPIGGDTISVTSGVVSRIEILSYVHGSTELLGLQIDAAINSGNSGGPAFNDKGNCVGIAFQSLKHEDAENIGYVIPTPVIMHFIQDYEKNGGYTGFPILGVEWQKMENPDLRMAMGMKPDQKGVRIRRIDPTAPESKVLKPSDVILSFDGVDIANDGTVPFRHGERIGFSYLISQKYTGDNAAIKVLRNSDIFKFDIKLDSHRRLIPAHSKGKPPSYYIIAGFVFTTVSVPYLRSEYGKDYEYEAPVKLLDKLLHSMPQSPDEQLVVVSQVLVADINIGYEDIVNTQVLAFNGQPVKNLKSLATMVESCNDEYLKFDLDYDQIVVLRMKTAKAATLDILATHCIPSAMSDDLKS

SEQ ID NO: 33813 - protein, 325 aa, Nostoc punctiforme PCC 73102
MKKQFLATGFFLLSLMFPLKASAQNYDDIYVFGDSLSDTGNVFNFTNGAIPPNPTYFNGRFSNGPIWVEYLASELGLTFNPNNNFAFGGATTGTDNLGLSFLPGLKQEINDFTTTNNSANPNALYIIWAGTNDYLEYFYGNTPNPTESVSNLSSAITSLAGVGAENILVVNLPDLGKFPVTGDNSQTASALSTFTNVHNSDLTKTINLLNQELSPETNIIPLDVNSLYNRIIATPEEFGFTNVTDSCIGDLSVVPIEVLVKPVVCNPDQFLFWDEVHPTTATHQLIGELAFLALKSASVPESSNVLGVLIFAALCVISLRKRHSY

SEQ ID NO: 33814 - protein, 502 aa, Yarrowia lipolytica CLIB122
MFRPAYLRRLPTLKASTRLISTSLKSNQPLATNNPPAPLSKADVPQTMQQLGNLPGGSPVTGPGHHNLSTLSPSPFGGDIASAEDRSSDSHEARLLPENHPPMYLSSMKTSDVVALMLTSAATSHPTLIKLCTKLMPYTPNALIKAIVYSLYCGGANHAEVVETGKKLLDRGFGNMMLSYSVEDAEGGDSANALMDSAVDSIIESIDNVLVKYAHESEKKTGKSITGFVALKPTGLMKNATAILRNHDKPEYAEQWKQYLAVCRKICRHAAENGEGKVGIVFDAEKKVLQPGVYAAQRAMMQEFNVNGAVPVIGTIQMYLQDSIIQLQDDISHAAANGYQIGMKLVRGAYIHSEPDRWTTIHRTKEDSDISYNRGVALCLDGIIPDIQSGTHHSAVGKLIVASHNECSMALAAHRLSADLTPEQLESQDKVIFAQLMGMAEDLGEELAHRGYKVLKYVPWGPVNETKDYLVRRMEENGDTLSDGGMTVAFQCATELAKRLVK

SEQ ID NO: 33815 - protein, 460 aa, Onion yellows phytoplasma OY-M
MEFDNIIKTLNEQAGSEQKLTSQLIMSFLQNQNIKIPYQQIAQSLKEQGIQIISCETQAAPSLNENPNQNDTQPQTNTTNDDFTDLDSELTNANLENTDDNKDEDNTQDSEEDIQDFDISEEDLISDEKLIELEEDEDEKISKIHSDIKMDDSVRMYLKEIGQIPLLSLAEEQKKSILVFLGKQAKQKLAKHKTKEIELSEEQLQEAHDQIEQARRAKDILVESNYRLVVSIAKRYIGRGILFLDLIQEGNMGLMRAVDKFDYQKGFKFSTYATWWIRQAITRAIADQARTIRIPVHIVETINKMALCTRKLTQKLKKKPTVEELADKMNISAEKIRSIQYIEKKPISLEAPARENEEDETSLGDFISDPNILSPHEYMMKEVTQKLLDEVLENTLTDREEKVLKMRYGLLDGKTHTLEEVGTLFGVTRERIRQIESKALRRLRTPAKQSKLKSLYHNHK

SEQ ID NO: 33816 - protein, 503 aa, Pisum sativum
MDIPIPTRQLFINGDWKAPVLNKRIPVINPATQNIIGDIPAATKEDVDVAVAAAKTALTRNKGADWATASGAVRARYLRAIAAKVTEKKPELAKLESIDCGKPLDEAAWDIDDVAGCFEYYADLAEKLDARQKAPVSLPMDTFKSHVLREPIGVVGLITPWNYPMLMATWKVAPALAAGCAAILKPSELASLTCLELGEICKEVGLPRSVLNIVTGLGHEAGAPLASHPDVDKISFTGSSATGSKIMTTAAQLVKPVSLELGGKSPLVVFEDVDLDKAAEWAIFGCFWTNGQICSATSRLILHESIATEFLNRIVKWIKNIKISDPLEEGCRLGPVVSEGQYEKILKFVSNAKSEGATILTGGSRPEHLKKGFFIEPTIITDVTTNMQIWREEVFGPVLCVKTFSTEEEAIDLANDTVYGLGAAVISNDLERCERVTKAFKAGIVWVNCSQPCFTQAPWGGVKRSGFGRELGEWGLDNYLSVKQVTQYISEEPWGWYQPPAKL

SEQ ID NO: 33817 - protein, 101 aa, Glycine max
  misc_feature (61)..(61): Xaa can be any naturally occurring amino acid
  misc_feature (92)..(93): Xaa can be any naturally occurring amino acid
  misc_feature (95)..(95): Xaa can be any naturally occurring amino acid
  unsure (1)..(101): unsure at all Xaa locations
STENQVNGEIYNHEELRKQLPNHTFRTGSDCDVIAHLYEEHGENFMDMLDGYFHLFCWISXNSFIVARDAIGVTSLTLGGGLDGSVWISSEXXGXNDDANF

SEQ ID NO: 33818 - protein, 409 aa, Silicibacter pomeroyi DSS-3
MRRVVVTGLGIVSSIGVNAEEVTASLRAGRSGIVACEEMAEHGFRSRIAGTLKIDVAEHVDKRALRFMGPGAAYAHIAMQQAIADAGLSEEQVVNPRTGLVAGSGGPSTSAMLSAHQTVLKTGATKRIGPFAVPKCMCSTISANLATAFKIKGLNYSITSACSTSLHCIGNAAEQIMMGKQDVMFAGGGEELDWTLSCLFDAMGAMSSKYNDTPEKASRAFDQDRDGFVISGGGGIVVLEELEHALARGAKIYAEVTGYAATSDGHDMVAPSGEGGERAMRLAVSTLPEDRKISYINAHGTSTPVGDVGEVEAVRRVFGEGRVPPISSTKSMTGHAQGAAGALEAIFCLLMLEHDFITPSINVETLAEGIQPGEVATQYVENAGLDSVMTNSFGFGGTNGSMVLSKFRG

SEQ ID NO: 33819 - protein, 488 aa, Bacillus cereus G9241
MNSATNQTTSQTETTKGKGELRRGLKSRHLTMISLGGTIGTGLFLASGGVIHSAGPGGALIAYAAIGIMVYFLMTSLAELAAYMPVTGSFSTYATKFVDPSLGFALGWNYWYNWAITIAAELAAVTLIMKFWFPDTPSLIWSGLCLAIIFLLNYLSVKGFGESEYWFALIKVVTIIIFLIVGFMMIFGIMGGETVGFKNFTVADAPFNGGIMAIIGVFMAAGFSFQGTELLGVAAGETSDPERNIPKAIRSIFWRILLFYILAILVIGLLIPYTTESLAASDVTVSPFTLIFEKAGVAFAASVMNAVILTAVLSAGNSGMYASTRMLWDLARQGKAPKFLGKLDSRGVPVNALIVTSIVGSIAFIASLFGDGVVYIWLLNASGMSGFIAWVGIAISHYRFRKAYIAQGKDLNDLPYRAKWFPFGPIFAFALCIIVILGQNYGAFMGESIDWNGVLVSYIGLPLFLVLWLGYKFTKKTKVIPLDKCELK

SEQ ID NO: 33820 - protein, 156 aa, Oryza sativa (japonica cultivar-group)
MKALAVTLSYMVYDAACCYLNDDVRVDNTVHHLVSIVGIAAGLAYRRCGTEMVASLFVTEISSPLLHLREILKEFGIKDTDLNLLVDILFAVIFSVARMGFGPYLTYVTVTADNPILIKAMATGLQLVSAYWFLRILRMVRHKLGKKRPAPKVAGD

SEQ ID NO: 33821 - protein, 389 aa, Glycine max
NGQPSSDFEHEVERQPIPQHVMTSTSEDLFDFIASSLKEFIAKEGDGSNISQDRRELGFTFSFPVKQMSVSSGILIKWTKGFSIVDMVGRDVAACLQEALTRKGLDMRVAALVNDTVGTLALGHYHDSDTVASVIIGTGTNACYLERVDAIIKCQGLPTTSGYMVVNMEWGNFWSSHLPRTSYDIDLDSESPNPNDQGFEKMISGMYLGDIVRRVILRMSLESDMLGPISSKLSMPFMLRTPMMAAMHEDDSPDLREVARILKGILEIPDVPLKLRKVVVKVCDVVTRRAARLAAAGIVGILKKIGRDGSGGIAGGRRSDMKMKRTVVAIEGGLYSSYTLFRDYLHEALNDILGEDIARHVILKVTEDGSGVGAALLAASHSSYDVDTV

SEQ ID NO: 33822 - protein, 551 aa, Yarrowia lipolytica CLIB122
MAQQQTMPMPDMSNAIVAQDEMGRPFIIVRDQGKKKRAHGIEAVKSHILAARTVSDIVKTSLGPRGLDKILISPDGDITITNDGATIMSQMEIEHQIARLLVELSRSQDDEIGDGTTGVVVLAGALLDQAYELIEKGIHPIRIANGFDQASKVAVERLEQIADTVPVSDVDKSTLIKAAKTSLGSKIVSKAHDLFTNIAVDAVLAVADLDRKDVDFELIKVDGKVGGSLEDTKFVRGVVLDKDMSHPQMPRDITDVKIAILTCPFEPPKPKTKHKLDISSVDEFRKLQAYEQKTFEDMVAKVKATGANLVICQWGFDDEANHLLLQNGIAAVRWVGGPEIELLAIATGARIVPRFEDLSAAKLGHAGRVRELEFGTTRDRMLVVEECANPRAVTVFVRGSNKMIVDEAKRALHDAICVVRNLVRDNRVVYGGGAAEIACAIAVAEKADHMTGIDQYAFRAFANALEAIPTALADNSGLSSIESLASVKSRQVKEGNSRLGIDCLNTGNNDMRENFVVDPLIGKRQQLLLATQLTRMILKINDVIVTGTDDY

SEQ ID NO: 33823 - protein, 455 aa, Deinococcus radiodurans R1
MPSPRFASLRNMTLSETHPTARSEALFVRARAVTPGGVNSPVRAFRSVGGVPRFIASAQGAYLTDADGARYLDYIGSWGPMILGHNHPAVRDAVAQALASGTSFGAPNEREVELAELIVELTGAERVRFVSSGTEATMSALRLARGYTGRKFIVKFRGNYHGHADGLLVEAGSGLLTNAEGDLGAAAPSSAGVPEEYAGLTLVLDYNDPEALDALMAQRGDEIAAVIFEPVVGNAGVLIPTSDFLAALHRVRDFGAVLIADEVMTGFRLSLNGATGLLSLDPDLRCWGKIVGGGLPVGAYGGRADIMDFVSPQGPVYQAGTLSGNPLAMAAGIATLRELKANPGLYRQLDEYAARLAAGLRGAAERAGVAVSINHIGSMLTVFFQDAPDGSVRDYAAAARSDTAAFAAWFQGLLARGIYWAPSQFESIFISAAHGEPELAATLEAAAQAFEGVKP

SEQ ID NO: 33824 - protein, 418 aa, Pseudomonas syringae pv. syringae B728a
MTSSSQRLALLEAVVEQSFNAVLITDANLANGGPFIVYVNPAFCAMTGYTAEALIGASPRILQGPDTDPQVIERMRECLSESLFFEGSTVNYRADGSPYIVEWKISPVRDDAGTVCNFVSVQQNISPRIRAEREQHLLAQALNAALDPIIITDCNSTIVFANEAFQQITGYSSSEILGENPRMLSSGKHDEAFYAQFKEALKSGAPLRTTFINKRKDGSLFYAEHSISPLCNLEGAITHYVSISQDVTTRLGREQKLLEIAHSDPLTGLDNRRSAEHTLERQIPAVSMSGKPFSLIICDIDHFKAVNDRYGHPAGDSVITSVAAILKQRIRLLDVAARWGGEEFLILVPDSSLKQAAELAERIRNSVESLVIPETGSVTISLGVAELSAGETAASLIQRADKALYQAKRLGRNRVECA

SEQ ID NO: 33825 - protein, 221 aa, Arabidopsis thaliana
MEEEYIRIISITTIRIISWGLIFILVRRIFSSYSFDFSTRIVSTLHATIAVTLATLSIQDWSCPVCPIASTSSLRQMETLAFSLSYMIYDLICSHFDQVLSIDNAVHHSVCILGFVAGLFYQKCGSEMVAAIWITEISSPFLHLREILKEIGCRDTDLNLAADVFFATIFSVARMVGGPYLVYVTIPADNPILIKVYSILIDEYDLHFVLGYTYYCFINCS

SEQ ID NO: 33826 - protein, 551 aa, Escherichia coli CFT073
MTHLPHWWQNGVIYQIYPKSFQDTTGSGTGDLRGVIQRLDYLHKLGVDAIWLTPFYVSPQVDNGYDVANYTAIDPTYGTLDDFDELVTQAKSRGIRIILDMVFNHTSTQHAWFREALNKESPYRQFYIWRDGEPETPPNNWRSKFGGSAWRWHAESEQYYLHLFAPEQADLNWENPAVRAELKKVCEFWADRGVDGLRLDVVNLISKDPRYPEDLDGDGRRFYTDGPRAHEFLHEMNRDVFTPRGLMTVGEMSSTSLEHCQRYAALTGSELSMTFNFHHLKVDYPGGEKWTLAKPDFVALKTLFRHWQQGMHNVAWNALFWCNHDQPRIVSRFGDEGEYRVPAAKMLAMVLHGMQGTPYIYQGEEIGMTNPHFTRITDYRDVESLNMFAELRNDGRDADELLAILASKSRDNSRTPMQWTNGDNAGFTAGEPWIGLGDNYQEINVEAALADESSVFYTYQKLIALRKQEAVLTWGDYQDLLPNSPVLWCYRREWKGQTLLVIANLSRETQPWQPGKMLGNWQLVMHNYEEASPQPCTMTLRPFEAVWWLQK

SEQ ID NO: 33827 - protein, 256 aa, Triticum aestivum
MGFLEDFQASVETLPAMLHKNYSLMRELDKSLQGVQLENEQRCQQEIEDIKHGLESGSITTYEPAKLKFSDEAIEEQKHCVRIADEKVALATQTYDLVDAHIQQLDQYMRKLEELRLEKEAAAAAAAAAADTAVAATSAAPAGAGSLRSAAADPAPKTGRAGERSRGGRKKAKVPMEMPTEMPVEQPAIDLELPVDPNEPTYCFCNQVSYGEMVACDNPDCKIEWFHFGCVGLKEQPRGKWYCLSCSAFQKKRKGR

SEQ ID NO: 33828 - protein, 429 aa, Glycine max
PKGQNEPFHYDGEFNLLFSDLWHTSSHEQEVGLSTKPLKWIGEPQTLLINGRGQFNCSLASKFINTTLPECQFKGGEECAPQILHVEPNKTYRIRIASTTSLAALNLAISNHKLVVVEADGNYVTPFAVDDVDIYSGESYSVLLRTDQDPNKNYWLSIGVRGRKPSTSQGLTILNYKTISASIFPTSSPPITPLWNDFEHSKAFTKKIIAKMGTPQPPKLYDRRVFLLNTQNRVDGFTKWSINNVSLTLPPTPYLGSIKFKINNAFDQTPPPMNFPQDYDIFNPPVNPNATIGNGVYMFNLNEVVDVILQNSNQLSVNGSEIHPWHLHGHDFWVLGYGEGKFKLGDEKKFNLTHAPLRNTAVIFPYGWTALRFKADNPGVWAFHCHIEPHLHMGMGVIFAEGVHKVGKIPREALTCGLTGKKLVENGHY

SEQ ID NO: 33829 - protein, 700 aa, Oryza sativa
  misc_feature (414)..(414): Xaa can be any naturally occurring amino acid
  unsure (1)..(700): unsure at all Xaa locations
MAFREDKYVRFHDWRSEHSVGSEKTVLEGRHNVFDSLMDRTVGAFSFLGNSSHPETLNKPASEEKKSKTRVLDPQGPFLQRWNKIFVISCLIAVSVDPLFFYIPVIDGDNICLYLDKKLEIIASVLRFFTDIFYLLHIIFQFRTGFIAPSSRVFGRGVLVEDTFAIAKRYLSTYFLIDFLAVLPLPQVLVLVVLPRLQGSSVMTAKNILMVIVICQYVPRLIRIIPLYLQITRSAGIITETAWAGAAFNLLIYMLASHVLGALWYLLSIQREDTCWKDACSRHDGCDSGSLFCGSNAARNNSFLQDFCPTNGTDNADPTFGIYLPALQNVSQSTSFFEKLFYCFWWGLQNLSSLGQNLKTSTYTWENLFAVFVSTSGLVLFALLIGNVQTYLQSASVRIEEMRVKRRDTEQWQXHRLLPDNLKERILRHEQYRWQETRGVDEEGLLSNLPKNLRREIKRHLCLSLLMRVPMFENMDEKLLDAMCDRLKPMLYTEGSCIIREGDPVNEMLFIMRGNLESMTTNGGQTGFFNSNIIKGGDFCGEELLTWALDPTSASNLPSSTRTVKTLSEVEAFALRADDLKFVATQFRRLHSKQLQHTFRFYSQQWRTWAACFIQAAWHRYCRKKLEDTLFEKEKRLQAAIVSDGSSSLSLGAALYASRFAGNMMRILRRNATRKARLQERVPARLLQKPAEPNFFAEDQ

SEQ ID NO: 33830 - protein, 604 aa, ASPERGILLUS NIDULANS FGSC A4
MVILDKIVSRADRAPAESHPADPKGPQERVAPNSGSDSDPSDLDLFTRNEKEVEQNPDKVTQDAHLGVQKAEAAALVWSRPAVYATYAWIWVCFFLLALQSSVSSTVIYNAYANFSSAPQVATANILYSIIGGVLKLPIAKILNLWGRSEGFLIFLGVYAVGLIIVAACNGPDSYAAGYVLFWVGYNALFLIMDVFMADTSGMRNRAFTFAFSQTPFICTAFTGPLAGQSFLEVANWRWAHGAFVIINVVAFSPLAVVFKFYQKKAERMGLYQHEPSGRTTIQSIIHYIHEFDLIGAALLMAGWVLLLLPFSLTSAGRSQYQDATFIAMVVIGFCLLFVFAAWEKWCARVQFIRYELLKQRTVLGACCMAAISFFAFYCWDLYFYNFCIVVYNLSVSNAGYMLQIYNVGSCFQGVLFGIYIRQTKHFKYACLLFGLPLLILGAGLMIHFRGEDQGIGYIIMCQIFIAFGGGTLVIGQDMAVMASADREGVPMMLSLLGLFSSLGGAIGQAVGAAIYNNSFTGALRSRLPNDLKHMAEEINNGGYLAQMNYPVGGDIRNAINYAWGRSQMYGSIAATCLLALGIPAIAVWRNYNVNKKQNKGIII

SEQ ID NO: 33831 - protein, 432 aa, Wolinella succinogenes
MDNKTLAQEDLRYLWHPCTQMKDHEQFPLIPIARGKGVYLYDFEGNAYIDGVSSWWVNLFGHSHDYINSQIVEQMGRLEHVILAGFTHEPIIKLSKRLVEMTPHGLEKCFYADNGSSAIEVALKMSFHRHKIEGKKRALFLSLSNSYHGETIGALSVGDVALYKETYGEILLATLQTPVPRDLTQEATQEALEALEVILENRGEEISAFVLEPLVQCAGGMHMYSADYVKGASQLCRARGIHLIFDEIAVGFGRTGTLLALEQCGVVPDFLCLSKGITGGYLPLSVVMMSQETYDCFYAPYHENRAFLHSHSYTGNALACAAANATLDLLEDGSVLKNNRLLGERIDTHLKRLALHPRIGNARRTGMIAALDLLGFDPKERVGLRVYSEALKRGILLRPLGNVIYFMPPYVITLTEIDQVFEALEEVLGRIL

SEQ ID NO: 33832 - protein, 168 aa, Zea mays
MAAASSATSVHDFTVKDASGKDVDLSVYKGKVLLIVNVASQCGLTNSNYTELSQLYPKYKDQGFEILAFPCNQFGGQEPGTNDEIVQFACTRFKAEYPIFDKVDVNGSNVSPLYKFLKSSKGGLFGDSIKWNFSKFLVDKEGHVVDRYAPTTSPLSIEKDIKKLLGSS

SEQ ID NO: 33833 - protein, 666 aa, Idiomarina loihiensis L2TR
MSERQYLANAIRALSMDAVQKAKSGHPGAPMGMADIAEVLWRDYLKHNPHNPGWADRDRFVLSNGHGSMLIYSLLHLSGYDLSIEDIKQFRQLDSKTPGHPEYGYTPGIETTTGPLGQGLANAVGMALAEKVLAAQFNRDNHEIVDHHTYTFLGDGCLMEGISHEVCSLAGTLGLGKLIAFYDDNGISIDGEVEGWFTDDTAKRFESYGWHVINKVDGHDSAAITRAIDEARANDDKPTLIICKTVIGYGAPNKQGSESCHGAPLGDDEIVAARKQLNWPHQAFEVPADVYQKWSAVDKGAAVESSWNKRWVAYEQEYPQLAKELKRRLNGELPEGFENTVHNYAKQLQSSPEAVATRKASLNVLNEFGPKLPELLGGSADLAGSNLTLWNDAKGITADDASGNYVFYGVREFGMSAIMNGVTLHGGFKAYGATFLMFMEYARNAVRMSALMKQPSIFVYTHDSIGLGEDGPTHQPVEQLANLRQTPNLQCWRPCDQVETAVAWGAAVQSSKTPSALVFSRQGMQQQERNDDQLTNIARGGYVLKDSDGEPDVILIATGSEVDLAVNAFEQLTEEGHKVRVVSMPSTNVFDIQDAEYKESVLPSSVTRRVAVEAGIADFWYKYVGLNGEVVGMTTFGESAPAGDLYKHFGITTENTVAAAKRLLGA

SEQ ID NO: 33834 - protein, 101 aa, Penicillium sp. NRRL 289215
DKDGDGQITTKELGTVMRSLGQNPSESELQDMINEVDADNNGTIDFPEFLTMMARKMKDTDSEEEIREAFKVFDRDNNGFISAAELRHVMTSIGEKLTDDE

SEQ ID NO: 33835 - protein, 487 aa, Zea mays
  misc_feature (448)..(448): Xaa can be any naturally occurring amino acid
  misc_feature (476)..(476): Xaa can be any naturally occurring amino acid
  unsure (1)..(487): unsure at all Xaa locations
LKDKYSLGRRLGQGQFGTTHLCVERATGKELACKSILKRKLGSDDDVEDVRREIQIMHHLAGHPSVVGIRGAYEDAVAVHLVMELCGGGELFDRIVRRGHYTERKAAELARVIVGVVEACHSMGVMHRDLKPENFLFADHSEEAALKTIDFGLSIFFRPGQIFTDVVGSPYYVAPEVLKKRYGPEADVWSAGVIIYILLCGVPPFWAENEQGIFEEVLHGRLDFESEPWPSISDGAKDLVRRMLVRDPRKRLTAHEVLRHPWVQVGGVAPDRPLDSAVLSRMKQFSAMNKLKKMALRVIAENLSEDEIAGLREMFKMIDADNSGQITFEELKVGLEKVGANLQESEIYALMQAADVDNNGTIDYGEFIAATLHLNKVEREDHLFAAFQYFDKDGSGYITADELQVACEEFGLGDVQLEDLIGEVDQDNDGRIDYNEFVAMMQKPTVGXSRRRPTCRTASVSGSGRRSGWPRPLCLXLPCCLRVGVDD

SEQ ID NO: 33836 - protein, 672 aa, Rhodobacter sphaeroides 2.4.1
MDIQSLREQHPDHWKKACAIRALTLDAVAAANSGHSGMPMGMADVATVLYEKHMVFDARSPDWPNRDRFVLSAGHGSMLVYALLHLTGDPEFPIEQIRNFRQWGSKTAGHPENFLAKGIETTTGPLGQGLAMSVGLAMAEESLRARWGAKIIDHYTYCIAGDGCLMEGVSQEAIGLAGRHELSHLIVMWDNNGITIDGKVSLSDRTDQKARFAAAGWDVFECDGHDPADIDRALTAAKASKGPAFIACTTHIALGSSAQDTSKGHGALTDAKLIADTKAAYGWTSAAFEIPADVKKAWEAIGARGAEARKAWDERLAALSDGKRALFQQQFSCEPPKKLASAIRAVKKDAVEKMPKVATRRASEMVLEAVNPVMPETIGGSADLTGSNNTKTADLGVFDPINRKGRYVYYGIREHGMAAAMNGMALHGGLRPYGGTFMCFADYCRPAIRLSALMHMPVVYVFTHDSIGLGEDGPTHQPVEHLAMLRATPNMMVFRPADLVETAEAWEIALGAKATPSVLALSRQNLPAVRKNHTNKNLVAQGGYVLEEATGKRQVILIASGSEVEVALKAREALEADGIGTRVVSMPCMELFAQQDEAYRRKVLPAGAVRIAIEAGVRMGWDRWLLGERGREGKDGFVGMTGFGASAPAERLFQEFGITYEATVAKAKALLG

SEQ ID NO: 33837 - protein, 511 aa, Oryza sativa
MANIDMGKILAGLENDDARVPKTKLVCTLGPASRSVPMLEKLLRAGMNVARFNFSHGTHEYHQETLDNLRQAMHNTGVLCAVMLDTKGPEIRTGFLKDGKPIKLTKGQELTVTTDYEIKGDENMITMSYKKLPVDVKPGNVILCADGTISLTVLSCDPKAGTVRCRCENTAMLGERKNCNLPGIVVDLPTLTEKDKEDILGWGVPNDIDMIALSFVRKGSDLVTVRQLLGQHAKRIKLMSKVENQEGVVNFDEILRETDAFMVARGDLGMEIPVEKIFLAQKMMIYKCNLAGKPVVTATQMLESMIKSPRPTRAEATDVANAVLDGTDCVMLSGESAAGAYPEVAVKIMARICVEAESSLDNEAVFKEMIRSAPLPMSPLESLASSAVRTANKAKAALIVVLTRGGTTAKLVAKYRPRVPILSVVVPVLTTDSFDWTISSEGPARHSLIYRGLVPLLAEGSAKATDSESTEVILDAALKSAVQKQLCKPGDAVVALHRIGVASVIKICIVK

SEQ ID NO: 33838 - protein, 492 aa, Candida albicans
MPQVTKTNNENEFRLTRSKVQHQESISTIKNTTISNSQHKQQTQQQISSPPQVSVTSSEGVSHVNTRQYLGDVSNQYITNAKPTNKRKPLGGDNAPLQKQQHRPSRPIPIASDNNNNGSTSSSSNSSNNNNNDANRLASLAVPSRLPQKRQATESSTNLVEKLRVPQPEVGERSQSYHKKSRLIDYEWQDLDEEDNDDQLMVSEYVNEIFSYYYELETRMLPDPQYLFKQTLLKPRMRSILVDWLVEMHLKFKLLPESLFLAVNVMDRFMSVEVVQIDKLQLLATAALFTAAKNEEVFSPLVKNYAYFTDGSYTPEEVVQAEKYMLTILNFDLNYPNPMNFLRRISKADDYDVQSRTLGKYLLEITIVDYKFIGMRPSLCCALAMYLARLILGKLPVWNGNLIHYSGGYRISDMRECIELMFQYLIAPIEHDEFFKKYAMRKFMRASTLCRNWAKKFQASGRDLFDERLSTHRLTLEDDDEEEEIVVAEAEE

SEQ ID NO: 33839 - protein, 208 aa, Archaeoglobus fulgidus
  misc_feature (1)..(1): Xaa can be any naturally occurring amino acid
  misc_feature (32)..(32): Xaa can be any naturally occurring amino acid
  misc_feature (86)..(86): Xaa can be any naturally occurring amino acid
  misc_feature (109)..(109): Xaa can be any naturally occurring amino acid
  unsure (1)..(208): unsure at all Xaa locations
XSLEKEYEYLVPPDDYLAAGVHIGTQIKTGDXKKFIFKVRQDGLYVLDIRKLDERIRVAAKFLSRYEPSKILLVAARQYAHKPVQXFSKVVGSDYIVGRFIPGTLTNPXLSEYREPEVVFVNDPAIDKQAVSEATAVGIPVVALCDSNNSSADVDLVIPTNNKGRRALAIVYWLLAREIAKIRGQDFTYSIEDFEAELEGGSHHHHHH

SEQ ID NO: 33840 - protein, 748 aa, Pseudomonas syringae pv. syringae B728a
MNPQGYEHDHVIPTNVEDVAKVLQAAAHSASCTAALLMVSSATGWEQLVSCGQSLLKADEAWLRMVSSYGDVVLVGQDSPANAIQTNSPGTTLIYVAIRGFRHELLGAMLLSNSDGAMVLSAAQRYALQAQAVHIRTYLQPGRDPEANNPLVTSFERLRLLESVVINANDAILITEAEPIDLPGPRIVYCNPAFLAITGFTEEEVIGRTPRILQCEDTSRATLDIIREALSHWRPVEVELLNTRKDGSQFWVELSIVPVANEKGWFTHWVSVQRDITERKESQQLAQRARLEWEEKLALQSRLEERERMSEELTYIAFHDELTSLFNRAYLMNELTTAFETRKSRYERATVLFLDLDGFKVVNDSMGHLAGDQLLKGVANRLQTCVRSNDVLARIGGDEFAILLMGKDQPETAVKMAERIVSQLNTAIQIEGQDIFISCSIGIVSAGESHTKPEELLRDADVAMYSAKKQGRGRWSIFNTSMREAAIDTLMIQNALRQALEDKDFLVFYQPIYSGNCEHLVGVEALVRWNHATMGIISPDAFIPIAEDLGIIHELGAWVMHKACSEVQAWRKEFSHLDLRLNVNVSGKELSHPGFVDRVTRIIASTGLPATQLQIEVTESVFLYQPDAIAEILRQIRQLGVRVALDDFGTGYSSLGYIDRYPIDAVKIDRSFVSRMMTYERSEAIVSSILSLGRALNLDITAEGVETAEQYNLLRKMGCPYFQGYLLNRPMRSEALLHIIKSAAECTA

SEQ ID NO: 33841 - protein, 208 aa, Archaeoglobus fulgidus
MSLEKEYEYLVPPDDYLAAGVHIGTQIKTGDMKKFIFKVRQDGLYVLDIRKLDERIRVAAKFLSRYEPSKILLVAARQYAHKPVQMFSKVVGSDYIVGRFIPGTLTNPMLSEYREPEVVFVNDPAIDKQAVSEATAVGIPVVALCDSNNSSADVDLVIPTNNKGRRALAIVYWLLAREIAKIRGQDFTYSIEDFEAELEGGSHHHHHH

SEQ ID NO: 33842 - protein, 611 aa, Zea mays
MALSASRVQQAEELLQRPAERQLMRSQLAAAARSINWSYALFWSISDTQPGVLTWTDGFYNGEVKTRKISNSVELTSDQLVMQRSDQLRELYEALLSGEGDRRAAPVRPAGSLSPEDLGDTEWYYVVSMTYAFRPGQGLPGRSFASDEHVWLCNAHLAGSKAFPRALLAKSASIQSILCIPVMGGVLELGTTDTVPEAPDLVSRATAGFWEPQCPTYSEEPSSSPSGRANETGEAAADDGTFAFEELDHNNGMDIEAMTAAGGHGQEEELRLREAEALSDDASLEHITKEIEEFYSLCEEMDLQALPLPLEEGWTVDASNFEVPCSSPQPAPPPVDRATANVAADASRAPVYGSRATSFMAWTRSSQQSSCSDEAAPAVVPAVEEPQRLLKKVVAGGGAWESCGGATGAAQEMSATKNHVMSERKRREKLNEMFLVLKSLLPSIHRVNKASILAETIAYLKELQRRVQELESSREPASRPSETTTRLITRPSRGNESVRKEVCAGSKRKSPELGRDDVERPPVLTMDAGTSNVTVTVSDKDVLLEVQCRWEELLMTRVFDAIKGLHLDVLSVQASAPDGFMGLKIRAQFAGSGAVVPWMISEALRKAIGKR

SEQ ID NO: 33843 - protein, 134 aa, Glycine max
MAGLQRSAVSFRRQGSSGFVWDDRFLQEELNKVKEDHNNNNNHDHDNDDGGEIKELQVQTTPPLQRIRSNGGARGYRTGKVSPAIEPPSPRLSACGFCAAFGKAGDNKHRPRDRKHNARYEAQFLWWAITRTPS

SEQ ID NO: 33844 - protein, 482 aa, Streptomyces avermitilis MA-4680
MSILNDVPKQLFIGGTWADAADGATMPVDDPATGEILCHVADAGPKDARLAADAAVEAQDGWARTAPRERSEILRRAYEIIVSRTGELALLMTSEMGKPLAEARGEVAYAAEFFRWFSEEAVRIDGGYGVLPDGRNRMLLMRRPVGPCLLVTPWNFPLAMGTRKIGPAIAAGCTMVLKPAPQTPLSSLALAGILKEAGLPDGVLNVVTTSRAGEVVEPLLTGGRIRKLSFTGSTRVGRLLLAQCADAVVRTSMELGGNAPFIVLDDADLSAAVDGAMTAKMRNMGEACTAANRFFVHRSVADEFGRRLAERMGALVVGPGTRDGVDVGPLIDEAGRAKVEELVADAVERGARVLVGGVAPDGPGRFYPPTVLADVDPGSRLMETEIFGPVAAILVFDDEDEVVRRANDTPWGLVGYVFTQGLDRALRVSERLEVGMVGVNTGLVSNPAAPFGGVKQSGLGREGGRVGIEEFLEYKYLAVPLR

SEQ ID NO: 33845 - protein, 575 aa, Glycine max
MGLKALFVWCIIWLGLAHLSLGGRVRHYKFDVEYMIRKPDCLEHVVMGINGQFPGPTIRAEVGDILDIALTNKLFTEGTVIHWHGIRQVGTPWADGTAAISQCAINPGETFHYRFTVDRPGTYFYHGHHGMQRSAGLYGSLIVDLPKGQNEPFHYDGEFNLLLSDLWHTSSHEQEVGLSSKPFKWIGEPQTLLINGKGQFNCSLASKFINTTLPQCQLKGGEECAPQILHVEPNKTYRIRIASTTALASLNLAISNHKLVVVEADGNYVSPFAVDDIDIYSGESYSVLLRTDQDPNKNYWLSIGVRGRRAPNTPQGLTILNYKPISASIFPISPPPITPIWNDFERSKAFTKKIIAKMGTPQPPKRSDRTIFLLNTQNLLDGFTKWAINNVSLTLPPTPYLGSIKFKINNAFDKTPPPVTFPQDYDIFNPPVNPNTTIGNGVYMFNLNEVVDVILQNANQLSGSGSEIHPWHLHGHDFWVLGYGEGKFKPSDEKKFNLTHAPLRNTAVIFPYGWTALRFKADNPGVWAFHCHIEPHLHMGMGVIFAEGVHKVGKIPRDALTCGLTGNKLVGNRHY

SEQ ID NO: 33846 - protein, 419 aa, Streptomyces avermitilis MA-4680
MSALSPHLRQATPVVAVRGEGVHLYGEDGRRYLDFTAGIGVTSTGHCHPRVVAAAQEQAGTLVHGQYTTVLHPPLRRLVDRLGEVLPAGLDSLFFTNSGSEAVEAALRLARQATGRPNVLVCHGGFHGRTVAAAAMTTSGTRFRSGFSPLMSGVVVTPFPTAFRYGWDEETATRFALQELDYTLRTISSPDDTAAIIVEPVLGEGGYVPATRAFLEGLRERADRHGFVLILDEVQTGVGRTGRFWGHDHFGVTPDILITAKGLASGFPLSGIAASAELMGKAWPGSQGGTYGANAVACAAACATLDVVRDEKLVDNAEAMGARLRAGLAAVAATTPAIGDVRGLGLMLASEFVTEDGGPDPETAARVQRAAVDEGLLLLLCGAWNQVVRMIPALVIDEAEVDEGLRAWSAAVEVGVPAR

SEQ ID NO: 33847 - protein, 108 aa, Brassica napus
MSLVRRSSVFDPFSVDLFDPFDSMFRSIVPSSPSSAAASETAAFASARIDWKETPEAHVFKADLPGVKKEEVKVEVEDGNVLLISGQRSREKEDKGDKWHRVERSSGQ

SEQ ID NO: 33848 - protein, 327 aa, Rhizobium leguminosarum
MAGETVLVVGGAGYIGSHTCLDLANKGYRPVVFDNFSNGHREFVRWGPAEEGDIRDRARLDEVLAKHKPAAILHFAALIEVGESVKDPVSFYENNVIGTLTLLSAAQAAGINAFVFSSTCATYGLPQSVPLDETHRQVPINPYGRTKYIVEQALADYDQYGSLRSVVLRYFNAAGADFEGRIGEWHQPETHAIPLAIDAALGRRQGFKVFGSDYETRDGTCVRDYIHVLDLADAHVRAVEYLLKGGDSVALNLGTGTGTTVKELLGAIEEVSNRPFPVEYIGRREGDSHTLVANNDKARDVLGWVPQYDLSEIIRSAWDWHAKSNQH

SEQ ID NO: 33849 - protein, 92 aa, Penicillium subarcticum
KDGDGQITTKELGTVMRSLGQNPSESELQDMINEVDADNNGTIDFPEFLTMMARKMKDTDSEEEIREAFKVFDRDNNGFISAAELRHVMTSI

SEQ ID NO: 33850 - protein, 262 aa, Frankia sp. EAN1pec
MMCRLTAMGERLSDSIPARRLEGKVAVVTGAGSGIGRAAALLFAREGARVVCADLSGREKETSTIIGEGAVPVHVDVTSSADVQNMIDTAVQEFGRLDVLFNNAGGGGPRKPITEFDEETFDKLIAVNLKGVFLGMKYGIAAMLRGDGGSVINTASAAGLVGWKDQAIYSAAKGGVVQMTKSAALDFAESGVRVNAICPGMTWTGLAHAADDSEPPVANLPQPMRRWGRPQELAAAALFLASDESSFVTGTAIPVDGGYVAR

SEQ ID NO: 33851 - protein, 476 aa, Arabidopsis thaliana
MEDGVTPPLLITEKDTTMIRVKEEVKKQLWLSAPLIGVSLLQYSLQVISVMFVGHLGSLPLSAASIATSFASVTGFTFLLGTASALETLCGQAYGAKLYGKLGIQMQRAMFVLLILSVPLSIIWANTEQILVLVHQDKSIASVAGSYAKYMIPSLFAYGLLQCINRFLQAQNNVFPVFVCSGITTCLHLLLCWLFVLKTGLGYRGAALAISVSYWFNVILLSCYVKFSPSCSHSWTGFSKEAFQELYDFSKIAFPSAVMVCLELWSFELLVLASGLLPNPVLETSVLSICLNTSLTIWQISVGLGGAASIRVSNELGAGNPQVAKLAVYVIVGIAVAEGIVVVTVLLSIRKILGHAFSSDPKIIAYAASMIPIVACGNFLDGLQCVLSGVARGCGWQKIGACVNLGSYYLVGVPLGLLLGFHFHIGGRGLWLGIVTALSVQVLCLSLVTIFTNWDKEAKKATNRVGSSDDKDGDVQ

SEQ ID NO: 33852 - protein, 443 aa, Candida glabrata CBS138
MNNTEDMFRDVENASQNMASTVNTSRMDQRQRRALTDLTSQKVNRIHTSKTIKDIPAYLSNYTADGENKNIDQAFNHSNDQDIGLVNQINSGYANVENEPGKETDHIFIDQDDLSDLDIVQEDSLREQLEEFEHDFENFVEPLSPIFNDEIQDTLDRAFKEYYRATPDMEDDDTFDAVMVTEYGSDIFRYMRKLELKYRPNPYYMAGQPELKWEYRKTVIDWIVQVHERFQLLPETLYLTINIIDRFLSRKNITLNRFQLVSATALLIASKYEEINCPTIKDIVYMVDNTYSRDDIIEAEKYMIDALDFEVSWPGPMSFLRRISKADDYEYRTRNLAKYLLETTLMESSLISALPSWLAAGAYFLSRIILGYEEWTLKHVYYSGYTHEQLYPLATLILDNCQNYEESHQAIWTKYSQPQYHQVSILVTKFLGRVSSDDMSEIY

SEQ ID NO: 33853 - protein, 159 aa, Glycine max
MDFRVMGLESPLFHTLQHMMDMSEDGAGDNKTHNAPTWSYVRDAKAMAATPADVKEYPNSYVFEIDMPGLKSGDIKVQVEDDNLLLICGERKRDEEKEGAKYLRMERRVGKLMRKFVLPENANTDAISAVCQDGVLSVTVQKLPPPEPKKPRTIQVKVA

SEQ ID NO: 33854 - protein, 348 aa, Burkholderia fungorum LB400
MLVTRQNVLRRFWYAIMPMARLDAGPQPFTLLGEPIVLWKGAGGKPHALRDRCCHRTAKLSKGFVDSDGNIACGYHGWTYDCSGQCVRIPQNSGGAIPSRAVVPSYRCEERYGYAWVALEDPLQPIPGFPEDGAPGYRRILQFYERWETSPLRMMENSFDNSHFSFVHKGNFGLFDNPKPSKYEFRPHEWGFEAETHVPVRNPPASYRITGTTEEVTERHLINRWFMPFARRFGCVYPASGIHHIIYNCATPIDDRTLMLSQWLYRNDTEDACSTQELIDWDRPITDEDRDILEATDYDACIDVRRQQECHMESDQPGLLMRRMLLKLLNDHGESEVFREVLPTHMEE

SEQ ID NO: 33855 - protein, 779 aa, Kluyveromyces lactis NRRL Y-1140
MMSQSHVQIQQGNGGSGAGGFYYRGDSNAVMNNVVNTGTGINASAGAGGVSLQQQQDFVNALISVLEVPKDATSVAAEYANDKNTASEVQAYAKIAGKDWTYYLKDIVINIGRNTSPGDASVDIDLGPAKVVSRQHATIKFNSNSALWELHVTGRNGAKVNFHRINSGPNSVPHPLSSGSILDIGGTQMMFILPDQGLYIDPNAVAHLTPKLFMAYYNVTTNPLLRNLFQSNPDLIHSLELSSPSRNGQLGVSSQTQMLPQSSQSHLHSHGNGQPSVRAFKMYDAPDSAMRSQLLSESTGQMYGSNGASNGHGMSHSNGSSDMSNGQLYGTIANTGFNIASTDVSTDLSRDENRNIKPPHSYATMITQAILSTEEGELSLSDIYKHIANHYSYYRYTKAGWQNSIRHNLSLNKAFEKVPRKPGEPGKGMKWRISEETQRDFLEKWQNGKIGKVRRGSSVTRQLQAHMYRFNSLPIQRETFSFNDQSKTNVKPQSSSSSHSDYSQTPKLEKSLQSLQPHSQSSLHQTSPPVPHPPIPSYSQQDHTSSNYSTDHSHQSDLPAPKRQHLNPPSQHSQHQQPALPPPSSGQTRSPNHQQMPSNVSSTGSLLHSPNKHFQVNAVEAYTPERGSNLQKSPQPILNLPSLPQATDMGQSTSRSDSNALQLPTKSSPGVMNLLQFSSVNNTPSTNLQRTPVSHPQVTENLDGKDSKSNMLAVNNAFQESNSINEDDKTNLLSARNVQDENDEDEGRIMSSPIKVKDNRNNQLVVDPNENSVIVKTDQ

SEQ ID NO: 33856 - protein, 857 aa, ASPERGILLUS NIDULANS FGSC A4
MNCPSRTDDTLPHCDWNQNPPFLAPDLTTRQDLNGISNVREFKDAGTGVITMQHCLHDADLLSRYKRESEVLRQMHPRASLTQSVLATAVLISASGFVDWLTGTVVPFRQTTTASVGHLVLDKETMQVRRYAKRQACASGGVDGSEYNTSLHVGALFIILGVSTLACALPILVIRFSRLRIPPAFLFFVRHFGTGVLIATAFVHLLPTAFTLLGDPCLSNFWTTDYPAMPGAISLGGIFLVTLIEMVFSPVRQATRKVSKQTDQESAPPAGTDHLSGGNHEQSCDCDRSPHIRPKGPLVGRAASFSRAIHRIGEESDRIHRISSAPEASPLPRVSEVKRFTHRQGSVDEFQLSEKQKYNKDVMQVFMLEVGILFHSVFIGMSLSVSVGNEFVVLLIAIVFHQTFEGLALGSRIASLEWPDKAIQPWLMSLAYGCTYVPQSYMVTFTEQVSTPIGQAIGIATHSLYSPDSEVGLLLVGTMNAISAGLLIFASLIELLSEDFLSDESWRVLRGRRRVIACALVFLGAFCMSLVGAWALVSYSLSSLSHCASSLFTWPQMSASLPGDRELPHSQYDLNTYWGRVRHAADISDPRYEPYYWLTVLLADLCLLIDTGEPVFLPFRMSCYVLSNLVVTAGMLTPGLKTTGTLLWQIANQSLNVAINNANSNKSTPLSVSQMAKSYLMAVSASCSVALGLNALVPRLKNVSPNTKLILGRLVPFAAVSSASALNVFLMRSEEIRQGIDVYPVPEKEGEPVQSLGRSKVAAKIAVGETAISRVLNATPIMVVPPLILVQLEKRKLLSPRMVLPANLGLVLATSLFALPLALGAFPQRQAISAASLEEEFWNRGGKDGKVEFNRGM

SEQ ID NO: 33857 - protein, 394 aa, Staphylococcus aureus
MQEAYIVAYGRSAAAKAKQGALFHERPDDVAAKVLQGVLKRIDGKFNKNMIEDVIVGTAFPEGLQGQNIARTIALRTGLSDTVPGQTVNRYCSSGLQTIAIAANQIMAGQGDILVAGGVELMIAVPMGGNEPTNNPTLQYDDIGASYPMGLTAENVASQFDVSREDQDAYAVRSHQRAYDAQRDGRFKDEIIPIQVNSVEYTNAGPKVHTNIFDQDEFIRPDTTMEALAKLRTVFKADGTVTAGTSAPLSDGAGFVVLMSGDKVKELGVTPIARFVGYKAVGVDPKIMGIGPAYAIPEVLSLSNLSVEDIDLIELNEAFASQTIASIKEVGLDISRTNVNGGAIALGHPLGATGAMLTARLLNEMGRRPDSRYGMVTMCIGVGMGAAAIFEYVR

SEQ ID NO: 33858 - protein, 237 aa, Paenibacillus macerans
MKKKSCFTLVTTFAFSLIFSVSALAGSVFWEPLSYFNRSTWEKADGYSNGGVFNCTWRANNVNFTNDGKLKLGLTSSAYNKFDCAEYRSTNIYGYGLYEVSMKPAKNTGIVSSFFTYTGPAHGTQWDEIDIEFLGKDTTKVQFNYYTNGVGGHEKVISLGFDASKGFHTYAFDWQPGYIKWYVDGVLKHTATANIPSTPGKIMMNLWNGTGVDDWLGSYNGANPLYAEYDWVKYTSN

SEQ ID NO: 33859 - protein, 468 aa, Rhodobacter sphaeroides 2.4.1
MEARMPAKSFDMIVIGAGPGGYVCAIRGAQLGLNVAIVERENLGGICLNWGCIPTKAMLRSAEVYHLMHRAKEFGLKAEGIGYDLGAVVKRSRGVAKQLSSGVAHLMKKNRITVVMGDATLAGKGRVSVRTDKGTEELEAKSIVLATGARARELPGLEADGDLVWTYRHALEPKRMPKKLLVIGSGAIGIEFASFFNTLGADTTVVEVMERILPVEDAEVSAFAKKQFVKQGMKILEKATVKKLDRAGGKVTAHVETGGKTETMEFDTVISAVGIVGNVEGLGLEAAGVTVDRSHVVTDEYCRTGVEGLYAIGDIAGAPWLAHKASHEGVMVAELIAGGHPHPIKPGSIAGCTYCQPQVASVGLTEAKAKEKGYEIRVGRFPFIGNGKAIALGEAEGFVKTVFDAKTGELLGAHMVGAEVTELIQGYVVGRALETTEAELMETVFPHPTLSEMMHESVLDAYGRAIHF

SEQ ID NO: 33860 - protein, 285 aa, Zea mays
  misc_feature (191)..(191): Xaa can be any naturally occurring amino acid
  misc_feature (207)..(207): Xaa can be any naturally occurring amino acid
  misc_feature (219)..(219): Xaa can be any naturally occurring amino acid
  unsure (1)..(285): unsure at all Xaa locations
MLARAPPPRPCSSAVGGACIARAHPRAAAGGGGVVKLVAARPGTRTTVAAAAAEAASNGSAAAAVAGISSSSSALVTSTVGKSTNILWHECAIGQKERQGLLNQKGCVVWITGLSGSGKSTLACALSRELHGRGHLTYVLDGDNLRHGLNRDLSFGAEDRAENIRRVGEVAKLFADAGLVCIASLIFPLQXDLKRRFGILLPKALVXIEVFLDVPLPSXEARDPKGLYKLARAGKIKGFTGIDDPYEPPSDCEIVIRCKVGDCPSPESMAGHVVSYLETNGFLQD

SEQ ID NO: 33861 - protein, 454 aa, Saccharomyces cerevisiae
MSEPEFQQAYEEVVSSLEDSTLFEQHPEYRKVLPIVSVPERIIQFRVTWENDKGEQEVAQGYRVQYNSAKGPYKGGLRFHPSGNLSILKFLGFEQIFKNSLTGLDMGGGKGGLCVDLKGRSNNEIRRICYAFMRELSRHIGQDTDVPAGDIGVGGREIGYLFGAYRSYKNSWEGVLTGKGLNWGGSLIRPEATGYGLLYYTQAMIDYATNGKESFEGKRVTISGSGNVAQYAALKVIELGGTVVSLSDSKGCIILETGITSEQVAVISSAKVNFKSLEQIVNEYSTFSENKVQYIAGARPWTHVQKVDIALPCATQNEVSGEEAKALVAQGVKFIAEGSNMGSTPEAIAVFETARSTATGPSEAVWYGPPKAANLGGVAVSGLEMAQNSQRITWTSERVDQELKRIMINCFNECIDYAKKYTKDGKVLPSLVKGANIASFIKVSDAMFDQGDVF

SEQ ID NO: 33862 - protein, 217 aa, Mangifera indica
MAGFRAEDDYDYLFKVGLIGDSGVGKSNLALRFTRNEFSLESKSTIGVEFATRSLNVDGKVIKAQIWDTAGQERYRAITSAYYRGAVGALLVYDVTRHSTFENVERWLRELRDHTDPNIVVMLIGNKSDLRHLVAVSTEDGNLLAERESLSFMETSALEATNVDNAFAEVLSKSTALLARRLWKLVIIDQDAVPSKSEKIDVSKDVSAVKKVGCCSG

SEQ ID NO: 33863 - protein, 491 aa, Buchnera aphidicola str. Sg (Schizaphis graminum)
MNYFNKLCFRKRINEIKKCRFMKENEFKNENKILKNKKIVIVGCGSQGLNQALNMRDSGLNISFALKKNSILRKNSSWLNATKNNFEVNDYESLIPNADLVINLTPDKQHENVVKELQKLMKKNSCLGYSHGFNIVECGEIIRKDITVVMVAPKCPGTEVREEFKRGFGVPTLIAVHTENDPKKIGLEIAKAWAFSTGGHRAGVLESSFIAEVKSDLMGEQTILCGLLQTASLICYEKLIKDKHNPSYAAKLIQYGWETITESLKHGGITLMMDRLSNPSKIKAFKISKKIKKILSPLFKKHMDDIISGSFSKEMMIDWHNNDKKLLNWREDTKKTPFEKNILSYSEKISEQEYYDHGTLMVSILKSGIELAFETMINTGIINESAYYESLHELPLIANTIARKKLYEMNIVISDTAEYGSYLFSEAAYPILKDFIMSLEKNVLGLSLPNTKIDNIELYKINEEIRNHPIEIVGKKLRKHMKEMKSICVAK

SEQ ID NO: 33864 - protein, 347 aa, Arabidopsis thaliana
MATTTQHMNQIFLVLLLISFAISPAISTVPKECETDSTDSCIDKTKALPLKIVAIVAILVTSMIGVAAPLFSRYVTFLHPDGKIFMIIKCFASGIILGTGFMHVLPDSFEMLSSPCLEDNPWHKFPFTGFVAMLSGLVTLAIDSIATSLYTKKAVADDSEERTTPMIIQIDHLPLTTKERSSTCSKQLLRYRVIATVLELGIIVHSVVIGLSLGATNDTCTIKGLIAALCFHQMFEGMGLGGCILQAEYTNVKKFVMAFFFAVTTPSGIALGIALSSVYKDNSPTALITVGLLNACSAGLLIYMALVDLLAAEFMGSMLQRSVKLQLNCFGAALLGCGGMSVLAKWA

SEQ ID NO: 33865 - protein, 453 aa, Saccharomyces cerevisiae
MSEPEFQQAYEEVVSSLEDSTLFEQHPEYRKVLPIVSVPERIIQFRVTWENDKGEQEVAQGYRVQYNSAKGPYKGGLRFHPSVNLSILKFLGFEQIFKNSLTGLDMGGGKGGLCVDLKGRSNNEIRRICYAFMRELSRHIGQDTDVPAGDIGVGGREIGYLFGAYRSYKNSWEGVLTGKGLNWGGSLIRPEATGYGLVYYTQAMIDYATNGKESFEGKRVTISGSGNVAQYAALKVIELGGTVVSLSDSKGCIISETGITSEQVADISSAKVNFKSLEQIVNEYSTFSENKVQYIAGARPWTHVQKVDIALPCATQNEVSGEEAKALVAQGVKFIAEGSNMGSTPEAIAVFETARSTPLDQATVWYGPPKAANLGGVAVSGLEMAQNSQRITWTSERVDQELKRIMINCFNECIDYAKKYTKDGKVLPSLVKGANIASFIKVSDAMFDQGDVF

SEQ ID NO: 33866 - protein, 393 aa, Synechococcus sp. CC9605
MTQAASLSDRLSREMPELLELRRHLHAHPELSGEEHQTAALVAGELRQLGWRVREGVGRTGLVAELGPGHGPTVGLRVDMDALPVEERTGLSYASTRQGLMHACGHDLHTCTGLGVARLLAQEPHLGARVRLLFQPAEELAQGAVWMRDAGAVEGLDALYGVHVVPNLPVGTVGIRRGCLTAAAGELEILVQGEGGHGARPHQSVDAVWLAARVITELQQTIARRLDALQPVVISFGKVEGGRAFNVIADQVRLLGTVRCLDLQQHAQLPAWIDETVQGICASGGGTALVNYRCIAPPVHNDPQLTTLLERCAVECLGRDKVLPVEQPSLGAEDFAELLRDVPGMMVRLGVAGPEGCAPLHNGAFALEEDALGVGIAVLTATVLAWITENTSA

SEQ ID NO: 33867 - protein, 128 aa, Buchnera aphidicola str. Sg (Schizaphis graminum)
MAYSKKVMDHYENPRNVGSFSNSDSNVGSGLVGAPACGDVMKLQIKVNEQGIIEDACFKTYGCGSAIASSSLVTEWIKGKSITEAEAIKNTSIVEELELPPVKIHCSILAEDAIKAAISDYKSKKNKN

SEQ ID NO: 33868 - protein, 146 aa, Hordeum vulgare
MSKPVKIGPWGGNGGSERDVQPKPIRMVSMTVSSGAIVDAIAFTYVGTDNVQHSSGIKWGGTGGTEDTINLDATNYVTEISGTVGKFGTDDIVTSLKIITSKGVTRTYGSGTGIPFRVPVLDGGKIAGFFGRAGAFLDAIGFYITP

SEQ ID NO: 33869 - protein, 391 aa, Bacillus cereus G9241
MSFIDGENYRMKRAKKKKHKGIVISSIAGTIVGASLFAFGAPLFSNDTDAFPQAEASGSNMAEAQGIKQISFVDAVDRASEAVVGVINIQRDNFSEADSEAGTGSGVIYKKTDGQAYIVTNNHVVAGANRIEVSLSDGKKVPGKVLGTDVVTDLAVLEIDAKHVKKVIEIGDSNTVRRGEPVIAIGNPLGLQFSGTVTQGIISANERIVPVDLDQDGHYDWQVEVLQTDAAINPGNSGGALVNAAGQLIGINSMKIAAKEVEGIGLAIPVTRAVPIMNELEKYGKVRRPYVGIELRSLNEIPNYYWSKTLHLPGNVTEGVCILDVKSPSPGADAGLREHDVIVAVDGKPVRDIIGFRTALYDKKINDKMTLTFYRGTKRATTTVKLGIQKY

SEQ ID NO: 33870 - protein, 669 aa, Synechococcus sp. CC9605
MVAAPASLDTLCINSIRMLAVDAINKSNSGHPGLPMGCAPMGYALWDKFLNHNPKNPKWFNRDRFVLSAGHGCMLLYALLHLTGYDSVSIEDIKQFRQWGSKTPGHPETFETPGVEVTTGPLGAGISNAVGLAIAESHLAAKFNKADATVVDHYTYVIMGDGCNQEGVSSEAASLAGHLKLGKLIALYDDNSITIDGRTDVSFTEDVLKRYEAYGWHVQHVAEGNTDVDAIANAIEAAKAVTDKPSIIKVTTTIGYGSPNKADTAGVHGAALGEEEAALTRQQLGWDYAPFEIPQDAYDQFRQAIDRGASLEAEWNQTLATYRTKYPTEAAEFERMLRGELPEGWDKELPTYTPEDGGLATRKHSQICLGALGPNLPELIGGSADLTHSNYTDIKGETGSYQASSPEKRYLHFGVREHAMAAILNGIAYHNSGLIPYGGTFLVFADYMRGSMRLSALSELGVIYVLTHDSIGVGEDGPTHQPIETIPSLRAMPNMLVFRPGDGNETSGAYKVAIQNRKRPSSLCLSRQGMANQANSSIDKVALGGYVLEDCAGTPDLILIGTGTELDLCVQAAKQLTAEGKKVRVVSMPCVELFDEQTDAYKEEVLPNAARKRMVVEAAESFGWHRFIGLDGDSVTMNRFGASAPGGTCLKEFGFTVENVVAKAKALLG

SEQ ID NO: 33871 - protein, 346 aa, Saccharomyces cerevisiae
MAEASIEKTQILQKYLELDQRGRIIAEYVWIDGTGNLRSKGRTLGHDSDIYLKPVAYYPDPFRRGDNIVVLAACYNNDGTPNKFNHRHEAAKLFAAHKDEEIWFGLEQEYTLFDMYDDVYGWPKGGYPAPQGPYYCGVGAGKVYARDMIEAHYRACLYAGLEISGINAEVMPSQWEFQVGPCTGIDMGDQLWMARYFLHRVAEEFGIKISFHPKPLKGDWNGAGCHTNVSTKEMRQPGGMKYIEQAIEKLSKRHAEHIKLYGSDNDMRLTGRHETASMTAFSSGVANRGSSIRIPRSVAKEGYGYFEDRRPASNIDPYLVTGIMCETVCGAIDNADMTKEFERESS

SEQ ID NO: 33872 - protein, 415 aa, Synechococcus sp. CC9605
MVDGLHRVVITGLGAVTPIGNTVQDYWNGLTSGSNGVDAITLFDASAHACRFAAEVKDFDPSGFIEPKEAKRWDRFCKFGVVAAKQAVAHAGLEINEANADRIGTIIGSGVGGLLTMETQAHVLEGKGPGRVSPFTVPMMIPNMATGLAAIALGTKGPSSAVATACAAGSNAVGDAFRLLQLGKADAMVCGGAESAITPLGVAGFASAKALSFRNDDPATASRPFDKERDGFVIGEGAGVLVLEKLEHAQARGATILGEVVGYGMTCDAHHITSPTPGGVGGAEAMRLALADGGIDPYEIDYVNAHGTSTPANDKNETSAIKAALGERALQIPVSSTKSMTGHLLGGSGGIEAVACVLALQHGVVPPTINHTTPDPDCDLDVVPNEARDQTLGTVLSNSFGFGGHNVCLAFKRAS

SEQ ID NO: 33873 - protein, 628 aa, Xanthomonas axonopodis pv. citri str. 306
MSDWSLDQARKTYSIPHWADGYFDVNAAGHVVVTPTADGPAVSLPEVVDAARAAGAKLPLLVRFPDILGQRLGKLQAAFAQAQSEWDYAGGYTAVYPIKVNQHRGVAGTLASHHGEGFGLEAGSKPELMAVLALSRPGGLIVCNGYKDREYIRLALIGRKLGLQTFIVIEKPSELTLVLEEARALDVKPGLGVRMRLASLGAGKWQNSGGDKAKFGLSPRQVLDLWKTLRDTEYADSLNLLHFHMGSQISNVRDIANGMREATRYFVELSRLGAKISHVDVGGGLGIDYEGTRSRSYCSINYGLHSYASNIVQPLASACEEHGLTPPRIVTECGRAMTAHHAVLIANVSEVEQAPEGRVPDAHDDEPAAIRHLREIHDELDVRPAVELFQEAQHFHAEGLSAYALGQIDLTHRARIDDLFYAIAHGVRARLSFDEKSHRPVLDELNERLVDKYFVNFSVFESIPDVWAIDQVFPIVPIERLNEAPQRRGIIADMTCDSDGMVKTYVENESLDSSLPLHRLNAGESYRIGFFLVGAYQEILGDIHNLFGDTDAVEVVVDRDGYRIAQQRRGDTTDVMLDYVGYQLDTLRATYAERIAAAHLSPERAQELSAALEAGLTGYTYLSDEPLG

SEQ ID NO: 33874 - protein, 380 aa, Mesembryanthemum crystallinum
MVCQMEANNKVNGGGENGSSSEGRPPNPLAATYRQCYSATRVSSTCKKTLMRHPSLVKATDIPIEPLAVADCESEFLPIVRSGAWTDIGFRSNMEDAYLCVDDFIHHYGVEHINESPNAFYGVFDGHGRKHAADFACCHLPRFIFEDNDFPREIERVITSAFLQTDNAFAEACSLDAGLASGTTALAALVLGRSLVVANVGDCRAVLCRRGKAIEMSRDHKPHCSREIKRIEASGGYVDDGYLNGQLNVARALGDWHMEGMKGADGGPLTAEPELITTELTQEDEFLIIGCDGLWDVFRSQNAVDFARRRLQDHNDPVMCSRDLVDEALKRKSGDNLAVVVVCFQPQPPPNLIVPRARVQRSVSAEGLRELQSFLDGLES

SEQ ID NO: 33875 - protein, 613 aa, Bacillus cereus G9241
MKKVGFFQSIHLKFVLIYMLLILIAMQVIGVYFVRELEKSLVQGFRDSLTQQTNLLSYNLKQEFKKSYTKAETESTDETIKTSIRKFASDRKKDIQEVSVFDANRKLLAISDESKQNKVNRTSTDIAVQRVLVQKKPEVKIEKDGRTGHRVQVMITPIMDDNNKDALGAIYVVASMEDVYKQMKDINQIFATGTVIALLVTAVLGILLAQTITRPISDMRRQAIEMAKGNYSRKVKVHSHDEIGQLALSFNNLSKKLQQARSSTESERRKLSSVLSHMTDGVIATDRKGDIILLNDPAEKMLNVSRETALDQSVLEVLGIQEEFTLDHLYEEPDSVLLDFSTRNEPYILRASFSVIQKETGKANGLIAVLYDVTEQERIERERREFVANVSHELRTPLTTMRSYLEALTDGAWQDPNIAPQFLTVTQEETERMIRLVNALLQLSKLDSTEHRLMKEWVDFTDFFNNIIDRFEMSKEQNVSFKRSFSKKSRFIDMDTDKITQVLYNIISNALKYSPEGGTVTYRLRDRGELLEISVSDQGMGIPKENVDKIFERFYRVDKARSRQMGGTGLGLAIAKEMIEAHGGSIWAKSEEGKGTTIYFTLPMAADEEDDWE

SEQ ID NO: 33876 - protein, 471 aa, Yarrowia lipolytica CLIB122
MAGVRFLDLVKPFTPFLPEVQAPERKVPFNQKIMWTAVTLMIFLVMSEIPLYGINSSDKSDALYWLRMMLASNRGSLMELGITPIVSSGMVFQLLGGTQLIEVNMDLKSDRELYQTAQKLFAIILSLGQATVYVLTGMYGPPKDLGVGVCLLLIFQLVLAALVVILLDELLQKGYGLGSGISLFIATNICEQIFWKAFAPTTVNKGRGYEFEGAIVAFVHLLFTRKDKKRAIIEAFTRQDLPNMSQLVTTVAIFAAVIYLQGFRVDIPVKSSKQRGPYGVFPIKLFYTSNLPIMLQSALTSNIFIISQMLFKKFPTNVLVRLLGVWDGREGMQQLFPVSGIAYYMQPPFNAKEALADPVKTVIYIAFVLGVCAVFSATWIEISGSSPRDVAKQFKEQGLVIAGRRETSAYKELKRIIPTAAAFGGATIGALSVASDLLGALSSGTGILMAVTTIYGYYEMAAKEGYVDAAI

SEQ ID NO: 33877 - protein, 299 aa, Zea mays
MGNVSGRAEDLVDADIDDGNNMRRASSSSAGYVRGGGSSSSPPASPPRPHSPRMFVPQKINNIIRKEKVEGDAKKKNMISPVTPLQRATEVSPPVFNQILMNQQQEDSDGPPQKKIPTLLTCTLGGRNIYVEGSWDNWTSKKLVEKSGKDHTILLMLSSGVHRYRFIVDGERRFIPDLPCETDNVGQILNLVDVHDFVPDSVESVSELMAPPSPDSSYGFHVPGEKEFSKEPPQLPSQLYLGVLNSRSTEEGCARPRHVVLDHLYIEKGWGAQPLVALGYTHRFRSKFVTCVLYKAIER

SEQ ID NO: 33878 - protein, 337 aa, Vitis vinifera
MGSQSETVCVTGASGFIGSWLVMRLLERGYTVRATVRDPTNVKKVKHLLDLPKAETHLTLWKADLADEGSFDEAIKGCTGVFHVATPMDFESKDPENEVIKPTIEGMLGIMKSCAAAKTVRRLVFTSSAGTVNIQEHQLPVYDESCWSDMEFCRAKKMTAWMYFVSKTLAEQAAWKYAKENNIDFITIIPTLVVGPFIMSSMPPSLITALSPITGNEAHYSIIRQGQFVHLDDLCNAHIYLFENPKAEGRYICSSHDCIILDLAKMLREKYPEYNIPTEFKGVDENLKSVCFSSKKLTDLGFEFKYSLEDMFTGAVDTCRAKGLLPPSHEKPVDGKT

SEQ ID NO: 33879 - protein, 473 aa, Frankia sp. EAN1pec
MALHGRARGRRGDQAVEVRPHLVIPDEDGPVPRYRMPRSSMSAETAYQIVRDELMLDGNARLNLATFVTTWMDEHADRLMTECAAKNMIDKDEYPQTAELEARCVNMLADLWHAPDATDAVGCSTTGSSEACMLAGLAMLRRWRSTREPHRGEQGGGQRGTGARPNIVMGANVQVCWEKFARYWDVEPRLMPLAPGRTHLTAPEAVARCDENTIGVVAVLGSTFDGTYEPVAEIVAALDQLAASGGPDVPVHVDGASGGFIAPFCDPDLVWDFRLERVVSINASGHKYGLVYPGVGWALWRDARHLPAELVFDVDYLGGSMPTFALNFSRPGAQVVAQYYSLLRLGRAGYRHTARTCRDNARWLADEIAKLGPFELISDGSGIPAFAFTTRDAAEFSVFEVSEALRARGWLVPAYRFPPDLAELAVLRIVVRAEFSRDLAHLLVEDLHRVVGRLSGPRWRTAAGGADLASFHH

SEQ ID NO: 33880 - protein, 209 aa, Ashbya gossypii ATCC 10895
MTQGPLFSLSPASTLDDLLEANQRWRRQQEQRKPALFRSHAAGQTPHTLFLACCDSRYSEACLGVEPGEAFTYRTIANIMDPADPGFRAALEFALHVLQVSRIVLCGHTNCGGVSTCLTGTRRALATPQCSSLHAHLDSLDALCSANKPALASLPPAVQAEQLVIANVRAQYRALSQDAAVRAAVQQRHLTLHALLYHVDTGALTVVAP

SEQ ID NO: 33881 - protein, 625 aa, Zea mays
MAGPEKTVVWFRRDLRIQDNPALAAAAKGGSVLPIFIWCPSDYGQYYPGRCSRWWLKQSLVHLGKSLELLGCPLVLIRAEDSTLAALLECVRSISATRVVYNRLYDPISLVLDNKIKNELPAHGISIQSFNGDLLYEPWDVYDENGQAFTTFNKYWEKCMSLPIEISQYLAPTRLVAAPGLANVRCCSIDDLGLESSKDVESSNALLSRAWSPGWRNAENMLEEFVSYGLLEYSEHGMKVGGSTTSLLSPYLHFGELSVRMIYQLVKMRQVKWQNEGKSEAEESVRLFLRSIGFREYSRYLCFNYPFTHERSFLGNLKHYPWLLDEGRFKSWRQGMTGYPLVDAGMRELWATGWTHNRIRVIVSSFAVKFLQIPWIWGMKYFWDVLLDADLESDILGWQYISGSLPDGHELSRLDNPEVQGQKYDPDGEYVRTWIPELARMPTEWIHSPWAAPNSILQVAGVELGFNYPKPIVELHMARECLDDAISTMWQLDTAAKLAELDGEVVDDNLNNIRNFDIPKVVLNKKLSPSTSSMEHRVLSTNGKDEKSQPTEVKALYKQIIRDDMMNDSNMDDTCSTANLKVTRKRSSSDSYFQKTADRDGTSKVEDNDSEDSGTSISRPSKKAA

SEQ ID NO: 33882 - protein, 379 aa, Zea mays
MADYVYGPGRTHLFVPGPVNIPDPVIRAMNRQNEDYRSPAVPALTKVLLEDVKKIFKTTTGTPFMIPTTGTGAWESALTNTLSPGDRVVSFLIGQFSLLWIDQQRRLGFDVDAVESEWGQGADLAALERRLRDDAPRHAIKAVAIVHNETATGVTNDLAAVRALLDKHAHPALLLVDGVSSICALDFRMDEWGVDVALTGSQKALSMPTGMGIVCASPRALEASKTYTSVRDFFDGLRTARYYDIEEGLDNVVRRHNRLGTATRLAVEAWGLSNCCQKEEWFSDTVTAVVVPPNIDSAEVVRHAWKRYNLSLGLGLNKVAGKVFRIGHLGNLNELQLLGCLSGVEMVLKDVGYPVKLGSGVAAAAAYLSNSTPLIPSRI

SEQ ID NO: 33883 - protein, 1331 aa, Trichophyton rubrum
MVEVSEKPNTQDDGVSKQENRNPASSSSSTSDKEKVAKKGNSDATKSSTPEDLDAQLAHLPEHEREILKQQLFIPDAKATYGTLFRYATRNDMIFLAIVSLASIAAGAALPLFTVLFGSLAGTFRDIALHRITYDEFNSILTRNSLYFVYLGIAQFILLYVSTVGFIYVGEHITQKIRAKYLHAILRQNIGFFDKLGAGEVTTRITADTNLIQDGISEKVGLTLTALSTFFSAFIIGYVRYWKLALICSSTIVAMILVMGGISRFVVKSGRMTLVSYGEGGTVAEEVISSIRNATAFGTQEKLARQYEVHLKEARKWGRRLQMMLGIMFGSMMAIMYSNYGLGFWMGSRFLVGGETDLSAIVNILLAIVIGSFSIGNVAPNTQAFASAISAGAKIFSTIDRVSAIDPGSDEGDTIENVEGTIEFRGIKHIYPSRPEVVVMEDINLVVPKGKTTALVGPSGSGKSTVVGLLERFYNPVSGSVLLDGRDIKTLNLRWLRQQISLVSQEPTLFGTTIFENIRLGLIGSPMENESEEQIKERIVSAAKEANAHDFIMGLPDGYATDVGQRGFLLSGGQKQRIAIARAIVSDPKILLLDEATSALDTKSEGVVQAALDAASRGRTTIVIAHRLSTIKSADNIVVIVGGRIAEQGTHDELVDKKGTYLQLVEAQKINEERGEESEDEAVLEKEKEISRQISVPAKSVNSGKYPDEDVEANLGRIDTKKSLSSVILSQKRSQEKETEYSLGTLIRFIAGFNKPERLIMLCGFFFAVLSGAGQPVQSVFFAKGITTLSLPPSLYGKLREDANFWSLMFLMLGLVQLVTQSAQGVIFAICSESLIYRARSKSFRAMLRQDIAFFDLPENSTGALTSFLSTETKHLSGVSGATLGTILMVSTTLIVALTVALAFGWKLALVCISTVPVLLLCGFYRFWILAQFQTRAKKAYESSASYACEATSSIRTVASLTREQGVMEIYEGQLNDQAKKSLRSVAKSSLLYAASQSFSFFCLALGFWYGGGLLGKGEYNAFQFFLCISCVIFGSQSAGIVFSFSPDMGKAKSAAADFKRLFDRVPTIDIESTDGEKLETVEGTIEFRDVHFRYPTRPEQPVLRGLNLTVKPGQYIALVGPSGCGKSTTIALVERFYDTLSGGVYIDGKDISRLNVNSYRSHLALVSQEPTLYQGTIRDNVLLGVDRDDVPDEQVFAACKAANIYDFIMSLPDGFGTVVGSKGSMLSGGQKQRIAIARALIRDPKVLLLDEATSALDSESEKVVQAALDAAAKGRTTIAVAHRLSTIQKADIIYVFDQGRIVESGTHHELLQNKGRYYELVHMQSLEKTQ

SEQ ID NO: 33884 - protein, 259 aa, Triticum aestivum
  misc_feature (106)..(106): Xaa can be any naturally occurring amino acid
  misc_feature (143)..(143): Xaa can be any naturally occurring amino acid
  unsure (1)..(259): unsure at all Xaa locations
MTEQPEKKLTHRIRQKRAQEVQTLLQKPDHEIDRMKLSVTHLRLLQEARERIQSKTPSGPSSSNQSSSHFGDTDDFDPFGDNYDNDRTENHALENATKLNYHSYMXQKTRAKWTKSDTDLFYQALRQFGSDFAMIQQLFPDKXRDQVRQKFKSEDKKHPMQVHDAILHRSRDNLYLKQVMKQLNIEDSLKDINSTQKQEVASTEGNTGNDVISETNISVENVSNLSDEEMGTLQSEVKEGEDVAAGNADDVDLDVFDWY

SEQ ID NO: 33885 - protein, 503 aa, Vibrio sp. Ex25
MEESQRSTQMANYFNTLNLREQLDQLGRCRFMDRSEFASEADYLKGKKVVIVGCGAQGLNQGLNMRDSGLDVAYALRQAAIDEQRQSFKNAKDNGFEVGSYETLIPQADLVVNLTPDKQHTNVVETVMPLMKEGAALGYSHGFNVVEEGMQIRKDLTVVMVAPKCPGTEVREEYKRGFGVPTLIAVHPENDPKGEGWDIAKAWAAATGGHRAGCLESSFVAEVKSDLMGEQTILCGMLQAGSIVCYEKMIADGIDPGYAGKLLQYGWETITEALKFGGITHMMDRLTNPAKVKAFELSEELKELMRPLYNKHMDDIITGHFSSTMMADWANDDANLLGWRAETGETAFENYPETDVEISEQEYFDNGILMVAMVRAGVELAFEAMTASGIIDESAYYESLHELPLIANTIARKRLYEMNVVISDTAEYGNYLFANVATPLLREKFMPSVSTDVIGKGLGETSNQVDNATLIAVNETIRNHPVEYIGEELRGYMTDMKRIAVGG

SEQ ID NO: 33886 - protein, 228 aa, Sinorhizobium meliloti
MFRKLSVEFLGTFWLVLGGCGSAVLAAAFPEVGIGLLGVSFAFGLTVLTMAYAVGGISGGHFNPAVSVGLAVAGRMPPASLVGYILAQVTGAIAAAAVLYVIASGKADFQLGGFAANGYGEHSPGGYSLTAALVTEVVMTAFFLLIILGSTHSRVPVGFAPIAIGLGLTLIHLVSIPVTNTSVNPARSTGQALFVGDWAISQLWLFWVAPLIGAVIAGIVWKIVGDDS

SEQ ID NO: 33887 - protein, 179 aa, Arabidopsis thaliana
SEKCVSFLLLLLLQCHNGHTLCSTCKVRVHNRCPTCRQELGDIRCLALEKVAESLELPCKFYNLGCPEIFPYYSKLKHESLCNFRPYSCPYAGSECGIVGDIPFLVAHLRDDHKVDMHAGSTFNHRYVKSNPREVENATWMLTVFHCFGQYFCLHFEAFQLGMGPVYMAFLRFMGDEED

SEQ ID NO: 33888 - protein, 243 aa, Pseudomonas fluorescens PfO-1
MSDKDKQPLAASAQAAPVAESADAALKRIVDGFLHFHHEVFPQQEELFKKLATAQSPRAMFITCADSRIVPELITQSSPGDLFVTRNVGNVVPPYGQMNGGVSTAIEYAVLALGVQHIIICGHSDCGAMRAVLNPDSLEKMPTVKAWLRHAEVAKTMVHDNCNCTDEKESMPILTEENVIAQLQHLRTHPSVASRMANGHLFIHGWVYNIETSEIKAYDADQGCFLPLDGSHPIPVATPKARF

SEQ ID NO: 33889 - protein, 278 aa, Oryza sativa
MDAQYNPRTVEEVFRDFKGRRAGLVRALTADVEDFFRQCDPEKENLCLYGFPNEHWEVNLPAEEVPPELPEPALGINFARDGMQEKDWLSMVAVHSDAWLLSVAFYFGARFGFDKNDRKRLFGMINDLPTIFEVVSGKSKAKPPSANNHSNSKSKSSNKTKSSEPRAKQPKPQPQPPVKNEGREEEGGPDDEEGGGGGGGGGREEEHGETLCGACGESYGADEFWICCDICEKWFHGKCVKITPAKAEHIKQYKCPSCSGGNGGGGGVSGNGKRARPS

SEQ ID NO: 33890 - protein, 394 aa, Staphylococcus aureus
MQEAYIVAYGRSAAAKAKQGALFHERPDDVAAKVLQGVLKRIDGKFNKNMIEDVIVGTAFPEGLQGQNIARTIALRTGLSDTVPGQTVNRYCSSGLQTIAIAANQIMAGQGDILVAGGVELMSAVPMGGNEPTNNPTLQYDDIGASYPMGLTAENVASQFDVSREDQDAYAVRSHQRAYDAQRDGRFKDEIIPIQVNSVEYTNTGPKVHTNIFDQDEFIRPDTTMEVLAKLRTVFKADGTVTAGTSAPLSDGAGFVVLMSGDKVKELGVTPIARFVGYKAVGVDPKIMGIGPAYAIPEVLSLSNLSVEDIDLIELNEAFASQTIASIKEVGLDISRTNVNGGAIALGHPLGATGAMLTARLLNEMGRRPDSRYGMVTMCIGVGMGAAAIFEYVR

SEQ ID NO: 33891 - protein, 511 aa, Oryza sativa (japonica cultivar-group)
MASAAAAAATQVGTYFLRNYYNLLQQSPDVVHQFYNDASTMVRVDDLAGTNTTASTMMDIHSLIMSLNFTQIEIKTANFLNSWGDGVLVMVSGLVQTKEYSHQRKFIQMFFLAPQEKGYFVLNDYFHFVDEEQVQPAPVIAQDNFETNMASNSVVEPEYIHEEENQSAVPITSEESDAVENYTYSEPPQQVVSQSDNWGDEPLPEEPISSFTNGMAMAPEEPVQSPPVPPPHVEEPVGEPVKKTYASILRTAKAPLVFPVAQPAPTRPHQATETNQAAQHSVMTSSVATEKPKTDVYGEFAVQDDEESKSVYVGNVPSSVSEADLENEFKKFGRLIPDGVAIRSRKETGGYYAFVEFEELSGVHNALKASPIEINGRQIYVEERKPNSGIRGGNYTQLHGVVDGGIYLRKYDMNLVRVWHWQEGEAEVVSVEEGEGMLEGEATTNMRATVVVAGHQMATSVFLTMRGAFWGATTQETKWFTTPWWWPGGICICCKHEQQFVDEECVVSNFG

SEQ ID NO: 33892 - protein, 456 aa, Crocosphaera watsonii WH 8501
MNSTWDLITLSYFSPKTWLNASYLYRVVGLLSPWRSSSFLLRFGEAIGALLISLIFIFGPFITTGLLGVWLIAITGYWGILTLSDTEKTGFSPIHLFVFLYWGVSAVAVALSPVKAAAFSGLIKLTLYLVFFVFCARILRSPRLTNWLITVVLGIGLVVGSYGIRQQIFGVEQLATWNDPTSELAGATRVYSYLGNPNLLSAYLLPAIALGVAAFFVWQGLVPKLLAITITLVNTACLYFTGSRGGWIAMIALVGAFLLLFFVWFKNNLSPFWRKWLLPLVFGILGGLMFAAIMSVDSLRIRVMSIFVGRQDSSNNFRINVWMAVLDMIRDRPLIGIGPGNAAFNKIYPLYMSPKYSALSAYSVLLETAVETGLIGLSIFVWLLVITVNQGVQQIQRLRDKNNPAGMWLIAAIAAMAGLMAQGLFDTVWYRPQVNTLWWFMVALVASQYQPLNNEQ

SEQ ID NO: 33893 - protein, 512 aa, Schizosaccharomyces pombe
MDTTAVASKGSTNVGSSTDTLSTSASLHPSMNAGSVNEYSEQQRHGTNSFNGKPSVHDSVGSDASVSNGHNNHNESSLWTSGIPKALEEATKSKKPDSLVSTSTSGCASAHSVGYQNIDNLIPSPLPESASRSSSQSSHQRHSRDGRGELGSEHGERRSAMDGLRDRHIRKVRVSQLLDLQRRRIRPADHTTKDRYGIQDFNFLQTLGTGSFGRVHLVQSNHNRLYYAIKVLEKKKIVDMKQIEHTCDERYILSRVQHPFITILWGTFQDAKNLFMVMDFAEGGELFSLLRKCHRFPEKVAKFYAAEVILALDYLHHNQIVYRDLKPENLLLDRFGHLKIVDFGFAKRVSTSNCCTLCGTPDYLAPEIISLKPYNKAADWWSLGILIFEMLAGYPPFYSENPMKLYENILEGKVNYPSYFSPASIDLLSHLLQRDITCRYGNLKDGSMDIIMHPWFRDISWDKILTRKIEVPYVPPIQAGMGDSSQFDAYADVATDYGTSEDPEFTSIFKDF

SEQ ID NO: 33894 - protein, 170 aa, Glycine max
  misc_feature (147)..(147): Xaa can be any naturally occurring amino acid
  misc_feature (156)..(156): Xaa can be any naturally occurring amino acid
  unsure (1)..(170): unsure at all Xaa locations
MEERYEPLKELGAGNFGVARLAKDKKTGELVAVKYIERGKKIDENVQREIINHRSLRHPNIIRFKEVLLTPTHLAIVLEYASGGELFERICTAGRFSEHDARYFFQQLISGVSYCHSMEICHTHLKLPNSLLDGNPSPRLKICDFGXSKAALLPSXPNPQVGTPAYIAPN

SEQ ID NO: 33895 - protein, 824 aa, Geobacter sulfurreducens PCA
MKTLADLFSSFSGRSLDTAFVFRTGVRRYRYTYAFLHDYSLRMNAWLADRGVGTGDRVVLWGPNSPWWGIAFWGIIARGAIVVPVDFMSGADRADTIAGLTDARLVIQSRDKLERLAGRPAVLLEELPFLLELCPQLTTRHVPDPDDIAELIYTSGTTGTPKGVILTHRNLVANLLQVNRHISIVSSDYVFLSLLPLSHMFEQMGGFLTPLYQGASVVYIRTLKPSAIMEALGEEDVHALIAVPRLLQLLKDSIERELDARGLGPVLARLLTVAERLPAQRRKLLFAPIHRKFGRHFSLFVSGGAPLAPEVFRFWAGLGFTVLEGYGLTECAPVLTANTLERQVAGSVGPALPGVELKLVDGEVMTRGDNVFPGYYRNEAATRDAFDDGWFRTGDLGEFDGAGWLRILGRKKELIVTGAGVNVFPDEIESMLNRAAGVRESCVIGLDRGKGEEVHAVLIPDESGRQVEEIINEINGRLDDLHRITGWSIWPDAEFPKTTTLKIRKFLVKERVAQGDGTGGAGGSSDRLSLMIARITGNPAEKVTDDAVLTTDLGLTSIGRLELVNAIEMEFRLDLEDTVIGPHTRVAELREVIRLRSKVHSRERFRFWTARPVALAVRRVLDMILHGPLIRHYASLKVEGGEHLGGLDGPVLFVSNHLSYFDHPVIMSALPSEWRYTTATAAWEEFFFRNYKNFAQKIWKRLAYEYASVAFTVFPLPQSRGFRGALRFMGGLADRGMSILVFPEGERSRDGTLLPFRPGLGVMVRELAIPVVPVRIRGLEQVFPRGASWPARGEVRVTFGKAIRFTLESPAEIVAAARTAVEDL

SEQ ID NO: 33896 - protein, 571 aa, Glycine max
MEQYEILEQIGKGAFGSALLVRHKHEKKKYVLKKIRLARQTDRTPRSAHQEMELISKVRNPFIVEYKDSWVEKGWFVCIIIGYCEAGDMAQAIKKANGGNFPEEKLSKWLVQLLMALDYLHGNHILHRDGKCSSIFLTKDQDIRLGDFGLAKMLSSDDLASSVVGTPSYMCPELLADIPYGSKSDIWSLGCCIYEMAAYKPAFKAFDIQSLLIKINKCIVSPMPTMYSAAFRGLVKSMLRKNPELRPTAAELLNHPHLQPYIHKIHLKLNSPIRSTFPFQWPESNYIRRTQFVEPESVSTLSDLDKCLSFNNDRTLNPSISGTEQVSQCSTQRAHGLSTCSKEKIYELSVGCVREKYKTDKSKASKFSTVERTPRSRAVTVSATTKRHTIATSKTTHSGPKRDSLPASHAPSRKFSTPPRTRARATPNLYTNVLGSLDSLDVSINAPRIDKIVEFPMAFCEDPFSPIRGPSSTSARCSSSSAGSTADCSITKDKYCVSSHSSTDLDQRRFDTSSYQQRAEALEGLLEFSARLLQQQRFDELGVLLKPFGLEKVSPRETAIWLTKSFKQTAV

SEQ ID NO: 33897 - protein, 319 aa, Mesembryanthemum crystallinum
MGYLDSVLSSSNQVHVEEQPVSGGGISQNGKFSYGYASSPGKRSSMEDFYETRIDGVEGEVVGLFGVFDGHGGARAAEYVKQNLFSNLIKHPKFISDTKSAIAEAYTHTDSEFLKSENTQNRDAGSTASTAILVGDRLLVANVGDSRAVICRGGEAIAVSRDHKPDQSDERQRIEDAGGFVMWAGTWRVGGVLAVSRAFGDKLLKQYVVADPEIQEEVVDSSLEFLILASDGLWDVVTNEEAVTMVKPIQDTEEAAKKLMQEAYQRGSADNITCVVVRFLDNPIDSSSNRISGNHGDTSSRVLGGSHTDSSNRFLGKPR

SEQ ID NO: 33898 - protein, 442 aa, Arabidopsis thaliana
MTATEAKNRKINVGDGDDVVDIEIPDTAHQISSDSWFQVAFVLTTGINSAYVLGYSGTIMVPLGWIGGVVGLLIATAISLYTNTLIAKLHEFGGRRHIRYRDLAGFIYGRKAYHLTWGLQYVNLFMINCGFIILAGSALKAVYVLFRDDHTMKLPHFIAIAGLICAIFAIGIPHLSALGVWLGVSTFLSLIYIVVAIVLSVRDGVKTPSRDYEIQGSSLSKLFTITGAAANLVFAFNTGMLPEIQATVRQPVVKNMMKALYFQFTAGVLPMYAVTFIGYWAYGSSTSTYLLNSVNGPLWVKALANVSAILQSVISLHIFASPTYEYMDTKYGIKGNPFAIKNLLFRIMARGGYIAVSTLISALLPFLGDFMSLTGAVSTFPLTFILANHMYYKAKNNKLNAMQKLWHWLNVVFFSLMSVAAAIAAVRLIAVDSKNFHVFADL

SEQ ID NO: 33899 - protein, 154 aa, Thermoplasma acidophilum DSM 1728
MGRISDAGGDIMIEVKEPKRIPLIGSLQGMYTVFKHLFKKPITVQYPEEKAYTPARFKFRIFLSMDDCVGCTLCEQVCPNLSIRMIVVERNNPHNKRNLYPQVNFGTCTVCRNCEEICPTEAIYLTHELETARTRNNFFYSPEELEKTESEVKK

SEQ ID NO: 33900 - protein, 281 aa, Oryza sativa
MRKRERENPCGICGHYHKYELGEVCGVCGHRPPASAGAQAAAGAAQAAAPRQDSAFPSEILKDFLFLGSYDNASRSELLKTIGISHILNTVPLCQNLYRNSFTYHCLQDEKTLQFDDAIQFLEQCERDKARVLVHCMSGKSRSAAFVIAFLMKTKGWRLSQCFQWVKERRPQVQLADAAQRQLIEYEQKLFNSTVGIPAQAFVPTDAFPSLGFGFPKPSGDIQVPIFNQQAPASIFERVSPHNIPSNFTFGAERTTEVKLPDNNSFGVVNSSGGDSMMDSS

SEQ ID NO: 33901 - protein, 78 aa, Glycine max
  misc_feature (59)..(59): Xaa can be any naturally occurring amino acid
  unsure (1)..(78): unsure at all Xaa locations
MGGLSTKLFVVLLLLVCYTGTQGGPVTMVSASKCESQSFRFKGPCSRDAYCANVCLTEXFTGGVCKGLRHRCFCTKDC

SEQ ID NO: 33902 - protein, 420 aa, Oryza sativa (indica cultivar-group)
MERVFSVEEISDPFWVPPPPPQSAAAAQQQGGGGVASGGGGGVAGGGGGGNAMNRCPSEWYFQKFLEEAVLDSPVPNPSPRAEAGGIRGAGGVVPVDVKQPQLSAAATTSAVVDPVEYNAMLKQKLEKDLAAVAMWRASGTVPPERPGAGSSLLNADVSHIGAPNSIGGNATPVQNMLSGPSGGSGSQLVQNVDVLVKQPTSSSSREQSDDDDMKGEAETTGTARPADQRLQRRKQSNRESARRSRSRKAAHLNELEAQVSQLRVENSSLLRRLADVNQKYNDAAVDNRVLKADVETLRAKKMAEDSVKRVTGMNALFPAASDMSSLSMPFNSSPSEATSDAAVPIQDDPNNYFATNNDIGGNNNYMPDIPSSAQEDEDFVNGALAAGKIGRPASLQRVASLEHLQKRMCGGPASSGSTS

SEQ ID NO: 33903 - protein, 465 aa, Solanum berthaultii
MSTKPTPLELPEMSTMSLEETFHPSKVSESTESSSSSTTPLSPHTGGDVRWDAINSATGRGGPPLNLSNFRLLKRLGYGDIGSVYLVELRGTNAFFAMKVMDKGSLASRNKLLRAQTEREILSLLDHPFLPTLYSHFETDKFYCLVMEFCSGGNLHQLRQKQPNKHFTEEASRFYASEVLLALEYLHMLGIVYRDLKPENVLVRDEGHIMLSDFDLSLRCSVNPTLVKSSSVHGGGGNPSSGSGILDNDNAVQGCIQPSTFFPRNILPTKKNRKSKSDFGLFVGGSLPELMAEPTNVRSMSFVGTHEYLAPEIIRGEGHGSAVDWWTFGIFLYELLHGTTPFKGAGNRATLFNVVGQPLRFPETPQVSAIARDLIRGLLVKEPHKRIAYKRGATEIKQHPFFEGVNWALVRSAVPPSIPEPVDFAQYASKEASAPCSDKKMPDTESHDKSKNTSNDSSYMDFEYF

SEQ ID NO: 33904 - protein, 257 aa, Bacillus megaterium
MSHEAPLFLKKVLITREAKQAHSFAAQIKKLGGIPLSLPVLTFARSNNEKEVEDVLLSIDCFDWIVFTSQNGISFFFEWLKELNISWSALKRLKVAAVGEKTAKLLEKHDVNVQLVPKEYVAESLLESLKANVSHHERVLLVRGQLARSVLKDGLKECEVTDLVVYQTIRNQDSERLVKQHVETGIDAITFTSSSTVRFFVESVKDIPNWLELINRTKVVCIGPITSQTASEYGIKHLVPNTYTINGMIDMLVSCFE

SEQ ID NO: 33905 - protein, 510 aa, Asarina barclaiana
MENGDHRTAPAFQLQQASPPEAAPVRNIILVAAIAAGVQFGWALQLSLLTPYVQLLGIPHTWTAFIWLCGPVSGMLVQPIVGYYSDNCTLRFGRRKPFIAGGAGLVVVAVFLIGFAADIGYAAGDTLGKGTKPRATAVFVVGFWILDVANNMLQGPCRALLADLSGGNARKMSNANALYSFFMAVGNVSGYAAGSYTHLFKIFPFSKTKACDVYCANLKSCFFISVALLLCVSALALTIVRETPPPETAEAPEATKKKKIPVFGELFSALKNLPRPMWFLLLVACLNWIAWFPFLLFDTDWMGKEVYGGTVAEGKMYDRGVRAGALGLMLNPVVLGFSSLGIQAIARGVGGPKRLWGGVNFLLAVCLALTVVITKQAEHSRLYTVGADGVQILLPPVPGVKISALALSGVLGIPLAVTFSIPFALASIYSSNYGAGQGLSLGVLNLAIVIPQMVVSVASGPLDALFGGGNIPAFVMGAVAAAVSGIFAVTMLPALPADASTKNLSVGSFH

SEQ ID NO: 33906 - protein, 345 aa, Escherichia coli K12
MVINCAFIGFGKSTTRYHLPYVLNRKDSWHVAHIFRRHAKPEEQAPIYSHIHFTSDLDEVLNDPDVKLVVVCTHADSHFEYAKRALEAGKNVLVEKPFTPTLAQAKELFALAKSKGLTVTPYQNRRFDSCFLTAKKAIESGKLGEIVEVESHFDYYRPVAETKPGLPQDGAFYGLGVHTMDQIISLFGRPDHVAYDIRSLRNKANPDDTFEAQLFYGDLKAIVKTSHLVKIDYPKFIVHGKKGSFIKYGIDQQETSLKANIMPGEPGFAADDSVGVLEYVNDEGVTVREEMKPEMGDYGRVYDALYQTITHGAPNYVKESEVLTNLEILERGFEQASPSTVTLAK

SEQ ID NO: 33907 - protein, 696 aa, Schizosaccharomyces pombe
MTEIFGKLHRSSNSENTNQASPSTIQSHSTQPVLSNDHSTKVNDYEGKEGASSNGYDPVFMSDRMKMRYNEITAQLHKEQSLKEDKESGSNSSESNGITPMGTYSEKPKLLQSRTPPSSCYIRHDTVVPKDKNGQHAFGRLYVRLHQGRDLNVKSVNAQPYAVITFEKTQVMVPPPFKDIDGGIPISIPSKNRPLAGSASGSSSGLHSELMLADVRCPHWDFETVFDVTKMKSQMVVSVYDKYEDDKFLGSVKITPIFLHEYVQEAWYKLEPLDLTKSLEGEIKVETIYEHIEHVRYGPEDFTALRLIGKGTFGQVYLVRKNDTNRIYAMKKISKKLIVRKKEVTHTLGERNILVRTSLDESPFIVGLKFSFQTASDLYLITDYMSGGELFWHLQHEGRFPEQRAKFYIAELVLALEHLHKHDIIYRDLKPENILLDADGHIALCDFGLSKANLSANATTNTFCGTTEYLAPEVLLEDKGYTKQVDFWSLGVLVFEMCCGWSPFYAPDVQQMYRNIAFGKVRFPKGVLSSEGRSFVRGLLNRNPNHRLGAVADTTELKEHPFFADINWDLLSKKKVQPPFKPNVQNDLDVSNFDKEFTNTNVKNINIVSNVDPANASTPLSNTIQDRFRGFTFVNKSIDEQFQNLGLQENEETDNLHACRTTTHSSVNSINSHGNPRTVDANDPVADTVFGETFEA

SEQ ID NO: 33908 - protein, 429 aa, Bacillus megaterium
MRSYEKSKAAFLEAQQLMPGGVNSPVRAFKSVDMDPIFMERGKGATIYDIDGNKYIDYVLSWGPLIHGHSNDQVVEAVKKVTESGTSFGAPTLIENELAKVVIERVPSIEIVRMVSSGTEATMSALRLARGYTGRNKILKFEGCYHGHGDSLLIKAGSGVATLGLPDSPGVPEGIAKNTITVPYNDLESVQYAFKEFGDDIAGVIVEPVAGNMGVVPPQPGFLQGLRDITSEYGSLLIFDEVMTGFRVAYNCAQGYYNITPDLTCLGKVIGGGLPVGAYGGKAEIMERVAPSGPIYQAGTLSGNPLAMTAGYETLTQLTPQSYDEFIRKADRLEEGLMAAAEKYDVPFTVNRAGSMIGFFFTNEQVINYETAKTSNLDYFAAYYREMANEGVFLPPSQFEGMFLSTSHTDADIEHTIAAAEKAFSKLRG

SEQ ID NO: 33909 - protein, 245 aa, Brassica napus
  misc_feature (61)..(61): Xaa can be any naturally occurring amino acid
  misc_feature (93)..(93): Xaa can be any naturally occurring amino acid
  misc_feature (157)..(157): Xaa can be any naturally occurring amino acid
  unsure (1)..(245): unsure at all Xaa locations
MIGQLINLKATELCLGLPGGAEANENLAKSAVGNKRGFSETVDLISYLLFSATKDDASNIXHVTASKENTLLKARAKPPAKAQVVVWPPERNXRKHHMTQQETRGEEEPGGKRAGNAGEEPLVAAFMDGYPWTGAPYLRKVDLKMYKSYQDLSDALXAKMFSSFTMGNYGAQGMIDFMNESKLMDLLNSSDYVPSYEDKDSDWMLVGDVPWEMFVDSCKRLRIMKGAEAIGLAPRAMEKYCKNRS

SEQ ID NO: 33910 - protein, 1058 aa, Anabaena variabilis ATCC 29413
MTPTESQYQTDLISDTIEKLRSCCQVNVQSTWLYQDSNTEITGVATSSISNWQPVELDTKGNIAWTGGQQVLWLEQKFVVPQNLHDYPLAGLSLRLSLLWWADSAKIYVNGQLVLEGDLFDCSPRVLLSREVSPGQEFVVALRLASPGHCDGALVRSLLVYESTDYNYPDPGFIADELAILQLYLEKFAPEKLNILTQAIPEIHPSNPESLVTFRQNLINHLSISDPKFKIYLLGHAHLDLAWLWSVSETWNAAQNTFTSVLKLQQDFPELIFCHSTPALYAWIEEHRPDLFTAIQQAVAAKKWEVIGGFWVEPDLNLIAGESIVRQLLYGQRYFQEKFGKLTTVVWVPDTFGFCATLPQFLANAGIEYFVTQKLRWNDTTKFDYGAFWWRSPDGSQVLSVMSATIGEGIDPIKMAAYSLEWQTQTCLTQSLWLPGVGDHGGGPTRDMLETAQRWQTSPFFPDLEFITAEKYLQQIQSTVNGQQSIVNSQRSTFPIWNDELYLEFHRGCYTTHADQKRWNRHSENLLYEAELFATLATFICGVTYPKSDIETAWKQVLFNQFHDILPGSSITQVYTDALPEWQQVEQTGTKILKESLQAIASHFTLPEPPKTDSLPIFVFNSLNWQRSEVVSVTLPPPPPNQQWQVYDTTGKQIISQLTEPSTILFLAEDIPSVGYRLFWLSPTSPTSSTSPTSSTSLDYILENEHLRVIVDPDTGDLSSIYDKTHQREVLSGAGNQLQAFKDSGQYWDAWNIDPNYSQHPLPATNLKSIQWLEQGTVQNCLRVVRQLGKSEFCQDYILQVGLPQLKIVSRVNWQEKHVLVKAAFPLNVTADFATYEIPCGAIRRPTQPQTPQDKAKWEVPALRWADLTAETDEGLYGVSLLNDCKYGYDSQPQLLRLTLLRSPTWPDPEADTGGIHEFAYTVYPHADSWESAHTVQKGYELNIPLQVILNPTQHFQLNTSKSTPNTRDKASFLNLPAENLVLMAVKPSEDDQQQLILRFYESHGVTTELSLQSDLKLTLGIPVDLLERPISQFSSGQQISTIEPWKIATFKVLEVRG

SEQ ID NO: 33911 - protein, 476 aa, Gluconobacter oxydans 621H
MTSSSHYRRTRIVATLGPASSSPEMILSLAQAGVNVFRLNFSHGAHEDHGERHAAIRAAEEKIGHPLAILADLQGPKLRVGVFENGPIILEEGKPFRLDLDRTPGTVSRVCLPHPEIISAAKPGSHLLLDDGKLKLRVVKTGEGFLETVVVVGGKLSERKGVNVPDVTLPIPALTEKDRRDFDFALSLGVDFVALSFVQRPEDVQEAREIAAGRAAIVTKLEKPQAMDDLAAIVHLSDAIMVARGDLGVELPPEEVPVAQKRAIAEARKQCRPVIVATQMLESMIESPTPTRAEVSDVSNAVYDGADAVMLSAESAAGKYPVEAVSMMVRIAERVEQDTEWRLRMDRLRPAPDETVQSAIVQAAWQVSRTLHAGAIACRTRSGAGAMRLSRERPHCPIIALTPELWVARRLCVVWGVFPHLINSEQSTQGIEPLAGPVAELARNMGFCKTGDRVLILAGLPSGHSGSTNTLRVITA

SEQ ID NO: 33912 - protein, 343 aa, Escherichia coli CFT073
MQVKTQSCVVAGKKTVAVTEQTIDWNNNGTLVQITRGGICGSDLHYYQEGKVGNFMIKAPMVLGHEVIGKVIHSDSSKLHEGQTVAINPSKPCGHCKYCIEHNENQCTEMRFFGSAMYFPHVDGGFTRYKMVETSQCVPYPAKADEKVMAFAEPLAVAIHAAHQAGELQGKRVFISGVGPIGCLIVSAVKTLGAAEIVCADVSPRSLSLGKEMGADVLVNPQNDDMDHWKAEKGYFDVSFEVSGHPSSVNTCLEVTRARGVMVQVGMGGAMAEFPMMTLIGKEISLKGSFRFTSEFNTAVSWLANGVINPLPLLSAEYPFTDLEEALRFAGDKTQAAKVQLVF

SEQ ID NO: 33913 - protein, 608 aa, Nocardioides sp. JS614
MTTDVLSERARIEAAIAGRTLPDALAETASRFADQPAYSDKHEVAEGGSWRTITWTRTRELALDVAAALIDAGVQPGDTVAIMATNRIEHFIADMGAVHAAATPMSIYNTLSAEQVAYVAGHARPTVVVLENDDHRARWANALEETDSIRKVVMLGAEWDAFVAAGAAYRTTHPDAVQQRVAELDADAPATILYTSGTTGYPKGVVLTHHNVMYEALSTLEAAGLHEAQTAISYLPLAHIAERVLGLYGPQIQGSHMYAIGDPSGLLAALGEVHPTSFFGVPRVWEKIKTGISAKLAADPNPDNVKMVQDAMAAGQAWVAAQEVGGTMTPEIEEAYRAADEAILGFLKLLLGLDQVTWAGSAAAPMPIEVARFMAGLGLKVYDVYGMTETTGAITANGPDAFKLGTVGRATPGMEVRLGEDNEVLVRGPVVMHGYHRQDDATRALIDEDGWVHTGDIGTLDEDGFFSIVDRKKELIITSAGKNIAPSNIEGYLKESPIVGHAMAVGDGRPYVVAILTLDGEIAPIVAQQLGLEFTDLADLAEKPEIRAMAQKAVDEANARLSRPEQVKSFELLPVEWTAESEELTPTLKLKRRVVNAKYADVLDRLYG

SEQ ID NO: 33914 - protein, 343 aa, Glycine max
MEYRLLPIFTLLNLALVAIHAALPPEVYWKSVLPTTPMPKAITDILYPDWVEEKSTSVNVGGKGVNVHAGKGGGGTNVNVGGKGSGGGVNVHAGHKGKPVHVSVGSKSPFNYIYASTETQLHDDPNVALFFLEKDLHPGTKLNLHFTTSSNIQATFLPRQVADSIPFSSSKVEVVFNKFSVKPGSEEAQIMKNTLSECEEGGIKGEEKYCATSLESMIDFSTSKLGKNVEVVSTEVVEDKETGLQKYTVAPGVNKLSGDKAVVCHKQNYPYAVFYCHKTETTRAYSVPLEGANGVRVKAVAVCHTHTSEWNPKHLAFQVLKVKPGTVPVCHFLPEDHVVWVPK

SEQ ID NO: 33915 - protein, 216 aa, Xylella fastidiosa Temecula1
MVMTIEALKHLGRVDESRVGRTEPLPLDNRHYVNGHPLCDSFPGLALIQFGLGCFWGAERLFWQLPGVFSTAAGYAGGGVPYPTYREVCSGETGHAEVVLVVYDHTVISFEQLLQTFWESHDPTQGMRQGNDIGTQYRSVIHCTTSEQYAAASASREVYQQQLNTAGYTAITTEILHPAPPFYYAENEHQQYLAKHPNGYCGLGGTGVTCAIRLQV

SEQ ID NO: 33916 - protein, 427 aa, Idiomarina loihiensis L2TR
MSRSEELYTKAQISIPGGVNSPVRAFNGVGGSPIFFESAEGAYMIDADGKRYIDYVGSWGPMILGHNHPAVLEATLQAAKRGLSFGTPTEVEITMAETIRKIVPSIEKVRMVNSGTEATMTAIRLARGYTGRDKILKFEGNYHGHADSLLVKAGSGALTLGVPNSPGIPEDFAKHTLTATYNDIESVKQIFAEMGDEIACIIVEPVAGNMNCIPPVDGFLEGLRSICDDHGSVLIFDEVMTGFRVAPGGAQDRYKIKPDLTTLGKVIGGGMPVGAFGGKKEVMDYIAPVGPVYQAGTLSGNPVAMAAGLAALQQLSTPGLYDQLYQRVDTLLDGLQERADRAGVPMTTNRAGSMFGFFFTEEPEVTTYAQATQCNMEHFKTFYHAMLEQGVYLAPSAFEGGFMSAAHSEEDIQNTLNAAEKAFAKLV

SEQ ID NO: 33917 - protein, 340 aa, Legionella pneumophila subsp. pneumophila str. Philadelphia 1
MKSLVKAKKEPGIWMQDIPVPEYGVNDVLIKIKRTAICGTDIHIYSWDEWAQATIPVPMTVGHEFYGEIVEVGKEVQGLKVGQRVSGEGHITCGFCRNCRAGKRHLCRNTLGVGVNRPGCFAEYLALPATNVIALPDNITEEQAAILDPFGNAAHCALAFDVVGEDVLITGAGPIGIMAAAIVRHIGARHVVITDVNDHRLELARQMGVSRAVNVKYQKLSDVANELGMLEGFDVGLEMSGNPMALNDMMKAMNHGGHVALLGIPPQETPIDWNQVIFKGLVIKGIYGREMFETWYKMIAMLQSGLNISPVITHNFPVDEYQHAFQIMASGQSGKVILNW

SEQ ID NO: 33918 - protein, 686 aa, Xylella fastidiosa Temecula1
MTKPTRRQLANAIRFLAADAVQAAHSGHPGMPMGMADIAEVLWNDFLRHNPNNPNWFNRDRFILSNGHGSMLQYALLHLSGYDLPLDELKQFRQLHSKTAGHPERSETPGIETTTGPLGQGFANAVGFALAEKLLAQRYNRPEHLIVDHRTWVFMGDGCLMEGISHEAAALAGTWNLGKLICFWDDNNISIDGNTAGWFTEDTPARFEAYGWHVIRDIDGHDAEKIATAIQAAVAQENKPSLLCCRTVIGFGSPNKAGKESSHGAPLGAEELEATRKMLDWPYGPFEIPSEIYDGWRANGTGMLRQAEWEQAFDNYARQYPKEAAELTRRSHAELPTDFLSQLDAYIAKVHAVGPCIASRKASQMAIEAFAPLLPELIGGSADLAHSNLTLWKGSQTVVGDAPNANYAYYGVREFGMSAIANGLALHGGFIPFDATFLVFSDYARNAVRMSALIPAHVIHVYTHDSIGLGEDGPTHQPVEHLAALRYIPNNDVWRPCDAVESAVAWKAAITRNNGPSCLVFSRQNLPHQPRHDAQLEQIARGGYILADAASSIPDIILIATGSEVSLAIEAKKTLDAMQLKTRVVSMPSTNVFERQDPTYRESVLPSKVHKRVAIEAGVTGFWWQYVGLHGAVIGLDTFGASAPADVLYKHFNITAEHVVEVAKALCGRAETTLSLPYYHQMPLSG

SEQ ID NO: 33919 - protein, 407 aa, Rhodobacter sphaeroides 2.4.1
MDYNLALDTALNRLHTEGRYRTFIDIERRKGAFPKAMWRKPDGSEKEITVWCGNDYLGMGQHPVVLGAMHEALDSTGAGSGGTRNISGTTLYHKRLEAELADLHGKEAALVFSSAYIANDATLSTLPQLIPGLVIVSDKLNHASMIEGIRRSGTEKHIFKHNDLDDLRRILTSIGKDRPILVAFESVYSMDGDFGRIEEICDIADEFGALKYIDEVHAVGMYGPRGGGVAERDGLMDRIDIINGTLGKAYGVFGGYIAASSKMCDAVRSYAPGFIFSTSLPPVVAAGAAASVRHLKGDVELREKHQTQARILKMRLKGLGLPIIDHGSHIVPVHVGDPVHCKMISDMLLEHFGIYVQPINFPTVPRGTERLRFTPSPVHDSGMIDHLVKAMDVLWQHCALNRAEVVA

SEQ ID NO: 33920 - protein, 222 aa, Chlorobium tepidum TLS
MKFFIDTASLDEIKAANELGVLDGVTTNPSLIAKIVKDSTNFTYADFKAHIAKICEIVDGPVSAEVTTLKAGEMIAQGEELAAIHKNIVVKCPLTVDGLKAIKHFSSNGIKTNATLVFSPTQALLAAKAGADFVSPFVGRLDDISTSGMELVRQIVTIYDNYGYLTEVIVASVRNPLHVVESAMVGADIATIPYSVIKQLANHPLTDKGLEKFMEDAAVMKP

SEQ ID NO: 33921 - protein, 349 aa, Oryza sativa
MSRSGAMDLASGLGGKITKDEVKSAVDEYEKYHGYYGGKEEARKSNYTDMVNKYYDLATSFYEYGWGESFHFAHRWNGESLRESIKRHEHFLALQLGVKPGMKVLDVGCGIGGPLREIAKFSLASVTGLNNNEYQITRGKELNRVAGVSGTCDFVKADFMKMPFSDNTFDAVYAIEATCHAPDPVGCYKEIYRVLKPGQCFAVYEWCITDHYEPNNATHKRIKDEIELGNGLPDIRSTQQCLQAAKDAGFEVIWDKDLAEDSPVPWYLPLDPSRFSLSSFRLTTVGRASSRPSVTRTMVKALEYVALAPQGSERVSNFLEKAAEGLVEGGKKEIFTPMYFFLVRKPISE

SEQ ID NO: 33922 - protein, 343 aa, Thermoplasma acidophilum DSM 1728
MTALITQEIGSFRKPDYLAKEFHKIERTPKFTELAERATRETLEVFERSGLDNIGIGGEMFRWEMYEHPAERIKGIIFYGMVRSFDNRYYRKGSAIDRLERREPFHVDEVKFVAGTTKKPLKVPITGPYTMMEWSFNDYYDSREDLAMEFARIINEELKDIASVWKQVSGGRRLEIQIDEPATTTHPDEMDIVVDSINRSVQGVDGEISMHVCYSSDYRLLYDRIPDLKIDGYNLEYSNRDTLERGLTDDKRVGFQDLKYFAQINESLQRKKFIGIGVTDVHIDYVEPVELIEDRINYALKIIGDPDLVRINPDCGLRTRSREIGEQKLRNMVMARNNILKQL

SEQ ID NO: 33923 - protein, 306 aa, Bacteroides fragilis YCH46
MRKVIGIGETILDIIFRNDQPSAAVPGGSVFNGIVSLGRMGVNVCFISETGNDHVGNIILQFMRDNHIPTDHVNVFPDGKSPVSLAFLNEHSDAEYIFYKDYPKQRLDVLFPSINEDDIIVIGSYYALNPVLRDKILELLDIAKEKRAIVYYDPNFRSSHKNEAMKLTPTIIENLEYADIVRGSLEDFYYMYGIKDVEKIYKDKIKFYCPLFLCTAGAERISLRTNAISKEYPVAPLEAVSTIGAGDNFNAGLIYGMLKYDVRYRDLQHLSEETWDKVIQCGQDFAAEVCKSFNNSISGEFAANYR

SEQ ID NO: 33924 - protein, 275 aa, Nostoc punctiforme PCC 73102
MTSISNSFQTLRDRQQCALIPFITAGDPNLETTAQALRILDRNGADFIELGIPYSDPLADGPVIQAAATRALQKGTKLEQVLEMLQAVTPTLKAPIILFTYYNPILHRGIKTFLAQIAAVGVQGLVVPDLPLEEAEELIQTAASFGIEVILLVAPTSSKDRILAIARQSQGFIYLVSVTGVTGIRAQIQDRVKDLITDLRSVTDKPIGVGFGISGPEQAHQVREWGADAVIVGSAFVKRLAEGSPTERLQAVEKLCQELKAAITPVSLQQVVSAK

SEQ ID NO: 33925 - protein, 186 aa, Physcomitrella patens
MSTSRFIKCVTVGDGAVGKTCMLISYTSNTFPTDYVPTVFDNFSANVVVDGNTVNLGLWDTAGQEDYNRLRPLSYRGADVFLLAFSLISKASYENISKKWIPELRHYAPSVPIILVGTKLDLRDDKQFFADHPGAAPITTSQGEELRKSIGAASYIECSSKTQQNVKAVFDAAIKVVLQPPKQKKK

SEQ ID NO: 33926 - protein, 182 aa, Physcomitrella patens
GAVGKTCMLISYTSNTFPTDYVPTVFDNFSANVVVDGNTVNLGLWDTAGQEDYNRLRPLSYRGADVFLLAFSLISKASYENISKKWIPELRHYAPSVPIILVGTKLDLRDDKQFFADHPGAAPITTSQGEELKRSIGAASYIECSSKTQQNVKAVFDAAIKVVLQPPKPKKKKKKQKNCVIL

SEQ ID NO: 33927 - protein, 415 aa, Neisseria gonorrhoeae FA 1090
MSQRRVVITGLGQVSPVGNTAAEAWDNLLAGKSGIGAITRFDASDINSRVAGEVRGFDIGQYISAKEARRMDVFIHYGIAAALQAIADSGLDDVENLDKDRIGVNIGSGIGGLPSIEATGKAVIEGGARKINPFFIPGSLINLISGHVTILKGYRGPSYGMVSACTTGAHAIGDSARLIKYGDADIMVAGGAEGAISTLGVGGFAAMKALSTRNDDPATASRPWDKGRDGFVIGEGAGILVLEELEHAKKRGAKIYAEIVGFGMSSDAYHITAPNEEGPALAVTRALKDAGINPEDVDYVNAHGTSTPLGDANETKALKRAFGEHACKTVISSTKSMTGHLLGAAGGVEAVYSILAIHDGKIPPTINIFEQDVEAGCDLDYCANEARDAEIDVAISNSFGFGGTNGTLVFKRFKG

SEQ ID NO: 33928 - protein, 504 aa, Neisseria gonorrhoeae FA 1090
MTTSKCPVTHLTMNNGAPVADNQNSLTAGPRGPLLTQDLWLNEKLADFVREVIPERRMHAKGSGAFGTFTVTHDITKYTRAKIFSEVGKKTEMFARFTTVAGERGAADAERDIRGFALKFYTEEGNWDVVGNNTPVFFLRDPRKFPDLNKAVKRDPRTNMRSATNNWDFWTLLPEALHQVTIVMSDRGIPASYRHMHGFGSHTYSFWNEAGERFWVKFHFRSQQGIKNLTNEEAAKIIADDRESHQRDLYEAIERGEFPKWTMYIQVMPEADAEKVPYHPFDLTKVWPKKDYPLIEVGEFELNRNPENFFADVEQSAFAPSNLVPGIGASPDKMLQARLFNYADAQRYRLGVNFRQIPVNRPRCPVHSNQRDGQGRADGNYGSLPHYEPNSFGQWQQQPDFAEPPLKINGDAAHWDYRQDDDDYFSQPRALFNLMNDAQKQALFDNTAAAMGDAPDFIKYRHIRNCYRCDPAYGEGVAKALGLTVEDAQAVRATDPALGQAGLL

SEQ ID NO: 33929 - protein, 309 aa, Rhodospirillum rubrum
MTTLLVSHHACVEHDPGAFHPECPDRLRAVQRVLEAEDFMLLLRDEAPHVTREQLLRVHPLSHVEFLLDHVPREGTYHIDGDTVMSPDSGEAALRAAGGMVQAVDAVMDKSVRNAFVAVRPPGHHAELATAMGFCLFNNAAIGAYHARARWGAERVAVIDWDVHHGNGTQHIFWDDPAMFYASTHEAHSFPNTGFVDETGGHGNIVNCPLRSGADGLRFREAFTERITPALRAFAPDLIIISAGFDAHVMDPMANLNLKVADFVWATEQVLDVANDVCDSRVVSVLEGGYDLTALASCVSAHVKTLMER

SEQ ID NO: 33930 - protein, 278 aa, Shewanella sp. MR-7
MSSISNQTIPHQAGRYHAAFSRLKAEGRGAFVPFVTLGDPSPELSLKIIDTLVQNGADALELGFPFSDPLADGPVIQGANLRALAAGTTPTQCFNLLAQIRAKYPELPIGLLLYANLVFANGIDAFYAKAQQAGVDSVLIADVPVEEAAPFIQAAKAHGIAPIFIAPPNADSDTLENVSKSGEGYTYLLSRAGVTGTDTKAGTPVEEILAKLQAFNAPPPLLGFGIAEPAQVSAAIQAGAAGAISGSAVVKIIETYQQDEAKLLSTLGEFTRAMKAAT

SEQ ID NO: 33931 - protein, 468 aa, Ashbya gossypii ATCC 10895
MVPTATVGSSTVNLIKTIVGAGLLAVPYAFRADGVCVAAVLVAVAAITSGFGLVVLAKASKALVNPRQSSFFALCQITYPRLAVVFDFAMFTQCFGVGVSYLIIVGDLFPGLLGGTREAWIAASAAVVVPLSHLRRFDSLKYSSVLGLVAIAYLALMIVAAWIEGLTTGYAHYERGEVRWLRPASLREMVSTFSIIVFAFTGSMNMFSIINELGDNSMRNIQRIVYYSIAASTALFILVGMAGYLTFGSNVAQNVILNFDPDAVSTQVGSLALGLMVLLSFPLLFHPGRIAFNNMVHWAHVTYCGYRPLKSEEQPGDAGASICLEVEDEEDRLILSAEGSESYQSLPRGANSNEDSGSSAEVDRQAVPFDGPRFYIVTWLLLLVLYLVAFKVRSFAYVLALVGATGSTAISFTLPGLFGYRLIGTDSLMKGNMLSRQDHLYRCASLGLVGYGIVVTIVSLMVVIYFGI

SEQ ID NO: 33932 - protein, 163 aa, Paracoccus denitrificans
MAFDFARATKYFLMWDFIKGFGLGMRYFVSPKPTLNYPHEKGPLSPRFRGEHALRRYPNGEERCIACKLCEAVCPAQAITIDAERREDGSRRTTRYDIDMTKCIYCGFCQEACPVDAIVEGPNFEYATETREELFYDKQKLLANGERWEAEIARNLQLDAPYR

SEQ ID NO: 33933 - protein, 362 aa, Arabidopsis thaliana
MATETQIRIGVMGCADIARKVSRAIHLAPNATISGVASRSLEKAKAFATANNYPESTKIHGSYESLLEDPEIDALYVPLPTSLHVEWAIKAAEKGKHILLEKPVAMNVTEFDKIVDACEANGVQIMDGTMWVHNPRTALLKEFLSDSERFGQLKTVQSCFSFAGDEDFLKNDIRVKPGLDGLGALGDAGWYAIRATLLANNFELPKTVTAFPGAVLNEAGVILSCGASLSWEDGRTATIYCSFLANLTMEITAIGTKGTLRVHDFIIPYKETEASFTTSTKAWFNDLVTAWVSPPSEHTVKTELPQEACMVREFARLVGEIKNNGAKPDGYWPSISRKTQLVVDAVKESVDKNYQQISLSGR

SEQ ID NO: 33934 - protein, 327 aa, Oryza sativa
MARVVSAAAAGSPWPMEKSRVLVVGGTGFVGRRVVAASLAAGHPTYVLLRPEIGLDIDKLQMLLAFKARGARLLEASLDDHDGLVAAVRQADVVVSAMSGVHFRSHNLMLQLKLVEAIKDAGNVKRFLPSEFGMDPSRMGDALEPGRVSFDEKMVIRRAIEDANIPHTYVSANCFAAYFCPNLCQMKTLLPPKERVGVYGDGNVKVFFVDENDVGTYAIKSIDDPRTLNKTIYIRPQDNCLTQNELISKWETLTGKSLEKFHIPGDEFLASMKDLDFASQVGIGHYYHIFYEGCLANFEIGDNGAEATQLYPEVQYTRMDEYLKRYI

SEQ ID NO: 33935 - protein, 496 aa, Kluyveromyces lactis NRRL Y-1140
MLSTILLWISCCTISTLAQEATRYFPETPIGCSLENNCPAEWPCCSQFGQCGTGPFCVGGCNPRLSHDPGSCLGQPALLPRMSPSFWLQSSLEQKPALKSSFLPRVQPSMDVASNEGGEKDLNNRGIVNFANFLISPQERIIKKMLRDYHFTYSGFVKYDAPGQLTLAMPKHTSGSLISSTRSFLYGRATVKMKTARGRGVVTAVVLISTVGDEIDFEFIGGELHHAQSNYYHQGELNHTRMEKLELSSDSFENTHIYEVDWDQDRINWIVDGVVARTLYKEDTWNEEKQRYEYPQTPMRLQVSVWPGGREDADPGTIMWAGGLIDWENSPDILEKGQFYATVESIAVTPYENKFWPSIVDELERLHLPIDANSLLDITYDYNYDKFNEHTWFEDSVIWKKGKLPYLSSLDKNGLNPGRQQQSLLVGKQLKQEQGDGPDQSPSNRFIQDTNKPSEKNHEEQDLLLRNALQSRDATTNGGSSHNNRNPIKRLLNMLH

SEQ ID NO: 33936 - protein, 528 aa, Citrus sinensis
MESTEAGAAAAAPTKNQSSIELRQPPPPPSSPMWKIVMVASIAAGVQFGWALQLSLLTPYVQLLGIPHKWSSLIWLCGPISGMIVQPIVGFHSDTCKSRFGRRRPFILAGAVLVAIAVFLIGYAADIGHSAGDSVTDSVKTRAIIIFVIGFWILDVANNTLQGPCRALADLSSGSSNKKTRTANSFFSFFMAVGNVLGYAAGSYTHLYHMLPFTKSKACDVYCANLKTCFFLSIALLITLTTIALFYVTEQRLEEIDDKETAPSTKDPFFSEIFGALKGLQKPMWILLAVTALNWIAWFPFLLFDTDWMGREVYGGNSKGSAEELRVYNNGVRAGSLGLMLNAIVLGFTSLGVEVLAKLIGGVKRLWGVVNFLLAVSLAFTFLITKLAESNRRSVTTAGGATHILPPPVGVKVGALAIFTVLGIPQAITFSVPFAMASIFSRTSAAGQGLSLGVLNLAIVVPQMLVSLLSGPFDAVCGGGNMPAFMVGAVAAALSGIVALTLLPSTTADVPPPITEAGTATANQTNKL

SEQ ID NO: 33937 - protein, 270 aa, Pseudomonas fluorescens PfO-1
MSRLQTRFAELKEQNRAALVTFVTAGDPDYDTSLAILKGLPKAGADVIELGMPFTDPMADGPAIQLANIRALGAKQNLTKTLQMVREFREGNSDTPLVLMGYFNPIHKFGVERFIAEAKEAGVDGLIVVDMPPEHNSELCDPAQAAGIDFIRLTTPTTDDARLPKVLNGSSGFVYYVSVAGVTGAGAATLEHVEEAVARLRRHTDLPISIGFGIRTPEQAASIARLADGVVVGSALIDHIANATTPDQAIDGVLSLCSALSEGVRKARVS

SEQ ID NO: 33938 - protein, 903 aa, Dechloromonas aromatica RCB
MLSGWFIALLAAAYLGLLFGVARFGDARADAGKSIISANVYALSLAVYCTSWTFYGSVGRATSGGLSFLTIYLGPTLMLLCVGAIIKMIRISKAQRITSIADFIASRYGKSQLLAGMVTIIAVIGVVPYIALQLKAVAASVDVLLEHSGSTVHFWGLDSTFLIAAVLALFSILFGTRHLDATERHEGMVAAVAFESVVKLIAFMAVGLFVTYGMFGGLGDLFQRAAASPELGRLLQLDSSRAGTWTSLIVLSGLAIIFLPRQFQIIVVENVDESHLKRAVWLFPLYLLLINIFVLPVALGGLLHFGEQGFNPDTFVLTLPLARGAEVLALLAFIGGLSAATGMVIVETIALSTMVCNDLVMPWLLRSTWLQAENRQDLSGLLIAIRRIAIALILLLGYIYFRAAGEAYALVGIGLISFTAVAQFAPAMFGGMYWKQGTRAGAVAGLSAGFVIWLYTLLLPSFAKSGWIASGFVEHGLFGIGWLKAQALFGLSGLDEISHCLWWSMLANIGAYVAVSLHSTPDAVEASQAERFVDVFRFDQRKAEARLWRGKASLDALVGLLERFLGANRAHQQLGLYAQGRQMADWRALPVDAPFVQFAEAELAGAIGSASARVMVASVAQEEDLGLEEVLDILDEATQVRAHSRELEAKQRELEAATTELREANERLRELDRMKDDFISTVTHELRTPLTSIRALSEMLHEDPRLELVERMRFLGIIVGEAERLTRLINQILDMAKLESGRAEWTTGEVDLGEIARETMDSVGQLFRDKGVLLEGDIPDGGPIVLADRDRLTQVLINLLSNAVKFVPGELGCVQVKIGVDGNMVRVEVRDNGPGLTAEECEVIFEKFRQGGNTLTGKPKGTGLGLPISRQIIEYFGGKLWVESHPGEGANFIFTVPLPASEE

SEQ ID NO: 33939 - protein, 149 aa, Bryonia dioica
MADQLTDDQISEFKEAFSLFDKDGDGCITTKELGTVMRSLGQNPTEAELQDMINEVDADGNGTIDFPEFLNLMARKMKDTDSEEELKEAFRVFDKDQNGFISAAELRHVMTNLGEKLTDEEVDEMIREADVDGDGQTNYEEFVKVMMAK

SEQ ID NO: 33940 - protein, 455 aa, Mycoplasma pulmonis UAB CTIP
MEKFDFVIIGSGPGGYSLALILSKLGKKVAIAERKNFGGSCINEGCVPTKGLVKVARTYELIKNSSKFGIKVNDFSFDWKQIIKRKNEIKDTLNNSIEKNLELNNVKIFKAEAKVLKDKSIEVNNTKIYAEKIIIATGSRARKISFDGSDKALEKQVLVDSNYLLDMQEVPKSIAFIGAGPISLELGYVLSALGSDVTLLEGRDQILANFDHDVREEVLKYLEQKNIKYFTSTKVLKYDQDGLHFSVGEKNKVINPEKIALSVGREANLEAVEDLDLELNPNKTIKVDDKLETSIKGIYALGDVTGKMMLSTIAYKHGDVIVNNLINNKEVKLDYKKVPHTIYLSPEISSIGLSEEEAKKTYGENLLAIKIPSERLPRNHADGNLGYGFFKLIINKDTKQVLGASIILENSSLIINEISIAMNNDLTIYDLAKSPHVHPTLAEALYYAIRDLSFQ

SEQ ID NO: 33941 - protein, 301 aa, Glycine max
  misc_feature (279)..(279): Xaa can be any naturally occurring amino acid
  unsure (1)..(301): unsure at all Xaa locations
FGSRAKELPDDYFVVLVGDMITEEALPTYQTMLNTLDGVRDETGASLTSWAIWTRAWTAEENRHGDLLNKYLYLSGRVDMKQIEKTIQYLIGSGMDPRTENSPYLGFIYTSFQERATFISHGNTARLAKEHGDIKLAQICGMIASDEKRHETAYTKIVEKLFEVDPDGTVMAFADMMRKKIAMPAHLMYDGRDDNLFDSYSSVAQRIGVYTAKDYADILEFLVGRWKVEQLTGLSGEGRKAQEYICGLPPRIRRLEERAQARVKESSTLKFSWIHDREXTTLNAPREEHGEIFRQYRSEKC

SEQ ID NO: 33942 - protein, 229 aa, Arabidopsis thaliana
MMGSVELNLRETELCLGLPGGDTVAPVTGNKRGFSETVDLKLNLNNEPANKEGSTTHDVVTFDSKEKSACPKDPAKPPAKAQVVGWPLVRSYRKNVMVSCQKSSGGPEAAAFVKVSMDGAPYLRKIDLRMYKSYDELSNALSNMFSSFTMGKHGGEEGMIDFMNERKLMDLVNSWDYVPSYEDKDGDWMLVGDVPWPMFVDTCKRLRLMKGSDAIGLAPRAMEKCKSRA

SEQ ID NO: 33943 - protein, 383 aa, Glycine max
MKKRFFFLLRRRKMALGDDAQHHSHSPSFLDSLLCEERETFEEDFDANGDECETENNDPSVIKSQPLPLVLYDNDLFWEDDELVSLIAKEGETHLRSFSDGALEGPRVEAVNWVSKVSGHYGFSALTTVLAVNYFDRFITSLKFQRDKPWMTQLAAVACLSLAAKTEETHVPLLLDLQVEESRFVFEAKTIQRMELLVLSTLKWRMLPVTPISFFEHIVRRLGLKSRLHWEFLWRCERVLLNIIADSRVMSYLPSTLAAATMIHVIKEIESFNATEYIDQLLGLLKISEEQVNKCYRIIQKLLGCHEGIYGLPQKCKRLSELGSPSAVTDASFSCDSSNDSWAVSSSVSLSLEPQLKRRRSQDQQMRLPSVSRVSIDVLNSPH

SEQ ID NO: 33944 - protein, 121 aa, Triticum aestivum
  misc_feature (75)..(75): Xaa can be any naturally occurring amino acid
  misc_feature (87)..(87): Xaa can be any naturally occurring amino acid
  misc_feature (92)..(93): Xaa can be any naturally occurring amino acid
  misc_feature (96)..(97): Xaa can be any naturally occurring amino acid
  misc_feature (99)..(99): Xaa can be any naturally occurring amino acid
  misc_feature (103)..(103): Xaa can be any naturally occurring amino acid
  misc_feature (106)..(106): Xaa can be any naturally occurring amino acid
  misc_feature (114)..(114): Xaa can be any naturally occurring amino acid
  misc_feature (118)..(118): Xaa can be any naturally occurring amino acid
  unsure (1)..(121): unsure at all Xaa locations
GDNIVDIQRRLGGHTHGRRLRRGGRDVVVGLQILVQHHPQPCHVVLKQMVSSPPARRRLSGSFSGACSLCRRELXPDKDVYMYRGDXGFCTXXSRXXQXLSDXARXHEAMVNKXRQGXVTA

SEQ ID NO: 33945 - protein, 379 aa, Oryza sativa
MAKDGGGPDWNGLLKWSLAHGDGTAKPRSLSEEDKKWFMEAMQANTMDVVKRMKEITQVMKTPDDVLQSQGVTPENIEDMLDELQEHVESIDMANDLHSIGGLDPLLGYLKNSHAGIRAKAAEVVSTIVQNNPKSQQLVMESNGLEPLLTNFSSDASTNSRTKALGAISSLIRHNQPGVAAFRLGNGYSALRDALGSDDARLQRKALHLLQYLLHDNKADRSVATELGLPKLMMHLASSDDSGVREAALGGLLELARDNTSGAGNVLPDQDKLKDVLKSRIEGISTMDADDLSAHREERQLVDSLWKECYNEPSSLREKGLVVLPGEDAPQQPPPDVVGSMFEPPLRAWAASRPPPKEDSESESAKKDPPLLLGPGPSS

SEQ ID NO: 33946 - protein, 329 aa, Chlorobium tepidum TLS
MKILVIGGAGYIGSHVAREFLDRGYQVTVFDNLSTGREENLFDDAEFVRGDIFDAEMLAEVMNRGFDGCVHLAALKAAGESMQKPEEYSVHNICGTIGTINQAVASGIKCLLFSSSAAIFGSPAYLPIDENHPKKPENYYGFTKLEIERILEWYDRLKGLKFAAVRYFNAAGYDVRGRIRGLERNPANLLPVIMEVASGVRPMLSVFGTDYPTRDGTCIRDYVHVNDLATAHVLAFEQVIESGESLSVNLGSETGVTVLEMLEAARRLTGKEIMAEFAPRRAGDPANLVATSAMARELLGWVPQYSDLDTLVESTWNVYRDVNAGSGRQ

SEQ ID NO: 33947 - protein, 394 aa, Arabidopsis thaliana
  misc_feature (317)..(317): Xaa can be any naturally occurring amino acid
  unsure (1)..(394): unsure at all Xaa locations
MVMAMDRIALFSSSSSVYHHGSSHSHGSKSSRVFTIRSDSTAVGRKLYIPPREVHLQVKYSMPPQKLEIFKSLEGWANDNLLAYLKPVEKSWQPTDFLPEPESEGFYDQVKELRERCKELSDDYLIVLVGDMITEEALPTYQTMINTLDGVRDETGASPTPWAVWTRAWTAEENRHGDLLNKYLYLSGRVDMRQIEKTIQYLIGSGMDPKTENNPYLGFIYTSFQERATFISHGNTARLAKDLGDLTLGKICGTIAADERRHEHAYTKIVEKLFEIDPDTTVVGFADMMRKKISMPAHLMYDGRDDNLFDHFSSVAXRLGVYTAKDYADILQHLVERWNVEKLSDLSSEGNRAQDYLCGLPARIRKLEERAQGRTKEAAKNIPFSWIFGREVRA

SEQ ID NO: 33948 - protein, 141 aa, Triticum aestivum
  misc_feature (55)..(55): Xaa can be any naturally occurring amino acid
  unsure (1)..(141): unsure at all Xaa locations
PDLPDELIFHINYLGADQPTFTLNFSKGSSQVIAQYYQLIRLGFEGYRNIMDNCXRENAMVLKEGLERPGWFNIASQDQRVPLARLPLRDSSATRTTARSRSVMRPRRSGAGPSGTTMTTPNGSDAGRRASGQTGTAPAPR

SEQ ID NO: 33949 - protein, 440 aa, Arabidopsis thaliana
  misc_feature (132)..(132): Xaa can be any naturally occurring amino acid
  unsure (1)..(440): unsure at all Xaa locations
MNRPKVQRRVGKYEVGKTLGQGTFAKVRCAVNTETGERVALKILDKEKVLKHKMAEQIRREICTMKLINHPNVVRLYEVLASKTKIYIVLEFGTGGELFDKIVHDGRLKEENARKYFQQLINAVDYCHSRGXVYHRDLKPENLLLDAQGNLKVSDFGLSALSRQVRGDGLLHTACGTPNYAAPEVLNDQGYDGATADLWSCGVILFVLLAGYLPFEDSNLMTLYKKIIAGEYHCPPWLSPGAKNLIVRILDPNPMTRITIPEVLGDAWFKKNYKPAVFEEKEEANLDDVDAVFKDSEEHHVTEKKEEQPTSMNAFELISMSRALDLGNLFEEEEGFKRETRFAAKGAANDLVQKIEEASKPLGFDIQKKNYKMRLENVTAGRKGNLRVATEIFQVSPSLHMIEVRKTKGDTLEFHKFYKKLSTSLNDVVWKSGESSGLSK

SEQ ID NO: 33950 - protein, 172 aa, Mesorhizobium loti MAFF303099
MATSTERAVLAGGCFWGMQDLIRRYPGVISTRVGYSGGDVANATYRNHGTHAEAIEINFDPAVISYRTLLERFFQIHDPTTRNRQGNDVGMSYRSAIYYTSDEQKRVAEDTIADVDASGLWPGKVVTEVAPAGAFWEAEPEHQDYLEKYPNGYTCHFVRPGWKLPVREKAVS

SEQ ID NO: 33951 - protein, 281 aa, Streptomyces avermitilis MA-4680
MAERLKRLGLIGELSAEFAGTMILILFGAGVVAQVVAGGALTTPPGGLGNHDSIAWAWGIGVTMGVYVAARLSGAHLNPAVTVTLAAFKGFPWSKVAPYAVAQTLGAFVAALLVRWNYTEALAKADPGHTLKTQGVFSTLPANGNPNLPVHEWGAFRDQVIGTAILLLLILAITDLLNTPPGANLAPFIIGLVVVAIGMAWGTNAGYAINPARDFGPRLASFITGYGSAWRDQYGNFYFWVPIIGPLIGGLLGGVVYKFFVGRFLPTAEPEPPGRVPTPEA

SEQ ID NO: 33952 - protein, 495 aa, Bordetella pertussis Tohama I
MKAITVSNLFFRRFGAAALVAFMAVTAAGTQVQAQTQVAPPAVALPDFTGIVEKVEPAVVNIRTTATVPVRGGPGGGNDPYELFRWFFGPDFQPPGPAPGQRRKQPQPQPEERTIPRGVGSGFFISADGYILTNNHVISDATDIYVTLTDGREFKAKVIGSDDRTDVALIKIDAKDMTPLTIGDPKTLKKGQWVLAIGSPFGLDSTVTAGIVSAIGRDTGEYLPFIQTDVAVNPGNSGGPLLNLQGEAVGINSQIISRSGGFMGISLAIPIDEAMRVVDQLRATGKVTRGRIGVQIGEVGKDVADAIGLPRAEGALVSSVEAEGPAESAGVQPGDVILKFNGEPIKRWSDLPRIVGETKPGTSAKMDVWRKGRNVTLSVKVAELKSDRSAATADEGKQAEPTAENHLGLGVVDVPSDMQRKLRIKGGAQVRVAEGAAAQAGLQEGDIVLAVNDTDVTDAAQFNKLVSRLDKKKAAGLLVRRGDQTQWVAVQPASK

SEQ ID NO: 33953 - protein, 259 aa, Prototheca wickerhamii
EFEIRMSTMASPCSSLRPTRLLGPSGSQLAYWPDHTPDCMHRDPPPSRSNGKTDSSRPRASTSTPALPGYAKGVSLSSSNAKMMAEDPASEASSLDIPTRKTKTVCTIGPTSCDREAFFRLADAGMNVVRLNMSHGDHASHQQVIDLVREYNALGRRNLAIMLDTKGPEVRSGDLTQPLDLEKGDLITFTIVAGADGTNNRIGVNYDGFIDDVEVGDMLLVDGGIMTMLVKSKSDTEVLVEVLGLGHEISRHLTFGEVR

SEQ ID NO: 33954 - protein, 273 aa, Oryza sativa
MSTAAAAAAAQSWCFATVTPRSRATVVASLASPSPSSSSSSSSNSSNLPAPFRPRLIRNTPVFAAPVAPAAMDAAVDRLKDGFAKFKTEFYDKKPELFEPLKAGQAPKYMVFSCADSRVCPSVTMGLEPGEAFTVRNIANMVPAYCKIKHAGVGSAIEYAVCALKVELIVVIGHSRCGGIKALLSLKDGAPDSFHFVEDWVRTGFPAKKKVQTEHASLPFDDQCAILEKEAVNQSLENLKTYPFVKEGIANGTLKLVGGHYDFVSGNLDLWEP

SEQ ID NO: 33955 - protein, 577 aa, Methanocaldococcus jannaschii DSM 2661
MEKDIYEKIMDLAKRRGYLWSSFEIYGGIAGFVDYGPLGCLLKNNIISKFREQYIIKEGFYEIESPTVTPYEVLKASGHVDNFTDPIVECKNCLESFRADHLIEEFVDVDTEGKTLKELDELIRKHNIRCPKCGGELGEVKKFNLMFVTSIGPGGKRTGYMRPETAQGIFIQFRRLAQFFRNKLPFGVVQIGKSYRNEISPRQGVIRLREFTQAEIEYFVHPERKEHEKFDLVKDEVVPLLPAERQMDENLSDDEKVIKISIGEAVEKGIIRHQTIAYFIALTKRFLEAIGIDKDKIRFRQHLPNEMAHYAIDCWDAEIYTERFGWIECVGIADRTDYDLRSHSAHSGVELSVFVELDEEREIETYEINLNYKVVGKIFKKDTKAIEAYINNLSEKEKEEFVKNIENDGKVIINIDGKEFEILKDYVEIKKVKKVIKGEKVIPHVIEPSYGIDRITYCLLEHSYREEEDRVYLDLKPSIAPIKAYVLPLVNKDDMPKIAKEIEQMLRENGIIAEYDDSGAIGRRYMRADEIGVPFCITVDGQTLEDRTVTVRERNTREQVRVKIDELVDYLKERLKE

SEQ ID NO: 33956 - protein, 711 aa, Oryza sativa (japonica cultivar-group)
MAGSMVDRATSDMLIGPDWAKNMEICDICNRDPGQSKDVVKALKKRIGHKNPKVQILALTLLETAIKNCGDIFHMHVAERDVLHEMVKIVKKKSDQNVKEKVLTMIDTWQEAFGGPRARYPQYYAAYHDLVRAGAAFPKRSDRPAPLFNGQSPAGRNMRSPDQQDEAESSAGNDFPALSMSEIQNARGIMDVLAEMLNALDPGNREGLRQEVIVELVDQCRTYKQRVVLLVNATADEELMSQGLALNDDLQRVLAKHDAIAAGIAVRVEKKPKSLQALVDTEDSMNQDSKKEQALVDIEDPTTQETNKEPSQSASVQSPFEQLALPAPPVSNGSATPAPKSDLGVDLLSWDDNPSTTENSLALVPVTDPVVDSTPSQNALAIVDIFSQNNTTNNIAKPADPFGVNSSSTLPGSQPYNAPTQHPLQAQQQPQQVGLYPNGGAVNPGTSYPTSSGWNGQIANNATPPAQQTVNYDEQSGALPPPPWEAQSAPSGDMSNGGMQSHPVSNGQFGGMPSLPTPSNQMGGMQPLHPQMNQMGGPQAHQMYNNQQPGAMQPSQPAVTQMQSGFANQFGSMPPHSMPGMQFPGMQPSPMPGAQPVMMYAQPMMMPGMQFAAMPQPRMYGPQMSQYRLVQQQAAQYYSNSQGRPTYYAGMNDLSQKMYGLSMQDSSYMGMNSSPYSTTPSSSSSMGQPSKPEDKLFGDLLSIAKTKQNKA

SEQ ID NO: 33957 - protein, 413 aa, Leuconostoc mesenteroides subsp. mesenteroides ATCC 8293
MNAVEEIGKRAKLVTSDVANLAVDIRNQILLDMSSALVANWQEIVAANKKDLDAATQLSGPMRNRLTLDQKTIGGIAASLSAVAKLADPLAGPYDNWKNHTGFKIVKKTVPLGVVAMIFEARPNVTVDAAALTFKSGNAVILRGGKEAIESNIILTNILRNVLRKHNLNPDIIQLITDTTHDSVNTLLNLRDYVDVLIPRGSGQFIDFVVKNATVPVIETGAGNTHIFVDESAKQDEAIRVIHNAKTQKPAVCNAAEKLLIHEAIAGEFLPKIVDDLLAAGVELRGDQKARSIDSRVIGASAEDWDTEYNDLIMAIKIVHNNDEAITWINDHTTHHSETIISEDLNHVTDFMNTVDAAVVYQNVSSRFTDGFEFGFGAEIGISTQKLHARGPMGLSALTTIKYEVFGEGQIRE

SEQ ID NO: 33958 - protein, 209 aa, Zea mays
  misc_feature (208)..(208): Xaa can be any naturally occurring amino acid
  unsure (1)..(209): unsure at all Xaa locations
MADQELKLFQEEVEAVKQWWKNPRFAQTTRPYTAEQVVSKRGTLKQTYPSNIQAKKLYATLEAHAAKGTTSHTYGALDPVQVTQMAKHLETVYVSGWQCSSTASSTNEPGPDLADYPYNTVPLKVEHLFMAQLFHDRKQREERSNMSPEQRAKTPVIDYLRPIVADADTGHGGLTAVMKLTKLFVEKGAAGIHIEGPAPGTKKCGHMXR

SEQ ID NO: 33959 - protein, 262 aa, Leuconostoc mesenteroides subsp. mesenteroides ATCC 8293
MNSWHRIVVKVGTSTIVNRDGQINYPVVNRLAQTLSSLQKSGHEILLVTSGAIGVALDQMNLEKRPQEIPQQQALAAIGQGYLMSLYNQSFAFYQQLIGQVLLTYDVFDNKAMLENTMNAIEMMFSQHIIPIVNENDVIAVDELDHQHSFGDNDRLAAIVTREIGADGLIILSDVDALYTANPNIDEFAQAIDKVTKITDDIRMSATGSTSGLGTGGMSTKLAAGEFVMKNGGKMVLINGNNPALILEVIAGKTVGTLFQGE

SEQ ID NO: 33960 - protein, 221 aa, Polaromonas sp. JS666
MTLKIYGTAASRAARPLWVAQELGLVYEHIPLPYLGGATRTPEFLAINPNGRIPVVDDDGVLVWESMACALYLAERFKPPGARSLAAQNDAGTPLLAARSHAELAEILRWSFWVVTECEKDALAILMHRVLMPAERRKPQLADEAERRLAGPLGVLEQHLQTCSYLAGERFTVADICVASVLTWAQSATQLMAQCPRTAQWLRTCLARPAFKAVRAMAQSA

SEQ ID NO: 33961 - protein, 428 aa, Gloeobacter violaceus PCC 7421
MRQVTAIILGGGRGTRLYPLTKRRAKPAVPIGGKYRLIDIPVSNCINSGIQHIYILTQFNSASLNRHVSQTYQFSRFSDGFCEILAAEQTDENPNWFQGTADAVRQYLWLLEPSGSTEYLILSGDHLYRMDYSKFVRRHRETNADVTIAVLPCDLERASDFGLIKTDADGRVVQFTEKPKGAELERMRVDTTTLGLTLEEAERRPFVASMGIYVFRHDVMLKLLRDDPSRTDFGKEILPACLDDYNVQAYLFDDYWEDIGTIEAFYKANLALTSQNAPPFSFYHPAPIYTRPRYLPPSKLIDCQIAESIITEGCIIKQARIFHSVLGLRSRIESGVRIEDSLLMGADFYETPIQREESLRRGLPPVGIGERCVLQKAIIDKNARIGNDVRILNKERPDSADHPERGFYIRHGIVIVPKDTVIPDGTVI

SEQ ID NO: 33962 - protein, 262 aa, Nocardioides sp. JS614
MRVAAGQAVSVSGDLDANVRTAARLTRLAATQDVRVLVLPEAFLTGYDVAAFDGPLPDAEGLDGGWLDPLRAESAAGVTVVVGTALRRGAERRLSQIVVRPDGRADAPYDKQHLDGLEKTFFTVGDHGTSIEVDGLELGLSICYDGCFPEHAQAAARDGAVGYLSSAAYFPGGAHRRDLYYAARAVENGMYVVFSGLTGRCGGFEFIGGSAVYDPEGRPIARLAEEEGLAIADLDAGLVAQTRATHTMISDHRGDLGPRVRR

SEQ ID NO: 33963 - protein, 484 aa, Alkalilimnicola ehrlichei MLHE-1
MPLPRRTKIIATLGPASDGPQMATRLVKAGIDLVRINFSHGTVDDHRRRVEAVRQAAREAGREVGVLADLQGPKIRIEGFRNGAVDLEEDAPFTLDTALDKDAGDTERVGVAYPQLVRDVEPGDVLLLDDGRVLLKVESVSDTAIHCRVATGGRLSNRKGLNRLGGGLSAEALTDKDEADIRTAVELGADYLAVSFVREAADVERARELLQAAGGNAGIIAKIERAEALDCQTEIIQAADAIMVARGDLGVEIGDAALPQVQKQLIHQARDLNRVVITATQMMESMIESPLPTRAEVFDVANAVLDGTDAVMLSAETAAGEYPDAAVAAMDRVCREAEKSRAATESGHRLECRFGSSEEAVAMAAMYTANHLPVKAIIALTESGTTALWMSRIRSGIPIYALTRHPETQGRVTLYRGVYPIAFDPTQGDADSVRQRLVQTLREKRLVTEEDHLVLTFGSRMGVAGGTNTMKVVKVGDLLNGTGH

SEQ ID NO: 33964 - protein, 476 aa, Vibrio sp. Ex25
MLSKYNKEGIMAHVNHYDVIVIGSGPGGEGAAMGLTKAGLNVAIVEKESSVGGGCTHWGTIPSKALRHAVSRIIEFNSNPLFCRNNTSVHATFSDILDHAKSVIDKQTRLRQGFYDRNSCTLLFGTARFIDNYSIAVMQSDGTEEIYSADKFVIATGSRPYQPNDVDFLHERIYDSDSILSLKHDPRHIIIYGAGVIGCEYASIFRGLGVKTDLINTRDRLLEFLDNEVSDALSYHFWNSGVVIRNDETYEKIEGTEDGVIIHLQSGKKMKADCLLYANGRTGNTDKLNLGAVGLEADSRGQLKVNRNYQTDIEHIYAVGDVIGYPSLASAAYDQGRFVAQAITKGQAENYLIDDIPTGIYTIPEISSVGKTEQELTAAKVPYEVGRSSFKHLARAQIAGKDIGSLKILFHRETKEILGIHCFGERAAEIIHIGQAIMEQKGSANTIEYFVNTTFNYPTMAEAYRVAALNGLNRLF

SEQ ID NO: 33965 - protein, 665 aa, Alkalilimnicola ehrlichei MLHE-1
MPTRRDLANAIRALSMDAVQRAHSGHPGAPMGMADIAEVLWNDYLRHNPANPHWWDRDRFVLSNGHGSMLLYSLLHLSGYELGIDDLKAFRQLHSRTPGHPEYGYTAGVETTTGPLGQGLANAVGLALAERTLAAQFNRPGHELVDHWTYCFLGDGCLMEGVSHEACSLAGTWKLGKLIGFYDDNGISIDGKVEGWFTDDTPGRFEAYGWHVVREVDGHDAEAIKRAIDEARAVTDRPSLICCKTVIGFGAPNVCGTHGVHGAPLGDEEIQATREFLKWEHGPFEIPREIYSGWDARARGKQLEAAWHERLAAYRKAHPEMAAEFERRMKGELPERFAQHAEEALAEAVDESAKVATRKASEQALNRLGPYLPELLGGSADLSGSNNTKWEDCAVIGGAKADADGNYLHYGVREFGMSAIANGLALHGGFIPYTGTFLVFSDYARNAIRMAALMGIQQIFVHTHDSIGLGEDGPTHQPVEHLGSLRMIPGLDVWRPCDAIETQAAWQAALERRDGPSLLALSRQGLVAQQRTDEQVALIRRGGYVLAEPKQGEAELILMATGSEVAIMVEAAERLADRGRRVRVVSMPCLEVFQSQPADYREAVLPAGVPVIAMEAAHPMPWQALLGDRGRVIGIDTFGESAPAPALYEHFGLTVDAVVQATETL

SEQ ID NO: 33966 - protein, 464 aa, Glycine max; identical to SEQ ID NO: 890

SEQ ID NO: 33967 - protein, 766 aa, Thermotoga maritima
  misc_feature (70)..(70): Xaa can be any naturally occurring amino acid
  misc_feature (75)..(75): Xaa can be any naturally occurring amino acid
  misc_feature (77)..(77): Xaa can be any naturally occurring amino acid
  misc_feature (105)..(105): Xaa can be any naturally occurring amino acid
  misc_feature (125)..(125): Xaa can be any naturally occurring amino acid
  misc_feature (134)..(134): Xaa can be any naturally occurring amino acid
  misc_feature (202)..(202): Xaa can be any naturally occurring amino acid
  misc_feature (376)..(376): Xaa can be any naturally occurring amino acid
  misc_feature (453)..(453): Xaa can be any naturally occurring amino acid
  misc_feature (500)..(500): Xaa can be any naturally occurring amino acid
  misc_feature (542)..(542): Xaa can be any naturally occurring amino acid
  misc_feature (561)..(561): Xaa can be any naturally occurring amino acid
  misc_feature (569)..(569): Xaa can be any naturally occurring amino acid
  misc_feature (651)..(651): Xaa can be any naturally occurring amino acid
  misc_feature (714)..(714): Xaa can be any naturally occurring amino acid
  misc_feature (753)..(753): Xaa can be any naturally occurring amino acid
  misc_feature (760)..(760): Xaa can be any naturally occurring amino acid
  unsure (1)..(766): unsure at all Xaa locations
MHHHHHHGKPIPNPLLGLDSTENLYFQGIDPFTKAYAFGFPKIGEKREFKKALEDFWKGKITEEQFEEEXNKLRXYXVENYRKNVDVIPSNELSYYDFVLDTAVXVGAVPERFGEYRGLSTYFDXARGGKALEXTKFFNTNYHYLVPEIETEEFYLLENKPLEDYLFFKSKGIETAPWVIGPFTFLYLSKRNGEWIRRPNQXEKLLESLVSVYKEVFEKLVENGCKEILVNEPAFVCDLEKAHWDLILNVYRELSEFPLTVFTYYDSVSDYEACVSLPVKRLHFDFVSNEENLKNLEKHGFPEDKKLVAGVINGRQPWKVDLRKVASLVEKLGASAISNSCPLFHLPVTLELENNLPGGLKEKLAFAKEKLEELKXLKDFLEGKTFDLPNVSFEDFAVDLQAVERVRNLPEDSFRREKEYTERDRIQRERLNLPLFPTTTIGSFPQTPEVRKXRSKYRKGEISKEEYEAFIKEQIKKAIELQEEIGLDVLVHGEFERTDXVEFFAEKLNGIATTQNGWVLSYGSRCYRPPIIYGTVTRPEPXTLKEITYAQSLTEKPVKGXLTGPVTIXSWSYYREDIPEREIAYQIALAINEEVKDLEEAGIKIVQIDEPAFREKAPIKKSKWPEYFEWAINAFNLAANARPETQIHAHXCYSDFNEIIEYIHQLEFDVISIEASRSKGEIISAFENFKGWIKQIGVGVWDIHSPAVPSINEXREIVERVLRVLPKELIWINPDCGLKTRNWDEVIPSLRNXVALAKEXREKFES

SEQ ID NO: 33968 - protein, 481 aa, Burkholderia fungorum LB400
MAIPSYTDTRLLINGEWCDAASGKTLDVINPATGQAIGKVAHAGIADLDRALAAAQRGFEAWRKVPANERATTMRRAAALVRERASDIGRLMTQEQGKPFAEARIEVLAAADIIEWFADEGRRVYGRIVPSRNLAAQQLVLKEPIGPVAAFTPWNFPVNQVVRKLSAALACGCSFLVKAPEETPASPAALLQAFVEAGVPAGTVGLVFGDPAEISGYLIPHPVIRKVTFTGSTPVGKQLAALAGAHMKRATMELGGHAPVIVAEDADVALAVKAAGGAKFRNAGQVCISPTRFLVHNSIREEFAAALVKHAEGLKLGDGLAEGTTLGPLANARRLSAMSKVLDDARKTGAKVETGGERVGSEGNFFAPTVLTNVSLEADVFNNEPFGPIAAIRGFDKLEEAIAEANRLPYGLAGYAFTKSFSNVHLLSQQVEVGMLWINQPATPSPEMPFGGVKDSGYGSEGGPEAMEGYLVTKAVSVMAV

SEQ ID NO: 33969 - protein, 1533 aa, Oryza sativa
MAGAPRSQASYRRESSLFERVLIQVTDDNERFAVVDISGVDSADAIKERMFAKLHLFDADHSSFQLFRTEIGQSEATGPVVNDDALLVLCLQMGDDRGTLKFLVQQTAPPNATVRAMPPPTSAAGQQRALNEVRRVSGAGSATSNHLRTDSQSSRSSISDALIYPEMVGADGAHEGSNRNSGSSLTRSKAQARRALPSAPPMDDLRSPTGYHDRRSIASSGEGHAQEASSKHASSVSEGSGTPVMLSQRSSSMNATQPAPTASSNNARRPSHVEDERPRFDADASANRSLQAPANGLGHRQDRSDEGVRDQSRQQAPGLTLHNAKSMDDLHRPAHGSTHAPAMIPQAEVRAQAGLDRDGRYPAPSIMRPSTAAPAGPGARDGGHGHRQYSSDALGTSKGPVDPASLDPRMLQRNRSAQAAIPSSQQLANHGPTRMASTPQIRSPPTQPNYPARGPVDPRYARPAGMDDPRFAGMPTHPAQSLQPRPTSPAARPPQFNAPSTYGGPNSYSVQSFGQAQRPLAPGYVNEFGVRAPNATPNFNTFHGHDPRLGANGMQGSLTPRPYSYHEASSTHHPAYRPYSPQLAPSPYRTREDPFTTRYFPASSSRQVSEFQMQAGRLEPGMTVQQTLRTHEVLRNQAVSSPQGQAYLGHAHPPGPSYGPRDPRQPGQPNQYMGMQPYPNVSAPPSMPSMPQRSSHPSSAHANPHHAPSSRPPQHSHPPARNAHDMANSNASAYVSAQPRPHSSASSGGRGVTPQPSPASHASAPAAESHRRDPPVRVNPSERSSGSSFSSQTSSGPGRPSQEDRNSRHSTDDSFSAPTSARSSQSGPASAKPTNGENRSSYAEQERELADDELARVRPLPKLPTSSAGTPTDTSSAKSGGAEAVRKSEDEDTLRAGEWAQLRRALEPASDGTVIGTAVSGSSGGDGDTVRAEPSTPGPSRPHTKDGLGSASPSLDPPRAPSPSMAPEENGTVASFGVFDDDESESGTWAQPLDSDVNAPRLPLRLDGDEDAAADDHGTLLPGQGALLQSPARVGGSSPKRPELRLTIDPAAGPTLLAPASQPAGLSPVPSSSHLSSSLSSGGITRSNSFARRDDDWAFRPPPEQLYENLDDFFPKHDLDKPLLDTTAVPESPMVSSPGSEAAAAAGSMASSPPTAPQQAMSHRSRLKRSIRLVAQDRKRFLDRAGKRATEKDAEASSGLVRRRSTKLWGTRVVEMTPGQELATPASATSAESPLSDTSPPKPVFKWVKGDLIGKGTYGRVYLALNATTGEMIAVKQVGLPRTASDREDSRQKGVVAALKSEIETLKDLDHPHIVSYLGFEETTTFLSTFLEYVPGGSVGSCLRKHGKFEEPTIKSFLHQILDGLAYLHSKGILHRDLKADNILVDFEGICKISDFGTVRRSDDIYGNVENMSLQGSIFWMAPEVVSLSKKGYSAKIDIWSLGCVVLEMFAGRRPWSDDEAVQAMFKIGAERKAPPIPADVKLSKQAAHFLKNCFEVDPAKRPTAQRLLDHVFSVPDESWHFQQSALWRSLQR

SEQ ID NO: 33970 - protein, 1447 aa, Arabidopsis thaliana
MASRNRALFSVSTLFLCFIVCISEQSNNQSSPVFACDVTGNPSLAGLRFCNAGLSIKARVTDLVGRLTLEEKIGFLTSKAIGVSRLGIPSYKWWSEALHGVSNVGGGSRFTGQVPGATSFPQVILTAASFNVSLFQAIGKVVSTEARAMYNVGSAGLTFWSPNVNIFRDPRWGRGQETPGEDPTLSSKYAVAYVKGLQETDGGDPNRLKVAACCKHYTAYDIDNWRNVNRLTFNAVVNQQDLADTFQPPFKSCVVDGHVASVMCSYNQVNGKPTCADPDLLSGVIRGQWQLNGYIVSDCDSVDVLFRKQHYAKTPEEAVAKSLLAGLDLNCDHFNGQHAMGAVKAGLVNETAIDKAISNNFATLMRLGFFDGDPKKQLYGGLGPKDVCTADNQELARDGARQGIVLLKNSAGSLPLSPSAIKTLAVIGPNANATETMIGNYHGVPCKYTTPLQGLAETVSSTYQLGCNVACVDADIGSAVDLAASADAVVLVVGADQSIEREGHDRVDLYLPGKQQELVTRVAMAARGPVVLVIMSGGGFDITFAKNDKKITSIMWVGYPGEAGGLAIADVIFGRHNPSGNLPMTWYPQSYVEKVPMSNMNMRPDKSKGYPGRSYRFYTGETVYAFADALTYTKFDHQLIKAPRLVSLSLDENHPCRSSECQSLDAIGPHCENAVEGGSDFEVHLNVKNTGDRAGSHTVFLFTTSPQVHGSPIKQLLGFEKIRLGKSEEAVVRFNVNVCKDLSVVDETGKRKIALGHHLLHLLVIVKDASTPSNLSTKIFISGLSSEESKMLPNEELVPVKRITPQSSWSWISIDATGKKTVLDVDKYVIMHRVQIHARDLRILDPNLFYPSAILGRERAIVLNLEHIKAIITAKEVLIQDSSDENLIPTLEEFQTRLSVGNKAHGGQLDGDVVEEDESAFEFRALEVALEAICSFLAARTIELEKSAYPALDELTLKLTSRNLLRVCKLKSSMTRLTAQVQKIKDELEQLLEDDEDMAELYLSRKLAGASSPAIDSGEHINWYPTSPTIGAKISRAKSHLVRHTFMQIDRTLNKLTELREYVDETEDFLNIQLDSSRNQLIKVVSGTATVCAILFVIIMSFARREHQTEMSIDSDVDPSEVSTAKRKPSRSWLLIDAAGNSTMLNVDSYAIIRRVHIYARDLRVFESSISSPLSIRTREGAIVLNLEVLLREPLNENVIPVAKEFERRLGVENRERRGQPDGKEDSGAEVDAEKDESPFEFRALEVALEAICSFLAARTTELEKSGYPALNELASKVKDELQLWLEDDDDLGDLCLSRKIATTSSPVSDSDEQINSYPTSPTIGAKISRAKSHLVRSATAHYMQIDRTLNKLAELREYLDDTEDYINFQLASSRNKLIEFEVIITAGSVCISVYSLVVGILSTNIPFSWNTKEHMFKWVVSATATLCAIFFVIIISYARYKKLVGN

SEQ ID NO: 33971 - protein, 552 aa, Geobacter sulfurreducens PCA
MPKNRDAARASLENLYRIFTVPEAPDSTLGAIDQAISGDVTGFLQTHIVAIERDLEDIEANFSSFSIPEEPTYVSEYTEFVKENLVAHSVHTASPAFVGHMTSALPYFMLPLARLMTALNQNVVKVETSKAFTPMERQVLAMLHHLVYRRDEDFYPSWIHNSRHALGAFCSGGTIANITALWVARNRLFAPNGAFRGIAQEGLARALKHRGADGIAVLVSERGHYSLGKATDLLGIGRDDLVKVKTDANNRIDLKALREECRRFQDRNTLPLALVGIAGTTETGNVDPLEAMADLAQELGCHFHVDAAWGGPTLFSDRHRSLLKGIERADSVTIDGHKQLYVPMGAGMVVFKDPTALSAIEHHANYILRHGSKDLGSHTLEGSRPGKAMLVHAGFSIIGRKGYELLIDMGIERARTFADMIKQHPDFELISEPELNILTYRYCPAAVQQTLHDVTDRERADINALLDLVCQLLQKFQREAGKTFVSRTRLHVARHDRELTVLRVVLANPLTTDEILESVLAEQCELVQLPEIQAVLQQVEELCTGLAKAASW

SEQ ID NO: 33972 - protein, 412 aa, Haemophilus somnus 129PT
MVVTGIGGITAFGNDWQKIKTAFQRKQNAVKSMNDWVERFPELDARLGAVIEDYYPPKHWNRKQLRSLGRVSQLVVDASERALANASLLDEDGIILEYLKDGRMGVACGSSTGSTNDIKDAAELLMTGKSDGFNANTYVRMMPHTTAANIGIFFGLTGRIIPTSSACSSGSQAIGYSYEAIKYGLIPMMLAGGGEEFCPSEVYVFDSLYAASRNNDNPSHTPRPYDKARDGLVIGEGGCMFVLEELEHALARGANIIAEVVGYGANSDGSHVTRPQKETMQRCMELALKDAGIEPSKIGYVSGHGTATEQGDIAETLATEAVFGYVPMSSQKSYLGHTLGACGALESWFSIEMMRDGWFAPTINLDNVDERCGKVDYIQHDGREIHTDYVMNNNFAFGGVNTSLIFKRWTDE

SEQ ID NO: 33973 - protein, 175 aa, Triticum aestivum
MPPPVMAWSATSVAPLQGLESTGVLPVSRRSNGDSLDSVSNGGRIMCMQVWPIEGIKKFETLFYLRPLSTEALLKQVDYLIRSKWVPCLEFSKVGFIFREHNASPGYYDGRYCTMWKLPMFGCTDATQVIHEVEEVKKEYPDAYVRIIGFDNMRQAQCVSFIAFKPPGCEESGKA

SEQ ID NO: 33974 - protein, 567 aa, Thermoplasma acidophilum DSM 1728
MEKIKEDVIILGGGMAGLRAAVAAAEYNKNISVGVVSKLYPLRSHSVSAEGGTSAVLNPKDSFDLHAYDTIKGSDYLADQDAVEEFVRLVPEQIYTTDHWGCPWSRNPDGTISQRDFGALSFPRATFAADKTGFHVMQTLFSRALKYDNIHFYNEYFATSMFLDGGRFNSLTTINLRTGEFVVFQGKSIIFAAGGAGRLYQFSTYAHSVSGDGDAIAYRAGIPLKDMEFIQFHPTGLVPSGILITEGARADGGYLLNGEKKRFMQAYAPNKLEKASRDVVSRAIMWEIEAGRGAKGEYGDMEYVYLDLRHMADILDERLPMITEIAKKFNGIDAHTELIPVHPATHYTMGGIDSNVKTTTDFSGIFAAGENACVSIHGANRLGSNSTNECLALGNVAGVSAAKYAMEHDIPDLVVENVNNEEKRIWDDLLKRDGGENVAKIREDLRINMDKNVGIFRDADGLNTSLKNIKQYKERYQKISIQDKSSTFNMELEWALEVGFMLDLAEIITVGAIMRTESRGAHYRKDYPNRDDENFLKHTIATYTKDGPKITYKPVVITKWQPTVRTY

SEQ ID NO: 33975 - protein, 336 aa, Thiobacillus denitrificans ATCC 25259
MRVLLTGGAGYIGSHTAVECLAAGHDVVVFDNLSNSSEKSLERVARIAGKPVSFVRGDIRDRHALRKLFAEHAVDAVVHFAGLKAVGESVEHPLRYYDNNIGGSIALFETMAEVGLKTIVFSSSATVYGDPVRVPITEDFPLSATNPYGRSKLFIEEMLRDIARSDGGWHIALLRYFNPVGAHASGLIGEDPRGIPNNLMPYIAQVAVGRRPHLNVFGGDYPTPDGTGVRDYIHVVDLARGHVAALGRLQKTAGVQTWNLGTGRGVSVLDMVRAFEAASGRAIPYRIVERRAGDVAQCWADPSCAARDLGWRAEYDLPRMCEDAWRWQQGNPEGYA

SEQ ID NO: 33976 - protein, 290 aa, Triticum aestivum
MAGKEIYHKMKDKVKDAFSSSGPETGKGKTKLSGRRVKHGYHLVKGKSNHPMEDYLVAEYRQVGEHDLGLFAIFDGHLGHTVPDFLRAHLFDNILSEPEFLSDTKNAIRKAYLLTDEKILEKAAELGRGGSTAVTAILISSNDSVKLVVANIGDSRAVISKNGKAEQLSVDHEPSMEREIIEEKGGFVSNLPGDVPRVDGQLAVARAFGDRSLKKHLSSEPHVAEEVIDESSDFLILASDGLWKVMTNQEAVDEIKDIRDAQAAAKHLTEQAVNRKSKDDISCVVVNFHC

SEQ ID NO: 33977 - protein, 219 aa, Azoarcus sp. EbN1
MHEIDQLFTNNRNWSERIRGEDPAYFRRLANQQSPQYLWIGCSDSRVPANQIIGLAPGEVFVHRNVGNVVVHTDLNALSVIQYAVDVLQVKHILVVGHYGCGGVSAALNNSRLGLIDNWLRHVQDVRDLHETMLAAIEDPLQRINQLCELNVMQQVVNISQTSVLREAWERGQPVMLHGWCYGLCDGLVRDLGVSATCRSEALERYRDAVNAALRTKPR

SEQ ID NO: 33978 - protein, 135 aa, Sinorhizobium meliloti
MSENRMPKITKTNEEWRAALTPEQYRVTREHGTERPFTGPFLDNKRHGTYKCVCCGRALFRSDTKFDSGCGWPSYFAPVDPDAIAEYVDRSHLMVRTEIRCADCDAHLGHVFPDGPPPTGLRYCLNGTAMTFEED

SEQ ID NO: 33979 - protein, 384 aa, Triticum aestivum
  misc_feature (106)..(106): Xaa can be any naturally occurring amino acid
  unsure (1)..(384): unsure at all Xaa locations
MAKDGAGGGPDWNGLLKWSLAHGSDGTNPPRALSEEDRKWFMEAMQANTVDVVGRMKEIAQVMKTPDDVLQSHGVTPENIEGTFSDMLDELQEACGNPFDMANDLXHSIGGLDPLLGSLEKFQNAGIRAKAAEVVSTVVQNNPKSQQLVMESNGLEPLLTNFRSDPSTTARTKALGAISSLIRNNQSGLAAFRLGNGHAALKDALGSDDARLQRKALHLTQYLLNNKADRNVAAKIGLPNQLIHLASSDDSGVREAALGGLLELARDKTPAARNALPDQDKLKDVLKSRIEGISAMDADDLQAAREERQLVDSLWKECYGEPSSLREKGLVVLPGEDAPQQPPPDVVGKMFEPPLRVWAVPRPAPAEDPDSGSGKKDPPLLLGP

SEQ ID NO: 33980 - protein, 409 aa, Bordetella pertussis Tohama I
MKRRVVITGLGIVSPVGNDIASAWDNIVNGRSGISRISRFDPTPLTTHIAGEVKDFDVTQYMPAKEARQMDTFIHYGLAAGMQAWRDCGLEVTETNAERIGVIVGSGIGGLPRIEETQTEMLAKGPRRISPFFVPASLINLISGQLSIAYGMKGPSYAVVSACTTGLHCIGDAARLIEYGDADVMLAGGAESTVSPLGIGGFAAMRALSTRNDDPTTASRPWDRDRDGFVLGEGAGVLVLEEYEHAKKRGARIYGELAGYGMSSDAHHITAPDKDGPRRGILNALRNGGINADEVSYVNAHGTSTPLGDKNETDALKLAFGDHASKLVVNSTKSMTGHLLGAAGGIEAVFTTLAVHNQISPPTINIFNQDPECDLDYCANEARPMKIEIGLSNSFGFGGTNGSMAVRRV

SEQ ID NO: 33981 - protein, 467 aa, Pseudomonas aeruginosa UCBPP-PA14
MGLNADWMQRDLNVLWHPCTQMKDHERLPVIPIRRGEGVWLEDFEGKRYIDAVSSWWVNVFGHANPRINQRIKDQVDQLEHVILAGFSHQPVIELSERLVKITPPGLDRVFYADSGSAGIEVALKMSYHFWLNSGRPRKKRFVTLTNSYHGETIAAMSVGDVALFTETYKSLLLDTIKVPSPDCFLRPDGMCWEEHSRNMFAHMERTLAEGHDEIAAVIIEPLIQGAGGMRMYHPVYLKLLREACDRYGVHLIHDEIAVGFGRTGTMFACEQAGIAPDFLCLSKALTGGYLPMSAVLTSETIYRGFYDDYQTLRAFLHSHTYTGNPLACAAALATLDIFEEDKVIEANRALSTHMARATAHLADHPHVAEVRQTGMVLAIEMVQDKASRTPYPWQERRGLKVFQHGLERGALLRPLGSVVYFLPPYVITPEQIDFLAEVASEGIDIATRDAVSVAVSDFHPDHRDPG

SEQ ID NO: 33982 - protein, 331 aa, Listeria monocytogenes str. 4b H7858
MTKVYYEDAVKNNALEGKTVAVIGYGSQGHAHSQNLRDNGNNVIIGIREGKSAESARNDGFDVYSVSEAAEKADVIMILLPDETQGETYENEIKPNLKAGNALVFAHGFNIHFDVINPPNDVDVFLVAPKGPGHLVRRTFVEGGAVPSLFAIYQDATGNARDTALSYAKGIGATRAGVIETTFKEETETDLFGEQAVLCGGATHLIQAGFETLVEAGYQPELAYFEVLHEMKLIVDLMYEGGMEKMRHSISNTAEYGDYVSGPRVVTADTKKAMKEVLTDIQNGNFAKSFIDDNKNGFKEFHRMRKEQQGHQIEKVGAELREMMPFVKPQH

SEQ ID NO: 33983 - protein, 431 aa, Schizosaccharomyces pombe
DPAWGFAVSWNYFLNYFVTCPLELTTCAITFKFWTEINSAAWISIFLAVVIVINLFGVRAYGEVEFILSTIKVIATVGFIILAIIINCGGVPTDHRGYIGGSIIKQKPFRHGFKGFCSVFTTAAFSFSGTEIIGLAAAEVGNPRKSVPSAVKQVFWRIAIFYVVSLILIGLLVSPDDPRLMGNGDVSVSPFVLAIQEANIKGLPSVFNAVIIISVVSVTNSTTYTAARTLQGMATLKQAPKFFSYTDRVGRPLIAMVVVLLFGFFAYINEADKNGSDISDTVFDWLLAISGLSSFFTWGSICLSHIMFRLAFKKQGHSLKELGFVSPMGIWGSVIGLGFNILCLMAEFYVSLFLIGGSPNANDFFQGYLAACIALAFFIGYKIYDRSHIPSLDKLDIDTGLKTYDNQDEEKEEYSSKGPLNILKKAWNAVC

SEQ ID NO: 33984 - protein, 552 aa, Anabaena variabilis ATCC 29413
MAKPIEFTLFAPYNKGAALIASFSDWQEIPMQKGDDGYFRATIELEDGTYQYKFRVQTRSWFFEEDQWVDVTDPYATDIDESSGKDNGIIKIKDGEKIVDTYVWQHDDKPLPADHELVIYELHVGDFSGGEDDLYARGKYKHVIEKLDYLCELGINAIELLPVKEYPGDYSWGYNPRYFFATESSYGSTADLKKLVDECHQRGIRIIMDGIYNHSEASSPLTQIDHDYWYHHEPRDPDNNWGPEFNYEHYDENLETYPARKFIGDTVRYWVGEYHLDGIRYDAARQIANYDFMHWIAQEAKKTAGAKPFYNVAEHIPETTSITNLDGPMDGCWHDSFYHTIKAHICGDTFDLESLKDVIDPKRQGFLGATNVVNYLTNHDHDHIMVELGNREIFHDEAFRRAKLGTAILMTAVGVPLIWMGEEFGEYKPKQQDQSKIDWTLLGNDLNRSLFDYYRGLIGLRKNNHALYTENIDFIHENPEAKVLAYSRWNDEGSRVVVVTNFSEDFLAGYHVPNFPSGGTWHEWTGDYDVEAGDDGIITDIGPYEAKVFVWQ

SEQ ID NO: 33985 - protein, 211 aa, Ashbya gossypii ATCC 10895
MSVEEVTQKAQALSVGDNEERKAVLTDSKDFDLKHPLNSKWTLWYTKPPVGDNESWSDLLRPVTSFTTVEEFWAIQNAIPKPRELPLKSDYHLFRNDIRPEWEDEANSRGGKWSFQFKVRNPPIDDLWLRALLAVIGESIDEDEFEINGVVINVRRSGFKIGLWTKSVRQAPLSKVGAKFKAVLQLDDSDTLEFFAHSSANDKNAKPALVL

SEQ ID NO: 33986 - protein, 579 aa, Schizosaccharomyces pombe
MSAKDYDFDIESVLPEEKAPQVSEAKKDYISQESTVLSGQVDFVEPEHKGFFQNLIDGFKPAREADGNGGPALKRGLSTRHMQLMSIGGAIGSGLYVGSGSALADGGPASVIINYILIGIMMFFVIYALGEMAVAYPVAGSFNTYATRFIDPAWGFAVSWNYFFNYFVTFPFELTTCAITFTFWTDVNCAVWISIFLVVVIGINLFGVRVFGEVEFVLALIKVVATVGFIILAIIINCGGVPTDHRGYIGGSIIKQKPFRHGFKGFCSVYTTAAFSFSGTEIVGLAAAEVGDPRKTLPGAVKQVFWRVAIFYIVSLILIGLLISPDDPKLMGNGSASVSPFVLAIQEANIKGLPSVFNAVIIISVISVTNSSTYTAGRTLHGMANLKQAPAFFKYTDRLGRPLIAMIVVLSFGFFAYINEANNNGNDISDTVFDWLLAISGLSNFFTWGSICLSHIMFRLAFKKQGHSLKELGFVSPMGIWGSVIGLGFNILCLMAEFYVSLFPIGGSPNANDFFQGYLAACITLVFFIGYKIYDRSHIPSLDKLDITTGLKTYEYEETKDSSDTGRFRFFKKIINTVC

SEQ ID NO: 33987 - protein, 402 aa, Candida glabrata CBS138
MDSTAPLLGPNSRQTALSTYSAAKRDLIYVCASSPLHLLLIFVPLGIIWGYMELSHTWTFVFNFLAIIPLAAILAHATEELADKAGSTIGGLLNATFGNAVELIVSVIALKEGQVRIVQASMLGSLLSNLLLVLGFCFLFGGYNRIQQTFNQTAAQTMSSLLAISCASLLIPAAFKATLPHGKEDWIVDDKILHLSRGTSLILLMIYVLFLVFQLGSHHAMFEQQHEETDEVVSELSIKPHQSLSIRSSLWFLLLSTVIVSICADYLVGTIDNVVESTGLSKTFIGLIVIPIVGNAAEHVTSVMVAMKDKMDLAISVAIGSSLQIALFVTPFMVLVGWWIDVPMTLNFSTFETTTLFIAVFLSNYLILDGESNWLEGVMSLAMYVLIAMAFFYYPDVMADAA

SEQ ID NO: 33988 - protein, 390 aa, Bacillus subtilis
MSISTLQKEINKQLDGCFEEMVEIRRHFHMYPELSFQEEKTAAFIASYYESLGVPIRTNVGGRGVLANIEGSEPGPTVALRADFDALPFKMKKDVPYASKVPGVMHACGHDGHTAALLAVAKVLHQNRHELKGTFVMIHQHAEEYYPGGAKPMIDDGCLENTDVIFGTHLWATEPLGTILCRPGAVMAAADRFTIKVFGKGGHGAHPHDTKDAVLIGSQIVSSLQHIVSRKVNPIQSAVISTGSFIADNPFNVIADQAVLIGTARSFDENVRDILEKEIEAVVKGICSMHGASYEYTYEQGYPAVVNHPAETNHLVSTAKNTEGVQQVIDGEPQMGGEDFAYYLQNVKGTFFFTGAAPEQPERVYSHHHPKFDINEKAMLTAAKVLAGAA

SEQ ID NO: 33989 - protein, 541 aa, Nocardioides sp. JS614
MPKILEFDEHARRALERGVDALANAVKVTLGPKGRYVVLDKKWGAPTITNDGVTVAREVELDDPFENLGAQLTKEVATKTNDIAGDGTTTATVLAQAMVHEGLRAVTAGANPMGLKRGMDAAAEAVGDALKEAAREVESREDMASVATISSRDSVIGDLLAEAFDKVGKDGVITVEESNTMGTELEFTEGMQFDKGYISQYFVTDPERMEAVLEDPYILLHQGKISAVAELLPLLEKVIQSGKPLFILAEDVEGEALSTLVVNKIRGTFNAVAVKSPAFGDRRKAMMQDIATLTGGQVVAPEVGLKLDQVGLEVLGQARRVVVTKDDTTIVDGAGDPKDVEGRVNQIKAEVENTDSDWDREKLQERLAKLAGGVCVIKVGAATEVELKEKKHRIEDAVSATRAAIEEGIVAGGGSALVHAVSVLSDDLGLTGDEALGVRVVRKAADEPLRWIAENGGVNGYVVTTKVRELGLGNGFNAATEEYGDLVAQGVLDPVKVTRSALVNATSIAGMLLTTETLVVDKPEEEEPAAAGHGHGHGHGH

SEQ ID NO: 33990 - protein, 97 aa, Nocardioides sp. JS614
MSVNIKPLEDRIVVKPLDAEQTTASGLVIPDTAKEKPQEGEVLAIGPGRIDDNGNRVPLDVTVGDKVIYSKYGGTEVKYAGEEYLILSARDVLAVVS

SEQ ID NO: 33991 - protein, 446 aa, Polaromonas sp. JS666
MATVPTHVFHRNLQNTPPVAVSGQGVYLTDAQGKRYIDASGGAAVSCLGHGHPDVLAAMHAQIDKLAYAHTSFFTTEVAEALADKLIQTAPQGMSHVYFVSGGSEAMEAALKMARQYFVEIGQPQRQHFIARRQSYHGNTLGALAIGGNPWRREPFAPILIEATHLSPCYPYREQQAGETPGQYGLRLAQELEQAIFEKGADRVIAFVAETVGGATAGVLAPVPGYFKAVREVCDRYGVLLILDEVMCGMGRTGTLHACEQEGVLPDLLAVAKGLGGGYQPIGAVLAQANIVDAMRDGSGFFQHGHTYLGHAVACAAALAVQQVIERDQLLAQVRVRGGFLQQLMRSNWGEHPHVGDIRGRGLFWGIELVQERASKTPFDPARKLHARIKQEAMARGLMVYPMGGTVDGRYGDHVLLAPPFIASEAELTMMVERLGSAMDAAIAAA

SEQ ID NO: 33992 - protein, 153 aa, Oryza sativa
MAPKAEKKPAAKKPAEEEPAAEKAEKAPAGKKPKAEKRLPAGKAEKGSGEGKKAGRKKAKKSVETYKIYIFKVLKQVHPDIGISSKAMSIMNSFINDIFEKLAGESAKLARYNKKPTITSREIQTSVRLVLPGELAKHAVSEGTKAVTKFTSA

SEQ ID NO: 33993 - protein, 1568 aa, Ustilago maydis 521
MSAATPTSPGFPLTMGTGVMAAHFAAPSSNAGSPRSRPTTPLSAGLTPSGPTYDDLGRWDDADVASWLNAARLGHYASIFAEHDIRGSVILDVDQAALKEMGITMVKDRVRISAAIKLLNKRCADSAVARRPSVVSISPLLPLASHPLYAHEGEIEYLQHDHTADPSADGSGSNFGLNSMGMRRGQMRPPPLTLKQSTSRGMPGYASPAGSINQSQGFGLSAARGLTPGAARGSVWNTASSSSATSKPGTPDGALHRKVNSIGGVAAPLAVGASSSLSSSRHPYGHAVHSNRPSTATGASGYSTVPASQSLRSNHTSSSPTATSFGSNINAASARPSTATGAQSYTTNVPGTSSARDGYSPLTPISESNSLGNTPTTPSGIQQQQQSAGYAVGRGPFASSQRYAASSVPSQQQPSSGHTLRHVDSGEGYNLAGYQNPNPPTLEDLKRRTIKFISEEDNTTRIVNVSDCRDAYDVMARVLKKFGKPPSGNSYTPTADQGPTGDELGATETWGIFATSADGQNTKALSDNELLAICHAPQPHDPLRERGLTLRRIPNHLPGEDARKVPVRSGRNKLEAFFGERMPVAQMQPAGPGSGVNADEEDAGSVTISGKKMKRASTVSIMSGLGDGPFSSSSHNTGAGHTHGSTRAEGKLLSKKESKHMSPPPVTSKPSKIRNFFGQRPPSELINTNLADFFPSTDSKALQRTARRSIYGRASASTRSKRNSTWSFVADPDAPPLPNKGSMDGHPTPLERSSISIRERGTTPVIQIGYDSRSEDDHQSNARRTSSGTHSHLHPSLTGPPTLPPVVSRDSLDEWSRDLKAVGSPVTEENAMFQSSRHGHASGSQQHHAAMKHYPSHASGYADRPSISRRASGESARSRRSLASQVRHGLSAARERNADTASLLTVDEITQEVENRRESISLAGAGGGWVVDEDGVPIPIPGSSSPFSSSAAASTRPSSGISSSYVHNGHLEHDDSEGHSDEEANQSSDLEEATRTRKARGVPSKAASIRTVASKRASSVLQAPGDESDRHLGDPMAVARSTTSRASSVSELRRSVHDHGDPSDGESGSDFTDSDLDSDGSETDEDEQANDVYLPSAKPAPIKWHKGALIGAGSFGNVFLGMNAKTGLLMAVKQVELPSGDSHLDQRKKGMLEALEREIKLLKSLEHENIVQYLDSFADDSHLNIFLEYVPGGSIVALLRNYGAFEEPLVRNFVRQILNGLSFLHNRGIMHRDIKGANILVDNKGGIKISDFGISKKVESDLVLATNKSGAGGGGAGGAAHRPSLQGSVFWMAPEVVKQTSYTIKADIWSLGCLVVEMISGTHPWAELNQMQALFQIGMGRKPSLPDEISNECRDFLEKTFELDYNNRPSADELLNHAFMGTEMTFPPSSGADGSGGGDDDAGGSGDAGDGDASTMGMTNDAETGTTRETRETKDGKRPTRSKSTRRLEREKRHKEAAAAAAAATALDTGTPNTPTSHTAAAAAAAAAAAASASASASASPAVASTSPAPGDAETGSPTNGKSAVPPAGSTGGTPESILTVSIATARGNSTSTALSAADAAFSEEADS

SEQ ID NO: 33994 - protein, 581 aa, Burkholderia vietnamiensis G4
MRPHRHAACLRVCRADIEVGAIALTLDIESGWPARTGVRGPRRPETRGPLARPYRSAAHAAIDMTLPRPTLRADTPLDPIIQLLARAGEQGYLTHADLVDALPPDSDSADALEVVRAALADIGIDVLDEPAAPAPFVGTTPVDVDRDTLDESRALLGDLARGASASTDPMALYMRRIHAVPLLKREDEIVLAREIETGRHQILHALAGYPPAVDALLARHGAASATDAAGDEDDDTPNDESRARAFARRDALRDALATLRGALHAQGCRSAEYRDARNRVAALLGELGWAAPAVDDASRVVDALARAPANAAGDAGTDAACFDAPARRALGAALRDGQQKLGDGTRAMLEANLRLVLSIARKYVNRGVDLPDLVQDGCLGLMRAIEKFEYRRGFKFSTYATWWIRQAVARAVADRSRTIRVPVHVGDQSQRVQRHALRFRQRHGRRATPAELAADTGLAEDKLRALLALPAEPLSLDTPLPDAETGLVDLIEDQTSASPFERLANTRMRECVSSLLRSVTPTEADVLRRRFGLGGAEPDTYDAIAQDAGMSRERVRQIEKRALATLRTAAQAEGAQSFLDA

SEQ ID NO: 33995 - protein, 200 aa, Oryza sativa
MARKRKTDAAPRLDEADRTLYSTFCGAANSLSQLYTQAMAQQKLSFQAGERHSLEKLHQWILRKHEEESRLTAADIMSHIQHELDYGGNDPHVSPRVHQHSANPFANSSIQPSAGSYGQATVGFAPRPSISDQSKNTIFSNALSSPVRRSLQSYHLTQGSGNGGRNAETNSAGQNRETNSGGSNDTSMDMVSDSAGNEYY

SEQ ID NO: 33996 - protein, 419 aa, ASPERGILLUS NIDULANS FGSC A4
MAYHKRPTSSYQPCDSYFVESYDDFTVPRMDPKEHAKLVARERQYAMADELSRVTSEEYRDDILSHMLDMDASTLPDVESIDIQTEIQWFMRPYLLDFLIEAHTAFQLLPSTLFLTVNLLDRYCSKRVVYKRHYQLVGCAALLIAAKYGDKKDRVPTIRELKSMCCSLYDDDMFIQMEWHVLQTLGWTIGHPTVDSFLQTAVMDTPYDPEVEHLALYIAEISLFHREFVSKPSSDLARASLALARCILNRPQPRHTEWASQYDSMTLVGLSQQLHQPSQVLARKYSSSHYSRVSKILEQFLARQASIASYTPPSPPSDVVNSESKPYEGEIGLATPQKAPHPTNMPHGYITPPITPENEAFVNGNAGYVKAVPVPSACSPSPTPSPSVQYVTHNPYQQESNYVTQQQYLQPQMSFTSGY

SEQ ID NO: 33997 - protein, 716 aa, Magnaporthe grisea 70-15
MVEKQTGSKYSLIRRLVVFNVELMPSAIGSKSADAMGLDRGISPSLVTSWSGIPVSEKSGGKKRRCAIDSGEISTEMTGRRLIGSDSTPGCNIRSSLATSRLRLIDFLNTHASRASVVAVMWNEKSRSDNVDLEDNRPAADRDLDNNIEHRPKVAEQPLTQNSNDDGDDSDAESVGGQRSAMTTRQLLLAFPALSISLFVSFIDQTSVSTAIPAIAEDLDTGAATSWIGASFLIASTAFQLINGRLSDIFGRKNLLLVCLGLMGLGDLLCGFARTKEQLFAFRAIAGVGGGGINSIVMIIVSDITTLENRGKYQGVLGAMISLANGVGPFIGGVVVEKANWRWVFWMVPLLAAPTAAVIFFFLTLRHHDGSTYFEKIKRIDHGGIVLNLASVLLVLIPLSGGGVTYAWGSPFLVGTLVAGCVLAVAFVLYEWKVAAMPIMPLRLYGYPHCAYLYAQTFLTGLAYFGAFFYLPIYFQSVLGNGPLLSGVLLLSLVITSSVASILSGLYMARKSRYMPCILVGFALWTLGNGLTLMFDRSTVVGALVAILIVQGFGTGLTLQPTLVGMYANSASRDRAVTTGLRNFIRTIGGAFGLVISGAILNNTLKQDLSGRPGFSQETIASLTSSAYTIDALGLAREDVDLVLTVYMRGLHYIFIFFTVCSALSLLLTVGVGNTDLKSKAKAQADGGQKTEQQAETTPTSTPASRSGSSLEQSRK

SEQ ID NO: 33998 - protein, 389 aa, Prochlorococcus marinus subsp. marinus str. CCMP1375
MILAAGKGTRVQPITHVIPKPMIPILQKPVMEFLLELLKEHGFKEIMVNVSHLAEEIENYFRDGQRFGVEIAYSFEGRIEDGELVGDALGSAGGLKKIQDFQEFFDDTFVVLCGDALIDLDLSEAVKRHKEKGALATLITKSVPKDQVSSYGVVVTDEGDRVKAFQEKPSIDEALSNNINTGIYLFEPEIFKYIPSNKPFDIGADLFPKLVQVGAPFFALSMDFEWVDIGKVPDYWKAIRSVLLGDVRQVEIPGKEVMPGVFAGLNVAANWDKINIEGPIYVGGMTRIEDGSTIIGPSMIGPSCYICEGATIDNSIIFDYSRIGPGVQLLEKLVFGRYCVDKNGDHLDLQEAALDWLITDARRQDLGEPSPQQKAMAEFLGTDLIGSGG

SEQ ID NO: 33999 - protein, 1104 aa, Micrococcus sp.
MSKKWKQKFLMVLALLLVIGGDAVCSSATGQAETSTAPADREVRLSILVRINDRDWIFGRGHRRRLMIKSILSRMKVGVRVSRHVAVAPRNEGIWICFAQHLKLDYSPKRIWGSLIQVNKDSLTQAFVTSGIEQIRIVPDGSAPVIDNGENAMFYYRDKELFAADAMNTIEKVELQFDGETHEMTYEPENERFVFLANDIPTGEHPYTYLVTKAGVTTEVTDPYNTVDGVSTLVFNQADLAVSGTVAPAAIDFNQNAVLSVDIEGITEDVKISKIVADTSLLGGSAQLEIDPTLKEISIAVDDDIAAGTKAIPLTVTDSYGNLYKGTAEVEVKTRQSVGEGDFDWDESVIYFMLTDRFFDGDASNNDPYDLNYDKESRGTYQGGDFKGITDKLDYLDELGVNTIWISPVVENIKYDVRYYETSEPYYGYHGYWANNFGELNPHFGTMEEFHDLIDGAHDRNMKIMVDVVVNHTGYGLKEIDGSVTNPPAGYPSDADRARFSDLLRQGADVGTDEVVGELAGLPDFITEDPNVRKQIIDWQTDWIEKATTENGNTIDYFRVDTVKHVEDATWMQFKNALTEKMPEFKMIGEAWGAKVDNTLGYLETGTMDSLLDFGFKETARSFVNGSLEAANASLTARNAKLDNTATLGQFLGSHDEEGFLHSLAGDKGKLQVAATLQATAKGQPVIYYGEELGQTGANNYPQYDNRYDFAWDQVEGNEILAHYTKILNFREGYSKVFAKGERTLVGGSDKDQFLLFSRDYQDQKVYVGLNVAEESKAVTLTVDSADAVVTDAYSGTEYTATAGKVNLTLPGKADPGTVLLTVEGGNITGVAKDNGEVVVELVPENNIRIHYKREDNVYKNYGAWLWNDVASPSANWPVGATMFEKTDSYGAYIDVPLADGAKNIGFLVMDITAGDAGKDGGDKGFTISSPQANEIWIKQGSDKVYTYEPVDLPANTVRIHYTREAVDYDDFGIWNWGDVASPSDGWPTGAVNFDGTDRYGAYPDIKLTEAAKEIGFLVVNEKTQEKDAGDKSFNLLDKFNHLWIKQGDDTVYVSPYDEVASGLGSAEVVSENTLLLRFNSTDGFTSEKLVAGLAIQDADSAAL

SEQ ID NO: 34000 - protein, 501 aa, Anabaena variabilis ATCC 29413
MREKKPMTKNTVRTYIKQTWKTLTRSHQHLLESAQDTKLEHQPNTPWIIYISPQEDCNTVKSVLERSLSTKEMQQIEIRTLPSEVEAIQEHGLLYLPGPYVVPGGRFNEMYGWDSYFILLGLLQDEEWELAQSQVDQLLYQVQHYGTILNANRTYMLTRSQPPVLSMMVLALFQHTQDQAWLKSTLPLLEQFYYYWVVPPHLNSATGLSRYYALGEGAAPEVLFSELDEAGRSHYERVKEYYKTFEIDDYDVSLFYDSEKDELTDLFYKGDRSMRESGFDITNRFGPFSVDIVHYAPVCLNSLLYQMEQDLTQIHKILDNPELAEQWSDRANIRRERINQYLWDEEKGIYLDYHFYSGKRRHYEFATTFYPLWTGLSSPEQAQRIVENLSLFTAPGGIFTSTRVTGNQWDAPFGWAPLTLIAVQGLYRYGYRKEGDDIAHKFLTMAIQEFTKYGFFVEKYDVERCSAQVSDEICFGYSSNEIGFGWTNGVILELLANLDDS

SEQ ID NO: 34001 - protein, 350 aa, Xylella fastidiosa
MVNVSITTDYSRMLFMRNTTSTLKIAIIGYGSQGRAHALNLRDSGFDIIIGLRPGGPTEAKAQADGFTVQSPDQAAKHADLVAVLTPDMVQKKLYEEVLAPNIKQGACLLFAHGLNVHYGMITPRSDLDVVLVAPKGPGALVRREYEIGRGVPCIYAVHQDLSSHAEQLALTYAGGLGGARANIIKTTFKEETETDLFGEQAVLCGGVSSLVQAGFETLVEAGYQPEIAYYEVLHELKLIVDLFYEGGITRMLEFVSETAQYGDYVSGPRVIDGSTKERMKAVLKDIQDGTFTKHWIAEYQAGLPNYKKYKQADLEHPIEKVGKQLRAKMVWLNSEKTNDTTPPMSSKVV

SEQ ID NO: 34002 - protein, 426 aa, Chlorobium tepidum TLS
MTIDLDFDRCHLWHPYTSMADPLPVWPVKRASGVMIELEDGRKLIDGMSSWWAAIHGYNHPVLNRAVTEQLGRMSHVMFGGLTHEPAIELGKILTSLLPDPLDRIFFCDSGSVAVEVAIKMALQYWLAAGKPGKKRLLTVRSGYHGDTFMAMSVCDPVTGMHSLFSGAVPEQLFVEAPACGFNEPWREEAIDKMRQALEDHANTIAAVIIEPIVQGAGGMRFYSPHYLRRLRELCTEHGVLLIFDEIATGFGRTGKLFAMEYASVTPDIVCLGKALTGGYMTLAATVTTGHVADTISGGNPGLFMHGPTFMANPLACAVAVASLKLLLSGDWQSTVWRIERQLAEELAPCTGMTGVRDVRVLGAIGVVELDRPVDMAKIQQAFVERGIWVRPFGRLVYLMPPFIIRDNELTRLTSVICEVIGAEYR

SEQ ID NO: 34003 - protein, 423 aa, Oryza sativa (japonica cultivar-group)
MASSSDEQPKPPEPPAAAAVAGTAVATAAAAVPTHAEWAASLQAYYAAAGHPYAWPAQHLMAAAAAGAPYGAPVPFPMYHPGAAAAYYAHASMAAGVPYPTAEAMAAAAAAAAGAVPEGKGKGKGAAASPEKGSSAAPSGDDASRSGDSGSEESSDTRDDDTDHKDSSAPKKRKSGNTSAEGEPSQATLVPYAAVESPYPLKGRSASKLPVSAPGRAALPNATPNLNIGIDLWSTPPALAVPAGQGEASPGLALARRDGVAHLDERELKRERRKQSNRESARRSRLRKQQECEELARKVAELTTENSALRSELDQLKKACEDMEAENTRLMVSTWHSTHTLPLVETGNATSFHITQFLWIILNFMKGDKAQYKGPTVTTTLGMSIDSSKTQHHDDEGQLHKNTNNNSNGNYVGGSHKPEANSR

SEQ ID NO: 34004 - protein, 639 aa, Zea mays
MGNTCVGPSITMNGFFQSVSTALWKTPQEGDALPAAANGPGGPAGAGSQSALPKPASDVHHVAVQSEAPEPVKIAAYHSEPAPAVRSEAPEPVKIAASHSEPAPMAAKPGGAAANASPSPSPRPRPQVKRVSSAGLLLGSVLRRKTENLKDKYSLGRRLGQGQFGTTHLCVERATGKELACKSILKRKLGSDDDVEDVRREIQIMHHLAGHPSVVGIRGAYEDAVAVHLVMELCGGGELFDRIVRRGHYTERKAAELARVIVGVVEACHSMGVMHRDLKPENFLFADHSEEAALKTIDFGLSIFFRPGQIFTDVVGSPYYVAPEVLKKRYGPEADVWSAGVIIYILLCGVPPFWAENEQGIFEEVLHGRLDFESEPWPSISDGAKDLVRRMLVRDPRKRLTAHEVLRHPWVQVGGVAPDRPLDSAVLSRMKQFSAMNKLKKMALRVIAENLSEDEIAGLREMFKMIDADNSGQITFEELKVGLEKVGANLQESEIYALMQAADVDNNGTIDYGEFIAATLHLNKVEREDHLFAAFQYFDKDGSGYITADELQVACEEFGLGDVQLEDLIGEVDQDNDGRIDYNEFVAMMQKPTVGGSRRRPICRTASASGSASGSGRRSGWPRPLCLWLPCCLRVGVDD

SEQ ID NO: 34005 - protein, 462 aa, Clostridium thermocellum ATCC 27405
MEVKKTMEKIVALAKNRGFIYPGSEIYGGLANSWDYGPLGVELKNNIKKAWWKKFVQENPYNVGVDCAILMNPQVWVASGHVGGFSDPLIDCKECKTRHRADKMIEEWNLKNNENVKVDGWSNEMLMNYIREKGVTCPECGGKNFTDIRKFNLMFKTFQGVTEDSKSEIYLRPETAQGIFVNFKNVQRTTRKKIPFGIGQIGKSFRNEITPGNFIFRTREFEQMELEFFCEPGTDLEWFEYWKNFCFNWLLSLNIKKENLRMRDHSKEELSHYSNATTDIEYLFPFGWGELWGIADRTDFDLRQHAEHSKEDLSYFDPNTNRKYIPYCIEPSLGADRVALVFLCDAYDEEEVEEGDIRVVLRFHPAIAPVKIAVLPLSKKLGDEAYKIYEMLIKKYNCEYDETGSIGKRYRRQDEIGTPYCVTFDFDSLNDRCVTVRDRDSMQQVRIKIDELLSYFEGKFDF

SEQ ID NO: 34006 - protein, 314 aa, Oryza sativa
MATLTVPAAVPPVAEDCEQLRKAFKGWGTNEKLIISILAHRDAAQRRAIRRAYAEAYGEELLRALNDEIHGKFERAVIQWTLDPAERDAVLANEEARKWHPGGRALVEIACTRTPSQLFAAKQAYHERFKRSLEEDVAAHITGDYRKLLVPLVTVYRYDGPEVNTSLAHSEAKILHEKIHDKAYSDDEIIRILTTRSKAQLLATFNSYNDQFGHPITKDLKADPKDEFLGTLRAIIRCFTCPDRYFEKVIRLALGGMGTDENSLTRIITTRAEVDLKLIKEAYQKRNSVPLERAVAKDTTRDYEDILLALLGAE

SEQ ID NO: 34007 - protein, 486 aa, Arabidopsis thaliana
MLTMDKEFDSKLTLQGNSSSNGETISRSKSFAFKAPQENFTYHDFELGKIYGVGSYSKVVRAKKKDNGTVYALKIMDKKFITKENKTAYVKLERIVLDQLEHPGIVKLFFTFQDTQSLYMALESCEGGELFDQITRKGRLSEDEARFYSAEVVDALEYIHNMGLIHRDIKPENLLLTLDGHIKIADFGSVKPMQDSQITVLPNAASDDKACTFVGTAAYVPPEVLNSSPATFGNDLWALGCTLYQMLSGTSPFKDASEWLIFQRIIARDIKFPNHFSEAARDLIDRLLDTDPSRRPGAGSEGYDSLKRHPFFKGVDWKNLRSQTPPKLAPDPACPRTRGERDGSPWNPTHVGDTSVLQNDGHNGLSESSGSITRLASIDSFDSRWQQFLEPGESVLMISAVKKLQKITSKKVQLILTNKPRLIYVDPSKLVVKGNIIWSDNSNDLNVQVSSPSHFKICTPKKVLSFEDAKQRALQWKKAIETLQNR

SEQ ID NO: 34008 - protein, 549 aa, Neurospora crassa
MGVVGRAIVEVSSKLTGVVANLVQEETNGRGVIAPDGYQRDVLLVNGAFPGPLIEANWGDMIVVNVFNNISSPEEGTAMHWHGFLQDDTPWDDGAPGVSQCPIVPGKSYTYEFNASLYGTSWYHAHYSAQYAGGIVGPIVVHGPTQAKYDIDLGPVMLSDWYHRPYFDLIKDMLAPGGSPSVPSDNNLINGKMNFDCDTAAAAGDQTPCTPNAGISKFKFQTGKTHRLRLINSGADGVQRFSIDGHTMTVIANDFVPVKPYNVTAISLAVGQRADVLVTANAAGSDPKSAFWMRSDLAKCSAAKQPFALAAVYYDQADPETAPSSQPWADAGDPDSTCGASDDLGKREPLYPIPVRGEPAVTKEMKIEAYRNASDVFLFLFDGVSARVDYNHPALDMVMKGNMSFPEVSNVKDFGSAKTVRVVVINKGPGPHPMHLHGYNFYVLSSGPGDWDGKTIVRSSNPVRRDTEVVRPHGHLVLQFDANNPGIWAFHCHIGWHASGGFVASFLTQPDEVRRRWGGDRMPGKMEQVCREWDAWSQNTVVDQIDSGT

SEQ ID NO: 34009 - protein, 153 aa, Sinorhizobium meliloti
MPERMPSYIFAAIERSAAMSENRMPKITKTNEEWRAALTPEQYRVTREHGTERPFTGPFLDNKRHGTYKCVCCGRALFRSDTKFDSGCGWPSYFAPVDPDAIAEYVDRSHLMVRTEIRCADCDAHLGHVFPDGPPPTGLRYCLNGTAMTFEED

SEQ ID NO: 34010 - protein, 651 aa, Aeropyrum pernix K1
MEARSVERRREKPWEGEVYESTFPWLLEWRARTQPGRVAFRWKRYGIWRRYTWRDYYLRVAYAALALENLGLGPGDTGAFITFNRPSWVIYEVGVQLLGGRAMGIYRDSLSDEVGYLLDSGDAKFVLVEGQEQLDRVLDSGVDVDKIIVDEAKGLHQYRGMVGSKLVTFGDVMRLGRKLYSDGGDQQVKKLMGELEPDMVCGLFTTSGTTGLPKLAMISFKNMLAMAHQLNTVDPVREDWEYVSFLPTAWIGEQMMSIPYHMIGGFKVNFPETPHTLWRDFREIAPHFMFSPPRVWERIAKDIMARVDDADPIKRAAFRLAYKIGYEAARRRLVKGRSRPPTLWRALYYLAYWLALRAVLDKAGLKRIVRAYTGGAMIGEDYVIFYHSLGVNLKQIYGQTEVAGIAVVHPDDDVRPDTVGKPLPLTEVKIAEDGEILMRSPAMMKGYYKNEEATAKTIVDGWLRTGDVGVLTEDGHLKVLDRAKEIIILSDGTKVAPQVIQNKLKFSPYIGEAAIVGSGKPYLAALVNIDFEIVSRWAERRRIPFTSYSDLSQKPEVLQLLKREIEKVNRRLPEKERIRRFVSLFKEFHPDDEEMTRTRKLRRMVIESRYAGLIEAIYSGDEEYELTVTMKLEDGRRVQVTRRVKIIDVEG

SEQ ID NO: 34011 - protein, 351 aa, Oryza sativa
MGAGWEEYKPCAAMVAAQCIYAALALWAKAVFTGGMSTMVFVVYRQAIATVFLVPIAIIANRATVNQYVYYQGLHLGSSSMATAMSNLIPAITFVMAASVGLEKVDLRRVRSLAKIFGTTVCVGGAMAMAFFKGPRLLNSSSLIVDLNFLLHSSASSKWVMGALFLICSSCCWSLWLILQVPICKSYMDPLTLSAWMCFLSTLQSAVLVSFLVPDINAWKIHSLFELGCCLFAGVFGSGVTFYLQSWCISVRGPLYSAMFNPLCTVIATVVAAAFLHEELHIGSLMGAAAVITGLYVVLWGKADDMKRGSEPATAAAAAKPCTDSCRDAIWLVVRCQMRPKPGEIVKEKFS

SEQ ID NO: 34012 - protein, 250 aa, Leuconostoc mesenteroides subsp. mesenteroides ATCC 8293
MRKYIAEFLGTFMLVFFGTGSVVYSAATTQSAITVGLAFGLSLAVAIYAFGHISGGHFNPAVSLAMAIQKRLPWVTFIGYVIAQLLGAIVASAAVYGGVTAYLKSSTVTTALSGQSMTVKQFVSLAGLGQTNFSDGSGWYAFAFELVLTFLFVLVIAIVTKLNNVPAPFIIGIWLAVLIVVVLPITGGAFNPARALAPAIFVQGKALTHVWVYLVADLLGGALAAFAANFLDKKEEVASTPKEVKETKKA

SEQ ID NO: 34013 - protein, 250 aa, Zea mays
LAMAPPRRPSMGRQKIEIRRIESDEARQVCFSKRRAGLFKKASELSILCGADVAAVVFSPAGKAFSFGHPSVESVVERFLASSSPSPAGAGAGHSASGGEDRAVSELNRQHGELRAQLDAVKARQERADEAIRKEREAGSPAMAWIDAELSGGAMGHDDLVAFWAALAGVQAAVAASADRLLRDALLVGRRGRQQQQPAQLAGGGGVAFDVGAFGGVGVQVQPPPGFAGVVDLQGFGGQAAAILGAGGPS

SEQ ID NO: 34014 - protein, 478 aa, Mesoplasma florum L1
MNKKELQARVKRTKIITTTGPSTNEPEQIRELFENGMTTIRLNFSHGDYEEQGYRIAGAKKVREELGKPVSILLDTKGPEIRVGKFVDGKQEVTANQSITIYTDAESFKNKECLSGEMTVAYDMSVDLKIGDTILIDDGKLEMTVEEVKPGVVKAIAFNNHLVKTNKRVNLPGVDFSMPFLAQKDINDIKYGVEQGVDYIAASFVNSAENVKEIRDILAEANGSDIQIISKIESQVGIDNIDAIIEASDGIMIARGDLGLEIPYYDVPYWEKIMIRKCREAGKVVIVATQMLETMTENPAPTRAEVTDVYFATELGADATMLSGESAAGDYPFITVNTMATINKRAEIEFYKKAYYQTQLENAKNSTSGPRADIAMDLAERTRDGQYEFAVVLSRTGALLKTISKFRPNVTILGVSESERLWTAFGVWHSIFMNKTANLLELEENVAQISEIAKLWGAKSGSKILVVRNKDIREITVA

SEQ ID NO: 34015 - protein, 318 aa, Ralstonia eutropha JMP134
MNKRAPVPMVVVGGYLGAGKTTMLNRLLANGEGRRITLLVNDFGEINIDAVLVRSRSDDVIQLENGCICCSIGGRLAAALVEIGQREKRPDLLVIEASGVSDPQRIAQVGLLDAALRLNGVVVAVDAESVFERLADPLVGDMVRRQITGASAVVLTKADLAGPTGLERARALMAEIAPQATVLVAHHGDVPWEVFADVAEPRPVSPGLLDGREGWHSVSGAAQHAGIRTLAYRTGRVFDKSRLCQALKNLPVRLLRAKGVVRLAGDVCLHEVHLVGGRLRIGRLACTDRMSESALVFIGAFGDAAEAAVRATMDQAVV

SEQ ID NO: 34016 - protein, 496 aa, Zea mays
ITMDPTKFRPSSSHDTTVTTTNAGAPVWNDNEALTVGPRGPILLEDYHLIEKVAHFARERIPERVVHARGASAKGFFECTHDVTSLTCADFLRAPGVRTPVIVRFSTVIHERGSPETIRDPRGFAVKFYTREGNWDLLGNNFPVFFIRDGIKFPDVIHAFKPNPRSHVQEYWRVFDFLSHLPESLHTFFFLFDDVGVPSDYRHMEGFGVNTYTFVSAAGKAQYVKFHWKPTCGVRCILTDEEAALVGGRNHSHATQDLYDSIAAGSFPEWTLYVQVMDPDTEEQYDFDPLDDTKTWPEDLLPLRPVGRLVLDRNVDNFFNENEQLAFGPGLVVPGIYYSDDKMLQCRVFAYADTQRYRLGPNYLMLPVNAPRCAHHNNHYDGAMNFMHRDEEVDYYPSRHAPLRQAAPPTPLPPRPVAGRREKATIRKPNDFKQPGERYRSWDADRQDRFVRRFADSLGHPKVSQELRSIWIDLLAKCDASLGMKIATRLNMKPNM

SEQ ID NO: 34017 - protein, 506 aa, Brassica napus
MTSINVKLLYHYVITNLFNLCFFPLTAIVAGKAYRLTIDDLHHLYYSYLQHNLITIAPLFAFTVFGSVLYIATRPKPVYLVEYSCYLPPTHCRSSISKVMDIFYQVRKADPSRNGTCNDSSWLDFLRKIQERSGLGDETHGPEGLLQVPPRKTFAAAREETEQVIIGALENLFKNTNVNPKDIGILVVNSSMFNPTPSLSAMVVNTFKLRSNVRSFNLGGMGCSAGVIAIDLAKDLLHVHKNTYALVVSTENITYNIYAGDNRSMMVSNCLFRVGGAAILLSNKPRDRRRSKYELVHTVRTHTGADDKSFRCVQQGDDENGKTGVSLSKDITDVAGRTVKKNIATLGPLILPLSEKLLFFVTFMGKKLFKDKIKHYYVPDFKLAIDHFCIHAGGKAVIDVLEKNLGLAPIDVEASRSTLHRFGNTSSSSIWYELAYIEAKGRMKKGNKVWQIALGSGFKCNSAVWVALNNVKASTNSPWEHCIERYPVKIDSDSGKSETRAQNGRS

SEQ ID NO: 34018 - protein, 506 aa, Brassica oleracea
MTSINVKLLYHYVITNLFNLCFFPLTAIVAGKAYRLTIDDLHHLYYSYLQHNLITIAPLFAFTVFGSVLYIATRPKPVYLVEYSCYLPPTHCRSSISKVMDIFYQVRKADPSRNGTCDDSSWLDFLRKIQERSGLGDETHGPEGLLQVPPRKTFAAAREETEQVIIGALENLFKNTNVNPKDIGILVVNSSMFNPTPSLSAMVVNTFKLRSNVRSFNLGGMGCSAGVIAIDLAKDLLHVHKNTYALVVSTENITYNIYAGDNRSMMVSNCLFRVGGAAILLSNKPRDRRRSKYELVHTVRTHTGADDKSFRCVQQGDDENGKTGVSLSKDITDVAGRTVKKNIATLGPLILPLSEKLLFFVTFMGKKLFKDKIKHYYVPDFKLAIDHFCIHAGGKAVIDVLEKNLGLAPIDVEASRSTLHRFGNTSSSSIWYELAYIEAKGRMKKGNKVWQIALGSGFKCNSAVWVALNNVKASTNSPWEHCIDRYPVKIDSDSGKSETRAQNGRS

SEQ ID NO: 34019 - protein, 548 aa, Idiomarina loihiensis L2TR
MAAKEVKFGNTARQKMLKGVNILADSVKVTLGPKGRNVVLDKSYGSPVITKDGVSVAKEIELEDKFENMGAQMVKEVASKANDEAGDGTTTATVLAQAIVNEGLKSVAAGMNPMDLKRGIDKAVIAAVEELKKISQPCADSKAIAQVATISANADHTIGEIIAQAMDKVGQEGVITVEEGQALTDELDVVEGMQFDRGYLSPYFINNQESGSVELDNPFILLIDKKISNIRELLPVLEGVSKAGKPLLIIAEDVEGEALATLVVNNMRGIVKVAAVKAPGFGDRRKAMLQDIAVLTGGTVVSEEIGMELEKTQLEDLGTAKRVVITKDNTTVVDGNGDDTAIDGRVNQIKQQMEDTTSDYDREKLQERLAKLAGGVAVIKVGAATEMEMKEKKARVEDALHATRAAVEEGVVPGGGVALVRAASKLAELRGDNEEQNVGIRLALRAMEAPLRQIAMNAGAEGSVVANNVRAGEGNYGYNAGNDTYGDMLEMGILDPTKVTRSALQFAASVGALMITTEAMIADIPQDDNAGGMPGGDMGGMGGMGGMM

SEQ ID NO: 34020 - protein, 397 aa, Frankia sp. CcI3
MENAVIVDGVRTASGRGKPGGALSETHPVELLATVLKALIARNDLDPALVDDVIAGCVDQAGEQAVNIGRTAVLSAGFPESVPATTIDRQCGSSQQAAHFAAQGVLAGAYDIVIAAGVESMSRVPMGSTTFGKDPNGPSLHARYPEGLAHQGIGAELVSARWKINREDLDIFSARSHQLAAASVAAGDFAGEIVPVEITLPDGTTAQHTVDETVRATTTVETLAKLKPSFYTEAYAARFPEITWNITPGNSSPLTDGASAVLIMSETRANKLGLRPRARFHTFALAGDDPLLMLTAPIPATRKALKRAGLSIDDIDAFEVNEAFAPVPLMWARDTGADPAKLNPRGGAIALGHPLGGSGTRLLTTMLNYLEATGGRYGLQTMCEGGGMANATIIERL

SEQ ID NO: 34021 - protein, 3475 aa, Nodularia spumigena
MAQNIDNKKLIAATLSKMEAMQARITELETRQSAPIAVIGMGCRFPGGISSPEIYWNYCQAGGDAIVEVPANRWDISKYYAPEPTPGKMNSRYGGFLQEDITEFDARFFSISAREATSMDPQQRLLLEVTWEALENANIPPTNLAGDRVGVFVGITSVDHAMTVYKSNYEQIDSFFGTGNSLSAAAGRLSYFLNLRGPAMSIDAACASSLVAIHQAIRSLRNHECELALVAGVNLILNPAITINLSQSGMMSPDGRCKTFDAAANGYVRGEGCGVLVLQRLSAAQKKGDRILAVLRGSAVNHNGAAAGLTVPSGPAQQDLLRQALTDARVSPQQVGYIEAHGTGTSLGDPIEMNAIAAVYGKRSQPLYVGSVKTNIGHLEAAAGIAGMIKTILSLQHGEIPPHLHFQKPNPLINWQGYPIKIPSQIIPWSNHGEIRIAGVSSFGFSGTNAHVIVEQAPAAKTTEIKLQRPSHLLTISAHNETALKELAQRFHTRLESDPEIGDICHSAAIGRSPLPERLAIVADTLPELQQKLSAFANEKTIDHLTFSQRFSGEKQPKIAFLFTGQGACYAGMGEQLYQTQPTFRKYIDQCADILANHLEYSLQNILFGNQTDLLNQTAYAQPAIFALEYSLTMLWKSWGIEPNLLIGHSVGEYVAACVAGVFSLEAGLQLVVKRGQLMQTAPTGKMAVVFADQATVLSLLENYTDTVSIAAINHPQQIVISGESHSIDQIIANCKTQNIPVQFLSLSGAYHSPLMEAILDEFETAAQSIDYDEPKTLLLSGIDGQPLETAPNASYWRKQCRQTVQFLQSIITALNKGYNLFLEIGYRPILAEQGRRYHDEAIWLSSLNRGLDSWQTMLATLAQLYIHGVSFNAEKFNQDYGYRNVQLPTYPFQRKRFQFQPPSQINEEHIEREQTKMTVAKVSHTQKHQQEIGKQLKSILAVLLKEDENEIRDDETLLNLGADSIILTDFTRKIEEKFSVKVRIDQLFTDLQRIVDIANYLSNYIAQEALETSEPISVGNIILSQNSELNNYLWVISQLQPIVVAYILKALGALGQSLNQAETWTTENLLQTLPIAPKYYLLITRYLKTLEQAGIIQNQGNVWTVKNLPTPFSLPETIENLQTHCPAAKPELEMLQRCGENLAEVIKGNIDPLELIFPAGSLIHAESIYGNSPVSRLMNQRVAQEINRILENFSSGDRPYQIIEVGGGTGATSEAILNNLNLTNVTYSFTELSPVLLNKARQKFQHRDHLNFHQLNIEKSPISQGIPAHSYHIVVAANVLHSTRNITETLNHIRELLLPGGFLVLLETVENNSWLDLTFGLTPGWWRFQDKELRLDTPLLSGETWCSVLKRCGFTTTDIFSQQNNVSIYNGQELIIASAPAESAIVSQPKTVAVSIPTSGKEALMMAQLQSLKDLKDIHEKTIIKQLEILQSASVAPSPTSEVLIRQTEPAPPQKATIEIAPLPQKIKTDSPKKPSSPSLNPLALKLAENKSLTEKQQAFISNLQIIYNQKTAKSKAYSQNSRKTMVDVKPTIDFRMALKEFQYPIVSESAQGAYFRDIDGNDYIDLAMGFGVNFFGHSPDFVIAAVQQQMQHGIGLGMQSNIAAETAALVSEITGVERVAFSNTGTEAIMAAVRIARSRTKRLKIVLFSGSYHGTFDGILARVGEEPGTAQPLSLGTPSGMVEDVIVLTYGAEESLEIIAAQADNLAAVLVEPVQSRKPDLQPQEFLQKLRKLTHEKEIALIFDEIITGFRMALGGAQEWFDVEADIVVYGKAIGGGLPISMICGKADFLDTIDGGFWSYGDNSHPHTELTGYGGTFCRHPLALAACRAVLLHLRAQGGTLQKRVNQLTNRLATEVNEFFQETGIPIRIVNFGSLFRFEPFGAYSLFLQPIELPLFYYLLNLKGIYTWEKRVCFLSTDHTNQDIDKVVIAVKEAIRELRQAGFFENAKPPQAKKREESDRSDDEDGRSSINQRFPTSEAQRQLWLLAELDTTASASYNVTTSLELRGNIEILYLQQAINEVVNRHEALRTQILEQGELQEVFNTVKIDLPLINLIDAENPEAAALTLRTQLSQKPFDLGSAPLFAAVLMRLAPEHYLLSLKTHHIVADGWSLGLILNEIGKLYSAKIGVSTDNLAPPMQFRQYLALRQQEAQSSQMQEHRDFWLKTYEGEIPVFELPTDFPRPAVKTYTGGRESKIIAPQLWRNLQTVGRQNQATLFMTMFAAYTAFLRRISGDDDLVIGIPISGRQFEGSEGLVGFCSQFLPVRIQTNITASFVDHLRHTKETLIAAFKHQSHALEELLAALQLQRDFSRSPLISVSFNMDPSLTLPEFEGLEVLLPPEPIGYTPFDLGFNFIEINDALIIYCNYNTELFKPETIKQFLESFEFLMEGVINNGNRLLSQLPLLTQSQEAKLLAELQGQTIDFPQTATIIDDFIAKVNSTPNAPALIVGDNTLSYGELNQKVNQLTNYLHQKYQLSSGKAIALIIGRNQNLIIAILATFKTGATYVPIDPEYPQSRIDFILKDSGCDVCLTESNFVSQLPQDIEAICLDKIDHTLAKFDTSEPHIKRDSSQIAYILYTSGSTGTPKGVMGCHISILNVIRSLRLTFDLDQHPDWHYIFTAPITHDPSLRNIFLPLTIGAALYMYEVKHIGHLVSFLQENQINALHTTPSIYREILAVLDTGETIPSLKYISAGGEKLDRETAIALRKRFPADIVSNVYGSTETCVGVAQYRIDENLNTDVPLGEVFHNNRLFVLDEFNNTVPLHVVGEICVEGVALASGYHNLPQITAEKFQPSFMTEGKTIFRTGDLGKQIAPGVIEFLGRKDNQVKVNGYRIDPGEIEYQLSRHSQIERAIVLPTNVDNQTQLSAYCKTESDIEISEIREFLSNFLPVYMIPTFFIFLKQFPLTRHGKIDLRSLAEFKGIGNLTQLAYTAPRNNLESKLVHIWEKILTKQPIGIFDNFFEIGGHSLLLSRVVTHVHKELNVLVKLAEFFKVPTIAGLAALVSKTQYDYQEPIPAITQQTSYPMSHGQRRLWALEFLDRNHTAYGMPSAYLFKGNLNIAAFENAFQHLLQRHEILRTTFTLIDNEPRQVVHESMNFQVKQIDLTEDEEQAEIIAEAIHNNAKNTFNLETGSLLKVNLLKVTQQSYIVLFNMHHIISDGWSAGVLIKDFLVLYHAYGQQNLELPPPLRIHYKDYSSWQEKRLNTSELQAQRDYWLNKLTPAPTRLNLPLDYARPGVQSFQGSAVIWQPDPELIKGFRVLLQNQESSLFMGLLTLVKSFLFCYTEQNEITVGSPIAGRNHPDLEEQIGFYVNMLVLRDQIAVDDSFATLLAKVKTTTLEAYDNQEYPFDKLVSDLNFPRDPSRNPLFDTAIVLQNNQNVELLLDGITVHPLDQEIVSAKFDLEFTFVEESQLYLKLIYNTDIFVHERISLMLKLLEGLLEEIVKLPEIPFLKLSFNTENSDEGDSKLFATNFNF

SEQ ID NO: 34022 - protein, 359 aa, ASPERGILLUS NIDULANS FGSC A4
MNPIHALLRRAEDGSLPTCETGNEYDGRMGVRISSIFVILVGSAFGALFPVFARSFQNSKVPSWAFFIAKYFGSGVIIATAFIHLLGPAEEALRNECLSGPITDYSWAEGIILMTIVVLFFVEMMVIRFSRFGEGHSHDNDSHSDHSHAHGHAGELKGTELSSNDVNHHMPGEDHLGHSREHRDLELAEKGVDLNEYMAQLTSVFILEFGIIFHSIFIGLTLAVSGPEFTTLYIVLVFHQTFEGLGLGSRLATIPWPRSKRWTPYFLGMGYAISTPIAIAIGLGVRQSYPPEGYTTLLVNGVFDSISAGILIYTALVELMAHEFMFSTSMRRAPLKNVLAAFGLLCLGALLMALLGKWA

SEQ ID NO: 34023 - protein, 96 aa, Idiomarina loihiensis L2TR
MKLRPLHDRVIIKRTEVEAKSAGGIVLTGSAAEKSTRGEIVAVGKGRILDNGEVRALDVKAGDKVLFNEGYGVKTEKIDGEEYLIMSESDILAVEE

SEQ ID NO: 34024 - protein, 506 aa, Brassica rapa
MTSINVKLLYHYVITNLFNLCFFPLTAIVAGKAYRLTIDDLHHLYYSYLQHNLITIAPLFAFTVFGSVLYIATRPKPVYLVEYSCYLPPTHCRSSISKVMDIFYQVRKADPSRNGTCDDSSWLDFLRKIQERSGLGDETHGPEGLLQVPPRKTFAAAREETEQVIIGALENLFKNTNVSPKDIGILVVNSSMFNPTPSLSAMVVNTFKLRSNVRSFNLGGMGCSAGVIAIDLAKDLLHVHKNTYALVVSTENITYNIYAGDNRSMMVSNCLFRVGGAAILLSNKPGDRRRSKYELVHTVRTHTGADDKSFRCVQQGDDENGKTGVSLSKDITDVAGRTVKKNIATLGPLILPLSEKLLFFVTFMGKKLFKDKIKHYYVPDFKLAIDHFCIHAGGRAVIDVLEKNLALAPIDVEASRSTLHRFGNTSSSSIWYELAYIEAKGRMKKGNKVWQIALGSGFKCNSAVWVALNNVKASTNSPWEHCIDRYPVKIDSDSGKSETRVQNGRS

SEQ ID NO: 34025 - protein, 219 aa, Prochlorococcus marinus subsp. marinus str. CCMP1375
MGTFFQKIADYSKDAVSAGKYLLQGLAVTFDHMRRRPITVQYPYEKLIPSERYRGRIHYEFDKCIACEVCVRVCPINLPVVDWVMNKETKKKELRNYSIDFGVCIFCGNCVEYCPTNCLSMTEEYELAAFDRHSLNFDNVALGRLPTSVTSDPSVMPLRELGYLPEGVMDPHELPKDSSRAGKLPIEIMDWMKNKESNKSEDNNLDININSLKVEKDSK

SEQ ID NO: 34026 - protein, 506 aa, Brassica napus
MTSINVKLLYHYVITNLFNLCFFPLTAIVAGKAYRLTIDDLHHLYYSYLQHNLITIAPLFAFTVFGSVLYIATRPKPVYLVEYSCYLPPTHCRSSISKVMDIFYQVRKADPSRNGTCDDSSWLDFLRKIQERSGLGDETHGPEGLLQVPPRKTFAAAREETEQVIIGALENLFKNTNVNPKDIGILVVNSSMFNPTPSLSAMVVNTFKLRSNVRSFNLGGMGCSAGVIAIDLAKDLLHVHKNTYALVVSTENITYNIYAGDNRSMMVSNCLFRVGGAAILLFNKPGDRRRSKYELVHTVRTHAGADDKSFRCVQQGDDENGKIGVSLSKDITDVAGRTVKKNIATLGPLILPLSEKLLFFVTFMGKKLFKDKIKHYYVPDFKLAIDHFCIHAGGRAVIDVLEKNLALAPIDVEASRSTLHRFGNTSSSSIWYELAYIEAKGRMKKGNKVWQIALGSGFKCNSAVWVALNNVKASTNSPWEHCIDRYPVKIDSDSGKSETRAQNGRS

SEQ ID NO: 34027 - protein, 416 aa, Vibrio sp. Ex25
MSKRRVVVTGMGMLSPVGNTVESSWKALLEGQSGIVNIEHFDATNFSTRFAGLVKDFDCTEYMSKKDARKMDLFIQYGIAAGIQALDNSGLQITEENAARVGVAIGSGIGGLDLIETGHTALVEKGPRKVSPFFVPSTIVNMVAGNLSIMRGLRGPNIAISTACTTGLHNIGHAARMIAYGDADAMVAGGAEKASTPLGMAGFGAAKALSTRNDEPQKASRPWDKGRDGFVLGDGAGMMVLEEYEHAKARGAKIYAELVGFGMSGDAYHMTSPSEDGSGGALAMEAAMRDANITGTQVGYVNAHGTSTPAGDVAEIKGVKRALGEEGAKQVLVSSTKSMTGHLLGAAGSVEAIITVMSLVDQIVPPTINLDDPEEGLDIDLVPHTARKVEGMEYAICNSFGFGGTNGSLIFKKFAE

SEQ ID NO: 34028 - protein, 392 aa, Prochlorococcus marinus subsp. marinus str. CCMP1375
MEQKAIDNQNDPCNMVLKPGLEGVPVTQSAICDINGLKGELKYRGYSIAELAAKSSFLETTYLLIWGDLPSSKQLREFEDAIQMHRRLSFRVRDMMKCFPATGHPMDALQSSAASLGLFYSRRAIDNPQYIYDAVVRLIAKIPTMVAAFQLIRKGQDPIQPRDDLPYSANFLYMLTEREPDPLAARVFDRCLILHAEHSLNASTFSARVTASTLTDPYAVVASAVGTLAGPLHGGANEDVIAMLEEIGAPENARNYLKQAIDQKSKIMGFGHREYKVKDPRATLLQGFAEDLFARFGKDEMYDVARSVEEEASPLLGPRGIYPNVDFYSGLVYRKLGIPRDLFTPIFAISRVAGWLAHWREQLSANRIFRPTQIYTGKKTRAWCALEERNKN

SEQ ID NO: 34029 - protein, 395 aa, Yersinia pestis biovar Medievalis str. 91001
MNAMSLLSVEVSNFTFVGLFKNDNVNIVSIHRVLLLLEELMSQLPEKMSAVVCHGPQDYRLEHVPTPVPKAKELVIKVKGCGICAGDCKCKNGAKMFWGETPWVKPPVVPGHEFYGHIVALGEGTESKYKLGERVIAEQIVPCWDCRYCNSGSYWMCETHNIYGFQKDVAEGGMAEYMRFSENAIVHKIPESLSHEDAVLIEPMACAIHTVARGDIQLDDVVVLAGAGPLGLCMVQVARLKTPKKLIVIDTIEERLALAKAFGADVVINPLKEDADKIVKSLTGGYGCDVYIEATGAPIGVTQGLQMIRKLGRFVEFSVFGQETTVDWSIIGDRKELDIRGAHLAPYSYEIATDLFERGLVTSKGIVTHSYSLDDWEKAFELADSTNSIKVILVP

SEQ ID NO: 34030 - protein, 353 aa, Haemophilus influenzae 86-028NP
MKLSKTFLFITALCSATPTLAIQNSTSSSGEQKMAMENTQNIREIYLAGGCFWGMEAYMERIHGVKDAISGYANGNTGKTSYHMIGLTDHAETVKVTYDANQISLDKLLKYYFKVIDPTSVNKQGNDRGRQYRTGIYYQDGADKAVIEQALAQLQTKYKKPVQVEVQPIKNYIVAEEYHQDYLKKNPNGYCHIDITKADEPVIDEKDYPKPSDAELKAKLTPLQYSVTQNKHTERSFSNEYWDNFQPGIYVDVTTGEPVFSSNDKFESGCGWPSFTKPIIKDVVHYETDNSFNMQRTEVLSRAGNAHLGHVFDDGPKDKGGLRYCINSASIKFIPLAEMEKAGYGYLIQSIKK

SEQ ID NO: 34031 - protein, 382 aa, Thermoplasma acidophilum DSM 1728
MQKKLMHVGPSFTSYRIQMAGVSENTGFASPDFLDAMKYSLEGLLYVAGADDSYMPFILPGSGTVAMETVTSLIPRGSKTLLLTNGVFGDRWIPILTAHGLQMDVLSADPGHAVSMADIEEKLEGGDYQNLIMTHVETSTGVRMDIEGVSKIARKHVERIIVDGVASLGAEREDIARLGITAIISASQKALGAPPGAALIVASRSALEDINEFSYFFNLKNWITPMERYLEGKNGYLSTEPVGVILSLNRVFSDIRTTGLEARIDDHRRLSLALNEGIEAAGLKVLAERDLWSNTVTAVLSDHADEIVRRSMDLGIEFATGVHPKLLGKYFRIGHMGYVNDFDALSALSVIERAAAQSGEKVRIGEGVRRAQQVLYDLSHGR

SEQ ID NO: 34032 - protein, 221 aa, Zea mays
MAPKNALPAASGMTLEPRYRGVRKRPWGRYAAEIRDPARKARVWLGTFDTAEAAARAYDAAALHFRGPKAKTNFPVAFATATATDTRALPLPLRLPLPPPPPKKLSVSPSGSTVESSSRDSPAAPAPAPSLDLSLGMPAMVAAQPFLFLDPRLAVTVAVAAPVPRRPTAAAAGAGASKQAAYSCCREDEQSDTGSSSSVVDASPAVGVGFDLNMPPPGEVA

SEQ ID NO: 34033 - protein, 286 aa, Glycine max
MSQQQRSMPAPFLTKSYLLVDDPATDDVVSWSEGGNTFVVWKHADFANDLLPKYFKHNNFSSFVRQLNTYGFRKTVPDKWEFANEYFKRGQKDLLAEIKRRKTVSSVSGKSGSGGNISASHSGGDDMGSTSTGSMEAATATVTTTQCADLSGENEKLKKDNEKLSDELARTKKHCDDLVAFLRDSLNVGPDVIDCIIRQGTCGSSNDDAVRFDATENLNNHNHDDDENAVGECEPEQPKGDNGESLKLFGVWLKGQNGKENSIGSCRKRGRQDPIAATAKELKTLV

SEQ ID NO: 34034 - protein, 69 aa, Brassica napus
MAIPKEEESREEHSTSFLLDALYCEEEKWDDEEVVEENSSYSSSSSTTSPFVLLEQDLFWEDEDLVALF

SEQ ID NO: 34035 - protein, 325 aa, Pseudomonas aeruginosa PAO1
MAKRIQFAAYGGPEVLEYRDYQPAEPGPREVRVRNRAIGLNFIDTYYRSGLYPAPGLPSGLGSEGAGEVEAVGSEVTRFKVGDRVAYATGPLGAYSELHVLAEEKLVHLPDGIDFEQAAAVMLKGLTTQYLLRQTYELRGGETILFHAAAGGVGLFACQWAKALGVQLIGTVSSPEKARLARQHGAWETIDYSHENVARRVLELTDGKKCPVVYDSVGKDTWETSLDCVAPRGLLVSFGNASGPVTGVNLGILSQKGSLYVTRPTLGSYADTPEKLQAMADELFGLIERGDIRIEINQRFALAEAARAHTELAARRTTGSTVLLP

SEQ ID NO: 34036 - protein, 290 aa, Glycine max
HFVGLVLENCNLPYANHGHVILGDPSPILFYPISSTEIRCLVDVPGHKLPSLGNGDMARYLKTVVAPQVPPELRDSFIAAVEKGNIRSMPNRSMPASPYPTPGALLMGDAFNMRHPLTGGGMTVALSDIVLLRNLLRPLHDLHDANALCKYLESFYTLRKPVASTINTLAGALYKVFCASPDPASKEMRQACFDYLSLGGVFSDGPIALLSGLNPRPLSLVLHFFAVAIYGVGRLLIPFPSPKRMWIGARLISGASAIIFPIIKAEGIRQMFFPVTVPAYYRTPPTNLED

SEQ ID NO: 34037 - protein, 574 aa, Arabidopsis thaliana
MGTSSGSNHPHQMLPPRQQQRSGGGLETALSLVSSDQEPRRESPAESASSQETWPLGDTVAGKKSMSQKTEPDSMEQTVNVMHHVSNADKVSVRDIARERVELVAERMHRLPDEFLDELKNGLKSILEGNVAQSVDEFMFLQKVVQSRTDLSSVTLVRAHRVQLEILVAINTGIQAFLHPNISLSQPSLIEIFVYKRCRNIACQNQLPADDCYCDICTNRKGFCNLCMCTICNKFDFSVNTCRWIGCDLCSHWTHTDCAIRDGQITTGSSAKNNTSGPGEIVFKCRACNRTSELLGWVKDVFQHCAPNWDRESLMKELDFVSRIFRGSEDQRGRKLFWKCEELIDKIKGGLAEATAAKLILMFFQEIESDSAKSFENGEGGRLMAPQDACNRIAEVVQETLRKMEIVAEEKMRMFKKARMALETCDRELEDKAKEVSELKAERQKKKLQIDELERIVRLKQAEADMFQLKANEAKREADRLQRIVLAKMDKSEEEYASNYLKQRLSEAEAEKQYLFEKIKLQENSRVASQSSGGGGDPSQVMMYSKIRDLLQGYNLSPKVDPQLNERNPFRSNP

SEQ ID NO: 34038 - protein, 266 aa, Zea mays
GTSRPAERPTAQPLCVRALSHTVCDDCVGGWVGYRRRPSPGADLFTGEERLLATPTPLTLLSRLPCENVPPRRTMGKPSRGRQRIEIRRIEEGGRLQVTFSKRKSGLQKKAAELSMLCGSPVAVVIFSPGRKVFALGTPSVDHVLRRHAPPIPGEGEEDGLLPVLQDGNVVMSSSAIADRAEVENIVRRTEETKARSVAEKARMDAVGKAVWQAAAKAGRRFWCEADSGELGDAELAGFAKALHRFRVNLQRHLDSLSASANKQLQ

SEQ ID NO: 34039 - protein, 198 aa, Sinorhizobium meliloti 1021
MARDMRVRWALEEVGQPYGVRLLSFKAMKEPAHLALHPFGQIPTYQEGDLALFESGAIVFHIAERHAGLLPDDANARARAITWMFAALNTVEPPIVDREVAEYLEDETWYEQRLPFIDERIRKRLGELSGRLGNADWLDGAFSAGDLLMVTVLRRLEGSGILEEYPNLSAYVARGKARPAYKRAFVAQLAVFTAAPTA

SEQ ID NO: 34040 - protein, 869 aa, Oryza sativa
RVADSCGLLCGRRSRPFRAMASRRQWGAGAGAVDVPAQERKGEAAKIARRPKTTTVVAQQPPRIRRALADVSNLVNGRAALPVVNRQKAAAAAADKCRKPIKQRNENNKAAKPEVIVISSDSEKHKKNPAQRAASRRAPIQTLTSILTKCSRASDGVISPKKELIYDIDASDSHNELAVVDYVEDIYRFYRNTENTYRPLCTYTVSQTEINERMRAILTDWLIEVHYRLMLMAETLYLTVYIIDQYLSLENVPRKELQLVGVSAMLIACKYEETWAPLVKDFLVISDNSFSRQQVLSTEKSILNKLQWNLTVPTMYMFILRYLKAALGDEEQEHMTFFYAELALVQYSMLFFAPSVIAAAAVYAARCTLGLSPLWSDLLEYHTGLAEPQLLGCARRLVSLHAAAPESRQKVVYKKYASPKLGAVSLHSPAKKLLPPPSPVCVLQFLVCCCCYGHIQFVFFSSWFVVVMACTMSSMACHSLPESGSNLSAADELFQNQRSEQGIYWTLWDSRLSDDLNTTTVYSDNHGSNGGGTQSFDTSEHCSTVPSDSDEQPGYPSQFEPLHMEQTNDMFLSQFSDEEVRRMDAPFQALDMFPDSMHRLMSYEHILNGALVSDSKNQEVNMDQDDMDTCGFPLYFSHGLQDDGGLPSFAKGMVAADTSSMDKTNRYIWVFANAGASATERGDPGSSPPGFEEAVLEELEEVMVQMARTTRICLRDAFYRLAEGSRSPRSAAAAADGATVAEATRYHAQAAVDLSRSLLEILQLVILMLSVSSSPLAAANPLQCVDDAAAPSPRRDRQDGGEPHLQAAAVLAGSRGGDDAAHACLRRPSSPSPDHRRTGGDSLGFSFQCDLARRIASSLACLTKDTLCM

SEQ ID NO: 34041 - protein, 362 aa, Ashbya gossypii ATCC 10895
MSQQDQFIADDVTSNQSNVTRQMLVKEYKRIGHGAFGTVVQAYLTPDNEKWYGPFAIKKVPAQTEYKSRELAILRIADHPNVVKLEYFFTHVSPSDGKVYQHLAMECLPETLQHEILRYTQNKLELPLKHIKMYTYQIARGMLYLHALGICHRDIKPSNILVDPKSGVLKICDFGSAKKLEQNQPSISYICSRFYRAPELIVGCTQYTTQIDIWGLGCVIGEMLIGKAVFQGQEPLLQLHEIAKLLGPPDKKFIFFSNPSYGGPLFSKPLFNGTPQQRFEKYFGHAGPEGIDLLMKVLCYSPERRLSPRRVLCHAFLDELRNDRYFFPAGSSQPKQMPELFDFSEFELEIIGTLLPSIVGHE

SEQ ID NO: 34042 - protein, 467 aa, Listeria monocytogenes str. 4b H7858
MTSVMWFRRDLRVNDNKALYHACKEDDLLLLFQVNPAQFITGSPSHQAFFASVAHFKQEIDKTAHLQIMFGEPIECFQQLKDSLPSWDKVYFNRDETGYGAKRDEAAQAFFDEQKIEVQAFHDSYLHSAEEVKKSPTEYYKIFTPYYKKWREEIKETPFKVTLKHENIRKESLFLKYEEQFAEMTSDLPILDIGERAANTRLANFIKHDVADYDKARDFPELDKTSHLSRYLRTGEISIRTIWQTLQETEATEGRATFEKELCWRDFYNMIYVSFPNQKNEPIQENYRFIEWENNREYFKAWQEGKTGFPLVDAAMRQLKETGWMHNRLRMITASFLTKDLLIDWRFGEKYFQQMLIDYDPASNIGGWQWAASTGTDAVPYFRIFNPTTQSQKFDSTGKFIRKYVKELANLPDKYIHQPEKMSETEQKEHGLLLGKDYPFPIVDHKERRKLAIARYEFSKEHSRGNI

SEQ ID NO: 34043 - protein, 569 aa, Arabidopsis thaliana
MDSARSWFHKFQPRDKPRKKDMFSGSTYGGGVTETTVPDGGNDTETATKLPPLGGDGEALSNSTKQKVAAAKQYIENHYKEQMKNLNERKERRTTLEKKLADADVCEEDQTNLMKFLEKKETEYMRLQRHKMGADDFELLTMIGKGAFGEVRVVREINTGHVFAMKKLKKSEMLRRGQVEHVRAERNLLAEVDSNCIVKLYCSFQDNEYLYLIMEYLPGGDMMTLLMRKDTLSEDEAKFYIAESVLAIESIHNRNYIHRDIKPDNLLLDRYGHLRLSDFGLCKPLDCSVIDGEDFTVGNAGSGGGSESVSTTPKRSQQEQLEHWQKNRRMLAYSTVGTPDYIAPEVLLKKGYGMECDWWSLGAIMYEMLVGYPPFYADDPMSTCRKIVNWKTHLKFPEESRLSRGARDLIGKLLCSVNQRLGSTGASQIKAHPWFEGVQWEKIYQMEAAFIPEVNDDLDTQNFEKFDEEDNQTQAPSRTGPWRKMLSSKDINFVGYTYKNFEIVNDYQVPGIAELKKKESKSKRPSVKSLFESESDSSSSGSEQQTINRSYSNPTPRGMEPNLRRLDSE

SEQ ID NO: 34044 - protein, 147 aa, Bacillus subtilis
MAYNKEEKIKSLNRMQYEVTQNNGTEPPFQNEYWDHKEEGLYVDIVSGKPLFTSKDKFDSQCGWPSFTKPIEEEVEEKLDTSHGMIRTEVRSRTADSHLGHVFNDGPGPNGLRYCINSAALRFVPKHKLKEEGYESYLHLFNKLEHH

SEQ ID NO: 34045 - protein, 97 aa, Erwinia carotovora subsp. atroseptica SCRI1043
MNIRPLHDRVIVKRKEVESKSAGGIVLTGSAAGKSTRGEVLAIGHGRILENGEVKPLDVKVGDIVIFNDGYGVKAEKIDNEEVLIMSESDILAIVEA

SEQ ID NO: 34046 - protein, 327 aa, Streptococcus agalactiae A909
MIDKYYNWATLGTGVIANELAQALEARGQKLYSVANRTYDKGLEFANKYGIQKVYDHIDQVFEDPKVDIIYISTPHNTHISFLRKALANGKHVLCEKSITLNSTELKEAIDLAETNHVVLAEAMTIFHMPIYRQLKTLVDSGKLGPLKMIQMNFGSYKEYDMTNRFFSRDLAGGALLDIGVYALSCIRWFMSEAPHNITSQVTFAPTGVDEQVGILLTNPANEMATVSLSLHAKQPKRATIAYDKGYIELFEYPRGQKAVITYTKDGHQDIIEAGKTENALQYEVADMEEAVSGKTNHMYLNYTKDVMDIMTQLRQEWGFTYPEEEK

SEQ ID NO: 34047 - protein, 601 aa, Shewanella sp. MR-7
MTASPKDEMWTVFKRLLGYLKPMKGMFLLSVCGLIVYGLVDAAFISFIGPFIDKGFSSSTPAISNGIALPTSQGFHADNQVLLMAPIVVILMFSLRGFANFVSTYGISYMSARLIMDMRQQVFEHYLSLPVSYMDKENTGNLISKVTFDTEQIARASGSALISIVRDGVTVIGMLGLMFYNSWKLSLCILVIGPIMGLVITIVSRRFRKVSKQIQTAMGDVSAATEQMIKGHKNVLAFGGQETETARFAKINDRNRHQNMKLAVAQAVSQPLIMVIGSFALAFVLYAASLDSMKADLTAGTFATILGAMMAMLQPIKNLTRVNAEFQRGIAACTTVFELLDTLPESDTGTYTVKRAKGNLRFDNVSFSYEGQERRALDKIDFEVTQGQTLALVGRSGSGKSTIASLVTRFYTGLESGDIKLDDVSIYDYSLKSLRSQVALVSQQVTLFNDTIANNIAYAYPGEATREQIIQAATLAHAMEFIEQLPEGLDTQVGENGVLLSGGQRQRIAIARAMLRDAPVLILDEATSALDTESEKAIQQGLDNLRQNRTSVVIAHRLSTIESADQILVVDQGRIVERGTHKSLLELGGMYAKLYQMQFGS

SEQ ID NO: 34048 - protein, 1044 aa, Arabidopsis thaliana
  misc_feature (381)..(381): Xaa can be any naturally occurring amino acid
  unsure (1)..(1044): unsure at all Xaa locations
MLTDGSQHTYQNGGTKNSKEHERKCDESAHLQDNSQTTHKKKEKKNSKEKHGIKHSESEHLQDDISQRVTGKGRRRNSKGTPKKLRFNRPRILEDGKKPRNPATTRLRTISNKRRKKDIDSEDEVIPELATPTKESFPKRRKNEKIKRSVARTLNFKQEIVLSCLEFDKICGPIFPRGKKRTTTRRRYDFLCFLLPMPVWKKQSRRSKRRKNMVRWARIASSSKLLEETLPLIVSHPTINGQADASLHIDDTLVRHVVSKQTKKSANNVIEHLNRQITYQKDHGLSSLADVPLHIEDTLIKSASSVLSERPIKKTKDIAKLIKDMGRLKINKKVTTMIKADKKLVTAKVNLDPETIKEWDVLMVNDSPSRSYDDKETEAKXKKEREIFQTRIDLFINRMHRLQGNRKFKQWKGSVVDSVVGVFLTQNTTDYLSSNAFMSVAAKFPVDAREGLSYYIEEPQDAKSSECIILSDESISKVEDHENTAKRKNEKTGIIEDEIVDWNNLRRMYTKEGSRPEMHMDSVNWSDVRLSGQNVLETTIKKRGQFRILSERILKFLNDEVNQNGNIDLEWLRNAPSHLVKRYLLEIEGIGLKSAECVRLLGLKHHAFPVDTNVGRIAVRLGLVPLEPLPNGVQMHQLFEYPSMDSIQKYLWPRLCKLPQETLYELHYQMITFGKVFCTKTIPNCNACPMKSECKYFASAYVSSKVLLESPEEKMHEPNTFMNAHSQDVAVDMTSNINLVEECVSSGCSDQAICYKPLVEFPSSPRAEIPESTDIEDVPFMNLYQSYASVPKIDFDLDALKKSVEDALVISGRMSSSDEEISKALVIPTPENACIPIKPPRKMKYYNRLRTEHVVYVLPDNHELLHDFERRKLDDPSPYLLAIWQPGETSSSFVPPKKKCSSDGSKLCKIKNCSYCWTIREQNSNIFRGTILIPCRTAMRGAFPLNGTYFQTNEVFADHETSLNPIVFRRELCKGLEKRALYCGSTVTSIFKLLDTRRIELCFWTGFLCLRAFDRKQRDPKELVRRLHTPPDERGPKFMSDDDI

SEQ ID NO: 34049 - protein, 201 aa, Prochlorococcus marinus subsp. marinus str. CCMP1375
MTAQASNIVWHKASVDRESIEKERGHKSVIIWFTGLSGSGKSTLANALNVALFKKGLATYVLDGDNIRHGLCNDLGFSDSDREENIRRIGEVAKLFLDAGVIVLTAFVSPFRSDREKARKLVKENDFLEIYCAANLDICETRDTKGLYAKARAGEIKDFTGISSPYEEPENPDLKIDTGLKDIDQCVEEVISKLIELNLVK

SEQ ID NO: 34050 - protein, 134 aa, Triticum aestivum
  misc_feature (27)..(27): Xaa can be any naturally occurring amino acid
  misc_feature (99)..(99): Xaa can be any naturally occurring amino acid
  unsure (1)..(134): unsure at all Xaa locations
MVQARSHLRVPGPLNIHDHVMRAMSRXTRYYRSTDSPALTNTLLYDENKILKTTPAPTYLLHSTETGAWESALTNTLSMGEPHHELLTAAQSALLRIDXQLSLCFMTYDAESDWGYCAYLMDLACKLRNDSKNT

SEQ ID NO: 34051 - protein, 242 aa, Bacillus subtilis
MPYLKRVLLLLVTGLFMSLFAVTSTASAQTGGSFFDPFNGYNSGFWQKADGYSNGNMFNCTWRANNVSVTSLGEMRLALTSPSYNKFDCGENRSVQTYGYGLYEVRMKPAKNTGIVSSFFTYTGPTDGTPWDEIDIEFLGKDTTKVQFNYYTNGAGNHEKIVDLGFDAANAYHTYAFDWQPNSIKWYVDGQLKHTATNQIPTTPGKIMMNLWNGTGVDERLGSYNGVNPLYAHYDWVRYTKK

SEQ ID NO: 34052 - protein, 544 aa, Haemophilus somnus 129PT
MKLNDIKRLYKIVRVFLSYGIDEILPHNKYTRSIRCWRMLFFWLKNKHKNKAFGLCLRLALQELGPVWIKLGQMLSTRRDLFPAEIADELALLQDNVEAFSGKIARQQIEQALGSSLENWFTDFDENALASASIAQVHTAKLKLGEEQEKEVVIKVLRPNIQPQIEADLSWMYKLAGLLPKLFREGYRLRAVEVIQEYEKTLRDELDLRVEMANAIKLRENFLDSPMLYIPKMYEAFCHKNVIVMERIYGIPVSDVETLQRNGTDMKLLAERGVQVFFTQVFRDSFFHADMHPGNIFVNPHYPENPQYIGIDCGIVGKLNESDKRYLAESFVAFFNRDYRRVAQMHVDAGWTPQDTNIDDFEQAFREVCEPIFAKPLSEISFAQVLLNLFNVAREFNMQVQPQLVLLQKTLLYIEGLGRQLYPQLDLWDTAKPFLQNWLNEQIGMKVTFKKLKAKLPYLQEHLPDFPETLMDALKQQKFISQQLVEINKKLAKQQRWQKKMFVLIVGIVIFSVTLWQFAALPLAISAGLFLVGFLVWLIGFLLP

SEQ ID NO: 34053 - protein, 239 aa, Prochlorococcus marinus str. MIT 9313
MAVALASQLREGTKAAHTMAENTGFVSCFLKGVVDQSSYRMLVADLYFVYSALEAEIGKLREQKHPVVAPIGFPELNRCEALEQDLIFYFGSDWRNLAKATLAAQEYVARIHKLAQESPELLVAHHYTRYLGDLSGGQILKTIAQKAMKLGGNDGVRFYIFNDIEDTKAFKTLYSATLDSLPINQQTAERMVEEANMAFHCNMAMFKELEGNLVAAIGKVLFGFLTSRQRGGSTEDAVA

SEQ ID NO: 34054 - protein, 96 aa, Wolbachia endosymbiont strain TRS of Brugia malayi
MSSISLSVLDDSVLIKPINEEKQGGIVLPSSAEKKPTKGEVIAIGEGSRNSSGERIALTVKAGDKVFYRQWAGTEIEHGSEKLIVMKESDILAIIK

SEQ ID NO: 34055 - protein, 550 aa, Wolbachia endosymbiont strain TRS of Brugia malayi
MTNVVVSGEQLQEAFREVAVMVDSTVAITAGPRGKTVGINKPYGAPEITKDGYKVMKGIKPEKPLHAAITSIFAQSCFQCNDKVGDGTTTCSILTSNMIMEALKSIAAGNDRVSIKNGMQKAKDAVLEGITSMSRTIPLEKMDEVAQVAIISANGDKDIGNSIADAVKKVGKEGVITVEESKGSKELEVELTTGMQFDRGYLSPYFITSNEKMIVEFDDPYLLITEKKLSIIQPLLPILEAVVKSGKPLLIIAEDIEGEALSTLVINKLRGGLKVTAVKAPGFGDRRKEMLEDIAALTGAKYVIKDELGIKMEDLTLEDLGTAKNVKVTKDNTTIVSGSSDSDRVKARVEQIKSQIETSTSDYDKEKLRERLAKLSGGVAVLKVGGVTEVEVKERRDRVEDALHATRAAIEEGIVPGGGVALLYASSALDKLKGGSDEEQIGINIIKKVLSAPIKRLVKNAGLESAVIIDHLTKQNDKELIYNVEAMNYANAFTAGVIDPAKVVRIAFETAISVASVLITTESMIVDVPNKEENASSSMGAGGMGGMNGF

SEQ ID NO: 34056 - protein, 417 aa, Arabidopsis thaliana
MSDLQANKDETTVDRQSSSSVDLDGPSPLRKMISVASIAAGIQFGWALQLSLLTPYVQLLGVPHKWPSFIWLCGPVSGLLVQPSVGYFSDRCTSRFGRRRPFIATGALLVAVSVVLIGYAADFGHSMGDKIDKPVKMRAVVIFALGFWILDVANNTLQGPCRAFLGDLAAGDAQKTRTANAFFSFFMAVGNVLGYAAGSYTNLYKIFPFTMTKACDIYCANLKSCFFLSITLLLVVTIIALWYVEDKQWSPKADSDNEKTPFFGEIFGAFKVMKRPMWMLLIVTALNWIAWFPFLLYDTDWMGREVYGGDSKGDDKMKKLYNQGIHVGALGLMLNSIVLGVMSLGIEGISRKMGGAKRLWGAVNIILAVCLAMTVLVTKKAEEHRRIAGPMALPTDGIRAGALTLFALLGIPLADFL

SEQ ID NO: 34057 - protein, 130 aa, Thermoplasma acidophilum DSM 1728
MRQMNKTGIAHIYASQNNTIIHVTDPTGAETIAMVSGGMVVKNDRDQASPYAAMKAADMVSEALKEKEITDLIIKVRAPGGNKSKIPGPGAQAAIRALSRAGLKIVRIEEVTPIPHDGTKKKGGKRGRRV

SEQ ID NO: 34058 - protein, 766 aa, Vibrio fischeri ES114
MTFRLKTIIGISIIQCIMLLILVFSSVKFISDSNEQRLIARANASVHMFSNAIKDSILNNQYDKVASLMDDFITLEKICYIRIFREDGSLIVEGGPKLHEVANPDSSILHNASDGTYDVILPIITNDKTLGKVEIGFGTHGENTFLSQAKSWIYAIASIELIFVIGLSFLLGNALTRNLHKLKKAVNTVASQGPGAQVDISSIGDLGDVAQAFNNMSLKLEQNYQDLQQARNEAEAANKSKSRFLASMSHEIRTPMNAVLGLLAILKDTTLKPNQKELVNTATDSSELLLSIINDILDFSRMEANTFYLENHIFNIHKSLNSVLKTFHPQAQNKQLELSLFIADNVPTYVQGDAHRLRQILLNLVGNSLKFTDDGQVQILVNAEEHEGRIQLHCSVQDSGIGIQQEQLEYLFDEFTMADNSFSRTHEGSGLGLAICQRLVHMMDGTITVNSQYGLGSEFSFNIQLDKATTKEINYLLSKEKIEQQKDIEQQKNCVFSDANILVVEDNHANQIVIKNTLNYAGYSIDIAQNGKEAITKAINTQYDLIFMDISMPEMDGMTATKKIRSLSDTHQNMPIIALTAHALSGDKERFIEAGMTDYLSKPFNRSDLLECLAKYLFKQGKQDPSFCQECDLCEFNESTEEPKSMDNELLLVDEQIIQQIIADTDASVMPELIRFYIIESKERVETISNAAKNKDLYALEFEAHTLGSSALTLGNVALSTLAREIEIHCINQQFDDALEKTAHLPDLATLSLDALEKRNKQGFSK

SEQ ID NO: 34059 - protein, 261 aa, Solanum tuberosum
MAAGRWNLEGCTALVTGGSRGIGYGIVEELASLGASVYTCSRNQKELNECLTQWRSKGFKVEASVCDLSSRSEREEFIKTVANHFDGKLNILVNNAGIVIYKEAKDYTMEDYSLIMSINFEAAYHLSVLAHPFLKASQRGNVVFISSISGASALPYEAVYGATKGAMDQLTRCLAFEWAKDNIRVNGVAPGVIASSMVEMTIQDQEQKENLDKLIDRCALHRMGEPKELAAVVAFLCFPAASYVTGQIIYVDGGFMANGGF

SEQ ID NO: 34060 - protein, 190 aa, Triticum aestivum
PFGDYRTSFTKKQAGTGPEFPGYRRPTRPKKKKGLKEKLQEKLPGHKDTEGEHVTGLPAPAAPASVQTHHDTDVVVEKIDGDVKTEATPAVPEEEKKGFLEKIKEKLPGGHKKPEDAAAVPVTHAAPAPVTHAAPAPVHAPAPAAEEVSSPDAKEKKGLLGKIMDKLPGYHKTGEEDKAAAATGEHKPSA

SEQ ID NO: 34061 - protein, 262 aa, Cucumis sativus
MSKHYQSPLTRMIKEEGKGKLQIKGMFQNQEEKMSDSPQRKMGRGKIEIKRIENTTNRQVTFCKRRNGLLKKAYELSVLCDAEVALIVFSSRGRLYEYANNSVKATIDRYKKASSDSSNTGSTSEANTQFYQQEAAKLRVQIGNLQNSNRNMLGESLSSLTAKDLKGLETKLEKGISRIRSKKNELLFAEIEYMRKREIDLHNNNQMLRAKIAESERNVNMMGGEFELMQSHPYDPRDFFQVNGLQHNHQYPRQDNMALQLV

SEQ ID NO: 34062 - protein, 268 aa, Pseudomonas aeruginosa PAO1
MSRLQTRFAQLKQENRAALVTFVTAGDPDYASSLEILKGLPAAGADVIELGMPFTDPMADGPAIQLANIRALDGGQTLARTLQMVREFRSGDSETPLVLMGYFNPIHHYGVERFIAEAKEVGVDGLIVVDLPPEHNEDLCHPAQAAGIDFIRLTTPTTGDQRLPTVLEGSSGFVYYVSVAGVTGANAATLEHVEEAVARLRRHTDLPIGIGFGIRSAEHAAAVARLADGVVVGSALIDRIAKARDNAQAVKDVLALCGELAEGVRNAR

SEQ ID NO: 34063 - protein, 229 aa, Cucumis sativus
MGRGKIEIKRIENTTNRQVTFCKRRNGLLKKAYELSVLCDAEVALIVFSSRGRLYEYSNNSIKTTIERYKKACSDSSATSSVTELNTQYYQQESAKLRQQIQMLQNSNSNLVRHLMGDSLSALTVKELKQLENRLERGITRIRSKKHEMLLAEIEYLQKREIELENENVCIRTKIAEVERVQQANMVSGQELNAIQALANSRNFFSPNIMEPAGPVSYSHQDKKMLHLG

SEQ ID NO: 34064 - protein, 53 aa, Pisum sativum
VDRREAALLKFRQKRKERCFDKKIRYVNRKQLAERRPRVRGQFVSKLNGINVD

SEQ ID NO: 34065 - protein, 488 aa, Zea mays
  misc_feature (219)..(219): Xaa can be any naturally occurring amino acid
  misc_feature (227)..(227): Xaa can be any naturally occurring amino acid
  misc_feature (245)..(245): Xaa can be any naturally occurring amino acid
  unsure (1)..(488): unsure at all Xaa locations
MASLWLARASSQLARRAAARRPPPRPGRHGSGQPTSSWFLGSVPQAALGSPALDTSRRGFCSVRRFAGESSAAAAAAAVVDEEPESGFAAGDQQAVDFPGGKVSFVAEMNFLPESTRERINCYRVLDDDGRTISGSRFQEVSRELALKMYSEMVTLQIMDTIFYEAQRQGRISFYLTSNGEEAINIASAAALSMDDIVLPQYREPGVLLWRGFTLQEFXNQCFGNKXDYGKGRQMPIHYGSNRLXYFTVSSPIATQPLHAVGAAYSLKMDKKDACAITYFGDGGTSEGDFHAALNFAAVMEAPVIFFCRNNGWAISTPTTEQFRSDGVVIRGQAYGIRGIRVDGNDALAVYRRIHAAREMAVTEGRPILVEALTYRVGHHSTSDDSTKYRPVDEIEHWRTARDPISRYRKWVQGNDWWSDAEESALRSRVRKELLQAIQVAERMPKPPVTELFTDVYDKIPSNLHEQEQLLRPPIMRHPADYPTDVPV

SEQ ID NO: 34066 - protein, 410 aa, Frankia sp. CcI3
MTALSAEPALARWGFSEWVESARRSGELIATPELDDRNDAVISINGRKVVNFAGIGILGWQHDPDVRNVFVETAMNYGLVVGGSRVVQGVARPHLELEALVAEITGRQKALTYATGLLANVGFVHAMSARFSFNDQPGVDNADTVFVLDRDSHWSMWKAVERFKFGRNLINFRHNDIADLRQVLENLRGRRVVVGFLTVYSDGSMAPVGEILDLCDEFGAVSFVDDANGFMVYGNGGHRFAAEYEELRRATFLMVSFGKSIGLGGGALAGPADALDAFRFLSGTSVFTTNIQPPTAGAIVHVLRRMRQDPSVMERYLDRVDRLRERLLGIGCTINATPTYVTSISVGSNHTAVRVRQDFLDRGYLVPMFGYPAVNKNQTVIRLMVNNRLSDEHLDGFLDTLAELKQKYEF

SEQ ID NO: 34067 - protein, 450 aa, Escherichia coli K12
MTKHYDYIAIGGGSGGIASINRAAMYGQKCALIEAKELGGTCVNVGCVPKKVMWHAAQIREAIHMYGPDYGFDTTINKFNWETLIASRTAYIDRIHTSYENVLGKNNVDVIKGFARFVDAKTLEVNGETITADHILIATGGRPSHPDIPGVEYGIDSDGFFALPALPERVAVVGAGYIAVELAGVINGLGAKTHLFVRKHAPLRSFDPMISETLVEVMNAEGPQLHTNAIPKAVVKNTDGSLTLELEDGRSETVDCLIWAIGREPANDNINLEAAGVKTNEKGYIVVDKYQNTNIEGIYAVGDNTGAVELTPVAVAAGRRLSERLFNNKPDEHLDYSNIPTVVFSHPPIGTVGLTEPQAREQYGDDQVKVYKSSFTAMYTAVTTHRQPCRMKLVCVGSEEKIVGIHGIGFGMDEMLQGFAVALKMGATKKDFDNTVAIHPTAAEEFVTMR

SEQ ID NO: 34068 - protein, 575 aa, Trichodesmium erythraeum IMS101
MLEHDIIIVGGGLAGCRAAVEIARKNPSLNVAVVAKTHPIRSHSVAAQGGIAASLRNVDTKDSWEAHAFDTVKGSDYLADQDAVEILAKEAPDVIIDLEHLGVLFSRLPDGRIAQRAFGGHSHNRTCYAADKTGHAILHELVNNLRRYGVHIYEEWYVMRLILEDTQAKGVVMYHIWDGDIVVLRAKVVMFATGGYGRVFNTTSNDYASTGDGLAMAAMAGLPLQDMEFVQFHPTGLYPAGVLISEAVRGEGAYLINSEGDRFMANYAPSRMELAPRDITSRAITLEIRAGRGINMNGSAGGPFIYLDLRHMGREKIMSRVPFCWEEGHRLLGIDAVNEPMPVRPTAHYSMGGIPTNTDGRVFASADTLVDGLFAAGECACVSVHGANRLGSNSLLECVVYGRRTGAAIAEFVEGRKLPDVEEQRYLREARAQVQGLLDRSGEYRINFLQQQFQDTMSQHCGVFRSQAIMEEGFKKLEQLQEQYQQVYLDDKGKLWNTEIVEALELRSIIVVGETILSSALSRQESRGAHSREDFTKRNDEEFLRHTLAYYSLAGIDISYRPVAITMFEPKERKY

SEQ ID NO: 34069 - protein, 763 aa, Zea mays
MGEGAGDRVLSRLHSVRERIGDSLSAHPNELVAVFTRLKNLGKGMLQPHQIIAEYNNAIPEAEREKLKDGAFEDVLRAAQEAIVIPPWVALAIRPRPGVWEYVRVNVSELAVEELRVPEYLQFKEQLVEEGPNNNFVLELDFEPFNASFPRPSLSKSIGNGVQFLNRHLSSKLFHDKESMYPLLNFLRAHNYKGMTMMLNDRIRSLSALQGALRKAEEHLSTLQADTPYSEFHHRFQELGLEKGWGDCAKRAQETIHLLLDLLEAPDPSTLEKFLGTIPMVFNVVILSPHGYFAQANVLGYPDTGGQVVYILDQVRAMENEMLLRIKQCGLDITPKILIVTRLLPDATGTTCGQRLEKVLGTEHCHILRVPFRTENGIVRKWISRFEVWPYLETYTDDVAHEIAGELQANPDLIIGNYSDGNLVACLLAHKMGVTHCTIAHALEKTKYPNSDLYWKKFEDHYHFSCQFTTDLIAMNHADFIITSTFQEIAGNKDTVGQYESHMAFTMPGLYRVVHGIDVFDPKFNIVSPGADLSIYFPYTESHKRLTSLHPEIEELLYSQTENTEHKFVLNDRNKPIIFSMARLDRVKNLTGLVELYGRNKRLQELVNLVVVCGDHGNPSKDKEEQAEFKKMFDLIEQYNLNGHIRWISAQMNRVRNGELYRYICDTKGAFVQPAFYEAFGLTVVEAMTCGLPTFATAYVPGRDHRARRVWLPHRPLPGRQGVGPARGLLRQVPGGRATGARSPRAGSSVSRRSTPGSCTRRG

SEQ ID NO: 34070 - protein, 1481 aa, Trichodesmium erythraeum IMS101
MDKKNLRQALVVGINRYPLLKKKKLGDLNLKAAVKDAEAIANILEKYGKFRIQRLPSLPSLPKNYDQEGTERFDPKGKVKINELQEAIINLFKPRKKNETPDVALLFFAGHGYVDEKGDIREGFLATSEAHLSENVYGISLNWLKRLLQDSPVQEQIVWLDCCFSGEFLNFDREANPGTEGKKISRCFITASRSFQTAEEKLDGKHGLFTDNLLAGLNPENYVDGWVTNYVLAEFINKKMSRTSQAPMFQNSGDAIILTTNTLTEYKDERWKNLAPYRGLSYFRQQENDAVFFHGRTLLTDELIDRVRTNNFVAVLGASGSGKSSLLRAGLLYQLRQGQKISGSDRWRYLNPFTPTFSPLKSLELAINREGEKQENFTDNFTDNLIRFIDLVEAERVVMIIDQFEEVFTLCQGDEEKEQERLDFFDCFLDVLERRGDKFCLVLGMRADFLDRCSEYGRLANQIKRHQLLVTPLEKDEIDEVIKKPAELVGVGVEPGLIAQIREDFLRNPGSLPLLEYTLDALWKFATQGENKSQFLTLATYTKLGGIKGTLTKRADAVFQSLNDEERSVAKRIFLELVQPGEKEISSGKITDTRRRVILEKLPNKRHSLELLSAVSDRLADPNNRLITKDNSEGGILLDIVHEDLIRSWKTLREWVEEYQEALPVERKIEADAAEWKKDGKNEGLLLRAGRLTKAEEYLKKYDEMALLDGVAYEFIEASRELKIREEEKEKERQRKVEEQAARILGMLSDSMIRQKPSLLDKGVLLGIESMKQYFDIKKRYGKVDSDLLFELDQTLRNGVSQLPKHLYTLKHQSDVYAVAFSPDGKTIATASYDKTARLWDTENGKELATLKHQSDVYAVAFSPDGKTIATASSDKTARLWDTENGKELATLNHQSSVNAVAFSPDGKTIATASSDKTARLWDTENGNVLATLNHQSSVNAVAFSPDGKTIATASSDKTARLWDTENGKELATLNHQSSVNAVAFSPDGKTIATASSDKTARLWDTENGKELATLNHQSWVNAVAFSPDGKTIATASSDKTARLWDTENGNVLATLNHQSSVNAVAFSPDGKTIATASSDKTARLWDTENGKELATLNHQSSVNAVAFSPDGKTIATASSDKTARLWDTENGKELATLNHQDTVRAVAFSPDGKTIATASSDKTARLWDTENGNVLATLNHQSSVIAVAFSPDGKTIATASSDKTARLWDTENGNVLATLNHQSSVIAVAFSPDGKTIATASSDKTARLWDTENGKVLATLNHQSRVNAVAFSPDGKTIATASDDKTARLWDTENGNVLATLNHQDWVFAVAFSPDGKTIATASSDKTARLWDTENGNVLATLNHQDWVFAVAFSPDGKTIATASSDNTARLHWATPEGLIQEGCRRLSRNLTAEEWQQYINSDLETYQKTCKNIPVHPSLIAEAKNLAKTGEKPKIKQAISIFKKALELEPEIDLDPDTKTRETDPQLVANKLAASAKLK

SEQ ID NO: 34071 - protein, 223 aa, Streptomyces coelicolor A3(2)
MSESQVWDDVDAYFVTHLAPDDDALAAARRESDAAGLPPVNVAANQGKLLQLLAQIQGARTILEIGTLGGYSTIWLARALPAEGRLVTLEYSARHAEVATRNIARAGLDALVDVRVGPALESLPKLADENPPPFDLVFIDADKGNNPHYLEWALRLTSTGSLIVIDNVVRGGRVADAGDTGDDVRGTRAAIELIGSHPRLSGTALQTVGTKGYDGFALARVLA

SEQ ID NO: 34072 - protein, 192 aa, Zea mays
LGQQVPLSLWMSLAPVVIGVSMASLTELSFNWTGFINAMISNISFTYRSIYSKKAMTDMDSTNVYAYISIIALIVCIPPAIIFEGPQLMSHGFSDAIAKVGLTKFVSDLVLVGLFYHLYNQIATNTLERVAPLTHAVGNVLKRVFVIGFSIVVFGNKISTQTGIGTSIAIAGVALYSYIKAKIEEEKRKKSA

SEQ ID NO: 34073 - protein, 222 aa, Vibrio sp. Ex25
MPEIKQLFENNSKWSQEIKSDRPEYFAKLAEGQKPDFLWIGCSDSRVPAERLTGLYSGELFVHRNVANQVIHTDLNCLSVVQYAVDVLKVKHIIVCGHYGCGGVNAAIDNPKLGLINNWLLHIRDIYFKHRTYLDQMPQQDRADKLGELNVAEQVYNLGNSTILQNAWERGQDVEIHGVVYGIEDGRLEYLGIRSNSKETVEASYQKALSTILNTDNKLLCR

SEQ ID NO: 34074 - protein, 664 aa, Crocosphaera watsonii WH 8501
MSQSTLGPDTPTADTITIDVQPRHIPRGHSEDLGPINDMSPESWQYSPETINDYYRKRLLQVIRRLINVFLLFASFALGLWWDKIRGKNPKEERKRAIHLREMLTELGPTYIKVGQALSTRPDLVPPVYLDELTTLQDQLPSFPNEVAYSFIEEELGQKPQNIYAELSDKPIAAASLGQVYKGKLKTGEKVAVKVQRPDLIKRITLDIYILRNLSTWAQKTFTFLRSDLVAITDELAGRIFEEINYIQEGKNAEEFAKFYGHLSEIYVPKIYWEYTGRRVLTMEWVEGTKLTNIQEIQAQGIEATHLVEVGVNCSLRQLLEHGFFHADPHPGNLLAMKDGRLAYLDFGMMSRIKPYQRYGLIEAVVHLVNRDFDALAYDYVKLDFLKPETDLTPIVPALTEVFGNALGSSVAELNFKSITDQMSEMMYEFPFKVPAYYALILRSMVTLEGIAIGIDPEFKVLSKAYPYVAKRLLTDPSPELRASLKDLLFKEGGFRWNRLENLMRNAKDSQDYDIDKVVDQAADFLFSARGEFIRERLVNEITNALDMFSRRTWFNMSSMVREQVGLAVQETPQDLQGNSESFEHLQNILQILQNTPGFDPMKVVPLIMKLLGKPETQQMGHKIAEGLVQKLVTRLVRNLLLEIDRPSDNNLGTINTQKSLPAA

SEQ ID NO: 34075 - protein, 475 aa, Vibrio sp. Ex25
MSKEIKAQVVVLGSGPAGYSAAFRCADLGLETVLVERYSTLGGVCLNVGCIPSKALLHVSKVIEEAKAMADHGVVFGEPQTDISKIRIWKEKVVNQLTGGLSGMAKMRNVTVVNGYGKFTGPNSILVEGEGEPTVVNFDNAIVAAGSRPIKLPFIPHEDPRIWDSTDALELKEVPEKLLIMGGGIIGLEMGTVYHSLGSKVEVVEMFDQVIPAADKDIVKVFTKRIKDKFKLMLETKVTAVEAKEDGIYVSMEGKKAPAEAERYDAVLVAIGRVPNGKLIDGEKAGLEIDERGFINVDKQMRTNVPHIFAIGDIVGQPMLAHKGVHEGHVAAEVISGKKHYFDPKVIPSIAYTEPEVAWVGKTEKEAKEEGIKYEVATFPWAASGRAIASDCTDGMTKLIFDKETHRVIGGAIVGTNGGELLGEIGLAIEMGCDAEDIALTIHAHPTLHESVGLAAEVFEGSITDLPNKKAVKKK

SEQ ID NO: 34076 - protein, 469 aa, Hordeum vulgare
MAGAAAAVASGISIRPVAAPKISRAPRSRSVVRAAVSIDEKAYTVQKSEEIFNAAKELMPGGVNSPVRAFKSVGGQPIVFDSVKGSHMWDVDGNEYIDYVGSWGPAIIGHADDKVNAALIETLKKGTSFGAPCALENVLAQMVISAVPSIEMVRFVNSGTEACMGALRLVRAFTGREKILKFEGCYHGHADSFLVKAGSGVATLGLPDSPGVPKGATVGTLTAPYNDADAVKKLFEDNKGEIAAVFLEPVVGNAGFIPPQPAFLNALREVTKQDGALLVFDEVMTGFRLAYGGAQEYFGITPDVTTLGKIIGGGLPVGAYGGRKDIMEMVAPAGPMYQAGTLSGNPLAMTAGIHTLKRLMEPGTYEYLDKVTGELVRGILDVGAKTGHEMCGGHIRGMFGFFFAGGPVHNFDDAKKSDTAKFGRFHRGMLGEGVYLAPSQFEAGFTSLAHTTQDIEKTVEAAEKVLRWI

SEQ ID NO: 34077 - protein, 456 aa, Arabidopsis thaliana
MSDLQANKDETTVDRQSSSSVDLDGPSPLRKMISVASIAAGIQFGWALQLSLLTPYVQLLGVPHKWPSFIWLCGPVSGLLVQPSVGYFSDRCTSRFGRRRPFIATGALLVAVSVVLIGYAADFGHSMGDKIDKPVKMRAVVIFALGFWILDVANNTLQGPCRAFLGDLAAGDAQKTRTANAFFSFFMAVGNVLGYAAGSYTNLYKIFPFTMTKACDIYCANLKSCFFLSITLLLVVTIIALWYVEDKQWSPKADSDNEKTPFFGEIFGAFKVMKRPMWMLLIVTALNWIAWFPFLLYDTDWMGREVYGGDSKGDDKMKKLYNQGIHVGALGLMLNSIVLGVMSLGIEGISRKMGGAKRLWGAVNIILAVCLAMTVLVTKKAEEHRRIAGPMALPTDGIRAGALTLFALLGIPLAYSVRTSFYNIKQLRRRSKTFSRSFKHGNCHTTNDCIVWSWSY

SEQ ID NO: 34078 - protein, 268 aa, Haemophilus influenzae 86-028NP
MSRFETQFATLNAKNEGAFVPFVTLCDPTFDCSFEIICTLVDNGADALELGFPFSDPLLDGPVIQAANNRALTAGHSSEDSFKLLEKVRSKYPEIPISLLLCANLIFAKGLDAFYQRCAEVGVDAVLVADIPLLAKEDYVQAAKKHGIQPVFICPPNADEKTIQGVAKNSEGYTYLVSRAGVTSAENQAHAANLDTLVEQLKAHYAPPILQGFGIAQPAQVKEALALGAAGAISGSATVKIIERNLDNHEQCLAELAEFVQTMKAATK

SEQ ID NO: 34079 - protein, 413 aa, Arabidopsis thaliana
MAEICYENETMMIETTATVVKKATTTTRRRERSSSQAARRRRMEIRRFKFVSGEQEPVFVDGDLQRRRRRESTVAASTSTVFYETAKEVVVLCESLSSTVVAFPDPEAYPKYGVASVCGRRREMEDAVAVHPFFSRHQTEYSSTGFHYCGVYDGHGCSHVAMKCRERLHELVREEFEADADWEKSMARSFTRMDMEVVALNADGAAKCRCELQRPDCDAVGSTAVVSVLTPEKIIVANCGDSRAVLCRNGKAIALSSDHKPDRPDELDRIQAAGGRVIYWDGPRVLGVLAMSRAIGDNYLKPYVISRPEVTVTDRANGDDFLILASDGLWDVVSNETACSVVRMCLRGKVNGQVSSSPEREMTGVGAGNVVVGGGDLPDKACEEASLLLTRLALARQSSDNVSVVVVDLRRDT

SEQ ID NO: 34080 - protein, 509 aa, Clostridium thermocellum ATCC 27405
MDELNYNGFSNEENEIKSFGELNNTTGENVDANINGDVVENAAQYAAENIIENVDADVGENAAEGFGENVIENAAVGVADKRVENEKTYEGSFVDLKSASYYSESYTKPKKRKNSVLLQMILVAVMSSILGGSIVGGFFVFGVPALSPSVQSIFRNTNVQNGSNDATSGVDTDYYKKVVIENNADSSVVVAIAEKVGPSVVGISVKSTTSISDFWFFTPRDTESQGSGIIIRSDGYIMTNYHVIESALNGRTNTLLPNASINVILPSDPDTPHPATVVGTDSKTDLAVLKIEATNLPVIEFGDSDKIRVGELAVAIGNPGGLEYMGSVTVGVISGLNRTIPITDGKELKLIQTDAAINPGNSGGALVNAEGKLIGVNTAKIGGQGYEGLGFAIPVNKAKEITDSLIQYKYVRGRPSLGIQINSGYTKEIADRYGLPEGVLVYNVEIFSAAYKAGIQKDDIITEFNGVRVKNYDELEEQKNKYKPGDKVKLKIHRDGKDITVEVTLDEQK

SEQ ID NO: 34081 - protein, 546 aa, Staphylococcus aureus subsp. aureus COL
MKQRIGAYLIDAIHRAGVDKIFGVPGDFNLAFLDDIISNPNVDWVGNTNELNASYAADGYARLNGLAALVTTFGVGELSAVNGIAGSYAERIPVIAITGAPTRAVEQGGKYVHHSLGEGTFDDYRKMFAHITVAQGYITPENATTEIPRLINTAIAERRPVHLHLPIDVAISEIEIPTPFEVTATKYTDASTYIELLATKLHQAKQPIIITGHEINSFHLHQELEDFVNQTQIPVAQLSLGKGAFNEENPYYMGIYDGKIAEDKIRDYVDNSDLILNIGAKLTDSATAGFSYQFNIDDVVMLNHHNIKIDDVTNDEISLPSLLKQLSNISYTNNATFPAYHRPTSPDYTVGTEPLTQQTYFKMMQNFLKPNDVIIADQGTSFFGAYDLALYKNNTFIGQPLWGSIGYTLPATLGSQLADKDRRNLLLIGDGSLQLTVQAISTMIRQHIKPVLFVINNDGYTVERLIHGMYEPYNEIHMWDYKALPAVFGGKNVEIHDVESSKDLQDTFNAINGHPDVMHFVEVKMAVEDAPKKLIDIAKAFSQQNK

SEQ ID NO: 34082 - protein, 272 aa, Zea mays
MMAEAWTPVPFPPTAPCFWLHDAHSVFWRGGDAWTAAENKLFEKALAQIDRNAPDRWEKVAEVVRTKTVDDVRNHYHDLENDVGFIEAGLVPFPHYSGSVPSFGFTHEDWDGGFRRGYCLKRARGSDPERKKGVPWTEEEHKLFLMGLKKYGRGDWRNISRKYVTTRTPTQVASHAQKYFIRLNSGGKDKRRSSIHDITTVNLPDEDRGNAPPSAVTTTTNPSVALVDMKPFVAPSLGVPHPYGDVKLEPKSSLVAGLGFNDSVLLMHCGQL

SEQ ID NO: 34083 - protein, 504 aa, Sinorhizobium meliloti
MLKTTTVAGLAAVLLTTGLPAEVAQSFAEAVRVQAPAVPSFANVVDAVSPAVVSVRVQARERVSDDESNFTFDFGGRGFEDLPEDHPLRRFFREFAPRENDRADRWRDRRGPRGEGRLRPRAQGSGFFITEDGYLVTNNHVVSDGSAFTVIMNDGTELDAKLVGKDSRTDLAVLKVDDKRKFTYVSFADDEKVRVGDWVVAVGNPFGLGGTVTAGIISARGRDIGSGPYDDYLQVDAAVNRGNSGGPTFNLSGEVVGINTAIFSPSGGNVGIAFAIPASVAKDVVDSLIKDGTVSRGWLGVQIQPVTKDIAESLGLSEANGALVVEPQAGSPGEKAGIKNGDVVTALNGEPVKDPRDLARRVAALRPGSTAEVTLWRSGKSETVNLEIGTLPSDAKEPAPATGEAQPDEGQAGEEALADLGLTVTPSEDGKGVTIASVDPDSDAGDRGLKEGEKIVSVNNQEVKSADDVLKVINNAKKDGRSKALFQIEAQEGSRFVALPITQG

SEQ ID NO: 34084 - protein, 201 aa, Zea mays
  misc_feature (87)..(88): Xaa can be any naturally occurring amino acid
  misc_feature (131)..(131): Xaa can be any naturally occurring amino acid
  misc_feature (143)..(143): Xaa can be any naturally occurring amino acid
  misc_feature (148)..(148): Xaa can be any naturally occurring amino acid
  misc_feature (154)..(154): Xaa can be any naturally occurring amino acid
  misc_feature (168)..(168): Xaa can be any naturally occurring amino acid
  unsure (1)..(201): unsure at all Xaa locations
MWPMEEEEVFVTVRRTEHVDVTSRAVVVAAGRAAVAGPRTVRVFCDDYDATDSSGDEAEEEEKKAARRRVKRYVQEIRLERAAKEEXXEEEATAAASLGAVLPGRKRKRKPDGEASEPRFRGVRQRPWGKXYAAEIRDPWRRXWRVWXLGTFDXTAEEAAKVYDSAAXRLRGRDATTNFQAAGGPRALSQGRAGSKSAATS

SEQ ID NO: 34085 - protein, 471 aa, Chlamydomonas reinhardtii
MSAGMAYGALPKFPNFKVHKLLGKGSYGKVYKVERESDKQLYALKEADLGSMSQAERADAVNEVRLLVSITHHNVIRYNEAFLLGNKLCTVMEYAPFGDLRYYISKGAKLRTPFPEEAVWRIFLQLCKGLQALHSQNIIHRDIKPANIFLCANDLLKIGDLGIAKALTSMNFARTQIGTPCYMAPEVWSGRPYSYSSDMWSLGAVLYEMMTFRTPMEGRTMADLRNRIKGGRYTPIPAGRYSAELTNICHSLLATDPAKRPSPTSILGSSAAAKWMHILPAAGPPVARRWTSDGAPPKSGGASLMDTIVVPRDLKQLHKRLPPPSYDSDIVRPSVPPPSSSGAGGPPGVQRSSSWSQGAGIQVPAAASSGGAQGIAPKLPSLPGSKAPSRENSRAPSPDVRALQDNRKGPSGSGAPLPPLFPRVPSGGLNPAAAAAAAAVAAYGQRWTPNAPPLAFAVPRVQVPSRRVSYS

SEQ ID NO: 34086 - protein, 226 aa, Triticum aestivum
MTTNTKRAYKLQEFVAHASNVNCLKIGRKTSRVLVTGGEDHKVNLWAIGKPNSISSLPGHTSAVESVAFDSTEVFVAAGAASGTVKLWDLEEAKIVRTLTGHRSNCMSVDFHPFGEFFASGSLDTNLKIWDIRRKGCIHTYKGHTRGVNAIRFTPDGRWVVSGGEDSAVKIWDLTAGKLLHEFKSHEGQIQCIDFHPHEFLLATGSADKTVKFWDLETFELIGSTG

SEQ ID NO: 34087 - protein, 421 aa, Arabidopsis thaliana
MVIKGMRVGKYELGRTLGEGNSAKVKFAIDTLTGESFAIKIIEKSCITRLNVSFQIKREIRTLKVLKHPNIVRLHEVLASKTKIYMVLECVTGGDLFDRIVSKGKLSETQGRKMFQQLIDGVSYCHNKGVFHRDLKLENVLLDAKGHIKITDFGLSALSQHYREDGLLHTTCGSPNYVAPEVLANEGYDGAASDIWSCGVILYVILTGCLPFDDANLAVICRKIFKGDPPIPRWISLGAKTMIKRMLDPNPVTRVTIAGIKAHDWFKHDYTPSNYDDDDDVYLIQEDVFMMKEYEEEKSPDSPTIINAFQLIGMSSFLDLSGFFETEKLSERQIRFTSNSLAKDLLENIETIFTEMGFCLQKKHAKLKAIKEESTQKRQCGLSVTAEVFEISPSLNVVELRKSHGDSSLYKQVMMHSCNIS

SEQ ID NO: 34088 - protein, 418 aa, Neurospora crassa
MSSAEPFNPHSVDLDTVDPKDVVCYLNSSPNDYNGRIGLRISALFVIMATSSLTTLFPVLATRIPRLRIPRYVYLFARYFGAGVIIATAFIHLLDPAYEEIGPASCVGMSKGWDSYSWPPAIAMTAVMLIFLLDFGVEWYVEQNYECDQADVSVEKVITTCPGHSTDGANSSDEGHSSESHDDCHNSPHKPSTTGHDAHHGHQFLHSGDQDAPTPIALPTAALPTTDSHGHDTSKDTIDIESHAFLTGESPASERIFREQIAAFLILEFGVLFHSVIIGLNLGVVGEEFSTLYPVVVFHQAFEGLGIGARLSSIPFPKRLSWMPWALCVAYGLTTPIALAIGLGVATTYESAGFTASIISGVLDSISAGILLYTGLVELLARDFLFNPERTRDKTRILFMLACLFAGCILMALLGKWA

SEQ ID NO: 34089 - protein, 185 aa, Schizosaccharomyces pombe
DPYGKRVGIIGMGAIGKSFAQKILPLGCEIVYHNRNRLEAEEEKRLGASFVSFDELLSSSDVISINCPLTPATHDLISTKEFEKMKDGVYIINTARGAIINEDAFIKAIKSGKVARAGLDVFLNEPTPNKFWLECDKVTIQPHCGVYTNFTVAKTEECVLASIETFLDTGIPTNPVNGPFGMNGC

SEQ ID NO: 34090 - protein, 483 aa, Sorghum bicolor
MSSSGQYSSPRRAATATLLLALAAGSFLLLPALARGSSSSSSFEEDRISALPGQPNDGVAFDMYGGYVTVDEHAGRAFYYWLQEADRGEVEDPDTAPLLLWLNGRPGCSSVGYGAMEELGAFRVHTDGHRLLLNEYAWNKVANVLFLDAPAGAGFSYSNTSSDLLVAGDISTAHDSYTFLVKWFERFPQYKYRDFYIAGESYGGHYVPQLSQLVYRNNIGVEKPVINLKGFMVGNGLTDDRADMVGMFEFWWHHGLIADETLDTGLKVCPGSSFIHVTPECRKIWDKALEEQGHIDGYSIYTPPCDKGSPYAHRLQSRPHPLMMLPAYDPCTAFYSTKYLNLPEVQTAMHANVSGSMEYPWVVCSNLLFDNWTDAATSMLPIYRELIEGGLKVWVFSGDTDTVVPLSATRRSLAALSLPVKTSWYPWMIVGCYEHELASDMAKSRALGKDILCRGPPAETLGKEKPSAKTPSAILFLNRRSMS

SEQ ID NO: 34091 - protein, 653 aa, Chlamydomonas reinhardtii
MAKDGSKDRQFKVLKFLGKGSYGSVFLVQRLADSQTYALKEMDVRSMSQAEREDSINEIRLLASVNHPNVVCYNEAFLDGNRLCIIMEYAADGDLAKVIKKQQMMKRPLPEDMIWKYFIQVVMGLQALHSMKILHRDIKPGNIMVFDNGVAKIGDLGIAKLLTKTAAAKTQIGTPHYMGPEIWKNRPYSYTSDTWAIGCLLYELAALAVPFEARSMSELRYKVLRGTYPPIPNTFSRDLQQMVRECLDPNPDKRPTMDQILASAAVASRAKLVPHESRHPPATAGSNLVETIKVPRGNIAAIRNKLPPAQYATDMLNIGNGPGGHAQMATIEEGSEDGTTGRLPPPHQPQYQQQLPVRAPPAAAVNRVPGGMPPMPPMPKPNYPPPMKAAAAYPPPAPSAAAGGKLPQLPGINGGGMQDVNAAAAAYNARLAAAGLRPPALNAVPPPAPPSHGGASAWSYAQAPGAGRGVSESHANYGAFYHNNQNGGYTPSSAAAARAQQQQPSPWQAGNKWPPQQGQGQGQQQQQQQQQQQQQQGPQSQYQSPYISPYGGQQQQQQQQQQRQYGGGGGGGGLHLPQLAQQRPQVAANSRPPPWNYGGQARRQQSNARAAAGIAGAGARPGGHYAGDLGGGGDARVPAYPPPQWAPRPARGW

SEQ ID NO: 34092 - protein, 354 aa, Bacillus thuringiensis serovar konkukian str. 97-27
MESMFNKIFLIVALIGVPLSVLGKTLHWPQTIMFAVYCITIIALAGFMGRATESLAIVSGPRIGGLLNATFGNAVELIISIFALQAGLIEVVLASLTGSVLGNLLLVGGLSFFVGGLKYKRQSFNVYDARHNSALLIFAVVVAFVIPEIFSMKMDAGKTYQLSIGVSIIMIIMYLAALLFKLVTHRGVYQHKSDEVAHEEEPEWSKGKALLILAIATIAVAYVSEALVHTFETVAKSFGWSELFIGVIIVAIVGNAAEHASAIIMAYKNKVNIAVEIAVGSTLQIAMFVAPVLVLLSMFFAQRMPLVFTIPELVSMITAVFLTIAISNDGDTNWFEGGTLLAAYVIMGIGFYLL

SEQ ID NO: 34093 - protein, 657 aa, Sorghum bicolor
MHEGLAVVELAVGTHRPVRARTHEFVSPAHKFATRPGEEAVVDEGLKGMGIFEALGGICSGATAEEQELAADSMAGHDEGRGNTDSEGGYRGRGGKQMATLEEYEEARNLRMGDRPRSTFRVHMGEDKVCRKDWCWSVRADYILEKLPDVSGPSFVQFHGRVCRSCAGIVHMSGVDLKWSYNMALDTRTWPREDVPGLGLTDEDVSLLWRTSRRQPPPGTGVGARVLEEQDHQQREDDLIRGLPGLPPNDDVPFDMYGGYITVDEQAGRALYYWFQEADRTEVEDPDAAPLLLWLNGGPGCSSIGGGALEELGAFRVHTDGERLLRNEFAWNRAHDAYKFLVKWFERFPKYKYRDFYIAGESYGGHYVPQLSQLVYRNNIGVENPSINFKGFMVGNGLTNDRTDMIGMFEFWWHHGLISDETLESGLKICPGSSFIHIEPECQKIWDKAVEEQGNIDGYSIYTPPCDKGTPYARRRLRRSRRPLMLPAYDPCTAFYSTKYLNLPEVQTAMHANVSGIIDYPWVLCSDPLYYNWTDTPASMLPIYKELIGAGLKVWVFSGDTDTAVPLSGTRRSLAALGLPVKTSWYPWYIVSTETRVLLSSPIRSSCPPMVMTAESYAEPVVMIMVFTTGSDGHYFHLPSNQRWNFFLPPVWFYNSN

SEQ ID NO: 34094 - protein, 195 aa, Pyrobaculum aerophilum
  misc_feature (1)..(1): Xaa can be any naturally occurring amino acid
  misc_feature (13)..(13): Xaa can be any naturally occurring amino acid
  misc_feature (51)..(51): Xaa can be any naturally occurring amino acid
  misc_feature (112)..(112): Xaa can be any naturally occurring amino acid
  misc_feature (120)..(120): Xaa can be any naturally occurring amino acid
  unsure (1)..(195): unsure at all Xaa locations
XHAINIAFFDLIXPVEKTLLILKPDAVARGLVDEIISRFKKAGLKIVALKXVKASPEEIERFYPSSEEWLQSAGQKLLKAYQELGIDPRAKIGTDDPVEVGRIIKRNLVKYXTSGPNVVXVLKGNRAVEIVRKLVGPTSPHSAPPGTIRGDYSIDSPDLAAEEGRVVFNLVHASDSPSEAEREIRFWFREEEVLE

SEQ ID NO: 34095 - protein, 911 aa, Chlamydomonas reinhardtii
MALQWGSFANAGIKELVAGADPTLNIKEGTLGDRYELQREIGSGSYGQAVLATRLEDGMQVVCKQIRLFEMDDKARADTLTEAKVLAQFNHVNIVHYYECVLESGVLNIVMEYANGGDLAAAIQRRQAEKKPYSEDEIMFWFVQIVLALYHVHGRNVLHRDLKSQNIFIAEGNLLKLGDFGIARVLNSDTELARTVIGSPYYLSPEICEDRPYNRKSDVWSLGCVLYELATLRRAFDGQSLPALVVKILRGKYPPVPTRYSTPLRGLIESMLKQNPKDRPSADAILKSDFVRQHVERYAAHVMALGVGAGGEALGEGEDGAAAAAAALGLAELVAANVRPKPSPPSRATRPGAARPPRAPSTAGALTPASSGAPVSPAPGGSGGDMERGSSREVSEAETGVSTPADGSSPNKPPAAPAGGRRAAGQKLVESGWVRQQQDKLAELAGALAAQKAGGVGAEAAAGAMDATLPSAAVGGGGVSQNTAAKAKLAELKLQRDAELEAQRKANAAGEQKAAAAARRNHEEAVAVRGRAAARQKDIERNLAEQKAEMAAKARKAAALAVAIKQREEARKRELDEAAQHMSAHKEQVKAARARINKEQLSELGAQFAARLASGGGASGAGETSSGQVLVVDFTADQPSSSTPVSKASPAHLRHRSPAHGAPVAGRQSPTPAAKAPRARAAAAAGSDSEGAGPSGRGAQKPAADPPWKLRHKPKGEFPEVQIFTPFGSGAVGSAADTAAAESDAGAGNTEEDDEAGQQAAGVLEVLAQIHTVLEGDDDEGGGGHASARPSSAATADEDEGGTGRPGGAAQAAANALKVEQLRIDLEGQLGGAAFLAAYRCLRDMQAAEEADGEGAPGSSTGGGSGGGAAAGGVGVGGGGTQRELERILGPKLHLVRQVHKLITLEDAVFA

SEQ ID NO: 34096 - protein, 491 aa, Fusobacterium nucleatum subsp. nucleatum ATCC 25586
MENILKKSYKMFINGEWIDSSNGVMVKSYAPYNNELLSEFPDASESDIDFAIKSAKEAFKTWRKTTVKERARILNKIADIIDENKDLLATVETMDNGKPIRETKLVDIPLAATHFRYFAGCILADEGQATVLDEKFLSLILREPIGVVGQIIPWNFPFLMAAWKLAPALAAGDTVVLKPSSTTTLSLLVLMELIQDVIPKGVVNLVTGKGSTAGEFLKNHPDLDKLAFTGSTAVGRDIALAAAEKLIPATLELGGKSANIILDDADIEKALEGAQLGILFNQGQVCCAGSRIFVQEGIYDEFISKLVKKFENIKIGNPLDPTTIMGSQIDARQVKTILDYVEIAKQEGGVILTGGVKYTENGCDKGNFVRPTLITNVNNGCRVSQEEIFGPVAVVIKFKTDDEVIAQANDSEYGLGGAVFTKNINRALKLAREIQTGRVWINTYNQIPEHAPFGGYKKSGIGRETHKVILEHYTQMKNILIDLEEGTSGLY

SEQ ID NO: 34097 - protein, 220 aa, Trichodesmium erythraeum IMS101
MLKAILFDLDGTLANTDPLHYQTWKEILDNHGIPINHNSYKQYISGRTNPEIIQDLLPKLSTTEAEELADYKEVKFREMAKNLQPLTGLLDLIEWIKNQKLQKAVVTNAPPENAKFMLEVLKLKDTFPLVILGGEMTVGKPDPAPYKLCLEKLAISPEEAIVFEDSRSGVKSAVGAGIYTIGVASTHEPKSLLEIGASIVINDFSDHKLEETLNNWNIYR

SEQ ID NO: 34098 - protein, 406 aa, Streptomyces avermitilis MA-4680
MRRGGPSVLGIVLAGGEGKRLMPLTADRAKPAVTFGGTYRLVDFVLSNLVNADILRICVLTQYKSHSLDRHITTTWRMSSLLGNYITPVPAQQRLGPRWYLGSADAILQSLNLVYDERPEYIAVFGADHVYRMDPRQMLGEHIESGAGVTVAGIRVPRAESSSFGVIAPGSDGQTVENFLEKPADPPGLPGDPECVFASMGNYVFTTKVLIEALQRDAEDGDSVHDMGGSILPALTDRGEARLYDFSANHVPGETTRDQGYWRDVGTLDAYYDAHMDLIAERPAFNLFNRSWPIYTHSGQLSPARFNAGGIASESIISAGCLIRGQVTRSVLSPGVVVDPGAVVQGSVLHDNVHVGRGAVVRGAVLDKNVEVPPGATIGVNPGRDADLYTVSKGGVIGLGKGQRVS

SEQ ID NO: 34099 - protein, 525 aa, Chlamydomonas reinhardtii
MARSTYDDFIIKEKIGSGSYGVVFKVVRKVDKHVYAMKEIDLQGMSRKEQEECIRETRVLSSLDSDFIIRYYDSFLEKGKLYIITEYAANGNLHDYIKKQKSRLTEDLIWKLYIQILLGLNHMHSKKILHRDIKTLNVFLDEDLNVKLGDMGVAKILSTNTVFAKTIVGTPYYLSPELCEDKPYNEKSDVWALGVVLYECCTQRHPFDADNQGALILKILRGKFPPVSGYSPDICDLIKRCLTQNANRRPNTYKLLLLPSIRQKGEELGISLPDQASLALMADKNMANAGAAGKAARPKTPQGDMNAPPEVAGTSAGDDKAFVFGSTIRADGAGARPVDVSVSAVEATSGEGAAPGAAPVPVQAAWAVDDAKPKVNRPPAWGLAQQMEELAVDDGEDEDEGKNPYLGVGGDDDEDDDGEGDDDDDYDDNGEYGDEPGEGEPGWSADPTRIAHMKSAMMIQRAACLDLVGEKAFNELYALLKSNQVDEASMTDLSRLVFKIIPYDKSEVIQMMYKLLYLESQLEGQ

SEQ ID NO: 34100 - protein, 812 aa, Chlamydomonas reinhardtii
MEKYLDLTAIGQGQYGTAYRAKDKYDNQLYCIKRIPMSAKDDHAGALREAQLLDSLDHPNIIRYRESFVDKDGSLCIVTSFCEEGDLFNRIRKKAAAKEYFTEDEVMNMFVQIASAISYIHSKRVLHRDLKTQNIFIAKGGIIKLGDFGISKVLERTDSFATTVTGTPYYMAPEICTNQPYTYKSDIWSLGCVLYELCTLRHAFAADSLLSLVYQIVRGNFPPIPTDQFSNGLSDLVNRLLWRDPATRPSLSEVFKLQFVQKHLDRFKGEEQRRNLKQSTSISRRKQLLDAQPGPGYSEYDGNLTPKQKLERKKQVDRERRELEMRVAAMSANKNREQVAARKKEMIYGSNVGLPGAQVHHQPPPQERGFEDDDMPNLGSVRIDDGPRAAAPPTRPGNRSIWDVDVPEPGPSVNPYAATLPSQARQQQQQQAARPQTSQQGARASPAGSAGRPGAGAPLQRPATTQGGSRGTPGAYGGGMWDDSDDVLQGSVRGTQRTVRAGLQGTASAMDAGGGGGGNNGWTYGRNDDMPNMGTVQFTQGPGSSAFGVGARGSPARPLEYTAGNRTGASDSPLMGSVVLGNTRTMGGVGAGAGASAGRPGSAHSRGGPGGSILSAGPERPASPYTGGAPPYGHARQSPAPDARRPAAQYGTPPGGRAGGGYGAAAGGSHHGHGHHGSHGHDDEDGYSDDFEEDDDDEGVVQQRNRIIANVEDMANRGYDGRDGIAAVQERVLNTGAKHDKARMLRANCERDLGSKFSAVYDYLSRVRSQNPPPEEREVQRRLLEIVGDKSKMNGTFQVDQLVFTEQMYRDS

SEQ ID NO: 34101 - protein, 466 aa, Escherichia coli K12; identical to SEQ ID NO: 1309

SEQ ID NO: 34102 - protein, 194 aa, Pseudomonas fluorescens PfO-1
MAPTASISRAQREARNGHRGTAMLLTGLPAAGKSTLAQALHAELFSRGLQSVVLDGDGLRVGLNRDLGFTDADRLENIRRASELAALLVENGQIVILAMIAPLAELREVFARRLGEDYREVWCSAALAVCEQRDPKGHYARARRGELAGFTGVSAPYEAPAQASLVLDTGTLTVEACLDRLLTWLGESAVLPKA

SEQ ID NO: 34103 - protein, 320 aa, Lupinus cosentinii
FAHYGPQWRLRRKLSSVHMFSGKALEDFTHLRQEEVARLTSNLASSRSKAVNLGQVLNVCTTNALTRVMIGRRVFNDGNDGFDPKADEFKSMVVELMVLAGALNIGDFIPALEWLDIQGVQAKMTKLHKKFDAFLTNIVEEHKNSKIEKHQDMLSTMLSLKDGTEDGGKLTDIEIKALLLNMFAAGTDTSSSTTEWAISELIKNPNIQAKLQQELDSVVGRDRLVTEADLAHLPYLEAVVKETFRLHPSTPLSLPRIASESCEVFGYHIPKGSTLLVDVWAIARDPKEWNNPLEFKPERFLPGGEKANVDIKGNDFEVIP

SEQ ID NO: 34104 - protein, 369 aa, Triticum aestivum
MSTPGAAYYASLARKQYFCYQCNRTVLIAASAAAAGELSCPDCRGDFLEEVTVPAPTILPFPFAFPPMMPTASSPSRSSSSSTAAPPSSDLSNFLTSILDLQEGRRVRSRSGSGAASAAGTATPENEPESFDPLVFFQNYIHTLMEGGANIQVLLDDASVNLAPGLGGRAGGTSYGDYFVGPGLEQLIEQLAENDPNRYGTPPAAKSALTTLPDVVVTDAMVAAAEGAECAVCKEDFSPGDGAKQMPCKHIYHADCIVPWLELHNSCPICRFELPTDDPDYEGNKASNAQSAVGIAAAAASGSSGAAEEGGEESGEAARVVERRFNVSLAWPFGGLAGQTPQQDGNNAGAGSSSQDSGSQDGAGGSNKN

SEQ ID NO: 34105 - protein, 436 aa, Helicobacter pylori 26695
MNFQENLAALDLEYLWHPCSQMQEHQNFPIIPIKKAQGIYLYDFNDNAYMDLISSWWVNLFGHNNAYISQQLKNQIDDLEHVLLASFSHKPIITLSQRLCQLTHMDKCFYADNGSSCVEIALKMSYHAHFLKNQTRRKKLFLSLSNSYHGETLGALSVGDVKLYKDTYTPLLLKNLTTPVPKNDHEIENSLNALKRLLDKHSEEICAFIAEPLLQCAGNMHIYSARYLKQAVLLCKQKNIHIIFDEIATGFGRTGSMFAYEQCEIKPDFLCLSKGISGGYLPLSALLTHNEIYNQFYAPYEENKAFLHSHSYTGNALACACANATLDIFEKENVIEKNKALSGFIFNTLQNALKPLMEQQVVSDLRHLGMVFAFEVFIQTKERLSLAVFKKTLKKGLLLRPLNNTIYLMPPYIITHEEVKKAVAGLVEILDELRKG

SEQ ID NO: 34106 - protein, 610 aa, Pseudomonas aeruginosa PAO1
MCGLAGWVDYTRKLDDEFPAIFAMTDTLALRGPDAEGIWKHRNALLGHRRLAVIDLSGGVQPMSYRFPTGQEVTLVYTGEVYNHDALRERLRRAGHEFRTRSDTEVVLHAYLQWGERCCEYLTGMFAFAVFDGRDGHLLLVRDRLGIKPLYYARHREGLLFGSEIKSILAHPEFAARLDAVGLVDLLTLSRGTSQTPFREVQELLPGHLLSWRPNSQAKLRRYWEVRRQEHADDLQSTVQRTRELVTRALGAQLHADVPVCSLLSGGLDSTALTGIAQRIAKAEHGGDINSFSVDFVGQAEQFRSDDLRPDQDQPFALLAAQYIGSRHRTVLIDNAELVCERAREEVFRAKDVPFTFGDMDTSLHLMFGEIRRHSTVAISGEGADELFGGYGWFRDPQAVAAARFPWASRVRLPAGFIDAGFNRRCDLLQYQQASYDDGLRQVEHLAGDSPEERRMREFSHLHLKRWMVLLLERKDRLSMCNGLEVRVPYTDHELVEYVYNVPWSIKSRDGEEKWLLKRACADYVPEAVLKRRKSPYPTSANLGYERFLRGSVRRLLEDAVNPVFGIVSREFLAAELEHPEGYFNTQVSRHNLETALALEGWLRLYGLSA

SEQ ID NO: 34107 - protein, 205 aa, Ralstonia solanacearum
MHASIPVSPSLPDTQRFALAPSEAFTIWMTGLSGAGKSTLAQEMQSRLRQHGRACYVLDGDVLRDGLSSDLGFSREDRCEQVRRVAHVARILNEAGVVAIVALVSPYRADRQLAHEIIGAGAMHEVWICTPLQVCQARDPKGLYQRASAGLLPAMTGVAAPYEPPPESTLRIDTSRHDVSTCASRILDAVGIYPCMNGSQHDVRR

SEQ ID NO: 34108 - protein, 468 aa, Burkholderia sp. 383
MVVQGSGNAVTQQQRSFDDIVAREQGLRHALTSGQMAMIAIGGAIGTGLFLGSGFAIGLAGPSVLVSYAIGALIALLLMGALAEMTVAHPTAGSFGAYAEHYVGPLAGFLVRYAYWFAVVFAIGTEISAIAVFMKYWFPAVPGWYWVIGFSALLIAVNLASVTLYGTVEYAFSLLKIAAIVVFIVLGAYLVWSAPAASGVGFANYTAHGGFMPKGPWGTWVAVIVAIFSYMSIEAVAIAAGEARDPQHAVTRAFRSTVFRLVLFYLLTLSLMLAIVPWTQAGTDESPFVKVMAATHVPYAAGVINFVLLIAALSAMNSQLYVTTRMMFSLSRARLAPAVFGRLGTNGVPRAALWISTSGVAVAAVLVALAPDTAFTVMMAIAMFGALFTWLMIFVTHLRFRSRYRGPALAFRMWGHPFGSLLGAGLVAAILFTTAFTREFRMTMVVGVVFAVLLTLAYALHYRHQHAR

SEQ ID NO: 34109 - protein, 459 aa, Neisseria gonorrhoeae FA 1090
MLLDLDRFSFSVFLKEIRLLTALALPMLLAQVAQVGIGFVDTVMAGGAGKEDLAAVALGSSAFATVYITFMGIMAALNPMIAQLYGAGKTGEAGETGRQGIWFGLILGIFGMILMWAAITPFRNWLTLSDYVEGTMAQYMLFTSLAMPAAMVHRALHAYASSLNRPRLIMLVSFAAFVLNVPLNYIFVYGKFGMPALGGAGCGVATMAVFWFSALALWIYIAKEKFFRPFGLTAKFGKPDWAVFKQIWKIGAPIGLSYFLEASAFSFIVFLIAPFGEDYVAAQQVGISLSGILYMIPQSVGSAGTVRIGFSLGRREFSRARYISGVSLVSGWVLAVITVLSLVLFRSPLASMYNDDPAVLSIASTVLLFAGLFQPADFTQCIASYALRGYKVTKVPMFIHAAAFWGCGLLPGYLLAYRFDMGIYGFWTALIASLTIAAVALVWCLEKYSMELVKSHKAV

SEQ ID NO: 34110 - protein, 409 aa, Arabidopsis thaliana
MNSFSHVPPGFRFHPTDEELVDYYLRKKVASKRIEIDFIKDIDLYKIEPWDLQGKILKVFFYSFVEIELCKIGHEEQSDWYFFSHKDKKYPTGTRTNRATKAGFWKATGRDKAIYLRHSLIGMRKTLVFYKGRAPNGQKSDWIMHEYRLETDENGTPQEEGWVVCRVFKKRLAAVRRMGDYDSSPSHWYDDQLSFMASELETNGQRRILPNHHQQQQHEHQQHMPYGLNASAYALNNPNLQCKQELELHYNHLVQRNHLLDESHLSFLQLPQLESPKIQQDNSNCNSLPYGTSNIDNNSSHNANLQQSNIAHEEQLNQGNQNFSSLYMNSGNEQVMDQVTDWRVLDKFVASQLSNEEAATASASIQNNAKDTSNAEYQVDEEKDPKRASDMGEEYTASTSSSCQIDLWK

SEQ ID NO: 34111 - protein, 153 aa, Glycine max
MSIIPNLFGGRRSNVFDPVSLDVWDPLEGFPFSTANAGESSAIANTRVDWKETPQAHVFSVDLPGLKKEDVKVEVEDGRVLQISGEKTIEQEQKDDRWHRIESSTGKFIRRFRLPENAKMDQVKAAMENGVLTVTVPKEEQKKPQVKSIQISG

SEQ ID NO: 34112 - protein, 768 aa, Glycine max
MGAALLSELATEIVVPVCAVIGIVFSLVQWFLVSRVKLTPDRNGTTSSPRNNKNGYGDFLIEEEEGINDHSVVVKCAEIQNAISEGATSFLFTEYQYVGIFMVAFAILIFLFLGSVEGFSTKSQPCTYDKSKLCKPALATALFSTVSFLLGAITSVLSGFLGMKIATYANARTTLEARKGVGKAFITAFRSGAVMGFLLAANGLLVLYITINLFKLYYGDDWEGLFEAITGYGLGGSSMALFGRVGGGIYTKAADVGADLVGKVERNIPEDDPRNPAVIADNVGDNVGDIAGMGSDLFGSYAESSCAALVVASISSFGINHEFTAMLYPLLISSMGIIVCLITTLFATDFFEIKAVKEIEPALKKQLIISTVLMTVGIAIISWIALPTSFTIFNFGAQKEVKSWQLFLCVGVGLWAGLIIGFVTEYYTSNAYSPVQDVADSCRTGAATNVIFGLALGYKSVIIPIFAIAISIFVSFTFAAMYGIAVAALGMLSTIATGLAIDAYGPISDNAGGIAEMAGMSHRIRERTDALDAAGNTTAAIGKGFAIGSAALVSLALFGAFVSRAGILTVDVLTPKVFIGLIVGAMLPYWFSAMTMKSVGSAALKMVEEVRRQFNTIPGLMEGHAKPDYATCVKISTDASIKEMIPPGALVMLTPLIVGIFFGVETLSGVLAGALVSGVQIAISASNTGGAWDNAKKYIEAGASEHARTLGPKGSEPHKAAVIGDTIGDPLKDTSGPSLNILIKLMAVESLVFAPFFATHGGLLFKIF

SEQ ID NO: 34113 - protein, 566 aa, Streptomyces coelicolor A3(2)
MIVNEPVPDTFEDTPAKDRDPDWFKRAVFYEVLVRSFQDSNGDGIGDLKGLTAKLDYLQWLGVDCLWLPPFFKSPLRDGGYDVSDYTAVLPEFGDLADFVEFVDAAHQRGMRVIIDFVMNHTSDQHPWFQESRRNPDGPYGDYYVWADDDKQFQDARIIFVDTEASNWTYDPVRKQYYWHRFFSHQPDLNYENPVVQEEMISALKFWLDLGIDGFRLDAVPYLYQEEGTNCENLPRTHDFLKRVRKEIDAQYPDTVVLAEANQWPEDVVDYFGDYAAGGDECHMAFHFPVMPRIFMAVRRESRYPVSEILAKTPAIPSGCQWGIFLRNHDELTLEMVTDEERDYMYAEYAKDPRMRANIGIRRRLAPLLDNDRNQIELFTALLLSLPGSPILYYGDEIGMGDNIWLGDRDAVRTPMQWTPDRNAGFSSSDPGRLFLPTIMDPVHGYQVTNVEASMASPSSLLHWTRRMIEIRKQNVAFGLGTYTELPSSNPAVLAFLREHEDDLVLCVHNFSRFAQPTELDLSAFDGRHPVELFGGVRFPAVGDLPYLVTLGGHGFYWFRLRKDAA

SEQ ID NO: 34114 - protein, 549 aa, Escherichia coli K12
MLNQKIQNPNPDELMIEVDLCYELDPYELKLDEMIEAEPEPEMIEGLPASDALTPADRYLELFEHVQSAKIFPDSKTFPDCAPKMDPLDILIRYRKVRRHRDFDLRKFVENHFWLPEVYSSEYVSDPQNSLKEHIDQLWPVLTREPQDHIPWSSLLALPQSYIVPGGRFSETYYWDSYFTMLGLAESGREDLLKCMADNFAWMIENYGHIPNGNRTYYLSRSQPPVFALMVELFEEDGVRGARRYLDHLKMEYAFWMDGAESLIPNQAYRHVVRMPDGSLLNRYWDDRDTPRDESWLEDVETAKHSGRPPNEVYRDLRAGAASGWDYSSRWLRDTGRLASIRTTQFIPIDLNAFLFKLESAIANISALKGEKETEALFRQKASARRDAVNRYLWDDENGIYRDYDWRREQLALFSAAAIVPLYVGMANHEQADRLANAVRSRLLTPGGILASEYETGEQWDKPNGWAPLQWMAIQGFKMYGDDLLGDEIARSWLKTVNQFYLEQHKLIEKYHIADGVPREGGGGEYPLQDGFGWTNGVVRRLIGLYGEP

SEQ ID NO: 34115 - protein, 469 aa, Arabidopsis thaliana
VIKCEYAVRGEIVNIAQKLQEDLKTNKDAYPFDEIIYCNIGNPQSLGQQPITFFREVLALCSYTALLDESATHGLFSSDSIERAWKILDQIPGRATGAYSHSQGIKGLRDAIADGIEARDGFPADPNDIFMTDGASPGVHMMMQLLITSEKDGILCPIPQYPLYSASIALHGGTLVPYYLDEASGWGLEISELKKQLEDARSKGITVRALAVINPGNPTGQVLSEENQRDVVKFCKQEGLVLLADEVYQENVYVPDKKFHSFKKVARSMGYGEKDLALVSFQSVSKGYYGECGKRGGYMEVTGFTSDVREQIYKMASVNLCSNISGQILASLIMSPPKPGDDSYESYIAEKDGILSSLARRAKTLEEALNKLEGVTCNRAEGAMYLFPCLHLPQKAIAAAEAEKTAPDNFYCKRLLKATGIVVVPGSGFRQVPGTWHFRCTILPQEDKIPAIVDRLTAFHQSFMDEFRD

SEQ ID NO: 34116 - protein, 486 aa, Zea mays
PTRPGRGTFGHVYAGFNSDKGEMCAMKEVTLFSDDPKSKESAKQLCQEISLLSRLQHPNIVRYYGSETVDDKLYIYLEYVSGGSIHKLLQEYGQFGEQAIRSYTKQILLGLAFLHAKNTVHRDIKGANILVDPNGRVKLADFGMAKHINGQQCPFSFKGSPYWMAPEVIKNASGCNLAVDIWSLGCTVLEMATSKPPWSQYEGIAAMFKIGNSKELPPIPDHLSEEGKDFIRQCLQRDPSSRPTAVDLLQHPFVGNAPPLEKSSASHPLEQLTTISCRTNWKVVEHARNMSSLGLEGRYQSILQRRAAKFSLPNSDIRIQSNISCPVSPCGSPLLRSRSPQHQNGRMSPSPISSPRTTSGASTPLTGGSGAVPLNHLRQPAYRNEGFTVTSRGFDDHIPSRLVDPVHGRFIRVQQLSAGRQERVVSEADILSSQFGKMRHANVWDPHDRPLPSERSSQQCFGDHAKLKPSLDLRSGPLHPGRNHGH

SEQ ID NO: 34117 - protein, 340 aa, Bradyrhizobium sp. BTAi1
MSEVLVTGGSGFIGTHVILQLLAAGHRVRATLRTPARQSEVLAMLQRGGATDTGPLSFYAADLTRDDGWAQAATGCDYVLHIASPLPAHVPKDENELIVPAREGTLRVLRAARDAGVKRAVVTSSFAAIGYGHVRRSHPFDETDWSELDGPAVQPYPKSKTLAERAAWHFVAQEGGGLELATVNPVAVLGPVLGPDVSTSIAMVQALLAGRIPAVPRISFGLVDVRDVADLHLRAMTAPAAKGERFLAIAGPPMSLREIAELLRVRLGASGRRAPRYELPDWLARALALAVPQLRAVLPLVGRYCETSADKAKRLLGWSPRSNEEAILATAESLIGQLAR

SEQ ID NO: 34118 - protein, 158 aa, Triticum aestivum
RYVNDGRPFWQYIVSSSTGCSDLQYFEELYQYYTTEKAWHLCDPDAGRVFEALRRAGVKTAVVSNFDTRLRPLLQALKCDGWFDAVAISAEVAAEKPNPTIFLKACELLGVKPEEAVHIGDDRRNDVWGARDAGCDAWLWGSDVYSFKEVAERIGVEV

SEQ ID NO: 34119 - protein, 382 aa, Escherichia coli K12
MFKSDAARTRQRLSARKGRTLPPGRGKFPHSTTESFRNTFWLKKIMEHCFNMVDQQTTTAQTNANFLQIRFTTMSKKIAVIGECMIELSEKGADVKRGFGGDTLNTSVYIARQVDPAALTVHYVTALGTDSFSQQMLDAWHGENVDTSLTQRMENRLPGLYYIETDSTGERTFYYWRNEAAAKFWLESEQSAAICEELANFDYLYLSGISLAILSPTSREKLLSLLRECRANGGKVIFDNNYRPRLWASKEETQQVYQQMLECTDIAFLTLDDEDALWGQQPVEDVIARTHNAGVKEVVVKRGADSCLVSIAGEGLVDVPAVKLPKEKVIDTTAAGDSFSAGYLAVRLTGGSAEDAAKRGHLTASTVIQYRGAIIPREAMPA

SEQ ID NO: 34120 - protein, 393 aa, Pirellula sp. 1
MPEVSSASNHRFQPSSNRQRVNMHPWIADRTASFDSSGIRKVFDLAAKLKDPINLSIGQPDFDVPEEIQDATVDAIRSGKNAYSPTQGIAPLREKLLAEINAKYPGQNRDVFVSSGTSGGLVLSLLSMINPGDEVIFLDPYFVMYPALVSLCGGIPVTVDSYPDFRLDPAKIEAAITPKTKMILVNSPANPTGVTASEQDLRDVGDLAAKHNIALLSDEIYSRFFYDGDFASPAATNPDTIVIDGFSKSHAMTGWRVGYVHGPPEIIATMLKIQQYSFVCSPQPAQWGALRAMEISLDGHIDDYRRKRDFMVEQLSPHFELTSPGGAFYLFPKAPGTEGGTAFVERAIADGLLIIPGKIFSSRDSHFRVSFAASDDTLRRGAERLIKLAGDNR

SEQ ID NO: 34121 - protein, 74 aa, Oryza sativa (japonica cultivar-group)
VERIQREERSNGVETLQHQKWSGANFYDRVLKTVQGGISSTAAMGKGVTEEQFKGSWTGPGSESSSHVLAKSRM

SEQ ID NO: 34122 - protein, 1004 aa, Prochlorococcus marinus str. MIT 9313
MIMAKPESTSASMQQSSAQKTDCEQPRAIGEGQQAGRLLQNRLELVEDLWQTVLRSECPPDQAERLLRLKQLSEPLALEGADENSASRAIVLLIQEMDLAEAITAARAFSLYFQLVNILEQRIEEDSYLASMSSGKENNRQDKPYDPFAPPLATQTDPATFRELFERLRRLNVPPAQLETLLQEMDIRLVFTAHPTEIVRHTVRHKQRKVASLLQQFQSDPTKSTSEKESLRLQLEEEIRLWWRTDELHQFKPSVLDEVDYALHYFQQVLFDAMPQLRRRLITAMAESYPDVHIPQAAFCTFGSWVGSDRDGNPSVTPEITWRTACYQRQLMLERYVNAVQKLRDQLSISMQWSQVSTPLLESLEMDRLRFPEVYEERAARYRLEPYRLKLSYTLERLKLTQHRNQQLAEAGWQTPPEGLNPSPNLINAGEALHYKSVAEFRSDLELIRNSLVSTDLSCEPLDTLLNQVHIFAFSLASLDIRQESNRHSDALDELTRYLNLPKAYGDMAENERVQWLMEELQTRRPLIPSAVIWSPSTAETVAVFRMLHRLQEEFGSRICRTYVISMSHTVSDLLEVLLLAKEAGLVDPAAGHAELLVVPLFETVEDLQRAPAVMEALLSSPVYRNLLPRVSEQVQPLQELMLGYSDSNKDSGFLSSNWEIHQAQIALQDLANRQGVALRLFHGRGGSVGRGGGPAYQAILAQPSGTVRGRIKITEQGEVLASKYSLPELALYNLETFTTAVLQNSLVTNQLDATPSWNQLMTRLAGRSREHYRALVHNNPDLVAFFQQVTPIEEISKLQISSRPARRKSGAKDLSSLRAIPWVFGWTQSRFLLPSWFGVGTALAAEVESDADQLDLLRRLHQRWPFFRMLISKVEMTLSKVDLDLAHHYMTSLGREDYREAFNRIFEIIETEYSLTRRLVLNITGQPRLLAADPALQLSVDLRNRTIVPLGFLQVALLRKLRDQNRQPPMNDAGDGRTYSRSELLRGALLTINGIAAGMRNTG

SEQ ID NO: 34123 - protein, 426 aa, Triticum aestivum
  misc_feature (21)..(21): Xaa can be any naturally occurring amino acid
  misc_feature (275)..(275): Xaa can be any naturally occurring amino acid
  misc_feature (370)..(370): Xaa can be any naturally occurring amino acid
  misc_feature (373)..(373): Xaa can be any naturally occurring amino acid
  misc_feature (397)..(397): Xaa can be any naturally occurring amino acid
  misc_feature (405)..(405): Xaa can be any naturally occurring amino acid
  misc_feature (414)..(415): Xaa can be any naturally occurring amino acid
  misc_feature (417)..(418): Xaa can be any naturally occurring amino acid
  unsure (1)..(426): unsure at all Xaa locations
RPTLPKSSAETGNFRLTIPTXSAPTSGFSSPVGSPRRLSNADVSSTVASSHAPQAWSAPSIHTIDFLGALSPRTLPEKLTGASEPSPYSSTFRSPILMPRNTSAPPSPLPKLFPENQISRTEVNGSASLHPLPLPPSAISPMQTSFSNQPAPKVEMPSVSCQWQKGKLLGSGTFGCVYEATNRNTGALCAMKEVNIIPDDAKSAESLNQLEQEIKFLSQFKHENIVQYYGSDTIEDRFYIYLEYVHPGSINKYVQQHYGAITESVIRNFTRHILXGLAFLHGQKIMHRDIKGANLLVDINGVVKLADFGMAKHLSSAAPNLSLKGPPYWMAPEMVQATLAKDVGYDLAVDIWSLGCTIIEMFGWKTPWSXLKXPAAMFKVLHKDQQFLENLPLEGKXFLQCCFKXDPTKRPPKXXFXXPFSRIKSL

SEQ ID NO: 34124 - protein, 177 aa, Oryza sativa (japonica cultivar-group)
PGSQRAIECRAAAFYVGVPENVPVRTVNRQCSSGLQAVADVAAAIKAGFYDIGIGAGLESMSVNAMGWEGQVNPKVNEVQKAQDCLLPMGITSENVAHRYGVTRQEQDQAAAESHRRAAAATAAGKFKDEIVPVPTKIVDPKTGEEKKVVISVDDGIRPGTTASGLAKLKPVFRKDG

SEQ ID NO: 34125 - protein, 460 aa, Lactobacillus johnsonii NCC 533
MENKQNHPPKLKRSMTAGQMEMISLGGAIGVGLFMGSTSTIKWTGPSVLLAYMFVGLILYIVMRALGEMLYVSPGTGSFADYATEYISPLAGYLAEWANVFQYIVVGISEVVAATEYLKFWWPEVSVFWSGIIIIAFLLLANLASAKAYGTLEFWFAMIKVVTIVIMIILGLLVILLGVGNHGKPIGFSNLWSHGGFFTGGVKGFFFSMAIIAGSYEGIELIGISAGEVANPQEAIVKSVKSVLWRILIFYVGAIFVIVTIYPWNQLSNIGSPFVETFTKVGITAAAGIINFVVLTAALSGANSGIYSSSRMLFKLAHEGEAPKAFGKLSKRIVPDRAIVGITSGILIGFILNLIMSTMNKSMGELFVVVYSSSVLPGMVAWFVILIAELKFRKNNSHLMAEHPFKLPLYPYSNYFAFAMLLVIVVFMFINPETRISVGVGAGVLVLASLVYMLKHRNKK

SEQ ID NO: 34126 - protein, 464 aa, Lactobacillus johnsonii NCC 533
MENKKSMPKLKRSMTAGQMEMISLGGAIGVGLFMGSTSTIKWTGPSVLLAYMFVGLILYIVMRALGEMLYVNPGTGSFADYATEYVHPLAGYLAEWANVFEYIVVGMSEVVAATEYLKFWWPKVNVFWSGIIIILFLVLANLASAKAYASLEFWFAMIKVVTIILMIILGFIVIFFGVGNGGKPTGFSNLWSHGGFFTGGVKGFFFSMSIIVGSYEGIELLGISAGEVANPKKAIVKSVKSVLWRILIFYVGAIFVIVTIYPWNELSNIGSPFVTTFAKVGITAAASIINFVVLTAALSGANSGIYSSSRMLFKLAHDGDAPKTFGHISKRIVPNHAILGISGGILIGFIINMIAATINKSTQDLFVVVFSSSVLPGMIPWFVILLAELKFRRNNQDLLVDHPFKLPLYPISNYFAFLMLIVIVIFMLINPETRVSVLVGAAVLLIATIVYLFRHKKDGVNNGE

SEQ ID NO: 34127 - protein, 379 aa, Cryptococcus neoformans var. neoformans JEC21
MISRPELTLLEQLEATGVKIDTDSMDPKVAANLPIKAHDMTSNQLLTDEQLKNPENKELVEKTIRELKGANWFDVQTVLTARFAKRVIPYIQGRVLAQTTPTKAFDKDAIISHARAYDKAFQAEGISRDRYCVKVPATTAGVQAAKILNEEGIRTLGTSLFSLAQAIACSQAGMLSISPYYNEVRAHVDSSLWPDVADPATQHPMSFRVRHIRETYDRLAKETGKVQPLIKGASYITAREVMAMPELGVEHVTLLVGPMEDLCSTSRLPEYRKGGEWQVRVRSELDKPNVKWATWSAPEPSASKKRMAEMAKSDPYSDLMQKHWKMASTDVDYLADGVLDKYNEEDEVTKVRLRDALELFKGGEAESKVEIERLQKLYA

SEQ ID NO: 34128 - protein, 102 aa, Brassica napus
IPGSTHASGLLTTMQEQGKLLDFILCVGDDRSDEDMFEVIMGAKDGPALSPVAEIFACTVGQKPSKAKYYLDDTAEIIRMLEGLATSDQTASTAEVPTKDIF

SEQ ID NO: 34129 - protein, 376 aa, Arabidopsis thaliana
MAIRKEEESREEQSNSFLLDALYCEEEKWDDEGEEVEENSSLSSSSSPFVVLQQDLFWEDEDLVTLFSKEEEQGLSCLDDVYLSTDRKEAVGWILRVNAHYGFSTLAAVLAITYLDKFICSYSLQRDKPWMLQLVSVACLSLAAKVEETQVPLLLDFQVEETKYVFEAKTIQRMELLILSTLEWKMHLITPISFVDHIIRRLGLKNNAHWDFLNKCHRLLLSVISDSRFVGYLPSVVAAATMMRIIEQVDPFDPLSYQTNLLGVLNLTKEKVKTCYDLILQLPVDRICLQIQIQSSKKRKSHDSSSSLNSPSCVIDANPFNSDESSNDSWSASSCNPPTSSSSPQQQPPLKKMRGAEENEKKKPILHLPWAIVATP

SEQ ID NO: 34130 - protein, 362 aa, Sorghum bicolor
MHTVSRGEQEKNAISRSPGEYYSPWRAATTTLLLALAAVVSLLLPALAQGSSEDDRILAMPGQPNDVAFDMYGGYITVDEQAGRALFYWFQEADQTAVKDPDDAAPLVLWLNGGPGCSSIGGGALEELGAFRVHKDGERLLLNEYAWNKAHDAYTFLVKWFERFPKYKYRDFYIAGESYGGHYVPQLSQLVYRRNIGVDKPIINFKGFMVGNGLTDDRTDMIGMFEYWWHHGLISDETLARGLKVCPGTSLIHASPECKEVWDVATKEQGNIDGYSIYTPPCEKGNPYARIFERSRRQVGGWSMEYEGLTFVTVRGAGHEVPLHRPEQALFLFKQFLQGEPMPAEAKNASLIQLPSEKAHSY

SEQ ID NO: 34131 - protein, 320 aa, Psychrobacter arcticus 273-4
MGLLVDGQWQDKWYDTEASGGRFEREDAGFRNWVTVDGSAGPSGQGGFQAEANRYHLYVSLACPWANRTTIFRQLKGLEDIISMSVVHPFMGDKGWTFAEGTGVVADPIINASYLYEVYTAAEPNYTGRVTVPILWDKKTNTIVSNESAEIIRMFNSAFDDVGAVVGDFLPSDAIVEIDEINAFIYDAINNGVYKTGFATTQEAYEDAVITLFDALDTLEARLAVQRYLLGDRITEADWRLFTTLVRFDAVYVGHFKCNIRRIVDYPNLWGYLRDLYQVPGIKDTVNMDHIKAHYYTSHTTINPTGVIPAGPVIEFDKPH

SEQ ID NO: 34132 - protein, 545 aa, Glycine max
MGVEKLSLLSTTNLAVLAQANNKCSSRKHVCWRSSTTPFHLQRKPISWSVLCGFMLFGLGLISLLTGHMVSDLEWYSHRRSLYSTMDGSYRAPIDVWKSQYSKYYYGCSVRGRAYAPAVPEWMSNGYLLIGTSGGLNQQRTGITDAVVVARILNATLVVPELDHHSYWKDDSDFIHIFDVDWFISYLAKDVTIVKRVPDKFMRSMEKPPYTMRVPRKSEPDYYLDQVLPILLRRQVVQLTKFDYRLANNLDNELQKLRCRVNFHALRFTKPIQELGQIIVMRMQKMARRFIAVHLRFEPDMLAFSGCYFGGGEKERRELGEIRKRWTTLPDLSPDGERKRGKCPLTPHEVGLMLQALGFSKDTYLYVASGEVYGGEETMQPLRDLFPNIYTKEMLAEEELKPFLPFSSRLAAIDYIVCDESDVFVTNNNGNMAKILAGRRRYMGHKRTIRPNAKKLSTILAGRHQMDWDTFAKKVKSCQRGFMGEPDEMRPGRGEFHEFPSSCVCKRPYVDEELSKEVYRSPKLVAINLTAKAYSSSNGIRRGRT

SEQ ID NO: 34133 - protein, 628 aa, Neisseria polysaccharea
SPNSQYLKTRILDIYTPEQRAGIEKSEDWRQFSRRMDTHFPKLMNELDSVYGNNEALLPMLEMLLAQAWQSYSQRNSSLKDIDIARENNPDWILSNKQVGGVCYVDLFAGDLKGLKDKIPYFQELGLTYLYLMPLFKCPEGKSDGGYAVSSYRDVNPALGTIGDLREVIAALHEAGISAVVDFIFNHTSNEHEWAQRCAAGDPLFDNFYYIFPDRRMPDQYDRTLREIFPDQHPGGFSQLEDGRWVWTTFNSFQWDLNYSNPWVFRAMAGEMLFLANLGVDILRMDAVAFIWKQMGTSCENLPQAHALIRAFNAVMRIAAPAVFFKSQAIVHPDQVVQYIGQDECQIGYNPLQMALLWNTLATREVNLLHQALTYRHNLPEHTAWVNYVRSHDDIGWTFADEDAAYLGISGYDHRQFLNRFFVNRFDGSFARGVPFQYNPSTGDCRVSGTAAALVGLAQDDPHAVDRIKLLYSIALSTGGLPLIYLGDEVGTLNDDDWSQDSNKSDDSRWAHRPRYNEALYAQRNDPSTAAGQIYQDLRHMIAVRQSNPRFDGGRLVTFNTNNKHIIGYIRNNALLAFGNFSEYPQTVTAHTLQAMPFKAHDLIGGKTVSLNQDLTLQPYQVMWLEIA

SEQ ID NO: 34134 - protein, 358 aa, Staphylococcus aureus subsp. aureus COL
MTIKVGIIGCGGIANGKHMPSLQKVENVEMIAFCDVDISKAASAAEAYGTDNAKVYDDYKALLKDDTIDVIHVCTPNDSHCEITVAGLHAGKHVMCEKPMAKTTAEAQKMIDTAKSTGKKLTIGYQNRFRADSQFLHQAAQRGDLGDIYFGKAHAIRRRAVPTWGVFLDEEAQGGGPLIDIGTHALDLTLWMMDNYEPESVMGSTFHKLNKQHHAANAWGSWNPDEFTVEDSAFGFIKMKNGATIILESAWAINSLEVDEAKCSLSGTKAGADMKDGLRIHGEDMGTLYTKHVELENKGVDFYEGNEVDEAEEEAKAWIDAVVNDTEPVVKPEQAMVVTKILEAIYQSAKSGKAIYFE

SEQ ID NO: 34135 - protein, 322 aa, Sinorhizobium meliloti 1021
MKAVVMKEVGGTDVMEFVDRPEPVARPAHVVVEVAAAGVNFMDIGVRQGMAWTDIPNPKVLGVEGAGRVLAVGDGTGEFAVGDRVAWVYAPGSYAQRQSIPAASLVKIPDTVDDRTAASTMMQGLTASHFATDFYPVQPGDIALVHAAAGGVGLLLTQIIRLRGGRVIGRVSSEDKVAIARKAGAEHVIVDTDGRFADEVLRLTGGEGVNVVYDGSGPKTFKGSIEALRRSGTFCWYGPVLGGPGPLEIMNLPKSIKIGYATFMDHIHTRELLLDRTKQLFDWIEDGSITVTIGETYRLADAAGAHAAMASRATTGKLLLIP

SEQ ID NO: 34136 - protein, 322 aa, Capsicum annuum
MAHHHHHHMASLTVPAHVPSAAEDCEQLRSAFKGWGTNEKLIISILAHRTAAQRKLIRQTYAETFGEDLLKELDRELTHDFEKLVLVWTLDPSERDAHLAKEATKRWTKSNFVLVELACTRSPKELVLAREAYHARYKKSLEEDVAYHTTGDHRKLLVPLVSSYRYGGEEVDLRLAKAESKILHEKISDKAYSDDEVIRILATRSKAQLNATLNHYKDEHGEDILKQLEDGDEFVALLRATIKGLVYPEHYFVEVLRDAINRRGTEEDHLTRVIATRAEVDLKIIADEYQKRDSIPLGRAIAKDTRGDYESMLLALLGQEED

SEQ ID NO: 34137 - protein, 423 aa, Aeropyrum pernix K1
MEVLALQPTDPLEEARAQLRRAVDLLGYDDYVYEVLANPDRVLQVRVTIKMDDGTVKTFLGWRSQHNSALGPYKGGVRYHPNVTMNEVIALSMWMTWKNSLAGLPYGGGKGGVRVNPKILSPRELELLSRKYFESISDIVGVDQDIPAPDVYTDPQVMSWFLDEYNRVKRGQFFGVVTGKPVELGGLNARIVSTGYGVAVSTRVAAEKFLGGLEGRTVAVQGYGNVGYYAAKFLAEMGAKIVAVSDSRGGIYDPEGIDPEEALKVKRSTGTVANYQRGKKISTMEILELPVDILVPAAIEEVITDENADRIKAKIISEGANGPTTTAAEKILVKKGVLVLPDILANAGGVIMSHIEWVNNRMGGWITDEEALKKLEQKMVENTKTVITYWEKNLKPEENSLRDAAYMIAVERVFRAMKLRGWI

SEQ ID NO: 34138 - protein, 239 aa, Trichodesmium erythraeum IMS101
MSTQPDIHLYTASTMNGWKPLIFLEEAEVEYNLTPIDFSKKDQKSEWYMKLNPNGRIPTIVDLSNDNFVVFESGAILWYLAEKYGKFLPKEEKSRSQALQWLMFQMGGVGPMMGQAMYFQRIAEPQGHHEEFSIKRYVQESRRLLEVLDKQLEGKTYLLGDEFSIADIATYPWARSYYWAKVSVDGLENLQAWFECIDNRPRTQRALEIPKPFPAFFGKGDVATAESANADRFKTDVKS

SEQ ID NO: 34139 - protein, 445 aa, Pisum sativum
GGFSVVRKGTRKSNNDDEKSQSQSKSQSQSQVAIKTLRRLGTSNNLPRKKDGGENSTETMMKFPTMRQVSVSDALLTNEILVMRRIVENVSPHPNVIDLYDVYEDTNGVHLVLELCSGGELFDRIVAQDKYSETEASTVVHQIVAGLEAIHRANIIHRDLKPENCLFLDVGKDSSLKIMDFGLSSVEEFTDPVVGLFGSIDYVSPEALSQGKITTKSDMWSLGVILYILLSGYPPFIAQNNRQKQQMILNGNFSFYEKTWKGISQSAKNLISSLLTVDPAKRPSAQELLSDPWVKGEKAKDDQMDPEIVSRLQRFNARRKLRAAAIASVWSSTIFLRTKKLKSLVGSYDLKEDEIENLRMHFKKICADRDNATLCEFEEVLKAMKMPSLIPFAARIFDLFDNNRDGTVDMREILCGFSSLKNSKGEDALRLCFQMYDTDRSGCIT

SEQ ID NO: 34140 - protein, 470 aa, Nocardioides sp. JS614
MSRTILRDTKHLPHLGPGAAARRRILHARRVMESQPVRATTRLDSYVDRYAARTAGMTASEIRALFSVASRPEVVSLAGGMPNISGLPLDVVGGAISELVATQGPVAMQYGSGQGVPELREQICDVMRLEGIDAHPDDVVVTVGSQQAVDLVTRIFCDPGDVVICEAPSYVGALGVFKAYQCDVVHAEMDADGLVPDALRQAIAVTKAAGKRIKFLYTIPNFHNPAGVTLSAARRQEVLEICRTEDILVLEDNPYGLLGFSGEPMRALRADEAEGVIYLGSFSKTFAPGFRVGWALAPHAVREKLVLAQESATLCPPQFSQMAVSAYLSGHDWQGQIKQFREMYRERRDAMVQALDDLMPAACRWNVPDGGFYVWLTLPPGIDAKAMLPRAVTARVAYVPGTAFFADGFGSGSMRLSFCYPTPERIREGVRRLAGVLEAEMELRETFGASAPTRELEGRSGYDAPSSDLT

SEQ ID NO: 34141 - protein, 495 aa, Leptospira interrogans serovar lai str. 56601
MDLIYRSIYKRRKIMSRKTLTTAGGHPVSQNQHSLTAGPRGPVLIQDTHLIEKLAHFNRERIPERVVHAKGAGAYGTLTITQDLTKYSRASIFSKKGKQTSLFLRFSTVAGEKGSADTERDPRGFAVKFYTDEGIWDLVGNNTPVFFARDPLKFPDFIHSQKRDPVTGYKNPIRMWDYWAGSPEAFHQITILFGDRGIPDGYRFMNGYGSHTFGLWNSKGERFWTKFHFKSMQGIRNLSMEKASALAGTDPDYATRDLFEAIERKEFPKWKFCVQIMPEKEATKYKFNPFDLTKVWSHKDYPLIEVGVLELNSNPKNYFEEVEQAAFSPSNMPPGIGASPDKMLQGRLFAYPDAHRYRLGIQYQQLPVNRPKNSVNVYHRDGRTRFQCDGNYDNYEPNGFEGPVQDSSYAEPPLSISGDMDRYNSHIGNDDYSQAGDLYRLMSVEERERLTSAIASTMHNLPKPLLEANLKHFHLCDPEYGEQLAAKVGLALSRV

SEQ ID NO: 34142 - protein, 220 aa, Zea mays
MADEIDTRPASAGSRGRPAHATEDDDREEGEIAADAPSPALPAAHPLEHSWTFWFDNPQSKSKQAAWGSSIRPIHTFSTVEGFWGLYNNINHPSKLIVGADFHCFKNKIEPKWEDPICANGGKWTISCGRGKSDTFWLHTLLAMIGEQFDYGDEICGAVVSVRGKQERIAIWTKNAANEAAQVSIGKQWKELLDYKDSIGFIVHDDAKKMDKGLKNRYTV

SEQ ID NO: 34143 - protein, 477 aa, Carboxydothermus hydrogenoformans Z-2901
MRGNLLVVSNRGPFTIEENNGSLKYRPAVSGLVSAVLPAVKKIGGTWLAWAGRIAEKPAEVQAVIKDEFQFVEILLSREEVEGYYEGYANGVLWPLCHLMPEKVRMYEENYRIYREVNQKFAQKAATLLRTGTLLWIHDYHLALMPHFIRQKNPWQRIAFFWHIPFPPVELFTIQPWAEEILRGLLGADIIGFHIDDYRENFLRAVERVLKLPVNYEWGTVYYNGREVLVKAVPIGIETKNFQKEVPEITEIEQEIAGLKIFLGVERLDYTKGLKEKIQGFARFLEKNPEYRGKVKLLQVAVPTRENIDQYQTYAREVLAEAAKVNERFGDNHWQPIKILKRNYSQEELIYLYRIADALVITSLEDGLNLVAKEYIASRKEPGVLILSKRTGVARQLNAALLVNPYSPEEIALKMKEAIEMPDTLKKKSFSLLKEQVILKNNEWWLENFLGKELRLMDTGFGKYYRKRGEKKVGAID

SEQ ID NO: 34144 - protein, 563 aa, Xylella fastidiosa Ann-1
MCSIFGIFNLQPSDNLQILRHQALECSQRQRHRGPDWSGVYVDVGAILVHERLAIVDPAGGAQPLLSEDGTLALAVNGEIYNHAVLKGTLQQPYAFQTHSDCEVINALYREETPTSFLNRLNGIFAFVLWDKTTGRGLIARDPMGVVPLYWGHDQDGRLRVASEMKALVEHCSDVAQFPPGHWYDTTTGTLVKYYERPWKNYSAVEGVQVSLQELREAFERAVHRQLMTDVPYGVLLSGGLDSSLVAAVAARYARHRIETNDQSEAWWPRLHSFAIGLKDSPDLSAANVAAEALNTVHHRFEYTFQEGLDVLPEVIRHIETYDVTTIRASTPMFLLARRIKAMGVKMVLSGEGSDEIFGGYLYFHKAPNAREFHEELVRKLNALYYYDCLRANKAMMAWGVEPRVPFLDREFLDVAMRMDAQHKMVDKTSNGPQRMEKGILRAAFDGYLPPSILWRQKEQFSDGVGYGWIDGLKAHAETQVSDHALATAETRFQVNPPQTKEAYYYRSIFERFFPSPAAAETVPGGKSIACSSPAAIAWDASFATMADPSGRAVSGVHQQALL

SEQ ID NO: 34145 - protein, 359 aa, Antirrhinum majus
MGRSPCCDKVSLKRGPWTPEEDQKLLSYIQEHGHGSWRALPSKAGLQRCGKSCRLRWSNYLRPDIKRGKFSLQEEQAIIQLHAFLGNRWSAIATHLPKRTDNEIKNYWNTHLKKRLTKMGIDPMTHKPKSHDVLGCGQPKVVANLSHMAQWESARLQAEARLVRESRLVSHHYHSQLLNRATAITHPTLPPCLDVLKVWHGAWTTRPGKDIITSAMFNGFFASNNGNLESPTSILKSSDNMLNASTSVGLLHENPFITDMSYVGKPSNVYEDWVKGIMDNSNELNKIIEPIDSTHYVAHDDDSIGFPGFMEGSTNLVTSTVRTNGPDDDNVVGVFEENDINYWRNVLNVVNSPMGSPVF

SEQ ID NO: 34146 - protein, 338 aa, GIBBERELLA ZEAE PH-1
MAPIKVGINGFGRIGRIVFRNAVEHPDIEVVAVNDPFIEPHYAVYMLKYDSSHGIFKGEVGNQGNDLVVNGKTIKFYSERDPANIKWSETGADYVVESTGVFTTIDKAKAHLQGGAKKVIISAPSADAPMYVVGVNENKYDGSADIISNASCTTNCLAPLAKVINDKFGIVEGLMTTVHSYTATQKTVDGPSSKDWRGGRGAAQNIIPSSTGAAKAVGKVIPELNGKLTGMSMRVPTANVSVVDLTVRLEKGASYDQIKQVIKEASEGDLKGVLAYTEDDVVSSDLNGNTNSSIFDAKAGISLNDNFVKLVSWYDNEWGYSRRVLDLLAHVAKVDASK

SEQ ID NO: 34147 - protein, 128 aa, Brassica napus
MPGLESETSTFHVFNHDLQTQLQRYPQETAVEEHPPVGRQNSIMSLTLDEIQMKSGKSFGAMNMDELLANMWMTVEENNGGGAGAQQDGEKPTIVPRQGSLSVPVTLYKKTVQEVWFEIQNGVQQPTT

SEQ ID NO: 34148 - protein, 458 aa, Arabidopsis thaliana
MFMRFSDGVPYGGQQQQNASRRSDHVVMSVPPPKSPSSAPPRPPHFMSSGSSGDYDSNYSDQSVLPPPSPGLALGLGIYQGTFNYEELSRATNGFSEANLLGQGGFGYVFKGMLRNGKEVAVKQLKEGSSQGEREFQAEVGIISRVHHRHLVALVGYCIADAQRLLVYEFVPNNTLEFHLHGKGRPTMEWSSRLKIAVGSAKGLSYLHENCNPKIIHRDIKASNILIDFKFEAKVADFGLAKIASDTNTHVSTRVMGTFGYLAPEYASSGKLTEKSDVFSFGVVLLELITGRRPIDVNNVHADNSLVDWARPLLNQVSELGNFEVVVDKKLNNEYDKEEMARMVACAAACVRSTAPRRPRMDQVARVLEGNISPSDLNQGITPGHSNVYGSSGGSTDYDSSQDNEGMNKFRKVGLETQDLYSNPISEYDLYPSWSSTDGQTTQGKATGNIKRPGQGYG

SEQ ID NO: 34149 - protein, 238 aa, Chromobacterium violaceum ATCC 12472
MPQADFTLLFDLDGTLTDTDELHFRAFRALLAEHGRELDHDGYLRHVHGSTNEAIMRALLPGIPERHRELAERKEQLFRASVGQLRPTPGALRLFDWAQAKGAAVAVVTNAPRANAELMLDGLGLASRVDALVIGDELAYGKPHPLPYLAGLARVGGRAERACAFEDSPSGIRAAKQAGLRTFAIAGMLPEVALREAGADSVIADFNSPELWQWLERASATASLNGRLGHVLNANRRL

SEQ ID NO: 34150 - protein, 545 aa, Arabidopsis thaliana
MGNCNACVRPDSKESKPSSKPKKPNRDRKLNPFAGDFTRSPAPIRVLKDVIPMSNQTQISDKYILGRELGRGEFGITYLCTDRETHEALACKSISKRKLRTAVDIEDVRREVAIMSTLPEHPNVVKLKASYEDNENVHLVMELCEGGELFDRIVARGHYTERAAAAVVRTIAEVVMMCHSNGVMHRDLKPENFLFANKKENSPLKAIDFGLSVFFKPGDKFTEIVGSPYYMAPEVLKRDYGPGVDVWSAGVIIYILLCGVPPFWAETEQGVALAILRGVLDFKRDPWPQISESAKSLVKQMLDPDPTKRLTAQQVLAHPWIQNAKKAPNVPLGDIVRSRLKQFSMMNRFKKKVLRVIAEHLSIQEVEVIKNMFSLMDDDKDGKITYPELKAGLQKVGSQLGEPEIKMLMEVADVDGNGFLDYGEFVAVIIHLQKIENDELFKLAFMFFDKDGSTYIELDELREALADELGEPDASVLSDIMREVDTDKDGRINYDEFVTMMKAGTDWRKASRQYSRERFKSLSINLMKDGSLHLHDALTGQTVPV

SEQ ID NO: 34151 - protein, 226 aa, Triticum aestivum
TTCYAEAGCPFRNSRELFTKGPAISHPLLGGANQRPSSSPFPFFPSVLPGGGGGFFKGFSGAGWRRRTSGTPRVAGGVREQDPFFPIANISRIMKKAVPANGKIAKDAKETLQECVSEFISFVTSEASDKCQKEKRKTINGDDLLWAMATLGFEEYVDPLKIYLQKYRDMEGDSKLTSKSGEGSVKKDIIGAHSGATSSNAQAMVQHGGYAQGMGYMQPQYHNGDT

SEQ ID NO: 34152 - protein, 378 aa, Photobacterium profundum SS9
MTPPLSDKQTLPPKQTIVVKLGTSVLTGGTLKLDRAHMVELVRQCAYLRRYGHKVIIVTSGAIAAGREHLDYPELPKTMASKQLLAAVGQSRLIQEWESLFGIYGLHVGQMLLTRADLDDRERYLNARDMLIALLDNGIIPVVNENDAVATTEIKVGDNDNLSALVGILGGADKLLLLTDQPGLFTADPRNNPDAELIREVHTIDETLRKLAGGSAGGLGTGGMATKLQAADVARRAGIEVIIAAGSRPDVISDLASGESVGTRFLPLDTPLESRKRWILAGPPPAGDIVIDAGAAKAVLERGSSLLSKGISEVKGAFERGEVARIFDTNGVLLARGICRYSSRDMAMIVGKHSQEIYKVLGYEYGPVAIHRDDLVVI

SEQ ID NO: 34153 - protein, 191 aa, Cryptococcus neoformans var. neoformans JEC21
MMRNTILRSTAAMASTSFARPAVRARPVLAAARTMGAGAGVSKRGYHAKVIDHYENPRNVGNLPKGDFDVGTGLVGAPACGDVMKLQIRVGEDGVISEVKFKTFGCGSAIASSSYMTERVKGMTLDQAGAVKNTEIAKELCLPPVKLHCSLLAEDAIKSAIKDYQTKRAQRLASANATLASSSSQPQQAAA

SEQ ID NO: 34154 - protein, 418 aa, Photobacterium profundum SS9
MNLEHMGKAAQEAAFELATVATAQKNQALAIIADELEANKDAILAANAKDINAARESGMTDALIDRLLLNEERLTGIANDVRNVISLNDPVGAELDSRVLENGMRLSRRRVPLGVVGVIYEARPNVTIDIAALCLKTGNASILRGGRETFHSNVELVKVIQVALKKADLPAASVQYIEKPDRELVSQLLRLDQYVDMIIPRGGAGLHKMCKENSTIPVIIGGFGISHIYVDHSADISRSIDVVENAKAQRPSACNALDTLLVSEKVAETFLPRLAERLNKSNVEFVADDAAYSFLEGKAATLRHAADGDFDTEWLSFTLGVKVVADVAEAIAHMRKHNASHSDAILTNDIQSAERFVNAAGSAAVYVNASTRFTDGAQFGLGAEVAVSTQKLHARGPMGLEELTSYKWVGQADYLVRP

SEQ ID NO: 34155 - protein, 568 aa, Psychrobacter arcticus 273-4
MHKQNILNRRRFLTGSSAVLGASLLPTIASSALGHSSRSGNQGATINSDQNTHKVPVLTGKEFDLYVRKQSAIVNGKKSMATLINDSLPAPTLKMREGDTVVIRVHNQMDESTSIHWHGLLVPFEMDGVPGISFDGIPANSTFTYKFELKQSGTYWYHSHSGFQEQTGMLGAIVIEPKGRERHPIDEDHVIVLSDWTSRNPHNLLKLLKQRSDFDNYHLPDFKKLLSDIAETDMKTAFDKRKMWNQMRMMPTDFTDLSGEKTFTYLINGKTTAANWAQIVKAGQRVKLRFINASAQTIFDVRIPGLKMTVVATDGIDVAPVSIDDFRIGVAEIYDVIVTPTKDAHTIFAQNIDRSGYVAATLATKEGARAATPAMDKIEWLTMADMMGAMGADGYKAKHAKTEYDFKSDMRVDSPRMNLDDPGINLRKINREVLNYSQLRSVDEAIFAEQRPPTREIELHLTGNMERYIWAFDGVKFSEATPVNIKPGERVRITLVNDTMMNHPMHLHGMWSDLRMPNGEFQVRKHTIMVQPAQKISFDVTGEAGRWAWHCHLLYHMEAGMFREVAVI

SEQ ID NO: 34156 - protein, 445 aa, Zea mays
MREILHIQGGQCGNQIGAKFWEVICDEHGIDATGRYAGDSDLQLERVNVYYNEASGGRFVPRAVLMDLEPGTMDSLRSGPFGQIFRPDNFVFGQSGAGNNWAKGHYTEGAELIDSVLDVVRKEAENCDCLQGFQVCHSLGGGTGSGMGTLLISKIREEYPDRMMLTFSVFPSPKVSDTVVEPYNATLSVHQLVENADQCMVLDNEALYDICFRTLKLATPTFGDLNHLISATMSGVTCCLRFPGQLNSDLRKLAVNLIPFPRLHFFMVGFAPLTSRGSQQYRALTVPELTQQMWDAKNMMCAADPRHGRYLTASAMFRGKMSTKEVDEQMLNVQNKNSSYFVEWIPNNVKSSVCDIPPKGLRMSGTFVGNSTSIQEMFRRVSEQFTAMFRRKAFLHWYTGEGMDEMEFTEAESNMNDLVAEYQQYQDATADEEYEDEDEEEAVSE

SEQ ID NO: 34157 - protein, 146 aa, Arabidopsis thaliana
  misc_feature (24)..(24): Xaa can be any naturally occurring amino acid
  misc_feature (59)..(59): Xaa can be any naturally occurring amino acid
  misc_feature (88)..(88): Xaa can be any naturally occurring amino acid
  misc_feature (117)..(117): Xaa can be any naturally occurring amino acid
  unsure (1)..(146): unsure at all Xaa locations
LTNPPPPLHYDPSARSFHNERSLXRLRQKASSLPNVRIEEGTVKPLIQESGVIKGVTYXIVAGEETTDFAHLTAVCDGCYSNASLTSXVTNNAEVLAYRVGLIFKELASLKTTRQVXMTMTEPSFTMLDQNHQDRRLDVIFEDRAN

SEQ ID NO: 34158 - protein, 434 aa, Bacillus thuringiensis serovar konkukian str. 97-27
MVVEFTKSEALHKEALEHIVGGVNSPSRSFKAVGGGAPVAMERGKGAYFWDVDGNKYIDYLAAYGPIITGHAHPHITKAITTAAENGVLYGTPTALEVKFAKMLKEAMPALDKVRFVNSGTEAVMTTIRVARAYTGRTKIMKFAGCYHGHSDLVLVAAGSGPSTLGTPDSAGVPQSIAQEVITVPFNNVETLKEALDKWGHEVAAILVEPIVGNFGIVEPKPGFLEKVNELVHEAGALVIYDEVITAFRFMYGGAQDLLGVTPDLTALGKVIGGGLPIGAYGGKKEIMEQVAPLGPAYQAGTMAGNPASMASGIACLEVLQQEGLYEKLDELGAMLEKGILEQAAKHNIDITLNRLKGALTVYFTTNTIENYDAAQDTDGEMFGKFFKLMLQEGVNLAPSKYEAWFLTTEHTKEDIEYTIEAVGRAFAALADNK

SEQ ID NO: 34159 - protein, 203 aa, Sinorhizobium meliloti 1021
MKLYHHPLSGHAHRARLFLSLLGIEHELVVVDFARREHKQADFLKLNSFGQVPVLDDAGTIISDSNAILVYLAKKTGRPDWLPEDAVGAAAVQRWLSVAAGQIAHGPAQARLINVFKAPYRPEEVIPRSHAILALIEQELEGRGWIAADRPTIADVALYSYVARAPEGDVDLQPYPEIRAWLARIEALPGFVEFEKTPVGLAA

SEQ ID NO: 34160 - protein, 426 aa, Frankia sp. CcI3
MRGRTGRWSRIGRGAAWACRCGSGTPNGSGSDDRGVRRGGPQHRAGRVDALGCVRRPRPLCVRAVLMGMAGASGGYGRSVSRLTGWISGIVAAAAMLVGATGCGTGGGPGSPTADRAAAADRAGLGAVAGIVSDVEPSVVTILVGNELGSGIVYRADGVIVTNQHVIAQASGGKAEVAFADGRRVAGRVQAADEISDIAVVKVNRTGLPAATFRKDLPQVGELAVAIGSPLGFENSVTAGIISGVNRNLPVSGQQGGQGRPLVDLIQTDAAISPGNSGGALLDSQGRVVGINEAYIPPSTGASSLGFAIPSATAVDAVEQLLRTGTVKHAFVGVQLATLTSAIAERLGLDVRAGALVLAVVRGGPAGKAGVLPGDVIRSFNGKSVASAGEFSARLREVSPGDMVTLGVHRDGRDHTVQVRVSDRPG

SEQ ID NO: 34161 - protein, 621 aa, Magnetospirillum magnetotacticum MS-1
MCGIAGLSAARPEILDEMVRRLAHRGPDGHGTFVCERTGFGLAHARLAVIDLTEGGRQPMHSPCGRWTIAFNGEIYNHAELRLELEGRGHTFRSSSDTEVLLALLAEKGEAALERLVGMFALALLDRADGSVLLARDRVGIKPLVWAGLPGGGLAFASEIKALKAVPGVDLSLDREALSQFLACLYVPAPYSIHAGIRKLAPGHLLRWKPGAAPEIACWWRPAFTAERALSVDDATEELMPALRDAVRSCMVADVPVGCFLSGGIDSSVIAALMAEARREQGASAPASFTMTFDEAAYDERVAARAVSDHVGTLHTELPASARLVDGLERMIAAFGEPFGNPTALLIGDLSAKARQHVTVALVGDGGDEVFGGYPRYQGGLLAAKWRKIPAFLRNGLIEPIVALLPESTSGRHTWRRIREFVAGAGLSDAEMYASWVEYFDPAQRRALLGGGTPPRPVADIYRATGRVHPLDAMQETDLLSFLPGNLMAYGDAMSMMHALELRLPLLDHRLIERVQAISAATRFQAGKKTLLKAAARRLLPAEIVDRPKLGFNPPMGLWLKNELAPMVAERLIPARMADLGLEWKGVEALLAEHRAGRRDLSLPVWALLVLERWQGLEASA

SEQ ID NO: 34162 - protein, 705 aa, Sinorhizobium meliloti 1021
MAKKPSAPNNTKPATIHDQKATRGNGGELHQIAEGDTPVLTTAQGGPVADDQNSLRAGERGPTLIEDFHFREKIFHFDHERIPERVVHARGYGVHGFFETYESLAAYTRADLFQRPGERTPAFVRFSTVAGSKGSFDLARDVRGFAVKIYTKEGNWDLVGNNIPVFFIQDAIKFPDVIHSVKPEPDREFPQAQSAHDNFWDFISLTPESMHMIMWVMSDRAIPRSFRFMEGFGVHTFRFVNAKDESTFVKFHWKPKLGLQSVVWNEAVKINGADPDFHRRDMWQAIQSGNFPEWDLHVQLFDQDFADKFDFDILDPTKIIPEEVLPTKPVGRLVLDRMPENFFAETEQVAFMTQNVPPGIDFSDDPLLQGRNFSYLDTQLKRLGSPNFTHLPINAPKCPFQHFQQDGHMAMRNPVGRVNYQPNSWGEGPRESPMKGFRHFPSEEQGPKLRIRAESFADHYSQARQFFISQTPPEQRHIADALTFELSKVETPVIRERMVAHLLNIDETLGKKVGHALGLETMPKPADAAVATRQDLDPSPALSIIQRGPKRFEGRKLGILATDGADGALLDALIAAVEKEKAAFELIAPKVGGFTASDGKRIAAHQMLDGGPSVLYDAVVLLPSAEAVTDLIDVATARDFVADAFAHCKYIGYAGAAVPLLERAGIAELLDEGTIELTDAASAAAFLTEIGKLRVWGREPSVKLK

SEQ ID NO: 34163 - protein, 438 aa, Polaromonas sp. JS666
MLTFEENELLCRVEGSAPMGQLMRRHWTPVCLIEEVSEPDGTPIKAQVFGEDLVVFRDTNGRVGVMDEYCPHRRVSLVFGRNEDCGLRCLYHGWKMDVEGNVLEMVSEPAASGMVQKVKHLAYPTREWGGFVWAYMGPPDTLPEFEPPAWAPTADTQVTIAKVIIPCNWAQILEGAIDSAHSSSLHSSDMVPARVDTAKATDTNWLRPSTDKAPRLQVERGSYGFRYAAIRRPISNAATSDYVRSTVFVAPATALIPPNNLYNVANINVPMDDTHTAFYFIAWGHPSQTPETATWRKFLGQQIGIDLDENYMPLRNRGNHFWQDRAAMKAGNFTGITGFPNQDIAMWVTMGPIADRTHERLGASDLAVVEFRKQMLEAVRAFQAGETAIGTGDARVPASVCAFQAIVPKTTDWRAFPATHVWDSSEPALEPSYSTSAQ

SEQ ID NO: 34164 - protein, 649 aa, Wolbachia endosymbiont strain TRS of Brugia malayi
MSTINNSEDKKKIIRDLVTKSIKKGGFITFDDINDKLSDENLSSDFIDDTISLLQDSGINILESSEDEEEAPSNSDDSKLDDDDALSNTTTTLVQNDDPVRVYLQDMSSVKLLSRTDEIEIAKKIESEKHNMLRAIIETSVTLKMIKAWRDDLSSGSLLLREIIDLDAIYNSDFNAIPKEESEESIEDDKDSENVSEGTKDDEYCEDDEIDSKKGNDEKENSNEDINSANLNVSILEMENDLLPKVIVALDEIITLADEALTLRKDPSGGLRYQNLYDQIWSIVLQIKLSDTAVAKITQKLYNINRSIMLEEANLISEAKKYNIDRESFLKVYADVLLRYKLEEISSLKSSENQFCFTGELKNKFVKFIDDNFEHIADTLNNIKQHIQEDNVQEFKELIKRTQKHEREVSEAKQGMIKANLRLVVSIAKKYSNRGLALLDLIQEGNIGLMKAVDKFDYKRGYKFSTYGTWWVRQSITRAIPEQSKVVRIPVHMVEIISKINRALRKLTHEMGREPTLEELSMELGMPLERIRKVMKIARDPVSLDAPTGKDDSSTFGDCIEDKRVSKPEDAAILTDLRCITTNLLATLTPKEERIIRMRFGLGKDCKEHTLEEIGCIFKVTRERIRQVESKALRKLKHPCRARKLRGFF

SEQ ID NO: 34165 - protein, 555 aa, Geobacillus stearothermophilus
MKKTWWKEGVAYQIYPRSFMDANGDGIGDLRGIIEKLDYLVELGVDIVWICPIYRSPNADNGYDISDYYAIMDEFGTMDDFDELLAQAHRRGLKIILDLVINHTSDEHPWFIESRSSRDNPKRDWYIWRDGKDGREPNNWESIFGGSAWQYDERTGQYYLHLFDVKQPDLNWENSEVRQALYDMINWWLDKGIDGFRIDAISHIKKKPGLPDLPNPKGLKYVPSFAAHMNQPGIMEYLRELKEQTFARYDIMTVGEANGVTVDEAEQWVGEENGVFHMIFQFEHLGLWKRKADGSIDVRRLKRTLTKWQKGLENRGWNALFLENHDLPRSVSTWGNDREYWAESAKALGALYFFMQGTPFIYQGQEIGMTNVQFSDIRDYRDVAALRLYELERANGRTHEEVMKIIWKTGRDNSRTPMQWSDAPNAGFTTGTPWIKVNENYRTINVEAERRDPNSVWSFYRQMIQLRKANELFVYGAYDLLLENHPSIYAYTRTLGRDRALIIVNVSDRPSLYRYDGFRLQSSDLALSNYPVRPHKNATRFKLKPYEARVYIWKE

SEQ ID NO: 34166 - protein, 230 aa, Chromobacterium violaceum ATCC 12472
MSQADFSLLFDLDGTLVDTDILHFGAYQTLLADHKRSITMQIYKERIMGAPNDAIMRELFPDLSKDSHRRLAERKEELFRAAIGKLEPTPGALALFEWAEARRVPIAVVTNAPRTNAERMLAGLDLLGRIDALVIGEELPRGKPDPLPYLTGLQRLNGRPERALAFEDSLSGVRAASAAGIHTFGVGAALPAESLRGAGADEVIADFTAAELWRRLDALELSAAAEESGA

SEQ ID NO: 34167 - protein, 231 aa, Escherichia coli
MFRKLAAECFGTFCLVFGGCGSAVLPAGFPELGIGFAGVALAFGLTVLTMAFAVGHISGGHFNPAVTIGLWAGGRFPAKEVVGYVIAQVVGGIVAAALLYLIASGKTGFDAAASGFASNGYGEHSPGGYSMLSALVVELVLSAGFLLVIHGATDKFAPAGFAPIAIGLALTLIHLISIPVTNTSVNPARSTAVAIFQGGWALEQLWFFWVVPIVGGIIGGLIYRTLLEKRD

SEQ ID NO: 34168 - protein, 443 aa, Xylella fastidiosa Ann-1
MTNSAPDIVSISKPALLLDVGRWAPVCVVLFVAFWPLPGLAATVLTLSALLASYYLIRYRFRGGTQLLDSPAWALTSVLFMAYWLPQVVSLFGALELSESLLKVATDLRYLPFMWLCAIAVGGPERRERTFKGLAVIGLIWTLDALAQAVLRTSPLFWSLNQLKQAISGYGFCSTQQMMLADRLSGIFGPCNLKLGQTLATLSPFVLFAMQRRGVALWLLVVAVLGIVLLLAGSRASWITYGLILMLSGWRVLGIRRLLGMGALFLPLVLAVIAFSPQTRERIDRTAAVFADHGAGVDQALSGRSQIWQAALCMIQAHPLSGVGVRGFRDAYPACNPTPERIPAWGAGPALHAHQIVLEILSETGVIGLLLWIAGAAMAWRAWCYATAAARDRARPAMISLLATVFPFNTHLAFYSSFWGALMLMLAGLYAGALLQNGVIKKT

SEQ ID NO: 34169 - protein, 305 aa, Brucella melitensis 16M
MGGFASIGECMIELSGNEGDQWRMGFAGDTLNTAWYMRALTDKSYPVEYVTAFGEDSFSQKQRVFLTSNGIGIAHSPVIGGLHPGLYAITLDGAERSFTYWRSNAAARRLACDRDALEKSLAGRDMIYFSGITLAIILPEHRATFFDILHQCRAAGSRIAFDPNFRQQLWPDRKAAREIISNAMGIADIALPTFPDEQALFGDRDAAACAKRIAALGGGEIVVKDGTEPALVAAGGECTLVPSAAAQAIDTTGAGDSFNGAYLAARLNGLAPVEAARKAHLVAARVVEIRGALAPMETARATFAG

SEQ ID NO: 34170 - protein, 944 aa, Cryptococcus neoformans var. neoformans JEC21
MSSLASAPPTASIPASDSYNSPVQSSGPGLSNGNSTPSKWKSVFKLGRTATIGRGKENRSALGGESFVLDNKEQQSFAGEVSPAVPTEPYLPPRKTQLRAHTDPYPPKSPSVKNNPGSVSVEHFDSKVLHEEGMPKTREEGSSESFNVHLNSSNGNLQTTSTSGEQSRPYSSVTDSASASTTERTSHSSGGHFLPGDGSLHGVASSNTYGTASTRSPTGGPLGIGNLKSRFFSAPLSAPAGKNKHDKSKSEKYRGLGKVATDFPQSTAPPSSAGGASSSGGGRKKSDGSSSLSSRGAASPRTPAKSKREPSANSSRRMPFGQTNDNGSNSGSVAARFLRRVVSAPNTKALFSNNLFSNAPDVPPLPAPKNQPNSSTSSKEKSSSPVVIVGNSGGHIDLTSSPDSDHPPSISPLSNSSTMYTSQTSHTPSASASATPTPSPLKQKNHFLSPTASPSPGQGSGLSAKGTRASRSLTTGTAPVLKNIRQLQGYSGSSPGGGGYMDGESRHKQVFKRTYSSNSIKTKQVEVTASSFQKIKLLGKGDVGKVYLVREKKTDKLFAMKVLSKKEMIKRNKIKRALAEQEILATANHPFIVTLFHSFQSQDYLFFVLDYCMGGEFFRALQTRPGKCLSEEHAKFYAAEVTAALEYLHLNGYIYRDLKPENILLHQSGHIMLSDFDLSKQSGEAGGAPAAIRHGGPNGQTILVDTRSCIADFRTNSFVGTEEYIAPEVIKGHSHSSAVDWWTLGILVYEMIFATTPFKGPNRNATFANVMKNEVLFPESVPVSSNCKSCIRKLLIKDENKRLGSASGASEVKQHKWFASVNWGLLRNMTPPIIPEESNGIDTINFRPLRESKSIDFDRDDITTDIIHAKAGSPSVSGNSTPGMLTPKELVQTTSSSSPIGGGAGGTSGHSSSAMPIPGSMRGYDKEKNPFGEFSSVTRDFGEC

SEQ ID NO: 34171 - protein, 428 aa, Clostridium tetani E88 [sequence omitted]

SEQ ID NO: 34172 - protein, 279 aa, Clostridium tetani E88
MFIIKRGLIMERMQFNRKEYLKDVKNIVVKVGSSTLTYENGLLNLFHIEHLVRQLVDLHNRGYNVILVSSGAIGAGVGKLGLSEKPKSIPEKQAAAAVGQGILLHTYEKIFAEYGKTIGQILLTKEDMIDEVRSCNATNTFNALLDKRVIPIINENDAVVVDEIKVGDNDTLSAFVSKLVKADLLILMSDIEGLYSCDPRINNDAELINFVEKITKDIISCAGGAGTDLGTGGMATKIKAAKIATSAGIPMLIVNGATNEVLQDVVEGKSVGTWFNAIK

SEQ ID NO: 34173 - protein, 449 aa, Manihot esculenta
MGKEKVHINIVVIGHVDSGKSTTTGHLIYKLGGIDKRVIERFEKEAAEMNKRSFKYAWVLDKLKAERERGITIDIALWKFETTKYYCTVIDAPGHRDFIKNMITGTSQADCAVLIIDSTTGGFEAGISKDGQTREHALLAFTLGVKQMICCCNKMDATTPKYSKARYDEIVKEVSSYLKKVGYNPDKIPFVPISGFEGDNMIERSTNLDWYKGPTLLEALDQIQEPKRPSDKPLRLPLQDVYKIGGIGTVPVGRVETGILKPGMVVTFGPTGLTTEVKSVEMHHEALQEALPGDNVGFNVKNVAVKDLKRGIVASNSKDDPAKEAANFTSQVIIMNHPGQIGNGYAPVLDCHTSHIAVKFAEILTKIDRRSGKELEKEPKFLKNGDAGFVKMIPTKPMVVETFSAYPPLGRFAVRDMRQTVAVGVIKSVEKKDPSGAKVTKSAAKKGGK

SEQ ID NO: 34174 - protein, 612 aa, GIBBERELLA ZEAE PH-1
MPSQKNSNGTGQVSHRLRNFFRMNTGGSTGSASSDKEKDKDKEKNSASTTPDPSKPRHTKFFSNTVGRLRAHTVASEGNQLEEAMSPTAHANPYFAHQGQPGLRHHNSDSVPPSPPDTPSLKVHGPDGTPATDQTTSETKEELARRLRRVASAPNAQGLFSKNDPNNERPATAELGKDPLLTSSGALGLIEPAKTPQNEEMPTHANPEDILAALPAPNMSMAFRRTYSSNSIKVRNVEVSPSSFDKIKLIGKGDVGKVYLVREKKSSRLYAMKILSKKEMIKRNKIKRALAEQEILATSNHPFIVTLYHSFQSEDYLYLCMEYCSGGEFFRALQTRPGKCIPEEDARFYAAEVTAALEYLHLMGFIYRDLKPENILLHQSGHIMLSDFDLSKQSDPGGKPTMIVGKNGARTDALPTIDTRSCIANFRTNSFVGTEEYIAPEVIKGSGHTSAVDWWTLGILIYEMLYGTTPFKGKNRNATFANILREDIPFPDHAGAPQISKKLLIKDENRRLGARAGASDIKAHPFFRTTQWALIRHMKPPIVPHAGRGVDTVNFRNVKESESVDLSGSRAMNLKGVPLDSGLATPGGEIADPFLEFNSVTLHHDGDDDHHR

SEQ ID NO: 34175 - protein, 486 aa, Candida albicans SC5314
MRSYKSSITDENELTKQRLRAKSIANLSSNHTTAGQPSTSSQHREALTDLTSQENKNHPRVKLTQTNTNHHRNSSSSSNKIQIYQQIEQKKTDIHQFKKPRLEKVLLNDDDDETDDEFDDEEDKENRYHDLELNEDDSKHQLISEAFETIDDRGISEGENDTAQEARERLEEETQSHTQDMRSIYGVHVPMQPMWNNAIINELKYVIQKYSRNTLDENDEDTYDTTMVAEYSPEIFNYLHELENKFTPDPNYMDFQDDLKWEMRAVLIDWVVQVHARFNLFSETLYLTVNYIDRFLSKRRVSLSRFQLVGAVALFIAAKYEEINCPTVQEIAYMADNAYSIDEFLKAERFMIDVLEFDLGWPGPMSFLRRISKADDYDYETRTLAKYFLEITIMDSKFVASPPSWLAAGAHYISRILLGRGEWTELHVFYSGYTEKQLQPLADVLLENCRHAEINHKAIFEKYKERRYRKSSLFVQEYFRHIMSQS

SEQ ID NO: 34176 - protein, 845 aa, Ralstonia solanacearum
MNPSTAPKTMKFGFIAHPTSVALKRHVKIVDLLERTIAEQDRGYRDDRWQWRNLVPFADFGRIVSAQGAVCEGILHYMPLTAEEMLSQPRAIAQRVVDAVESLKDQGAQVVGLGGFTAIVGNRGLQTLERTGIPVTTGNSLTAYAAYRNVLESMDRLGVEPADTEVAVVGYPGSIALVIAKLLAGHGCRLCLVHRGSEAQGRQGLAYLPEPMHAQVRLSNDIEHCYEHVQFYVAATSTGGLIDPYRLRPGSVVVDAALPRDVKPYRKDRNDILIIDGGLVSASSALRFGAESMGLAPKKFLNGCLAETLILGLEGRAEAFSIGRELPEDKVLEIGRIAELHGFSPSPMASYGEPVKDRHFAALRPFHRPRTQSPAGLEGESLREHALRSFGEHINPILRDFYAFNHIERVFQHGRGCTLTDINGQAFLDFVAGYGCLNTGHNHPRIKAALLDYLQREHPTFVQYVSVPLQTSQLAQRLSELAPGRMERVFFSNSGTEAVEAALKLALAAMSKPRVLYCDNGYHGKTLGALSVTGRDKHRTPFKPLLPRCDAIPFGDADALEAALQTGDVGAFIVEPIQGEGGVIIPPDGYLAKVRQLCSAYDCILILDEIQTGLGRTGKMFACEWEGVEPDILILSKSLSGGAVPIGATLSRKAIWDRAYGNIDTFALHTSTFGGGNLAAAAGLATLDVLAEEDLAGNAARVGESLRHQLTAATRDYPFIREVRGRGLMIAIEFRHSYAGGIEAFIREFANRMPGDAAATYRMLSGKARQHIRAAIEEVEKSFEEMFVLRFVTKLSQEYGILTFVTANNNRVMRIQPPLVLNEDQAQSFVDAFARVCHDMSTFLD

SEQ ID NO: 34177 - protein, 130 aa, Arabidopsis thaliana
  misc_feature (60)..(60): Xaa can be any naturally occurring amino acid
  misc_feature (96)..(96): Xaa can be any naturally occurring amino acid
  unsure (1)..(130): unsure at all Xaa locations
LNAHATADPGFRGASADLASSKMTLRKAFGDFHQATPEERYHKFGVREHGLRPSCNGIAXLHSPGLNAYCATFFVFTDYMRSAMGISTLSEAGVIXVMTHESIGLGHDGPTHHPSDHIANFRAMHNTLMF

SEQ ID NO: 34178 - protein, 350 aa, Zea mays
  misc_feature (68)..(68): Xaa can be any naturally occurring amino acid
  misc_feature (77)..(77): Xaa can be any naturally occurring amino acid
  misc_feature (131)..(131): Xaa can be any naturally occurring amino acid
  unsure (1)..(350): unsure at all Xaa locations
MYTLPVRATTSSIVASLATPAPSSSSGSGSGRPRPRLIRNAPVFAAPATVVKRDGGQLRSQTREIERXRKGGHPPAXGDKRGGERGQRRGGEEEENEQLPLPSEKKGGASEGEAVHRYPHLVTPSEPEALXQPPPPPSKASSKGMDPTVERLKSGFQKFKTEVYDKKPELFEPLKSGQSPRYMVFACSDSRVCPSVTLGLQPGEAFTVRNIAAMVPAYDKTKYTGIGSAIEYAVCALKVEVLVVIGHSCCGGIRALLSLQDGAPDTFHFVENWVKIGFPAKIKVKKDHASVPFDDQCSILEKEAVNLSLENLKTYPFVKDGLANGTLKLVGGHYNFVSGEFLTWDNKQPS

SEQ ID NO: 34179 - protein, 299 aa, Escherichia coli
MSQNTLKVHDLNEDAEFDENGVEVFDEKALVEEEPSDNDLAEEELLSQGATQRVLDATQLYLGEIGYSPLLTAEEEVYFARRALRGDVASRRRMIESNLRLVVKIARRYGNRGLALLDLIEEGNLGLIRAVEKFDPERGFRFSTYATWWIRQTIERAIMNQTRTIRLPIHIVKELNVYLRTARELSHKLDHEPSAEEIAEQLDKPVDDVSRMLRLNERITSVDTPLGGDSEKALLDILADEKENGPEDTTQDDDMKQSIVKWLFELNAKQREVLARRFGLLGYEAATLEDVGREIGLTR

SEQ ID NO: 34180 - protein, 337 aa, Saccharomyces cerevisiae
MLAELSHRELIKLAQKRCIPPLLPKFHKGQSGGRVCIIGGCEDYTGAPYFSANATALMGCDLTHVICEYNAGTVIKSYTPNLMVHPYLRMSNTKLDVDMDEQRKKINSLLDRIHVVVIGPGLGRDPLMLKSIKDIIRYILEKHEGKIPLVIDADGLFLVTQDSEVKEMLKSYPKGRVILTPDVVEFKRLCDAIGKKGDSHSEMGSLIAQELNCIVVEKGQSDKIFSPDSEKDMLTNSEEGSNKRVGGQGDTLTGAISCMLAFSRAMYDFKICEQEEKGESSNDKPLKNWVDYAMLSCYAGCTITRECSRLGFKAKGRAMQTTDLNDRVGEVFAKLFG

SEQ ID NO: 34181 - protein, 238 aa, Arabidopsis thaliana
  misc_feature (18)..(18): Xaa can be any naturally occurring amino acid
  misc_feature (132)..(132): Xaa can be any naturally occurring amino acid
  misc_feature (182)..(182): Xaa can be any naturally occurring amino acid
  unsure (1)..(238): unsure at all Xaa locations
MDIEQKQAEIIDQLVKRXSTCKSEALGPLIIEATSHPSLFAFSEILALPNVAQLEGTTDSVYLDLLRLFAHGTWGDYKCNATRLPHLSPDQILKLKQLTVLTLAESNKVLPYETLMVELDVSNVRELEDFLXINECMYSGIVRGKLDQLKRCFEVPFAAGRDLRPGQLGNMLHTLSNLLNTXQNLLISIQDKIKWADNMSDMDKKHRKEAEEGVEEVKKSLFMKVSRAWSSIGFTFPY

SEQ ID NO: 34182 - protein, 198 aa, Aeropyrum pernix K1
MIVRTCCCGVSIMPPKAVAKTLPRRGGLFTGVTDNLAALMIGLKYFVNPRRFSIYYPKEYPELRQGYRGFIILNKAKCISCAACARICPSAAMKMIRVPVPHPKEPEKKVTKQFPVINYQRCIFCGYCVDICPTEALYHVNYHDIVYDNLAEMFWDLETFQKEPEYKTALEGTPVRLLIHEEYGLVKIPARGVREDGE

SEQ ID NO: 34183 - protein, 439 aa, Fusobacterium nucleatum subsp. nucleatum ATCC 25586
MIIFCLLIFKEEFRMSKETLNPLESGQKQVKKACDALGLDPAVYELLKEPQRIIEITIPVKMDDGSIKTFKGYRAAHNDAVGPFKGGIRFHQNVNSDEVKALSLWMSIKCQVTGIPYGGGKGGITVDPSELSQRELEQLSRGWVRGMWKYLGEKVDVPAPDVNTNGQIMAWMQDEYNKLSGEQTIGVFTGKPLSYGGSQGRNEATGFGVAVTMREAFKALGKNLKGATVAVQGFGNVGKFTVKNIMKLGGKVVAVAEFEKGKGAYAIYKDSGFTFEELEAAKAAGSLTKVAGAKELSMDEFWALNVEAIAPCALENAITNHEAELIKAGIVCEGANGPITPEADEVLYKKGIVVTPDVLTNAGGVTVSYFEWVQNIYGYYWTEKEVEEKEERAMVDAFTPIWALKKEFDGKGQPISFRQATYMKSIKRIAEAMKIRGWY

SEQ ID NO: 34184 - protein, 238 aa, Escherichia coli
LGEIGYSPLLTAEEKVYFARRALRGDVASRRRMIESNLRLVVKIARRYGNRGLALLDLIEEGNLGLIRAVEKFDPERGFRFSTYATWWIRQTIERAIMNQTRTIRLPIHIVKELNVYLRTARELSHKLDHEPSAEEIAEQLDKPVDDVSRMLRLNERITSVDTPLGGDSEKALLDILADEKENGPEDTTQDDDMKQSIVKWLFELNAKQREVLARRFGLLGYEAATLEDVGREIGLTR

SEQ ID NO: 34185 - protein, 508 aa, Oryza sativa
  misc_feature (221)..(221): Xaa can be any naturally occurring amino acid
  unsure (1)..(508): unsure at all Xaa locations
MGRVGLGVAVGCAAVTCAIAAALVARRASARARWRRAVALLREFEEGCATPPARLRQVVDAMVVEMHAGLASDGGSKLKMLLTFVDALPSGSEEGVYYSIDLGGTNFRVLRVQVGAGSVIVNQKVEQQPIPEELTKGTTEGLFNFVALALKNFLEGEDDQDGKMALGFTFSFPVRQISVSSGSLIRWTKGFSIRDTVCKRLLYFVEECLLNDYSFMLLCTXVNDTVGTLALGHYYDEDTVAAVIIGSGTNACYIERTDAIIKCQGLLTNSGGMVVNMEWGNFWSSHLPRTPYDILLDDETHNRNDQGFEKMISGMYLGEIARLVFHRMAQESDVFGDAADSLSNPFILSTPFLAAIREDDSPDLSEVRRILREHLKLSDDSLFQIPDAPLKTRRLVVKVCDIVTRRAARLAAAGIVGILKKLGRDGSGAASSGRGRGQPRRTVVAIEGGLYQGYPVFREYLDEALVEILGEEVARNVTLRVTEDGSGVGAALLAAVHSSNRQQQGGPI

SEQ ID NO: 34186 - protein, 368 aa, Streptococcus pyogenes SSI-1
MEHKWKLWLFIVGVVLLIGGASVLIQKGQAKAFSQGKPQLPAKKVKSTKVDPNAPVDQKVIYLAEGCFWGVEEYFSQVDGVLDAVSGYANGRGDTTNYQLIHQTGHAETVEVTYDANRISLKELLLHFFRIIDPTSLNKQGNDRGSQYRTGIYYTDKADLAIIDEVFKEKAKDYKKKIVVEKAPLKHFIKAEEYHQDYLKKNPNGYCHIDINQATYPVIDESKYPKPSATEIKAKLSADEYRVTQKNETEKAFSNRYWDSFDAGIYVDVVTGEPLFSSKDKFESGCGWPSFSRPISPDVVRYKEDKSFNMTRTEVRSRSGNSHLGHVFTDGPKDQGGLRYCINSLSITFIPKADMEAKGYGYLLSSVE

SEQ ID NO: 34187 - protein, 222 aa, Pinus sylvestris
MRRLRMRLASYYPACSSAWSRTRPMVTRGNFTPEEAEEKKHTGLIGKLHRTHSSSSSSSSDEEEEGEKKKEKERKKKEAKDKTNKKLPGDGQHSSDQSGIEEEKKVSLVDKFKEKLPAQPNKGEGEEKVEVEKKAGVKEKLPVQPNKGEREEKAEVEKKVGLLDKIKEKLPGHSNQKGRGREKKKKKQKWRKRRVLIDKIKEKLPGHHTKKEGEEEEKKQNY

SEQ ID NO: 34188 - protein, 230 aa, Bradyrhizobium japonicum USDA 110
MNPPRAFTHVDTWVFDLDNTLYPHHVNLWQQVDARIGEFVCNWLNVSPEEARHIQKDYYRRFGTTMRGMMTLHGVRADDYLAYVHKIDHSPLEPNPALGAAIAKLPGRKLILTNGSVDHVGAVLARLGLATHFDGVFDIIAAEFEPKPAPQTYRKFLGDHAVDPARAAMFEDLARNLTVPHELGMTTVLVVPDGTKEVVREDWELEGRDAAHVDHVTDDLAGFLAGLSPH

SEQ ID NO: 34189 - protein, 392 aa, Prochlorococcus marinus str. MIT 9312
MKAMILAAGKGTRVQPITHIIPKPMIPILQKPVMEFLLELLKEHGFKEIMVNVSHLAEEIENYFRDGQRFGVEIAYSFEGRIEDGELIGDALGSAGGLKKIQDFQKFFDETFVVLCGDALVDLDLTEAVKKHKEKGAIASLITKKVTRDQVSSYGVVVSDENGRIKAFQEKPSIDKALSDSINTGIYLFEPEIFNYIPSGEKFDIGADLFPKLVEMDLPFFALPMDFEWVDIGKVPDYWSAIRNVLQGKVRQVEIPGKEIKPGVFTGLNVAANWDKVDITGPVYIGGMTRIEDGATIIGPAMIGPSCCICEGATIDNSIIFDYSKIGKGVRLVDKLVFGRYCVGKNGDHFDLQDASLDWLITDSRRSDMTEPSPQQKAMAELLGTDLINIPE

SEQ ID NO: 34190 - protein, 250 aa, Wolbachia endosymbiont of Drosophila ananassae
MRHTTIGLNRYDLEHRKGTRKIKNLPSVLGVEAVGVIEKLGKKISDGLKVGDRVGYCTAPPGAYCEKRIIHQKYLIKIPDDISDEVAAAVLFKGMTAHYLVNQSYKVRPGAFVLVHGANGGLGQIICQWAKDKKGVVIGSVSSDEKMKIALQSGCTYAINYNDKDFVSKIMEITQNRGVGAVYDPIGYATSKLSFESLGRFGIYVSYGQISGNAPISFSLLSSRSLFATGTLIYHYSMIDHIVLHMEISR

SEQ ID NO: 34191 - protein, 425 aa, Brucella melitensis 16M
MTKYTDHLGRPIVAITGAGVVSSLGQGKDDNWAALTGGKSGIHTITRFPTENLNTRFSGTVDFLPESESGASALSEALARLAGEEALAQSGLSVTAFGGPLFLAAPPVELDWKSRFALDASVKDEGPASYQLLLEACRRARHDALFNTTQFGYIAERLSQAFGTRGLPITLSTACASGATAIQLGVEAIRRGESDRVLSIGTDGSVSAEALIRFSLLSALSTQNDKPEKASKPFSKDRDGFAMAEGSGALVMESLESAVARGAKVLGILAGCGEKADDFHRTRSKPDASPAIGTVRAALADAGLTEDQISYINAHGTSTPENDKMEYLALSTVFGDKLGSILVSSNKSMIGHTLTAAGAIEAVFSLLTIQTGTLPPTINYDNPDPAIPLDVVPNVKREAKVAAVLSNSFGFGGQNTSLVLTPNPN

SEQ ID NO: 34192 - protein, 85 aa, Arabidopsis thaliana
MANKALIHLLVIFFLALSHIFIFPSHASRLGSLMEKPKIVRPQQDTLMDVKKEVEERMVMELNDYPGSGANNRHLPRQRGCVVDC

SEQ ID NO: 34193 - protein, 158 aa, Clostridium tetani E88
MGRLFKKSKGRGEIIMMPYSDKVMEHFRNPRNVGEISDANGVGEVGNPKCGDIMKIYLKVEDNIIKDVKFKTFGCGSAIASSSMATELIKGKTLEEAWELSNKAVADALDGLPPVKMHCSVLAEEAIHKAINDYRESIGLEPWEMKVHSDHIHDEVHG

SEQ ID NO: 34194 - protein, 224 aa, Streptococcus pneumoniae
MPKTLTEKLNAIKAAGKGIFVPYIMAGDHEKGLDGLAETIHFLEDLGVSAIEVGIPFSDPVADGPVIEEAGLRSLAHGTSTQALVETLKTIETEIPLVIMTYFNPLFQYGVENFVKDLADTAVKGLIIPDLPHEHANFVEPFLADTDIALIPLVSLTTGIERQKELIEGAEGFIYAVAINGVTGKSGNYRADLDKHLAQLHQVADIPVLTGFGVSSQADLERFN

SEQ ID NO: 34195 - protein, 208 aa, Prochlorococcus marinus str. MIT 9312
MKNFLQQINSYIKEAFNAGKYLYNGLSVTFDHLRRRPVTVQYPYEKLIPSERYRGRIHYEFDKCIACEVCVRVCPINLPVVDWVMNKETKKKELRNYSIDFGVCIFCGNCVEYCPTNCLSMTEEYELATFDRHNLNFDNVALGRLPTNVTTDPSIKPLRELAYLPKGVMDPHEIPASDIRVGKLPEEVYDWMRPTSNENKDKISNSNN

SEQ ID NO: 34196 - protein, 208 aa, Zea mays
MEVEACYNYGFLPADRGRHQPPPPPHATLPHAAEDAGELWEYFPCPFCYIEVEVPFICNHLQEEHCFDTRNAVCPICANNLGKDMAAHFRLQHTHLLKRRKPYRPSSCPAAATSPATYQVNSYYEEAEPQQHYSRPYKDPAPDPLLSQFICSVDAVPGDDNAQKDDQRLKLNNKGATASDDDASSKLGLEERLQRIDFLTEILMSTIL

SEQ ID NO: 34197 - protein, 381 aa, Prochlorococcus marinus str. MIT 9312
MDSNKLILKPGLEGVPVTNSSICDIDGNKGKLLYRGYSIEELSKKSSFLETAYLLIWGDLPTAIQLRDFEQEVQMHRRLSFRVRDMMKCFPATGHPMDALQSSAASLGLFYSRRAIDDPNYIYNAVIRLIAKIPTMIAAFQLIRKGQDPIQPRDDLTYSSNFLYMLTEKEQDPIAAKVFDRCLILHAEHSLNASTFSARVTASTLTDPYAVIASAVGTLAGPLHGGANEDVIAMLEEIKTPKNAASFLDNAIKNKSKIMGFGHREYKVKDPRAIILQKLAEELFIRFGADEMYEVAKSLEAEAIPRLGPKGIFPNVDFYSGLVYRKLGIPRDLFTPIFAISRVAGWLAHWREQLGANRIFRPSQIYTGSAPREWISLENRD

SEQ ID NO: 34198 - protein, 224 aa, Streptococcus pneumoniae
MPKTLTEKLNAIKAAGKGIFVPYIMAGDHEKGLDGLGETIHFLEDLGVSAIEVGIPFSDPVADGPVIEEAGLRSLAHGTSTQALVETLKTIKTEIPLVIMTYFNPLFQYGVENFVKDLADTAVKGLIIPDLPHEHANFVEPFLADTDITLIPLVSLTTGIERQKELIEGAEGFVYAVAINGVTGKSGNYRADLDKHLAQLHQVADIPVLTGFGVSSQADLERFN

SEQ ID NO: 34199 - protein, 224 aa, Streptococcus pneumoniae
MPKTLTEKLNAIKATGKGIFVPYIMAGDHEKGLDGLAETIHFLEDLGVSAIEVGIPFSDPVADGPVIEEAGLRSLAHGTSTQALVETLKTIETEVPLVIMTYFNPLFQYGVENFVKDLVDTAVKGLIIPDLPHEHANFVEPFLADTDIALIPLVSLTTGLERQKELIEGAEGFVYAVAINGVTGKSGNYRADLDKHLAQLHQVADIPVLTGFGVSSQADVERFN

SEQ ID NO: 34200 - protein, 393 aa, Burkholderia mallei ATCC 23344
MNPSDLKPPHWALSERARKLTSSAIREILKVTERPEVISFAGGLPSPATFPAERMREAAERVLRDSPAAALQYSATEGFLPLREWIAERYRVRTTQVLVTTGSQQALDLLGKVLIDPASRVLVETPTYLGALQSFSLYEPIYAQVPTDDAGLLPEALTPELTKDARLLYAQPNFQNPTGRRLSVERRRALAAFARTSPFPVLEDDPYGALNYAGEPLPTMLSMAPDHIVHLGTFSKVLAPGLRIGYIIAPEELHFKLVQAKQATDLHTPSLTQRIAHEVIQDGFLDAHIPTIRKLYGAQCEAMLASLARHMPQGVSWNRPEGGMFIWVTLPAQIDSMQLLETAVANNVAFVPGAPFFANDAQKNTLRLSFVTVPPEKIEEGVARLGKLLRERL

SEQ ID NO: 34201 - protein, 247 aa, Bacillus cereus ATCC 10987
SLPEESVQLIEDTTRDSAKQLFTMNDYLDVLIPRGGKQLIDTVVREASVPVLETGAGNCHIFIDETADKQMAIDIIINAKTQRPSVCNAIETIVLHEKWAQQHGSELFSSLKERGVELRGDQRALALDSSIVLASEEDWGTEFLSLTLAVKVVSSIEEAIHHINTYGSMHSEAIISENEENVSKFFVSVDAAALYHNASTRFTDGSEFGFGAEIGISTQKLHVRGPMGLPALTSTKYVIRGNGQIRK

SEQ ID NO: 34202 - protein, 344 aa, Aster yellows phytoplasma
MKLKFGNIEEEIITRKDFSLEKAIDFLLNETICVLGYGVQGPGQALNLRDNGFNVIVGQRKNSKSWEKALQDGWIENKTLFSIEEGVEKSTIIMFLLSDAGQIAVWPKIKKYFSEGKGLYFSHGFGLTFNKKTNIVPPKNIDIFLVAPKGSGTSLRRLFKEGKGLNSSYAIYQNYTGKAKQRALSIGIGIGSAYLFETTFQKEVYSDLTGERGTLMGAIQGIFSAQYQVLRENGHSPSEAFNETVEELTQSLMPLIAEKGMDWMYENCSTTAQRGALDWWKKFRDINLPIFRNLYKEVSSGKEAEKTILSNSKNDYRENLKKELKEIKESELWKTGEIVRKLRP

SEQ ID NO: 34203 - protein, 419 aa, Zea mays
  misc_feature (230)..(230): Xaa can be any naturally occurring amino acid
  misc_feature (237)..(237): Xaa can be any naturally occurring amino acid
  misc_feature (253)..(253): Xaa can be any naturally occurring amino acid
  unsure (1)..(419): unsure at all Xaa locations
MDPYKHRPTSGANSGYWTTNSGAPVWNNNNALTVGQRGPILLEDYHLIEKLAQFDRERIPERVVHARGASAKGFFEVTHDVSQLTCADFLRAPGVQTPVIVRFSTVVHERGSPETLRDPRGFAVKFYTREGNFDLVGNNMPVFFIRDGMKFPDMVHAFKPSPKTNMQENWRIVDFFSHHPESLHMFTFLFDDVGIPLNYRHMDGFGVNTYTLISRDGKAHLVKFHWKPTXVGVKCLXLDDEAVTVGGTCHTHXATKDLTDSIAAGNYPEWKLFIQTIDADHEDKFDFDPLDVTKTWPEDIIPLQPVGRMVLNKNIDNFFAENEQLAFCPAITVPGIHYSDDKLLQTRIFSYADTQRHRLGPNYLMLPVNAPKCAHHNNHHDGLMNFMHRDEEVNYFPSRFDPTRHAEQYPIPPRVLSGC

SEQ ID NO: 34204 - protein, 447 aa, Arabidopsis thaliana
MVDDPLTNEVVSWSSGNNSFVVWSAPEFSKVLLPKYFKHNNFSSFVRQLNTYGFRKVDPDRWEFANEGFLRGRKQLLKSIVRRKPSHVQQNQQQTQVQSSSVGACVEVGKFGIEEEVERLKRDKNVLMQELVRLRQQQQATENQLQNVGQKVQVMEQRQQQMMSFLAKAVQSPGFLNQLVQQNNNDGNRQIPGSNKKRRLPVDEQENRGDNVANGLNRQIVRYQPSINEAAQNMLRQFLNTSTSPRYESVSNNPDSFLLGDVPSSTSVDNGNPSSRVSGVTLAEFSPNTVQSATNQVPEASLAHHPQAGLVQPNIGQSPAQGAAPADSWSPEFDLVGCETDSGECFDPIMAVLDESEGDAISPEGEGKMNELLEGVPKLPGIQDPFWEQFFSVELPAIADTDDILSGSVENNDLVLEQEPNEWTRNEQQMKYLTEQMGLLSSEAQRK

SEQ ID NO: 34205 - protein, 414 aa, Candida albicans SC5314
MIFPTGKETGSYLAIDLGGTNLRVVLVKLAGNRDFDTTQSKFALPAHMRTATSDELWDFIAKCLKEFVDEIYPDGCSEPLPLGFTFSYPASQNRINEGILQRWTKGWSIDGIEGKDVVPMLQKAIKKVGVPIDVVALINDTTGTLVASMYTDPEAKMGLIFGTGVNGAYFDVVKDIPKLEGKCPSDIPPESPMAINCEYGSFDNEKYILPRTKYDVQIDEESPRPGQQTFEKMISGYYLGEVLRLILLEFAEEKKLIFKGQNLDKLKVPYVMDASYPSKIEEDPFENLSDVADLFREKLGIETTEPERKIIRRLAELIGERSARFSVCGIAAICQKRGYETAHCAADGSVYNKYPGFKERTAQALRDIYEWPADVKDPIIIVPAEDGSGVGAAVIAALTEKRLKEGKSVGLLGA

SEQ ID NO: 34206 - protein, 553 aa, GIBBERELLA ZEAE PH-1
MTHARNNGSPNPHGEDRGLLSHGPDYDDDYFGIVADDHSGSGSGSASADLGKASGKTDSNGQPRTPGRVRFDLTPEIVPVSNGQSFGGFRDDDSERRSSDDAYFDIEEATSPARAHRTPLLTDMEAPSVTLANSMGDPSELAEHEMNRPKSGLKSAFMNMANSIIGAGIIGQPYAVRQAGLVGGILLLVGLTVVVDWTICLIVINSKLSGTSHFQGTVKHCFGQSGLIAISVAQWVFAFGGMVAYGVIVGDTIPHVLVAVWPNLSEVPVIGLLANRQVAIAVFVLGIGYPLTLYRDISKLAKASTFALVGMVVIVFTILVQGIVAPASERGSFSPSLLLFNGGFFQAIGVISFAFVCHHNSLLIYGSLKTPTIDNFSRVTHYSTGVSMVFCLVLALGGFLTFGDKTMGNVLNNFPADNTMVNIARLCFGLNMLTTLPLEAFVCREVMLTYFFPDEPFNMNRHLLFSTSLVVSALVLSLVTCDLGAVFELVGATSAVAMAYILPPLCYIKLTTRSWRTYMAGAVVAFGIVVMTISVIQAVQKMVNSKDGPAQCA

SEQ ID NO: 34207 - protein, 692 aa, Sinorhizobium meliloti 1021
MAQAALKKDRRNAPDESIDWKKVVQLLLLSRALDEMEEQRLVPEKKILYQFSARGHDMAQILLGLHLTGRHDAACGYYRSRPLLLALGVDPADALGSAMGRAGGYSDGRDIGVVFNYPNPHGASALPMCGGVGTQYTPTAGWAQAITYFSEVLGKEEYQKDIAVVLGGDGSVASNGFWSALTIATTQGLPLLFYIEDNGFGISVPSSFQTPEGNIAGNLAGWKNLTVLDGDGSDPEEAARLTKGAVELVREGRMPVLLRLEVPRLEGHSFQDTQTYKSEELVRSEWAHDPLPRLRDYIVPAMLSAEEWNEAARDAKAAAERARVEAESRPVADPETVTSHVFFEGRMQVMGGQHPAGYRPPKTTETATGDGQRINMVTAIRRTLDHEMTVNQRVVLFGEDIGPKGGVHAVTLGLQEKFGTARVFDTSLSEEGIIGRAVGMALAGLVPVPEIQFRKYAEPAIEQLNDCGTIRWRTSNRFAAPIVVRMAGGFLKCGDPWHSQTNEVAFVHQPGWKIAVPSNAEDAVGLLRTALRGNDPVIFFEHRAMLDHPWARRPYPGDAFALPFGKAKFTREGRDITIVTWGAMVPRCEEAAEGISADVIDLRTLMPWDRKAVIASVRRTRRCLIVHEDLATAGFGAEIAAAVADEAFIDLDAPISRLTMPDIPSPHNPALLDWAVPSTERIRRKIIDLLEF

SEQ ID NO: 34208 - protein, 243 aa, Fusobacterium nucleatum subsp. nucleatum ATCC 25586
MEDLMNRLEGKVAVVTGSARGIGRAIVEKLAAHGAKMVISCDMGETSYEQGNVVHKILNVTDREAIKAFVDEVEKEYGKIDILVNNAGITKDGLLMRMTEDQWDAVINVNLKGVFNMTQAVSRSMLKARKGSIITLSSVVGLHGNAGQTNYAATKGGVVAMSKTWAKEFGGRNVRANCVAPGFIQTPMTDVLSEDTIKGMLDATPLGRLGQVEDIANTVLFLASDESSFITGEVISVSGGLML

SEQ ID NO: 34209 - protein, 285 aa, Magnetospirillum magnetotacticum MS-1
MSQESAIRQAARQAEARPLDNRSKHLRRLVVEGLLGGGRGHIGSSMSPIEILRVLYDEVMRFDPAQPKWTGRDRFILSKGHGCLAQYALLVDKGFIARETLGTFCKKDSILGGHPEANKIPGVEASTGALGHGLSIGVGMALAARVQKRDSRVFVVMGDGEINEGSVWEAAMSAGKHRLSNLVAIVDYNKIQSYAFTDEVQPLDPLPEKWAAFGFDAIEVDGHDVEALSKLFRELRYDGDKPTAIIAHTVKGRGVPFAEHQPSWHHKNKFTDEEVRAIAAALEDA

SEQ ID NO: 34210 - protein, 204 aa, Triticum aestivum
  misc_feature (76)..(76): Xaa can be any naturally occurring amino acid
  unsure (1)..(204): unsure at all Xaa locations
SVFAGIAQGPEDPILGVTVAYNKDPSPVKVNLGVGAYRTEEGKPMVLNVVRRAEQMLIQNESRVKEYLPITGLADXRTGSLRVGGEFLARHYHERTIYIPQPTWGNHPKVFTLAGLTARSYRYYDPATCGLDFQGLLEDLSSAPSGAIVLLHACAHNPTGVDPTLEQWEQIRQLMRSKALLPFFDSAYQGFASGSLDKDAQSVR

SEQ ID NO: 34211 - protein, 361 aa, Saccharomyces cerevisiae
MTTAVRLLPSLGRTAHKRSLYLFSAAAAAAAAATFAYSQSQKRSSSSPGGGSNHGWNNWGKAAALASTTPLVHVASVEKGRSYEDFQKVYNAIALKLREDDEYDNYIGYGPVLVRLAWHTSGTWDKHDNTGGSYGGTYRFKKEFNDPSNAGLQNGFKFLEPIHKEFPWISSGDLFSLGGVTAVQEMQGPKIPWRCGRVDTPEDTTPDNGRLPDADKDADYVRTFFQRLNMNDREVVALMGAHALGKTHLKNSGYEGPWGAANNVFTNEFYLNMLNEDWKLEKNDANNEQWDSKSGYMMLPTDYSLIQDPKYLSIVKEYANDQDKFFKDFSKAFEKLLENGITFPKDAPSPFIFKTLEEQGL

SEQ ID NO: 34212 - protein, 238 aa, Escherichia coli
LGEIGYSPLLTAEEEVYFARRALRGDVASRRRMIESNLRLVVKIARRYGNRGLALLDLIEEGNLGLIRAVEKFDPERGFRFSTYATWWIRQTIERAIMNQTRTIRLPIHIVKELNVYLRTARELSHKLDHEPSAEEIAEQLDKPVDDVSRMLRLNERITSVDTPLGGDSEKALLDILADEKENGPEDTTQDDDMKQSIVKWLFELNAKQREVLARRFGLLGYEAATLEDVGREIGLTR

SEQ ID NO: 34213 - protein, 674 aa, Halobacterium salinarum
MTSVQNTESETAAGATTIGVLFAGSDPETGPAACDLDEDGRFDVTQIRDFVAARDRVDDPDIDCVVAVHEPDGFDGVAFLEAVRQTHAEFPVVVVPTAVDEDVARRAVDADATGLVPAVSEDATAAIADRIEQSAPAHSEDTETRMPISDLTVESERRLKEQALDEAPIGITISDATDPEEPIIYINDSFEDITGYSPDEVVGANHRFLQGPKTNEEPRGGFWTAITEDHDTQVVLRNYRRDGSLFWNQVDISPIYDEDGTVSHYVGFQMDVSERMAAQQELQGERQSLDRLLDRVNGLMNDVTSALVRAADREEIETRITDRIGTGGEYAGAWFGRYDATEDTITVAEAAGDCEGCDGDVFDLASAGEAVALLQDVVEQREALVSTDADGVSGTADGDACVLVPVTYRSTTYGVLAVSTAEHRIDDREQVLLRSLGRTTGASINDALTRRTIATDTVLNIGVELSDTALFLVELAGATDTTFEQEATIADSQTQGVLMLVTTPHDDPQAVVDTALGYDAVQDAEVIVSTDDESVVQFDLSSSPLVDVLSECGSRVIRMHADRTTLELDVRVGTEGAARRVLSTLRDKYADVELVAYHEDDPEQTPHGFREELRNDLTDRQLTALQKAYVSGYFEWPRRAEGKQLAESMDIVPSTYHQHLQAAKQKLVGAFFEE

SEQ ID NO: 34214 - protein, 397 aa, Frankia sp. CcI3
MADTRTLAVVTVDDVEAAAPLAWLTDHARARAAAGLRRELRPRGGPDKPGASVLVDLAGNDYLGLGRHPAVVGGGIRALRAWGAGATGSRLMTGTTTLHGELENALAAHAGFASALVFSSGYTANLAVVTALAGPGDLVVSDALNHASIVDACRLSRADVVVTPHADVAAVAAALAGRPWRRALVVTESVFSADGDLAPLTELHEAARAHGAVLVVDEAHALGVVGPAGRGALAATGLAGEPDVVATATLSKALGGQGGAVLGEAAVRDHLIDTARSFIFDTGLAPANVGSALAALEFLGAHPELPGTVRRRARQLAGLTGAPDPAGAVVSVIIGDPEPAIAAATTCRGHGVAVGCFRPPTVPVGTSRLRLAARADLTDADLAIVTNALAAAGVLAR

SEQ ID NO: 34215 - protein, 279 aa, Bradyrhizobium japonicum USDA 110
MGRLDGKVAVITGATSGIGLRTAEVFVAEGAKIVIAGRRLPEGEALAKQLGANCIFRQTDVTVEAQMQALIALAVDKFGRIDCLFNNAGGPAQTGGIEGLEVERFDAAMATLVRSVMLGMKHAAPYMKKQGSGSIINNGSIAGRLAGFSSSVVYGAAKAAVIHLTKCVAMELGESNVRVNSISPGAIATGIFGKALGLATSAAEKTPAVMREVYKTAQPIPRAGIPDDIAHAAVFLASDESSFINGHDLVIDGAITGGRNWSQQQQGYVALRKAFDQGA

SEQ ID NO: 34216 - protein, 486 aa, Bradyrhizobium japonicum USDA 110
MLPRSAGAGRNKVAVARCPFGQPTGALVMSMQNVAAPALQFTAPRRNELTHIPGDEGWPVIGKTFQVLADPKGHIEANGAKYGPVYRTHVFGETNVVLLGPEANELVMFDQQKLFSSTHGWNKVLGLLFPRGLMLLDFDEHRLHRKALSVAFKSGPMKSYLSDLDRGISARVAQWKAKPGEMQLYPAMKQLTLDLAAASFLGADIGPEVDEINRAFVDMVAAAVAPIRRPLPGTQMARGVAGRKRIVAYFRQQIPLRRGNHGGDDLFSQLCRATHEDGALLSEQDIIDHMSFLMMAAHDTLTSSLTSFIGELAANPDWQDRLRAEVLALGLAPGAPSSFDDLEKMPLSEMAFKEALRIKPPVPSMPRRAMRDFTFKGFRIPAGTAVGVNPLYTHHMKDIWPEPDRFDPLRFTEEAQRNRHRFAWVPFGGGAHMCLGLHFAYMQAKCFARHFLQNIEVSLAPGYKPDWQMWPIPKPRDGLKVRVKAV

SEQ ID NO: 34217 - protein, 251 aa, Glycine max
MYGRSDSYESDLALLDSIRRHLLGESELIFGAPNFGSGRSSSFSSLDSCLSDDWGELPFKEDDSEDMVLYGVLRDAVNVGWVPSLDAGSPESVSSGFPAVKLEPDVMPALINPCPPPAPAVEEKKVVPPKGKHYRGVRQRPWGKFAAEIRDPAKNGARVWLGTFETAEDAALAYDRAAYRMRGSRALLNFPLRVNSGEPDPVRVTSKRSSSPESMAAAAPKRKKVMVVGTVQEQVGSQVVECTRGEQLLVS

SEQ ID NO: 34218 - protein, 211 aa, Prochlorococcus marinus str. MIT 9312
MMQKMKEQDQTNSTNIKWHNLTIDRDKLEKMRGHKGMVIWFTGLSGSGKSTLANALNEVLHLDGFSTYVLDGDNIRHGLCRDLGFSDEDREENIRRIGEVANLFMNAGIITITAFVSPFISDRDKVRKIIGSKDFIEVYCAADIKVCENRDTKGLYKKARLGEIKDFTGISSPYEAPHNPEIIVDTGSLDLKDSVEKVINYLKKENFLKKG

SEQ ID NO: 34219 - protein, 305 aa, Chromobacterium violaceum ATCC 12472
MTPPQFVAFGEALTDFIRVDGDAWQSRPGGAGWNVARVVGRLGVGAAFAGAVSDDLLGRQLLEASAAAGLDTRFLQPLPYPPLLAMVPSSQPPSYFFVGDNSADLHFDPARLPPDGLDALRIAYFGSISLARPPLADRLLELAHELAARGVAIAFDPNMRSAMSEAGYRRRFEALAGLASYIKVSDEDLQLLFPARDQDRALEALRRLAPRAAILYTRGADGMSLLGSGGALEQAALPAAVADTIGCGDASIGGLIASLLKYPARTMAEHLRFAAATAACTAGHAGAYAPDEAMVNAKLTLPSAA

SEQ ID NO: 34220 - protein, 326 aa, Arabidopsis thaliana
MAASNGEKSLIVSFGEMLIDFVPTVSGVSLADAPGFIKAPGGAPANVAIAISRLGGRAAFVGKLGDDEFGHMLAGILKQNGVSAEGINFDTGARTALAFVTLRSDGEREFMFYRNPSADMLLRPDELNLDVIRSAKVFHYGSISLIVEPCRSAHLKAMEVAKEAGALLSYDPNLRLPLWPSKEEAQKQILSIWDKAEVIKVSDEELMFLTGSDKVDDETALSLWHSNLKLLLVTLGEKGCRYYTKSFRGSVDPFHVDAVDTTGAGDSFVGALLCKIVDDRAVLEDEARLREVLRLANACGAITTTKKGAIPALPTESEVQSLLKGN

SEQ ID NO: 34221 - protein, 535 aa, Avena sativa
MALAFDEYGRPFIILREQEKKSRLQGLDAHKANIAAAKAIARILRTSLGPKGMDKMLQSPDGDVTITNDGATILELMDVDNQIAKLLVELSRSQDYDIGDGTTGVVVMAGALLEQAEKLLERGIHPIRVAEGYEMASRIAVDHLESISTKYEFSATDIEPLVQTCMTTLSSKIVSRCKRALAEISVKAVLAVADLERKDVNLDLIKVEGKVGGKLEDTELVEGIIVDKDMSHPQMPKRIYDAHIAILTCPFEPPKPKTKHKVDIDTVEKFQTLRGQEQKYFDEMVQKCKDVGATLVICQWGFDDEANHLLMQRELPAVRWVGGVELELIAIATGGRIVPRFQELSTEKLGKAGLVREKSFGTTKDRMLYIEKCANSKAVTIFIRGGNKMMIEETKRSIHDALCVARNLIINNSIVYGGGSAEISCSIAVEAAADRHPGVEQYAIRAFADALDAIPLALAENSGLPPIDTLTVVKSQHVKENNSRCGIDCNDVGTNDMKEQNVFETLIGKQQQILLATQVVKMILKIDDVITPSEY

SEQ ID NO: 34222 - protein, 368 aa, Cucurbita moschata
MASHSRKFLDVRSEEELLSCIKKETEAGKLPPNVAAGMEELYQNYRNAVIESGNPKADEIVLSNMTVALDRILLDVEDPFVFSSHHKAIREPFDYYIFGQNYIRPLIDFGNSFVGNLSLFKDIEEKLQQGHNVVLISNHQTEADPAIISLLLEKTNPYIAENTIFVAGDRVLADPLCKPFSIGRNLICVYSKKHMFDIPELTETKRKANTRSLKEMALLLRGGSQLIWIAPSGGRDRPDPSTGEWYPAPFDASSVDNMRRLIQHSDVPGHLFPLALLCHDIMPPPSQVEIEIGEKRVIAFNGAGLSVAPEISFEEIAATHKNPEEVREAYSKALFDSVAMQYNVLKTAISGKQGLGASTADVSLSQPW

SEQ ID NO: 34223 - protein, 478 aa, Pseudomonas fluorescens
MSQKFDVVVIGAGPGGYVAAIRAAQLGLKTACIEKYIGKEGKVALGGTCLNVGCIPSKALLDSSYKYHEAKEAFKVHGIEAKGVTIDVPAMVARKANIVKNLTGGIATLFKANGVTSFEGHGKLLANKQVEVTGLDGKTQVLEAENVIIASGSRPVEIPPAPLSDDIIVDSTGALEFQAVPKKLGVIGAGVIGLELGSVWARLGAEVTVLEALDKFLPAADEQIAKEALKVLTKQGLNIRLGARVTASEVKKKQVTVTFTDANGEQKETFDKLIVAVGRRPVTTDLLAADSGVTLDERGFIYVDDHCKTSVPGVFAIGDVVRGAMLAHKASEEGVMVAERIAGHKAQMNYDLIPSVIYTHPEIAWVGKTEQTLKAEGVEVNVGTFPFAASGRAMAANDTTGLVKVIADAKTDRVLGVHVIGPSAAELVQQGAIGMEFGTSAEDLGMMVFSHPTLSEALHEAALAVNGHAIHIANRKKR

SEQ ID NO: 34224 - protein, 535 aa, Avena sativa
MALDFDEYWRPFIILREQEKKSRLQGLDAQKANIAAGKSVARILRTSLGPKGMDKMLQSPDGDVTITNDGATILELMDVDNQIAKLMVELSRSQDYDIGDGTTGVVVMAGSLLEQAEKLLERGIHPIRVAEGYEMASRIAVDHLESISTKYEFSATDIEPLVQTCMTTLSSKIVSRCKRALAEIAVKAVLAVADLERKDVNLDLIKVEGKVGGKLEDTELVQGIIVDKDMSHPQMPKRIEDAHIAILTCPFEPPKPKTKHKVDIDTVEKFQTLRGQEQKYFDEMVQKCKDVGATLVICQWGFDDEANHLLMQRELPAVRWVGGVELELIAIATGGRIVPRFQELSTEKLGKAGLVREKSFGTTKDRMLYIEKCANSKAVTIFIRGGNKMMIEETKRSIHDALCVARNLIINNSIVYGGGSAEISCSIAVEAAADRHPGVEQYAIRAFADALDAIPLALAENSGLPPIDTLTVVKSQHVKENNSRCGIDCNDVGTNDMKEQNVFETLIGKQQQILLATQVVKMILKIDDVITPSEY

SEQ ID NO: 34225 - protein, 466 aa, Arabidopsis thaliana
MNSGDVFILSRSKGHDMLAPFTAGWQSADLDPLVIAKSEGSYVYDDTGKKYLDSLAGLWCTALGGNEPRLVSAAVEQLNTLPFYHSFWNRTTKPSLDLAKVLLEMFTANKMAKAFFTSGGSDANDTQVKLVWYYNNALGRPEKKKFIARKKSYHGSTLISASLSGLPPLHQNFDLPAPFVLHTDCPHYWRFHLPGETEEEFSTRLAKNLEDLIIKEGPETIGAFIAEPVMGAGGVIPPPATYFEKVQAVVKKYDILFIADEVICAFGRLGTMFGCDKYNIKPDLVTLAKALSSAYMPIGAILMSQEVADVINSHSSKLGVFSHGFTYSGHPVSCAVAIEALKIYKERNIPEYVAKVAPRFQDGVKAFASGSPIIGETRGTGLILGTEFVDNKSPNEPFPPEWGVGAFFGAECQKHGMLVRVAGDGILMSPPLIISPEEIDELISIYGKALKATEEKVKELKAQHKK

SEQ ID NO: 34226 - protein, 619 aa, Neurospora crassa
MKFLGIAALVAGLLAPPLVLAAPAPGTEGVNLLTPVDKRQDSQAERYGGGGGGGCNSPTNRQCWSPGFNINTDYELGTPNTGKTRRYKLTLTETDNWIGPDGVIKDKVMMVNDKIIGPTIQADWGDYIEITVINKLKSNGTSIHWHGMHQRNSNIQDGVNGVTECPIPPRGGSKVYRWRATQYGTSWYHSHFSAQYGNGIVGPIVINGPASANYDVDLGPFPLTDYYYDTADRLVLLTQHAGPPPSNNVLFNGFAKHPTTGAGQYATVSLTKGKKHRLRLINTSVENHFQLLLVNHSMTIISADLVPVQPYKVDSLFLGVGQRYDVIIDANQAVGNYWFNVTFGGSKLCGDSDNHYPAAIFRYQGAPKALPTNQGVAPVDHQCLDLNDLKPVLQRSLNTNSIALNTGNTIPITLDGFVWRVNGTAININWNKPVLEYVLTGNTNYSQSDNIVQVEGVNQWKYWLIENDPDGAFSLPHPIHLHGHDFLILGRSPDVTAISQTRYVFDPAVDMARLNGNNPTRRDTAMLPAKGWLLIAFRTDNPGSWLMHCHIAWHVSGGLSNQFLERAQDLRNSISPADKKAFNDNCDAWRAYFPDNAPFPKDDSGLRSGVKAREVKMKW

SEQ ID NO: 34227 - protein, 665 aa, Psychrobacter arcticus 273-4
MPAPISERKLANAIRVLSFDAVQKANSGHPGAPMGMADIAEVLWRKFLKHNPADPSWHNRDRFVLSNGHGSMLIYSLLHLSGYDVSVDDLKGFRQLHSKTPGHPELGYTPGVETTTGPLGQGIANAVGFAIAEKTLAAQFNRDGHNIVDHHTYAFLGDGCLMEGISHEVCSLAGTLELGKLVFFYDDNGISIDGDVEGWFTDDTQARFESYGWQVIKVDGHDTDEITQATEQAIKETTKPSLIICKTTIGAGSPNKQGLAASHGAPLGDDEIVLTRDALSWKHAPFELDDEIYQAWDAKAKGDVQQKNWDANFEAYKKAYPELAAELVRRLEGDLPADFEQKAQEYIQQTQDQGGDVASRKASQNAINILQPLLPELLGGSADLAGSNLTLFKDAKGIQDDDAGNYIYYGVREFGMTAIANGIALHGGFIPYVATFLMFMEYARNAVRMGALMKQRVIHVYTHDSIGLGEDGPTHQPVEQLTSLRTTPNLRTWRPCDATESASAWVEAIKSENNPSALIFSRQSLPHQARDTEQVANITKGGYVLAKEQGELQAIIIATGSEVGLAMQAYATLSENGVGVRVVSMPCAEIFSEQDASYREGVLPANIRARVAVEAAHVDYWYKFVGLDGKVIGMTTYGESAPADELYKEFGITTEAVVDAVNSLV

SEQ ID NO: 34228 - protein, 250 aa, Zantedeschia aethiopica
MGKSYPAVSEEYQTAVGKAKRKLRALIAEKNCAPLMLRLAWHSAGTYDVSTRTGGPFGTMRFQAELAHGANNGIDIAVRLLEPIKEQFPILSYADFYQLAGVVAVEVTGGPEIPFHPGREDKPAPPVEGRLPDATKGSDHLRQVFSQQMGLNDQDIVALSGAHTLGRCHKERSGFEGAWTTNPLIFDNSYFKELLSGEKEDLLQLPSDKALLSDPVFRPLVEKYAADEDAFFADYTEAHLKLSELGFAEC

SEQ ID NO: 34229 - protein, 200 aa, Escherichia coli
RMIESNLRLVVKIARRYGNRGLALLDLIEEGNLGLIRAVEKFDPERGFRFSTYATWWIRQTIERAIMNQTRTIRLPIHIVKELNVYLRTARELSHKLDHEPSAEEIAEQLDKPVDDVSRMLRLNERITSVDTPLGGDSEKALLDILADEKENGPEDTTQDDDMKQSIVKWLFELNAKQREVLARRFGLLGYEAATLEDVG

SEQ ID NO: 34230 - protein, 328 aa, Oryza sativa (japonica cultivar-group); identical to SEQ ID NO: 786

SEQ ID NO: 34231 - protein, 138 aa, Panax ginseng
MAKAIPRSGSRRSGRIGSRKSTRRIPKGVIHVQASFNNTIVTVTDVRGRVVSWSSAGTCGFKGTRRGTPFAAQTAAGNAIRTVVDQGMQRAEVMIKGPGLGRDAALRAIRRSGILLTFVRDVTPMPHNGCRPPKKRRV

SEQ ID NO: 34232 - protein, 278 aa, Bacillus thuringiensis serovar konkukian str. 97-27
MWRDTMSAFLGELIGTALLIVLGGGVCAGVSLKKSFAKDSGWIVITMGWGLAVAVAAYAVGSISGAHLNPALTIGLAFKGAFPWSDVPGYIAAQMIGAIIGAVIVYLHYLPHWKETEDPGTKLGVFATGPAIPNTFANLLSEMIGTFVLVFGILAIGANKFADGLNPFIVGFLIVSIGLSLGGTTGYAINPARDLGPRIAHFFLPIAGKGGSNWKYAWIPVVGPILGGSLAGLFHQVVFEGKQNAALIYVIIATVIVLAISYMTSKKSGSNTNSRKVA

SEQ ID NO: 34233 - protein, 1049 aa, Polaromonas sp. JS666
MSTSTPSSGSPVKILIVEDSPTQAQQLQHILEQEGYEVGIARNGRLALKMLPQFRPALIISDVIMPEMDGYELSRRIKTQPDLRNIPVILVTTMSDPQDVIRGLECGADNFVLKPYDERYMLARVRYVLVNREMHREQDMGLGVEIYFNDQRHFITADRLQILNLLLSTYDAAIQRNKDLTQTQESLGQRSAEVAAVNRFLDSVIETIPDMIFVKDAADLRFVRFNRAGEELLGYSRDELVGKNDYDLFPEAEADAFTSKDQEVLTRGMVLDIPEEPIHTRNKGDRILHTKKIPIFDSKGRPLYLLGISRDVTEKKKLEDALRKRNEELSKSQEDLQWSNSELNKLRLALEARVNQRTQQLTAVVEALRESEARTRLTIDTALDAVVAMDAHGLVREWNAQAETIFGWKRDEAIGKPLAGLVIPRQHREGHARGLERFLATNEGPILSQRLELTALHREGREFPVELSITPMLLQGEWTFSAFLRDITDRKQMEERTLNLNRELEQRVAQRTTELVAAREAADTANRAKSTFLATMSHEIRTPMNGMFGMLELLGLTELDTDQRATLAIVRESSQSLLCIIDDILDFSKIEAGKLTVRPEVASIKDVIEHVRNMYAGNASGRGLLLKHGTDPQISPALMFDPLRLGQILNNLVSNALKFTSRGSIEIKAELIARTNGEDQVRFVVTDTGMGVSAEDQQRLFQPFTQGGGDTARWAGGTGLGLTICRRLAGMMNGTVEMVSELGKGTTMILTLSLPIADPKELAKIRRAQMQDSARTTHTARRDAPTVARAETEGTLVLLVDDHPVNRMLLMRQVHVLGYAAESAKNGVEALAKWQSRRFGIVITDCNMPEMNGYDLARSIRGLESGNEGKHVPIIACTANALSGEAESCFAAGMDDYLVKPVELSQLREKLDQWLPIPDATVMPEATSGTSSKHMAATAAAVPVDRSVIAEFSGGDASTERHIFTEFRSANDEDAAMLKRAVAASDGVQITRTTHRMLGASRMIGARDFARVCESIEHASRTSDWAAVEAHMSAFQHELQRLNAYLDAL

SEQ ID NO: 34234 - protein, 487 aa, Bradyrhizobium japonicum USDA 110
MAQGEVNWWRDGIFYQVYPRSFQDSDGDGVGDLAGILRRLPYVKSLGVDAIWLSPIFPSPMADFGYDISDHTGIDPLFGTMADFDALLTAAHEHGLKLILDLVPNHTSDQHPWFVESRSSRDNPKRDWYVWRDPAPDGGVPNNWLSEFGGSAWQFDETTGQYYYHAFLAQQPDLNWRNPDVRAAIYDAMRFWLDKGVDGFRVDVIWHLIKDAEFRDNPLNPHYVEGRPPNEKILTQYSTDQPPFNFALLSTFWSARSIETIIDDYEKALPKGAWPNWVLGNHDRPRVASRVGPEQARVAAMLLLTLRGTPTLYYGDEIGMHQLAIAPEDVRDPFEKNVPGIGVGRDGCRTPMQWDSSNFAGFSNVRPWLPLPEDHIHENVVNLEADTRSILSLYRRLIVLRKSSPPLVAGNYHPIAAQGDLLIYRREAEGRAVIVALNLGPDPIAVTTSAIRFGSEILLSTFLDREGERLEGVLDLRGNEGVIVQPP

SEQ ID NO: 34235 - protein, 162 aa, Zea mays
MAMRALPLTPSRSSSFGAHQTRPSGGGPRSVRAYAKGDEEGDKQSLFGSITEALDFSQVRSEKDAELLYEARESTRGGGRMTREQYGALRRKIGGTYQDFFKSYVEVDGQYVEEGWVALAGQICKKDTRGEPRQVDKLGRYAHVACLENPKPTNFFAKIFAR

SEQ ID NO: 34236 - protein, 565 aa, Bradyrhizobium japonicum USDA 110
MIDDLWYKNGVIYCLSVGTYMDADGDGVGDFKGLLRRLDYLHGLGITTIWLMPFQTSPGRDDGYDIADYYSVDSRYGTLGDFVEFAHGCKQRGIRIIIDLVVNHTSDQHRWFKDARRDKNSPYRDWYVWSDTKPANANKGMVFPGVQKSTWTRDKDAGAWYFHRFYDFQPDLNTSNPHVQAEILKIMGFWIQLGVSGFRMDAVPFVIATKGAKVKKPVEQYDMLRAFREFLQWRQGDAIILAEANVLPETDMEYFGRDADRMHMMFNFHVNQHLFYALASADSRPLAKALKATKPRPGSAQWGLFLRNHDELDLGRLTPAQRDTVFKSFGPDKDMQLYDRGIRRRLAPMLGGDRRRLELAYSLMCTLPGTPVIRYGDEIGMGDDLSLPERNCARTPMQWSTEPHGGFTKNDKPACPVIDKGPYGFPHVNVAKQRRDANSMLNWTERIVRMRKEVPEIGWGDFAVIATRDPAVFIMRYDWRNNSVLFVHNLDEKPREIAFSTGLPDDAGAHLINLLAEDHSHADKRGQHRVVLEPYGYRWYRVGGLDYLLKRSDIDGDTAGNKHPG

SEQ ID NO: 34237 - protein, 379 aa, Thiomicrospira crunogena XCL-2
MSSRRDFIKHLLALSALGTGSLSTVSYGKATRPGHFSTGVVLDPLFFKHDMSGHPENAQRLVAINNEMEKQGIWPQLTPVATRLATNEELLLAHTQSYIDEIEILSDSGGGFYEPYQGDTYLNASSFDAAKMAAGSNINLNLAIYDRKIDHGFALLRPPGHHALQNKAMGFCIFNSDIIAARALQKYRGVKRIAIIDFDVHHGNGTQDLSDNDPSIMSISIHQHPFWPMTGGHTFTGKDKAKGTVVNCPFPKGAGDQTYLNVYDQVIHPKLEAFKPEHIIVFAGYDAHWQDPLAQHQVSVAGFNQLVDKCLKSAKELCGGRISFSLGGGYNLNPLAQCAVGTFHTLLGNPEKNIDSIGKAPTPEVDYQQRIQELVIHHL

SEQ ID NO: 34238 - protein, 316 aa, Bradyrhizobium japonicum USDA 110
MMAGIAPRILCIGIPVRDLTFRVEAVPARGSKANATHLAEICGGNALNAAIAMARLGGRVSFAGPMGDARETSSGFILERMAQEGIDTGHIVRMPDVTTPVSAIMIEPSGERTLTIYRDPGLWSVKLPDADVLLADCRAVLVESRCAGFATSLCAEARRRGIPVIVGVDRAMSLQDGLLTAASHLLFASEQVQETAGIAADGEALRHLAKLTPAFLAATRGPLGTIWLNDAGELEETPAFPVHAVDTLGAGDVFHGAFTLRLAEGAVVREALRFAAAAAALKCTRHGGGLAAPQRVEVERLLDGPPARAPGGSPRL

SEQ ID NO: 34239 - protein, 333 aa, Zea mays
MDRAALTVGPGMDMPIMHDGDRYELVRDIGSGNFGVARLMRNRADGQLVAVKYIDRGEKIDENVQREIINHRSLRHPNIIRFKEVILTPTHLAIVMEYASGGELFERICNAGRFSEDEARFFFQQLISGVSYCHSMSSVLHSQPKSTVGTPAYIAPEVLLKKEYDGKVADVWSCGVTLYVMLVGAYPFEDPDEPKNFRKTIQRILGVQYSVPDYVHISPECQDLISRIFVANPSTRITMPEIRSHPWFLKNLPADLVDDSATTTSKQYEEPEQPMQGMDEIMQILGEATIPAAGSRGLNQFLNDGLDLDDDMEDLDSDADLDLESSGEIVYAM

SEQ ID NO: 34240 - protein, 329 aa, Magnetospirillum magnetotacticum MS-1
MADPRPVLIAGGAGYIGSHVALALADAGRPVVILDDLSTGRQALVPEGAVFVRGDMGDRALVRRLLAEHGCSGVMMFAGSIIVSESFREPLPYWRNNAGSGLAFVETCVEAGIRHFVYSSTAAVYGTPDTLPISESAALRPISPYGRSKLAVEWALSDICETAPTRFAALRYFNVAGADHRGRSGQVSPVATHLIKIAVEAALGRREGMAIYGDDYPTADGTCIRDYIHVTDLAEAHVLALAHLERGGESLIANCGYGHGFSVREVIDVVRRVSGRDFPVHSSERRRGDPPALVADSGLLKAKLGWVARRDDLELMVRSALEWEAKQQP

SEQ ID NO: 34241 - protein, 661 aa, Streptococcus agalactiae A909
MTFDTIDQLAVNTVRTLSIDAIQAANSGHPGLPMGAAPMAYVLWNKFLNVNPKTSRNWTNRDRFVLSAGHGSALLYSLLHLAGYDLSIDDLKQFRQWGSKTPGHPEVNHTDGVEATTGPLGQGIANAVGMAMAEAHLAAKFNKPGFDLVDHYTYTLHGDGCLMEGVSQEAASLAGHLKLGKLVLLYDSNDISLDGPTSQSFTEDVKGRFESYGWQHILVKDGNDLEAIAAAIEAAKAETDKPTIIEVKTIIGFGAEKQGTSSVHGAPLGAEGITFAKKAYGWEYPDFTVPAEVADRFASDLQARGAKAEEAWNDLFAKYEVEYPELATEYKEAFAGQAETVELKAHDLGSSVASRVSSQQAIQQLSTQLPNLWGGSADLSASNNTMVAAETDFQASNYAGRNIWFGVREFAMAAAMNGIALHGGTRVYGGTFFVFSNYLLPAVRMAALQNLPTVYVMTHDSIAVGEDGPTHEPIEQLASVRSMPNLNVIRPADGNETNAAWQRAVSETDRPTMLVLTRQNLPVLEGTSELAQEGVNKGAYILSEAKGELDGIIIATGSEVKLALDTQDKLESEGIHVRVVSMPAQNIFDEQEASYQEQVLPSAVTKRLAIEAGSSFGWGKYVGLNGLTLTIDTWGASAPGNRIFEEYGFTVENAVSLYKEL

SEQ ID NO: 34242 - protein, 255 aa, Bacillus subtilis subsp. subtilis str. 168
MIMNLTDKTVLITGGASGIGYAAVQAFLGQQANVVVADIDEAQGEAMVRKENNDRLHFVQTDITDEAACQHAVESAVHTFGGLDVLINNAGIEIVAPIHEMELSDWNKVLQVNLTGMFLMSKHALKHMLAAGKGNIINTCSVGGLVAWPDIPAYNASKGGVLQLTKSMAVDYAKHQIRVNCVCPGIIDTPLNEKSFLENNEGTLEEIKKEKAKVNPLLRLGKPEEIANVMLFLASDLSSYMTGSAITADGGYTAQ

SEQ ID NO: 34243 - protein, 171 aa, Oryza sativa
MGFKVDTSSPLYKRFRLKLLGQSYKIGEKIGSYVFEDDPGLSGQPNSSTQDLPNKQTQQTAYRCKKCRRIIAVQGNVVSHTPGEGESCFQWQNKRKGERSYSKEQDCSSLFVEPLKWMTPVEDGALEGKLSCIHCGARLGYFNWSGIQCNCGSWITPAFQISKSKVDISTT

SEQ ID NO: 34244 - protein, 447 aa, Zea mays
MGKEKTHINIVVIGHVDSGKSTTTGHLIYKLGGIDKRVIERFEKEAAEMNKRSFKYAWVLDKLKAERERGITIDIALWKFETTKYYCTVIDAPGHRDFIKNMITGTSQADCAVLIIDSTTGGFEAGISKDGQTREHALLAFTLGVKQMICCCNKMDATTPKYSKARYDEIVKEVSSYLKKVGYNPDKIHFVPISGFEGDNMIERSTNLDWYKGPTLLEALDLINEPKRPSDKPLRLPLQDVYKIGGIGTVPVGRVETGVIKPGMVVTFGPTGLTTEVKSVEMHHEALQEALPGDNVGFNVKNVAVKDLKRGYVASGSKDDPAKEAASFTSQVIIMNHPGQIGNGYAPVLDCHTSHIAVKFAELVTKIDRRSGKELEKEPKFLKNGDAGMVKMVPTKPMVVETFSQYPPLGRFAVRDMRQTVAVGVIKSVEKKDPTGAKVTKAAAKKK

SEQ ID NO: 34245 - protein, 254 aa, Triticum aestivum
  misc_feature (129)..(129): Xaa can be any naturally occurring amino acid
  misc_feature (145)..(145): Xaa can be any naturally occurring amino acid
  misc_feature (165)..(165): Xaa can be any naturally occurring amino acid
  misc_feature (171)..(171): Xaa can be any naturally occurring amino acid
  misc_feature (176)..(176): Xaa can be any naturally occurring amino acid
  misc_feature (184)..(184): Xaa can be any naturally occurring amino acid
  misc_feature (193)..(193): Xaa can be any naturally occurring amino acid
  unsure (1)..(254): unsure at all Xaa locations
MHPTRWELSHMVDLQAGAVVISVVAAEVGAGGSGISLFIATNICENIIWKAFSPTTINSGRGAEFEGAVIALFHLLITRSDKVRALREAFYRQNLPNVTNLLATVLVFLIVIYFQGFRVVLPVRSKNAXRGQQGSYPIKLFYTSXNMPIILHSALITNLYFISQXLYRKYXGNFLXVNLLGIWXKESEYPGPXLSPVGGLAYYVTGTHQVWLISWRIHPCMCSRGLMAGGSMRRRAPFAYSESYYIHWASFTPS

SEQ ID NO: 34246 - protein, 391 aa, Saccharophagus degradans 2-40
MSLQPRDVVIVDYARTPMGRSKNGCYRNVRADDLSADLITGLLARNAALDPAQIDDMIWGCVMQRGEQGFNVARNILLRAGLPHTVPAQTVNRLCGSSMSALHTAAANIMAGLGDVYLVGGVEHMGHIDMNQHVDPNPALGHSVAQAAGSMGLTAEYLSLLHGITREAMDEFGARSHRKAAEATEQGKFAREIIARIGHDETGAPTLIKHDETIRPDTTVEALSKLKPAFNPKGGTVTAGTSSQITDGASSMLVMSAAKAAELGLTPIAKIRSMALAGVDPSIMGYGPVPATQKALANAGLSIEDIDVVELNEAFAAQALPVLKDLNLLDAMEDKVNLYGGAIALGHPFGCSGTRITGTLLSVMQDKDATLGVSTMCIGLGQGITTIVERV

SEQ ID NO: 34247 - protein, 470 aa, Bacillus subtilis subsp. subtilis str. 168
MQNHKNELQRSMKSRHLFMIALGGVIGTGLFLGSGFTISQAGPLGAIAAYIIGGFLMYLVMLCLGELAVAMPVAGSFQAYATKFLGQSTGFMIGWLYWFSWANTVGLELTSAGILMQRWLPSVPIWIWCLVFGIVIFLINALSVRSFAEMEFWFSSIKVAAIILFIVIGGAAVFGLIDFKGGQETPFLSNFMTDRGLFPNGVLAVMFTLVMVNFSFQGTELVGIAAGESESPEKTLPKSIRNVIWRTLFFFVLAMFVLVAILPYKTAGVIESPFVAVLDQIGIPFSADIMNFVILTAILSVANSGLYAASRMMWSLSSNQMGPSFLTRLTKKGVPMNALLITLGISGCSLLTSVMAAETVYLWCISISGMVTVVAWMSICASQFFFRRRFLAEGGNVNDLEFRTPLYPLVPILGFCLYGCVLISLIFIPDQRIGLYCGVPIIIFCYAYYHLSIKKRINHETIEKKQTEAQ

SEQ ID NO: 34248 - protein, 456 aa, Triticum aestivum
  misc_feature (224)..(224): Xaa can be any naturally occurring amino acid
  misc_feature (403)..(403): Xaa can be any naturally occurring amino acid
  unsure (1)..(456): unsure at all Xaa locations
MEKALDRQRILLRHLEPAAGASPAASAISASACAAGESAAYHRGPCFADDVVIVAAYRTAICKAKRGSFKDTLPEDLLVPVFKALVDKTKLNPSEVGDIVVGTVLAPGSQRAIECRMAALYAGFPDTVPLKTVNRQCSSGLQAVADVAAAIKAGMYDIGIAAGVESMTVNKVDLIGKVNPKVELFAQARDCLLPMGLTSENVAQQFGITRMEQDQAAVESHRKXAAAAVAAGKFKEEIVPVHTKIVDPKTGEEKEIVVSADDGIRSNTTLAVLSKLKPAFSKDGTTTAGNASQVSDGAGAVLLMRRDVATQKGLPILGIYRSFAAVGVDPAVMGVGPAVAIPAAVKAAGLQINDVDLFEINEAFASQYVYCSKKLDLDPAKVNVNGGAIALGHPLGATGICFXSMLCAPGAHHLLDSWTGARCVSTLLNEMKRRGKDCRFGVISMCIGSGMGAAAL

SEQ ID NO: 34249 - protein, 122 aa, Zea mays
MHQQQQQLAAVAPKGCVTVRVGLEGEEQRRFAVPLGHLKHPLFGALLEEAEREYGFRHQGALAIPCRVDRFVQVEHLIGQDLHGTSCAQHLVDLDGALASGGAHHHQHHHLHLPRFVGCFRA

SEQ ID NO: 34250 - protein, 448 aa, Clostridium perfringens str. 13
MEVKKYVDNLMEDLKKNNPGESEFLAAAEEVLYSLVPVLEKNPKYMEEGILERIVEPERVIMFRVPWVDDAGNVRVNRGYRVQFNSAIGPYKGGLRFHPSVNLSIIKFLGFEQIFKNSLTTLPIGGGKGGSNFDPKGKSDREIMRFCQSFMSELYRHIGPNTDVPAGDIGVGGREIGYMFGQYKKLKNSVDAGVLTGKGLTYGGSLARKEATGYGLVYFVDEMLRDNGQTIEGKTVVISGSGNVAIYATEKVQELGGKVVALSDSSGYVYDENGIDLEVVKEIKEVKRGRISEYVNYVKTAKFTEGFRGIWNVKCDIALPCATQNEIDKSSAKTLIDNGVIAVGEGANMPSTLEAQKLFVDNKILFAPAKAANAGGVATSALEMSQNSLRMSWTFEEVDAKLKDIMKNIYYNSRNAASEYGHDGNLIVGANIAGFKKVADAMLDHGII

SEQ ID NO: 34251 - protein, 199 aa, Burkholderia sp. 383
MRAGCRHQRGTDFMVNEMLETATLGGGCFWCTEAVFLDVDGVTAVQSGYAGGHTRNPGYRDICEGDTGHAEVVNVTFDPARIGYREILEIFFATHDPTQLNRQGNDVGTQYRSVVFTHSDAQRDTALDVIRELEREQVFGQPIVTQVVPLDGNYWPAEDYHQNYYARNPGQGYCSVVIGPKLAKFRQKFSHRLKSLRGA

SEQ ID NO: 34252 - protein, 222 aa, Pseudomonas syringae pv. tomato str. DC3000
MEKNVFSLCVHNPEWMIMENSQGGQSLVWQPSQVSSKDREQHLRQTPKTVWLTGLSGSGKSTIAFALERALMDLGKLAYTLDGDNIRQGLCRDLGFSAEHRSENIRRIAEVARLMNDAGLIVISSFISPYEADREAARSIIGNERFMEVFISTPLETCIQRDPKGLYRRAVAGELKDFTGISAPYESPLYPVLQLDTRHVPIEECVARILDILQITKNHFRA

SEQ ID NO: 34253 - protein, 342 aa, Ralstonia solanacearum
MFLKNAWYVACTPDEIADKPLGRRICGERMVFYRGQEGKVAALEDFCPHRGAPLSLGFVRDGHLVCGYHGLTMKADGKCASMPGQRVGGFPCIRQFPVVERYGFIWVWPGDPEQADPARIHHLEWAESEAWAYGGGLYHIQCDYRLMIDNLMDLTHETYVHATSIGQPEIEEAAPQTKVEGDAVVTSRFMENIMPPPFWATALRGAGLADDVPCDRWQICRFTPPSHVLIEVGVAHAGKGGYHAAPEHRVGSIVVDFITPETETSIWYFWGMARNFRVDDAALTDTIRQGQGKIFSEDLDMLESQQRNLLAYPERNLLKLNIDAGGVQSRRVLERLLERERQ

SEQ ID NO: 34254 - protein, 639 aa, Saccharophagus degradans 2-40
MKIPFKKGWSIADSTELYGVNDWGVGYFSVSEDGKVIVTPNIDGKTIELPLLNVVSDIKDRGMDVPVLIRFEDLLEEQIGRLNNAFTTAIKASNYQGQYRGVFPIKVNQQCHVIEEIAEVGAKYGHGLEAGSKPELIIALAHLESQDACIVCNGYKDAEFIDLGLQACKMGYKCFFVIETPSELPIIIERSRKLGIKPMIGVRVKLASMVGGHWNATSGDRSIFGLSIAQLIEMVDTLKAEGMLDCLKLLHYHLGSQIPNIRDIRSGVLEACHVYNELVKEGAAMGYLDLGGGLAVDYDGSKSNYIHSKNYTLDEYCTDIVDVIISTLDPQGVEHPTIITESGRATIAYSSVLVFNVLDVAKFEPASPVDEVQEDEHELIHNLKESLDSVSLRNIQECYNDTVYYRDEIRELFKRGQISLRSRSLAENLFLQTMHRLVALADDAPRTMHEIEKLKEQLSDIYYCNFSLFQSLPDIWAIDQIFPISPIHRLNEFPDRNAMIADITCDCDGKIDRFSNMHETRKTLPLHDLKANEEYYIGVFLVGAYQETLGDLHNLFGDTNVVSVRVQKDGSYDFSDEIEGDSIADVLTYVEYQPQNLRERFRKIAERSVRQGFITGAERQSIMKTFSDSMMGYTYYEKD

SEQ ID NO: 34255 - protein, 360 aa, Oryza sativa (japonica cultivar-group)
MGNDEAVVTQKMGKAPSPPKDHPALSPYLDWSNMQAYYGPGILPPTFFSPGIAAGHTPPPFILGPQPLVPSAFGKPYAAIYPPGGAFSHPFMPLMVSPLSMEPAKSVNSKDSCSNKKMKEIDGAAVSTGSGNSEKTSGDCSLEGSSDGNNQKASGTPKKRSIDDRPKSGVETGGALTPNDRPSEQAALPNLCIPVTAIKPDVSTASDFRVIATPVTEVPTKDDKESKRERRKQSNRESARRSRLRKQAETEELARKVELLTAENTSLRREISRLTESSKKLRLENSALMEKLTETGPDEAQEVPPVKTKAQQARGVENFLSMIDKTGTPRSSGHMDHAIATPKLRQLLGSGLATDAVAAR

SEQ ID NO: 34256 - protein, 47 aa, Pleurotus ostreatus
HWHGFFQEKTTWADGPAFVTQCPIVPGHSFEYNFHVPAQAGTFWYHS

SEQ ID NO: 34257 - protein, 384 aa, Cryptococcus neoformans var. neoformans JEC21
MSFSSPSSLYSSVYFSSPPSSPPSTPPLTSPYPSYANKPKVLLIGDYCGHETFDKQIREIAEVHTLPTVTYDETVELIKQKVEQVGGGFVAFGGLFTSMDTFPDRWDATLLSPLLPSCKLFVGPGAGYDKVDVPWLTSVGAMYANAPTIVGKRTAEGALVLTLAAMRGVVRYDMSVRKGVWGDRGVRTVDWKTAKIGIIGLGSIGSHLAFLLSSIGATSIFYHSRRPSLHAASNPAWTYLPNRDDLYAQSDVIILACPLTKETEGMIGRAAFGKMKDGVILVNVSRGKVVKEEELVEALESGKVMRAALDVFENEPTVHPNLLTNPNVILSPHVAPAPDSMGPYIKGEVIENIIHYLQTGMPLTPINLPQLKAEGWEVDGKEFV

SEQ ID NO: 34258 - protein, 160 aa, Gibberella avenacea
RAEYGKSGNITCMRKWLCCEKLVDKYPYIAMDTEFPGVVSRPMGGFRGKSDYHYQCLRTNVDMLKVIQIGSHSSMRTAKPAPRPVHGSSTSNLSQDDMYNESRSESLQPSRYRTSICSNVTESTLSNCLTPHPFRSRVLRQRAMDFIPRRLRFWLPHQAL

SEQ ID NO: 34259 - protein, 589 aa, Clostridium perfringens str. 13
MEEINEKKTHKWKTIKRLLKYVAPYKWKTIGIILMLLLIMSCNTLNPYLMKVSIDKFVSAKDVNGLLGIGAVLLLLNIIAMILSKIRMLSMSKITNQILVNIRHELYTHIQTLSFSFFDNRPVGKILSRVVGDVNALNNLLNHSIVNLIPNLFTILLVIFMMFLMDPSLTLVCLTVLPFLFAGMFFIEIKSNKRWRVFRENRSALLGYTHEAFSGMKVVQGFNREEYSREKFENHLEGHAGGFLHAVRLQDYFWPTVDICRGFGIAIVLFAGYKLTRGGNLSLGTLMAFIMYIEMLWRPIMNLSAFYNAFVTNLSAAERIFDIMDTKNDMVNNKEEERLPKIKGEIHFEDVTFSYDNDGNHALKDVTFTLNPGEKIALVGETGAGKTTITNLISRFYEPTKGKIFIDGIDISTVDVESLRSQMGIMLQDSFLFASSIKENICYGKLDATDEEIIQAAKAVNAHNFIEKLEEGYNTNVNERGSRLSLGQRQLIAFARALISDPRILILDEATANIDTETERLVQEGIKKLMEGRTSIVIAHRLSTIRDCDKIFVLSHGKIVEEGTHEELLNRKGYYYNLYCAQYSFLKEA

SEQ ID NO: 34260 - protein, 572 aa, GIBBERELLA ZEAE PH-1
MASPPHIGSLSRLPANLRGSIESVKRGGHNVSWPLLNLDLLRNVLLFLFFWRWSRRAFWQLRGRGIIGSVVELYTNIRRILYGYFLRAPGVRGKVQQQVNESLVKLSDKLVPKDQIRYLTLPKEGFSHDVVRSELENLANMDHTRWEDGYVSGAVYHGEDELLALQTEAYGKFTVANPIHPDVFPGVRKMEAEVVSMVLSMFHAPPGAAGTSTSGGTDSILMACLAARQKAYAERGVTEPEMILPETGHTAFRKAAEYFKIKLHLVACPAPEYQVDVNAVRRLINPNTVILVGSAPNFPHGIIDDISALSKLALRKNIWLHVDCCLGSFLVPFLERAGFETLLFDFRLKGVSSISCDTHKYGFAPKGNSTVLYRTAEHRKFQYFVSPDWSGGVYASPGMAGSRPGALIAGCWASLMTMGESGYIDSCTKIVGTAKKIAEAIQTTPALGGELEIMGKPLVSVVAFTARNLNVYDIADGMGTKGWHLNALQSPPAIHVAVTLPITKVWEKLITDLEAVVEEEREKERVRLVEGKGTHGKAMGDASALYGVAGSLPNKSVVVDLASGFLDLLYKA

SEQ ID NO: 34261 - protein, 528 aa, Psychrobacter arcticus 273-4
MSTAYKSAIDLVRELKQKHGNWQNISETDAARMMSQNRFKTGLDIAKYTAKIMRQDMEEYDNDTSQYTQSLGAWHGFVAQQTMYAKKKYFGTTSKTYIYLSGWMVAALRSEFGPLPDQSMHEKTSVPKLIAEIYTFLRQADAKVLNDYFRELNAAEEAGQDTSAILEKIENFDSHVVPIIADIDAGFGNEEATYLLTKQMIEAGACAIQVENQVSDAKQCGHQAGKVTVPHEDFISKINAIRYAFLELGVEDGVIVARTDSEGASLTQKIPVSNEPGDLASQYIDFIEMEEVTLENAKENDSLLKHNGKLVRPVRLPNGLYQFREDTNIDRVVLDCVTALENGADLLWIETPTPDVEHIKMMVDRIKEQQPKAKLVYNNSPSFNWTLNFRKQIIAQWEEEGKDLSAYNKNDLMSADYDGTELDTAADEAARNFQRDAAREAGVFHHLITLPTYHTTALSVHELAKGYFGEDGMLAYAAGVQRKEIREGIACVKHQAMAGSDLGDDHKEIFSGEHALKAGGGKNTMNQF

SEQ ID NO: 34262 - protein, 214 aa, Shigella flexneri 2a str. 301
MSQTSTLKGQCIAEFLGTGLLIFFGVGCVAALKVAGASFGQWEISVIWGLGVAMAIYLTAGVSGAHLNPAVTIALWLFACFDKRKVIPFIVSQVAGAFCAAALVYGLYYNLFFDFEQTHHIVRGSVESVDLAGTFSTYPNPHINFVQAFAVEMVITAILMGLILALTDDGNGVPRGPLAPLLIGLLIAVIGASMGPLTGFAMNPARDFGPKVFA

SEQ ID NO: 34263 - protein, 268 aa, Zea mays
MRIQCDACEAAAATVVCCADEAALCARCDVEIHAANKLASKHQRLPLALGDATAASASSLPRCDVCQEKPAFIFCVEDRALFCRDCDEPIHVPGTLSGNHQRYLATGIRVGFSSVCGAGAGAEGLPPPAPPKGSSKPAAVVSAPAAGATKTTTTVKDTLPQEVPSSPFLPPSGWAVEDLLQLSDYESSDKKDSPLGFKELEWFADIDLFHAHSPAKTTTAEVPELFASPQPASNAGFYKTNGVARQSKKPRMEVPEDDEDYFIVPDLG

SEQ ID NO: 34264 - protein, 81 aa, Gaertnera brevipedicellata
TPQDEMRAGMSYFHETIWKGVPKFLRRVDTALKNIGINERVPYNAPLIQFSSWMDGDRDGNPRVTPEVTRDVCLLARMMAA

SEQ ID NO: 34265 - protein, 239 aa, Cyanophora paradoxa
MEINKKKILVVDDEISIRRILETRLSMIGYEVVTAADGEEALTIFQLEHPNLVVLDVMMPKLDGYGVCQELRKESDIPIIMLTALGDVADRITGLELGADDYVVKPFSPKELEARIRSLLRRTENPTLSTTSTNGENLQIGFLKIDINKRQVFKNGERIRLTGMEFSLLELLISKMGEPFSRAQILQEVWGYTPERHIDTRVVDVHISRLRSKLEENPSNPDLILTARGIGYLFQNTSN

SEQ ID NO: 34266 - protein, 81 aa, Gaertnera brevipedicellata
TPQDEMRAGMSYFHETIWKGVPKFLRRVDTALKNIGINERVPYNAPLIQFSSWMGGDRDGDPRVTPEVTRDVCLLARMMAA

SEQ ID NO: 34267 - protein, 211 aa, Escherichia coli
  misc_feature (51)..(51): Xaa can be any naturally occurring amino acid
  unsure (1)..(211): unsure at all Xaa locations
SLFDKKHLVSPADALPGRNTPMPVATLHAVNGHSMTNVPDGMEIAIFAMGXFWGVERLFWQLPGVYSTAAGYTGGYTPNPTYREVCSGDTGHAEAVRIVYDPSVISYEQLLQVFWENHDPAQGMRQGNDHGTQYRSAIYPLTPEQDAAARASLERFQAAMLAADDDRHITTEIANATPFYYAEDDHQQYLHKNPYGYCGIGGIGVCLPPEA

SEQ ID NO: 34268 - protein, 435 aa, Desulfotalea psychrophila LSv54
MKNSMSAQDLLHFDKTHLWHPYTSIEEPLPVYSVASASSSTLTLTDGRQLVDGMSSWWAAIHGYNNPVLNRALVEQVSRVSHVMFGGLTHEPAVELGKILLQLVPKSLNRIFYCDSGSVAIEVAMKMAMQYMHALGQPQKKRFVTIRGGYHGDTFHGMSVCDPVNGMHGLYAGVLPEYFFADRPTTSFFASWDAADFVGMRRLVEENQQNICAIILEPIVQGAGGMYFYHPQYLREVRALCDEYGLLLIADEIATGFGRTGKLFACEHAGIEPDILCLGKAITGGYMSFAATLATEEVGRVISSAAPGVFMHGPTFMGNPLACSVAKASLQLLIENDWQTQVEGLAKGLEEGLAPCLDLDCVAEVRVLGGIGVVELHAPLSSQGMVQIQAAFVEAGIWVRPFGRLVYLMPPYIMSKEELAFLTAAVFKVLATGDY

SEQ ID NO: 34269 - protein, 1789 aa, Trichodesmium erythraeum IMS101
MIDPDQNEVELLSELIFALEMSQGDFRLFLASCNYQTQRRRLMEKLQTSFSGDLAILEVDASVEKLYTTIGQHLGEQQPDGLMVWGLESNRNIDQILVSMGLVREEFKNNYQFPILLWIDQEISRKFIRLIPDFESWTSLTVFETTTPELRDFIQQTSESVYQKILESGEGIFLDDADLGLVESTYQKLLDAQQELTNRGISLESELEASLEFVLGRMADNSTKIALDHYERSLELWQQLNNPLRVAHTYYYLGLWWQTYGFEHKAEKNMAYEKACSYFQQVIEGFETVNRRDLVAKFINAWGTILQTLKRWDELNTVGNRAIELHKAYSYPFREARAYNFLAEFELANSNYKKAKKFSETAIKIFNQTLDYASSPTSNEDKKTLDWERYYHQGRYLFSLAKSEKGNGKIKSAIATLELAKSTINPKYNHEFCIKIITELREIYYQQKEYLKAFELKQEIQKIKQQFGLIAFIGPNYLRDIKENINLALPQSKQRINQQKLTQEIAASGRELDVEKLLERISRNDHKLIVIYGESGVGKSSILQAGLVPILEAKPINTRDVVVVLQRVYVNWISELGTILAEKLQIIPNLKVNSESLNSPEAIFDQLKNNGNDKLNLLTVIIFDQFEEFFFAKTNMEPKDKRLFAEFLQKCLEIPFLKIVFSLREDYIHYLLELNRLGNLDAINNDILSKNILYFLGNFSPDNAKLVIERLTENSLFKIEKNLTEKLLEDLGKQSGEIRPIELQVVGAQLQEDQITTLAKYQELGDNPQVELVESSLKSVVKDCGEENEKLAWVVLWLLTDENNTRPLKTKAELVKESQLNPEKLELALNIFVGSGLVFLLPKKPAARYQLVHDYLVWFIRQRKGDKIIEELKLSRQEKKKNAITEANKSRELSLSGQRWDGLMTAMKARQKQIDSEFPATDEASEITNALRFAVYKRNKDDEFREINRIQGHENEVYGIAFSPDGETIASASADNTVKLWNREGKLLQTLTGHEKGVWDIAFSPDGETIATASHDKTVKLWNREGKLLQTLTGHEKGVWDIAFSPDGETIATAGGDNTVKLWNRQGNLLQTLTGHENWVYGIAFSPDGETIATAGGDNTVKLWNRQGNLLQTLTGHEKGVYGIAFSPDGETIASASGDNTVKLWNRQGKLLQTLTGHKDSVWGITFSPDGETIATAGGDKTVKLWNRQGKLLQTLTGHENGVFGIAFSPDGETIATAGGDKTVKLWNRQGKLLQTLSGHENSVYGIAFSPDGETIATAGGDKTVKLWNGQGKLLQTLTGHENGVNGIAFSPDGETIATASHDKTVKLWNRQGKLLQTLTGHKNWVLGIAFSPDGETIASASRDKTVKLWNREGNLLQTLTSHEKEVRGIAFSPDGKTIASASGTTVKLWNREGKLLQTLTGYENSVYGIAFSPDGETIATASRDNTVKLWNRQGKLLQTLTGHKNSVYGIAFSPDGETIASASRDNTVKLWNRQGKLLQTLTGHESSVEAVAFSPDGKTIATASADKTVKLWTGWRIEDLTKRGCQWLNDYLISHPQELEELEICQTDKHKELAASSWVIEGEKLAREGKVKEAVATFKKALKWNPDLKLNQNFKGLAASLAEAERLMEEGTTLAEEEKIEAAVEKYQRAKELDKIAFIPTWQNLDPEAKARYQAVDALLNKGLTLVTVGKVKEAIASYQKAEKIDPTQISASYWNTLCRYGSLYKKADGVMFACEKAVALNPKEVNLIDSRGLARALTGDIEGAIADFQAYVDWTSNEEKKAQRQEWIKALQAGENPFTDKLLKELR

SEQ ID NO: 34270 - protein, 505 aa, uncultured bacterium
MKRTALLTVAQMTKADEVTIQSGTAGHVLMDRAGRAVAKAILARWTERPVVVLCGPGNNGGDGLVIARYLLGEGWPVRVAVLGELWAYWGDALVHARGWDPSSCVPVGPEALAGAALVVDALFGAGLSRPLDGAAALTLHAAARAGMPVVAVDVPSGVFGDTGVDTGAAQAALTVTFFRKKPAHVLMPGRALCGEVIVADIGMGADVAESVQPGAFENAPECWASDWPFLGAEQHKYQRGHALVYGGGLMTGAARLSARAAARVGAGLTTVSVPELAWAVYAAALDSIMVQPLPGQDALALSASLHEVLGDARISAVLVGPGAGGGLAKGVRPLVEVALASGRPVVLDADALSAFESDPQALFTAIKASPGAVVLTPHEGEFARLFPQAAALPSRDKLSRARWAARQSGAVVVLKGADTVISSPDGRALVNTNAPPWLATAGAGDVLAGMVTGLLAQGMDALMAASAAVWLHGEAAQAFGPGLIADDLPAQLPAVLRKLLAPSSD

SEQ ID NO: 34271 - protein, 724 aa, Polaromonas sp. JS666
MPRPKRKAAGPTRPADGARDKQTQLDAFTAGSANVLTTNQGLQIPDNHNSLKGGVRGPTLLEDFILREKITHFDHERIPERVVHARGSGAHGYFKPYKSMVQYTSAAFLQDPAIETPVFVRFSTVAGSRGSADTVRDVRGFAVKFYTAEGNYDLVGNNIPVFFIQDAIKFPDLIHAVKPEPHHEMPQAASAHDTFWDFASLMPESTHMLMWTMSDRALPRSFRMMEGFGVHAFRFINARGDSHFVKFHWKPKLGVHGLAWDEAQKIAGKDPDFHRRDLWEAIESGHFPEWELGVQIVDDGQESELGFDILDATKLIPEEQVPVQIIGKLVLNRNPDNFFAETEQVAFHPGHLVPGIDFSNDPLLQGRLFSYTDTQLSRLGGANFHELPINRAVCPMHNFQRDGMHRQAISKGRVAYEPNTLGNGAEYRVDGAAQGFQSYPEQLEPPKIRRRSPSFDDHFSQATLFWNSQSVAEKDHIVAAFRFELSKVDVPEIRQRIVDNLAHVDLKLAGRVAVTLGIAAPDPKAAAGRLGFRDYRITSKVDEDPTLRMVGRPGGGVKTRKVAILVANGVESAPLRRIQQDLTEAGALCKLVAQHLGTVSTASGRQLAVDHTFANMPSVMFDAVLIPGGASSAAALSGLGEAVHFVLEAYKHGKTICAVNDGVQLLGTLGFSQGKNPELVTVPTVGVLIADGRKVLDGQVSQDFMAAIALHRHWDRLNIDAIPA

SEQ ID NO: 34272 - protein, 191 aa, Saccharomyces cerevisiae
MQTLKCVVVGDGAVGKTCLLISYTTNQFPADYVPTVFDNYAVTVMIGDEPYTLGLFDTAGQEDYDRLRPLSYPSTDVFLVCFSVISPPSFENVKEKWFPEVHHHCPGVPCLVVGTQIDLRDDKVIIEKLQRQRLRPITSEQGSRLARELKAVKYVECSALTQRGLKNVFDEAIVAALEPPVIKKSKKCAIL

SEQ ID NO: 34273 - protein, 293 aa, Thiomicrospira crunogena XCL-2
MTTPSKIAIFGEVLFDCFPTGEKVLGGAPFNIAWHLQALGDSPIFISRVGTDELGKKIILSAQEWGLKPDHIQLDPSHPTGQVAITVEEDEPHYLITPDCAYDFIDQHLIKLPSPPDILYHGTLALRNTASRQALDALAQTTNAPLFLDVNLREPWWHQDDVEQWLSRATWVKLNIEELKTLGFSGETIESDMRSFQKEFALEQVIVTRGAQGTIVLTQENQFHSKKPEALARFVDTVGAGDAFTAVYIHGLMSKWPIEKTLTAAQEFASQVIGIRGATSTDPAFYQEFIDTL

SEQ ID NO: 34274 - protein, 651 aa, Thiomicrospira crunogena XCL-2
MYEQISHSLLNDILNQIKPDIYEQDLRHFYTRLGANFYAIHSLFDRLYGNRPDFKQQSLRLVETMARQYIKRPDKLKDLDIEREDDYNWFLSQEWVGMALYSNGFANDLKGMKEHLNYFQELGVNLVHIMPIMKCPEGRSDGGYAISDFREIDERIGTLQDLNELSSEMQQRDLLLVLDVVLNHTSDEHEWAQKARSGDPVYQDYYYTFESRNIPDMFEQSMLEVFPETAPGNFTWDEEMQRWVMTVFNDYQWDLNYSNPAVFIEMLDVILFWANQGADILRLDAVAFLWKKIGSTCQNEHEAHLILQLLKDCCQVTAPGVLFIAEAIVAPVEVTKYFGEDAVIAKECEIAYNATFMALMWDAVATKNAKLLNQGIKSLPVKLERATWLNYVRCHDDIGLGFDDNDIIKAGYEPNSHRRFLIDYLTGKFDESHARGLPFGENAKTGDARISGSLASLVGLQYAMETGDIEATEDAVKIILLLHSMILSFGGIPLLYYGDEIGTLNDDAYLSDPNKMDDNRWVHRPHIDWEKTERRNSTGTVEYQIFSALKKMIAVRKEINVFSDFNNRELIEVDNPNLFVISRFDPHKFSDRVLVVANFNSKPQSLNLEEVSSWGSYQNGELMDLYTRQSPEIFNNALIVPGFSFYWLYEM

SEQ ID NO: 34275 - protein, 424 aa, Bacillus subtilis subsp. subtilis str. 168
MSAKQVSKDEEKEALNLFLSTQTIIKEALRKLGYPGDMYELMKEPQRMLTVRIPVKMDNGSVKVFTGYRSQHNDAVGPTKGGVRFHPEVNEEEVKALSIWMTLKCGIANLPYGGGKGGIICDPRTMSFGELERLSRGYVRAISQIVGPTKDIPAPDVYTNSQIMAWMMDEYSRLREFDSPGFITGKPLVLGGSQGRETATAQGVTICIEEAVKKKGIKLQNARIIIQGFGNAGSFLAKFMHDAGAKVIGISDANGGLYNPDGLDIPYLLDKRDSFGMVTNLFTDVITNEELLEKDCDILVPAAISNQITAKNAHNIQASIVVERANGPTTIDATKILNERGVLLVPDILASAGGVTVSYFEWVQNNQGYYWSEEEVAEKLRSVMVSSFETIYQTAATHKVDMRLAAYMTGIRKSAEASRFRGWV

SEQ ID NO: 34276 - protein, 446 aa, Chromobacterium violaceum ATCC 12472
MNHPLTTRSEFDHLDLRAHWMPFSANRNFQRDPRLIVSGEGNYLTDADGRRIFDSLSGLWCCGAGHSRKEIAEAAYRQLSTLDYSPGFQFGHPLSFRLAERVAAMAPGALNHVFFTNSGSECADTAVKMARAYWRLKGQASKTKLIGRARGYHGVNIAGTSLGGMNGNRKLFGPLMDADHLPHTLLPANAFSRGLPEQGAELADDLLRLIELHDASNIAAVIVEPMAGSAGVIVPPQGYLQRLREICTQHGILLIFDEVITGFGRTGSLFGADHFGVTPDIMNLAKQLTNGAVPMGAVVASSEIYDAFMAQATPEYAVEFAHGYTYSAHPVACAAALAALDVLEQENLVARAAELAPHFERGIHGLKGLPHVIDIRNCGLAGAVQIAPSGGDAIVRPYEAAMALWRKGFYVRYGGDALQFGPPFTATPQELDSLFDAVGETLAKLA

SEQ ID NO: 34277 - protein, 619 aa, Zea mays
MWRSCVSRGLSRAKASASRLLSTASSSYTVVDHTYDAVVVGAGGAGLRAAIGLSEHGFNTACITKLFPTRSHTVAAQGGINAALGNMSEDDWRWHMYDTVKGSDWLGDQDSIQYMCREAPKAVIELENYGLPFSRTEEGKIYQRAFGGQSLDFGKGGQAYRCACAADRTGHAMLHTLYGQAMKHNTQFFVEYFALDLLMDNEGKCQGIIALNMEDGTLHRFRASNTILATGGYGRAYFSATSAHTCTGDGNAMVARAGLPLQDLEFVQFHPTGIYGAGCLITEGSRGEGGILRNSEGERFMERYAPTAKDLASRDVVSRSMTMEIREGRGVGPLKDHIYLHLNHLPPEVLKERLPGISETAAIFAGVDVTKEPIPVLPTVHYNMGGIPTNYHGEVVDIKGDNPDAVIPGLMAAGEAACASVHGANRLGANSLLDIVVFGRACANRVADISKPGEKQKPLEKDAGEKTIAWLDKLRNANGSLPTSKIRLNMQRVMQNNAAVFRTQETLEEGCELISKTWESFHDVKLSDRSLIWNSDLIETLELENLLINACITMYSAEARKESRGAHAREDFTTRDDEKWMKHSLGYWENEKVRLAYRPVHMKTLDDEVESFPPKARVY

SEQ ID NO: 34278 - protein, 216 aa, Wolbachia endosymbiont strain TRS of Brugia malayi
MARNNPNIKLLYIRDLFAKECKEIEEYCILGKKQHIQISPEEGKLLSLFIKIHKVRSIVEIGTLYGYSSICMAKALPEYGHIYTIENNPKHFKIAKKNFNAFNMSNKITLIVGNALEKLAELSAKAPYDMIFIDADKAGYPKYLDWAESYIKQDGLIVADNTLLLNTVFLKSPPKEVLEKSWRAMREFNYRLSDEKKYCSILIPTDEGMTIALKLT

SEQ ID NO: 34279 - protein, 278 aa, Corynebacterium sp. ATCC 31090
MTVPSIVLNDGNSIPQLGYGVFKVPPADTQRAVEEALEVGYRHIDTAAIYGNEEGVGAAIAASGIARDDLFITTKLWNDRHDGDEPAAAIAESLAKLALDQVDLYLVHWPTPAADNYVHAWEKMIELRAAGLTRSIGVSNHLVPHLERIVAATGVVPAVNQIELHPAYQQREITDWAAAHDVKIESWGPLGQGKYDLFGAEPVTAAAAAHGKTPAQAVLRWHLQKGFVVFPKSVRRERLEENLDVFDFDLTDTEIAAIDAMDPGDGSGRVSAHPDEVD

SEQ ID NO: 34280 - protein, 223 aa, Brassica napus
QDECFKWLDAKEEGSVLYVCLGSICNLPLSQLKELGLGLEESERPFIWVIRGWEKYNELAVWIQESGFEERVKERGLLIKGWAPQVLILSHPSVGGFLTHCGWNSTLEGITSGLPLLTWPLFADQFCNEKLVVQVLKAGVKAGVEQPMKWGEEEKIGVLVDKEGVKKAVEELMGESDDAKERRRRAKELGVLAHKAVEEGRGSSHSNITSLLEDIMQLAQSNN

SEQ ID NO: 34281 - protein, 234 aa, Triticum aestivum
QIRQLMRSKALLPFFDSAYQGFASGSLDKDAQSVRMFVADGGELLMAQSYAKNMGLYGERVGALSIVCGSADIAVKVESQLKLVIRPMYSNPPLHGASIVATILKDSAMFDEWTLELKAMADRIISMREQLFNALKIRETPGDWSHIIKQIGMFTFTGLNSDQVAFMRQEYHIYMTSCRCHTCRSNKTEVNDNIATPSHNKILNSLQQFPRGSTRGVLLAELENLPCRLIKLVV

SEQ ID NO: 34282 - protein, 335 aa, Methanococcoides burtonii DSM 6242
MVEMFYDKDADLGALKGKIIAVMGYGSQGHAQAQNLHDSGLDVVIGLREGSRRWKQAEDDGLKVMTVADAAKAADVVQILLPDEIQSKVYYSEIEPGLEAGNSLVFSHGFNIHYNQIVPSKDLDVYMVAPKSPGHLVRRTYKEGAGVPGLIAVYQDASGNALEMALAHAKGVGCTRAGVIETTFREETETDLFGEQVDLCGGVASLIKTSFEVLVEAGYQPEMAYFETLHELKLIVDLIHEGGLEKMWYSVSNTAEYGGLTVGPQIINEESREAMYVALERIQNGEFAREFVLEGQTNHAVLTSMERLEKEHPVEVVGKKLRAMMPWLNSELNEE

SEQ ID NO: 34283 - protein, 242 aa, Hyacinthus orientalis
MGRGRVELKRIENKINRQVTFSKRRNGLLKKAYELSVLCDAEVALIVFSSRGKLYEFGSAGTGKTLERYQRCCYTSQDASIADREAQSWYQEVSKLKAKFESLQRSQRHLLGEDLGPLSVKELQQLERQMESALSQARQRKQTQIMLDQMEELRKKERHLGEINKHLKSRLEAEGATFRAIQGSWESTAAIQGNAFSVHPSQSRAMDCEPTLQIGYHHLVQPEEAIPRNTVGENNFMLGWVL

SEQ ID NO: 34284 - protein, 490 aa, Leuconostoc mesenteroides
MEIQNKAMLITYADSLGKNLKDVHQVLKEDIGDAIGGVHLLPFFPSTGDRGFAPADYTRVDAAFGDWKDVEALGEEYYLMFDFMINHISRESVMYQDFKKNHDDSKYKDFFIRWEKFWAKAGENRPTQADVDLIYKRKDKAPTQEITFDDGTTENLWNTFGEEQIDIDVNSAIAKEFIKTTLEDMVKHGANLIRLDAFAYAVKKVDTNDFFVEPEIWDTLNEVREILTPLKAEILPEIHEHYSIPKKINDHGYFTYDFALPMTTLYTLYSGKTNQLAKWLKMSPMKQFTTLDTHDGIGVVDARDILTDDEIDYASEQLYKVGANVKKTYSSASYNNLDIYQINSTYYSALGNDDAAYLLSRVFQVFAPGIPQIYYVGLLAGENDIALLESTKEGRNINRHYYTREEVKSEVKRPVVANLLKLLSWRNESPAFDLAGSITVDTPTDTTIVVTRQDENGQNKAVLTADAANKTFEIVENDQTVMSSDNLTQN

SEQ ID NO: 34285 - protein, 487 aa, Burkholderia sp. 383
MPLSCRAPRAHVAAWARYTGGRMSTRDGLQPPSVDIGATLDDGPFTTMQRCVVLLAALAIVLDGFDGQLIGFAIPVLIREWGITRGAFAPAVAAGLIGMGIGSACAGIVADRFGRRQAVIGSVFLFGIATCAIGFAPDVTAIAALRFVAGLGIGGALPTATTMTAEYTPARRRTMMVTATIVCVPLGGMLAGLFAHEVLPRYGWRGLFFAGGALPLVLGFVLVRALPESPRYLARRPARWPELGALLARMERPVAPGTAFTDMRDARAAGGRGGFGALFESGQARDTIALWCAFFMCLLAVYAAFSWLPTMLAASGLSVSVAGTGLTAYNLGGVIGALLCAWTIAHAGSRWPLVLCSIGGAASAVWLMGVDASRHTGWLIVGLGLHGLFVNAVQSTMYALCAYIYPTAVRATGTASALAFGRLGAILSAFAGAIVITTGGATAYLTMLAIAMGVVCVALLVVRRHIPRLSRAAVQPREGEELARTSS

SEQ ID NO: 34286 - protein, 416 aa, Triticum aestivum
MASPFGATSTVGLMAAPTGLVSDKKPFSLSSISLADRPRHVRLQRKCNFRVKAAKELYFNKDGSATKKLQVGVNKLADLVGVTLGPKGRNVVLESKYGSPKIVNDGVTVAREVELEDPVENIGAKLVRQAAAKTNDLAGDGTTTSVVLAQGLIAEGVKVIAAGANPVQITRGIEKTAKALVLELKKMSKEVEDSELADVAAVSAGNNYEIGNMIAEAMSKVGRKGVVTLEEGRSSENNLYVVEGMQFERGYISPYFVTDSEKMTTEYENCKLLLVDKKITNARDLINVLEEAIRGQYPILIIAEDIEQEALATLVVNKLRGSLKICAIKAPGFGERKTQYLDDIAILTGGTVIRDEVGLTLDKADNTVLGTAAKVVLTKESTTIVGDGSTQEEVTKRVAQIKNLIEAAEQDYEKEN

SEQ ID NO: 34287 - protein, 315 aa, Clostridium perfringens str. 13
MNKVFCIGELLIDFIGKDIGKGLKNGVNFEKKAGGAPANVGAAVCKLGGESYFLGQVGNDSFGEFLVDMLKNIGINTEMTKMDGYTTLAFVAIDEKGERDFEFHRGSDGEYSFNNIDLSKIEKDDIIHFGSATGFLKGELKNTYFKLLEIGRKNGNFISFDPNYRDMLIKEEGIEEFKEDCKKFISSCDFLKLSDEEIKLLTEEEDLERGVEKLHSLGAKIIAVTLGGKGTLLSNGIHSEIVPSIKINQVDSTGAGDAFVGAVLKKVSELKDKKNLDLNSWREIISYGNKVGALTCTNYGAIDAIPNEEDLMKYI

SEQ ID NO: 34288 - protein, 723 aa, Thermotoga sp. RQ2
MWLLFLIPLVALGFAAANFAAVVRKPEGTERMKEISSYIRSGADSFLAHETKAIFKVAIVIAILLMIFTTWQTGVAFLLGAVMSASAGIVGMKMATRANVRVAEAARTTKKIGPALKVAYQGGSVMGLSVGGFALLGLVLVYLIFGKWMGQVDNLNIYTNWLGINFVPFAMTVSGYALGCSIIAMFDRVGGGVYTKAADMAADLVGKTELNLPEDDPRNPATIADNVGDNVGDVAGLGADLLESFVGAIVSSIILASYMFPIYVQKIGENLVHQVPKETIQALISYPIFFALAGLGCSMLGILYVIVKKPSDNPQRELNISLWTSALLTVVLTAFLTYFYLKDLQGLDVVGFRFGAISPWFSAIIGIFSGILIGFWAEYYTSYHYKPTQFLSKSSIEGTGMVISNGLSLGMKSVFLPTLTLVLGILFADYFAGLYGVAIAALGMLSFVATSVSVDSYGPIADNAGGISEMCELDPEVRKITDHLDAVGNTTAAIGKGFAIGSAIFAALSLFASYMFSQISPSDIGKPPSLVLLLNMLDARVIAGALLGAAITYYFSGYLISAVTKAAMKMVDEIRRQAREIPGLLEGKAKPDYNRCIEITSDNALKQMGYPAFIAILTPLVTGFLLGAEFVGGVLIGTVLSGAMLAILTANSGGAWDNAKKYLEAGNLEGYGKGSEPHKALVIGDTVGDPLKDTVGPSLDILIKIMSVVSVIAVSIFKHVHLF

SEQ ID NO: 34289 - protein, 548 aa, Corynebacterium glutamicum ATCC 13032
MAKIIAFDEEARRGLEKGLNTLADAVKVTLGPKGRNVVLEKAWGAPTITNDGVTIAREIELEDPYEKIGAELVKEVAKKTDDVAGDGTTTATVLAQALVREGLRNVAAGSNPMGIKRGIEKAVAQVTEKLLEAAKEVETEEQIAATAGISAADPAIGAQIAKAMYAVGGGKLNKDSVITVEESNTFGVELEVTEGMRFDKGYISGYFATDMERLEAVLEDPYILLVSGKISNIKDLLPLLEKVMQSGKPLLIISEDVEGEALSTLVVNKIRGTFKSVAVKAPGFGDRRKAQLQDIAVLTGGQVISEEVGLSLETADLPLLGQARKVVVTKDDTTIVDGAGSEAQIEGRVNQIRVEIENSDSDYDREKLNERLAKLAGGVAVLKVGAATEVELKERKHRIEDAVRNAKAAVEEGIVAGGGVALLQAAHVLDNDLELSGDEATGVRIVREALTAPLKQIAANAGLEPGVVADKVSQLPQGEGLNAANGEYVDLMAAGINDPVKVTRSALQNAASIAALFLTTEAVVADKPQPAGAAGMPGADEMGGMGGF

SEQ ID NO: 34290 - protein, 448 aa, Streptococcus pneumoniae TIGR4
MREYDIIAIGGGSGGIATMNRAGEHGAKAAVIEEKKLGGTCVNVGCVPKKIMWYGAQIAETFHQFGEDYGFKTTDLNFDFATLRRNREAYIDRARSSYDGSFKRNGVDLIEGHAEFVDSHTVSVNGELIRAKHIVIATGAHPSIPNIPGAELGGSSDDVFAWEELPESIAILGAGYIAVELAGVLHTFGVKTDLFVRRDRPLRGFDSYIVEGLVKEMERTNLPLHTHKVPVKLEKTTDGITIHFEDGTSHTASQVIWATGRRPNVKGLQLEKAGVTLNERGFIQVDEYQNTVVEGIYALGDVTGEKELTPVAIKAGRTLSERLFNGKTTAKMDYSTIPTVVFSHPAIGTVGLTEEQAIKEYGQDQIKVYKSSFASMYSACTCNRQESRFKLITAGSEEKVVGLHGIGYGVDEMIQGFAVAIKMGATKADFDATVAIHPTASEEFVTMR

SEQ ID NO: 34291 - protein, 493 aa, Burkholderia sp. 383
MYLGIDLGTSEVKVLLLAPDGTVVGTAGSPFSVSRPHPRWAEQHPDDWWQGTLAALATLRERHREAFAAVRGIGLSGQMHGAVLLGRDDRVLRPAILWNDMRSADECALLTDRAPDLHALAGNLAMPGFTAPKLLWVAKHEPDVFAATACVLMPKDYLRFRLTGAKVSDPSDAAGTLWLDVARRDWSDALLAACGMTRDQMPRIVEGNAPSGTLRADIARELGLSEAVVVAGGGGDNATSALGIGAIHAGDGFVSLGTSGVLSVVGDRFMPNPSSAVHAFCHAIPDRWQLMSVVLSAASCLRWVCKLTGTDEPALLAEVEALDADALATAPLFLPYLSGERTPHNDPYAQGVFFGMTHATERAHLGYAVLEGVTLGLADGLDALHAAGVETDQLSLIGGGARSAFWAQLIADALNVRTRQHGGGETGAALGAARLGWLAVGGDPHAVLTKPPVRAEYAPDAARHALLRERLDAFRALYRHVQPLYEPSRARLA

SEQ ID NO: 34292 - protein, 402 aa, Wolbachia endosymbiont of Drosophila melanogaster
MVNYEEIFLNKIKDIKDEGRYREFTHFASLPGRLPHIMDYERNREVIVWCSNNYLGMSQNESVIAAIQNSSVGAGGTRNISGTTKEVVELEKSLACLHKKEAALTFACGYLANQTTLSTLSSVIPGVVIFSDEKNHSSMIEGIKSGKRPKHIFKHNDVNHLEQLLKSIDKKTPKIIALESVYSMDGDVAPLKEICDLADQHNAITYLDEVHAVGMYGSHGGGIAEREGLMDRITVIQGTLSKAFGVMGGYIASSKSLVDVIRSSAPGFIFTTAMSPVLAAAAKASVEHLKSSNIEREKQKQVVEKVKSSLRNAGINFIPTETHIIPIIIGNSELSKKASKLLFDEYGIYVQHINYPTVPRGTERFRITPTPYHTDEMIEHLTESLVKVFEKLSISVACLCYS

SEQ ID NO: 34293 - protein, 353 aa, Rickettsia prowazekii
LIGSDSKTDLALLKIDSEEPLPFVEFGDSNDARVGDWVIAIGNPFGNLGGTVTSGIISSKGRDIDVDTDNIVDNFIQTDAAINNGNSGGPMFNLDQKVIGVNTAIFSPLGTNIGIGFAIPSNTAKPIIERLKKDGKVSRGRLGVTIQDLTEEISEVLGFKGTNGVLVSKVQENGPGYKAGIKKGDIIIKFGDRLVKNTKKLRVIIADTPINQEVKLKILRDAQELELPIKVTADNEEVINDSTEETNKAVIINKKENNLSITKNNITFSNLTEELRKKYDIPQDKTGIVIINIDEEESVFKLGDLITNINHDSIDDIRKLEVLYENAKKLEKQNILLLIERGDTSVFIPLSVS

SEQ ID NO: 34294 - protein, 544 aa, Psychrobacter arcticus 273-4
MTKFIFVTGGVVSSLGKGITAASLAAVLEARGVNVTMTKMDPYINVDPGTMSPFQHGEVFVTEDGAETDLDLGYYERFLRHSKMSKSNNFTSGRIYQNVLNKERRGEYLGGTVQVIPHITDEIKSKILASGEGYDVAIIEIGGTVGDIESLPFMEAVRQMQVELGRHRAMLMHLTLVPYIASAGETKTKPTQHSVKELRSIGLQPDILICRSDHHISPDNRRKIALFTNVEERAVIMCEDAQSIYQIPRTLHEQDLDDLICERFGLDLPEADLSDWDKVVEAQLNPESTVTVAMVGKYVELPDAYKSINEALLHAGITHKVDVKIDYIDAERLEDDDSLLAQLHNADAILVPGGFGERGTMGKIKAITYARENKVPYLGICLGMQLAVIEYARNVLHIDANSSEFDRKTAEPIIGLITEWLDERGELQIRSDDSDLGGTMRLGAQQAELVAGSKLAQIYGATNITERHRHRYEMNNRYIEPLEQAGMTISGYSAKQHLVESVELADHPWFVAVQFHPEFTSSPRGGHPLFNSFVKAAKNYSEAK

SEQ ID NO: 34295 - protein, 168 aa, Ralstonia metallidurans CH34
MTTQIETAILAGGCFWGMQDLLRRYPGVLSTRVGYTGGDVPNATYRHHGTHAEGIEIAFDPSQISYRQILEFFFQIHDPTTKNRQGNDVGTSYRSAIFYLNDEQKQTAEDTVADVNASGLWPGKVVTEIAPAGPFWDAEPEHQDYLERYPNGYTCHFIRPGWKLPKRG

SEQ ID NO: 34296 - protein, 332 aa, Arabidopsis thaliana
MAKEPVRVLVTGAAGQIGYALVPMIARGIMLGADQPVILHMLDIPFAAEALNGVKMELVDAAFPLLKGVVATTDAVEACTGVNVAVMVGGFPRKEGMERKDVMSKNVSIYKSQASALEKHAAPNCKVLVVANPANTNALILKEFAPSIPEKNITCLTRLDHNRALGQVSERLSVPVSDVKNVIIWGNHSSTQYPDVNHATVKTSVGEKPVRELVKNDEWLNGEFISTVQQRGAAIIKARKLSSALSAASSACDHIRDWVVGTPEGTFVSMGVYSDGSYNVPAGLIYSFPVTCRNGEWTIVQGLPIDDASRKKMDLTAEELKEEKDLAYSCLS

SEQ ID NO: 34297 - protein, 81 aa, Gaertnera lowryi
TPQDEMRAGMSYFHGTIWKGVPKFLRRVDTALKNIGINERVPYNAPVIQFSSWMGGDRDGNPRVTPEVTRDVCLLARMMAA

SEQ ID NO: 34298 - protein, 167 aa, Panax ginseng
MFSMVTEFMNYGQQTVRAARYIGQGFMITLSHANRLPVTIQYPYEKLITSERFRGRIHFEFDKCIACEVCVRVCPIDLPVVDWKLEMDIRKKRLLNYSIDFGICIFCGNCVEYCPTNCLSMTEEYELSTYDRHELNYNQIALGRLPMAVIDDYTTRTILNLPEIKNA

SEQ ID NO: 34299 - protein, 266 aa, Haloarcula marismortui
MSGNEKEGLDASDSDFDPSDEDDEAVDAETETEAEQPADDAEEATEAEPTDDESEADERRPQLDEDVMPDEQSEADLLIPVEDYLGAGVHIGTQQKTQDMERFIHRVRTDGLYVLDVSMTDERIRTAADFLSNYEPEQILAASSRQYGRFPAEKFAEAIGARVRTGRFIPGTLTNPDYDGYIEPDIVVVTDPIGDAQAVKEAITVGIPVIAMCDSNNTTSNVDLVVPTNNKGRKALSVVYWLLANETLDRRGAEPTYGLDDFESDI

SEQ ID NO: 34300 - protein, 200 aa, Brassica napus
TPDLTKGALLIAIGCICWAGFVNLQAITIKSYPVELSLTAYICLMGSIESTIVALFIEKGNPSAPARPLDSKLLAAVYGGVICSGVGYYVQGVIMKTRGPVFVTAFNPLSMVIVAILGSIILAEVMYLGRILGAIVIVLGLYSVLWGKSKDEPANSFSDTDKELPLSNIQVVSFSSKANADKDTMDANVVILRPTTNDSV

SEQ ID NO: 34301 - protein, 803 aa, Ralstonia metallidurans CH34
MARTHILGFPRIGARRELKFAQEAFWRGETPEAALRETGTTLRRRHWQLQADAGLATVAAGDFAWYDQMLGLTALLGALPKRFGFDAASLTLAQYYELARGNAAQPAMEMTKWFDTNYHYLVPELDADSTFDGGPTWFLDEVDEALALGLATRPVLIGPVTYLYLSKSHVPGFDRLTLLPKVVQAYRRILAQLRERGIEWVQIDEPVLCLDIDAEWLDAIDRAYVDLVDLVDLADAGPKVLLATYFDTAAPHAARAAALPVHGFHVDLVRAPEQLETWLQVLPANAVLSAGVIDGRNIWRADLRAVLATLAPLHAQLGDRLWIAPSCSLLHVPVSLDAEQRLDPELKSWLAFATEKLEELRTLAVALNQGKAAAATQLAASDAARESRRTSRRVVNQRVQGRLAAVTADMADRASAFDIRIERQREALQLPALPTTTIGSFPQTTAIRQTRAAYKRGEIGALDYLQRIRGEIELAVRKQEALGIDVLVHGEAERNDMVEYFGEQLCGYAFTENGWVQSYGSRCVKPPVIYGDVYRPEPMTVDTARYAQSLTDKPMKGMLTGPVTMLQWSFVRDDQPRATTARQLALAIRDEVRDLEAAGIRIIQIDEPALREGLPLRRDDWTAYLEWAVNAFRLSAAGVSDQTQIHTHMCYAEFNDILPAIAAMDADVITIETSRSAMELLEGFGEFDYPNEIGPGVYDIHSPRVPTVEAITRLLERACEVIPPERLWVNPDCGLKTRGWPETEAALANMITATRQLRGKLASQPPVTWKRVTQPAPGSARSAAAAHAHGTACDPNCAGQLSI

SEQ ID NO: 34302 - protein, 342 aa, Porphyromonas gingivalis W83
MKQKILVTGGTGYIGSHTTVELQQAGYRVVSVDNFSNSNAAVLDGIARITGVRPDFYEADCNDTEAMERVFTAHPDIAGVIHFAASKAVGESVQKPLLYYRNNILSLLNILELMERFGTRGIVFSSSCTVYGQPEVLPVTEEAPIQEALSPYGNTKQINEEIIRDAIHAGAGYKAILLRYFNPIGAHPTAHIGELPNGVPQNLIPYLTQTAAGIRAELSVFGDDYDTPDGSCIRDYIYVVDLAKAHVAAIERMLNEEKASDSLEVFNIGTGRGVSVLELIRTFERVTGVAVPHRIVGRREGDIEQVWAEPKKANEVLGWKALESLEDTLLSAWRWQQRLSEK

SEQ ID NO: 34303 - protein, 304 aa, Zea mays
MMRETYMDVLPPVDHIAASRSGGWFPGAARLWTAAENKQFERALAGLDLCRPDWEKVARAIPGRTVREVVSHFKSLQVDVQQIESGLVPMPVYGAGAGSFTLQWDGCYGPADSRHNGYRFGSGGCGRRHHGRTPEQDRKKGVPWTEEEHRLFLLGLKKYGKGDWRNISRNYVQTRTPTQVASHAQKYFIRLNSGGKDKRRSSIHDITTVNLTDDERAPSPSRSSLITTTSQPNAPAPAAAVIGGPFSSAAAAEAKQHQHGAGNLPPNRTSVVPAVYRMDDSQDHGLQCGPLRHQLVASHHSVLF

SEQ ID NO: 34304 - protein, 368 aa, Triticum aestivum
AGSHRWPAAASRSSGGVATSCGRRGSGMERYEVIKDIGSGNFGVAKLVRDVRTKELFAVKFIERGHKIDENVQREIMNHRSLRHPNIVRFKEVVLTPTHLAIVMEYAAGGELFERICSSGRFSENEARFFFQQLLSGVSYCHSMQICHRDLKLENTLLDGSEAPRLKICDFGYSKSSVLHSQPKSTVGTPAYIAPEVLSRREYDGKVADVWSCGVTLYVMLVGAYPFEDPDEPKNFRKTITRILSVQYAVPDYVRISMECRHLLSRIFVANPEQRITIQEIKNHPWFLKNLPIEMTDEYQMSLHMVGVNAPPQTLEEVMAIIQEARIPGDGSKFAGQLSVPGLGSMELDDIDDVDADVEDSGDFVCAL

SEQ ID NO: 34305 - protein, 765 aa, Triticum aestivum
  misc_feature (379)..(379): Xaa can be any naturally occurring amino acid
  misc_feature (684)..(684): Xaa can be any naturally occurring amino acid
  misc_feature (717)..(717): Xaa can be any naturally occurring amino acid
  unsure (1)..(765): unsure at all Xaa locations
MAILGELGTEILIPVCGVVGIVFAVAQWFIVSKVKVTPGAASAAAGSKNGYGDYLIEEEEGLNDHNVVVKCAEIQTAISEGATSFLFTMYQYVGMFMVVFAAIIFLFLGSIEGFSTKGQPCTYSTGTCKPALYTALFSTASFLLGAITSLVSGFLGMKIATYANARTTLEARKGVGKAFITAFRSGAVMGFLLSSSGLVVLYITINVFKMYYGDDWEGLFESITGYGLGGSSMALFGRVGGGIYTKAADVGADLVGKVERNIPEDDPRNPAVIADNVGDNVGDIAGMGSDLFGSYAESSCAALVVASISSFGINHDFTAMCYPLLVSSVGIIVCLLTTLFATDFFEIKAASEIEPALKKQLIISTALMTIGVAVISWLXALPAKFTIFNFGAQKDVSNWGLFFCVAVGLWAGLIIGFVTEYYTSNAYSPVQDVADSCRTGAATNVIFGLALGYKSVIIPIFAIAVSIYVSFSIAAMYGIAMAALGMLSTMATGLAIDAYGPISDNAGGIAEMAGMSHRIRERTDALDAAGNTTAAIGKGFAIGSAALVSLALFGAFVSRAGVKVVDVLSPKVFIGLIVGAMLPYWFSAMTMKSVGSAALKMVEEVRRQFNTIPGLMEGTAKPDYATCVKISTDASIKEMIPPGALVMLTPLIVGTLFGVETLSGVLAGALVSGVQIAISASNTXGGAWDNAKKYIEAGNSEHARSLGPKGSDCHKAXAVIGDTIGDPLKDTSGPSLNILIKLMAVESLVFAPFFATYGGVLFKYI

SEQ ID NO: 34306 - protein, 496 aa, Arabidopsis thaliana
MASEKSHKVHPPLHFILFPFMAQGHMIPMIDIARLLAQRGATVTIVTTRYNAGRFENVLSRAMESGLPINIVHVNFPYQEFGLPEGKENIDSYDSMELMVPFFQAVNMLEDPVMKLMEEMKPRPSCIISDLLLPYTSKIARKFSIPKIVFHGTGCFNLLCMHVLRRNLEILKNLKSDKDYFLVPSFPDRVEFTKPQVPVETTASGDWKAFLDEMVEAEYTSYGVIVNTFQELEPAYVKDYTKARAGKVWSIGPVSLCNKAGADKAERGNQAAIDQDECLQWLDSKEDGSVLYVCLGSICNLPLSQLKELGLGLEKSQRSFIWVIRGWEKYNELYEWMMESGFEERIKERGLLIKGWSPQVLILSHPSVGGFLTHCGWNSTLEGITSGIPLITWPLFGDQFCNQKLVVQVLKAGVSAGVEEVMKWGEEEKIGVLVDKEGVKKAVEELMGASDDAKERRRRVKELGESAHKAVEEGGSSHSNITYLLQDIMQQVKSKN

SEQ ID NO: 34307 - protein, 594 aa, Thiomicrospira crunogena XCL-2
MTRVERKQQLIDLIERAKDLGYLTFSDVNDVLPDDIEEDQLGQVLTILRDFGIQLFESAPDADELLTKEGETFDDAAAEAAILALAEVDAEFGRTTDPVRMYMREMGSVELLTRQGEVEIAKRIEYGIRDMLEAMAKYPQVAMELLASFSRIEDGEGKTADLIQGFIRPADLVDIPIEELSPDNDSGEPKEDGINPEELDAFLQKLAKLNADTLKAEEKNGYSDPKSVKKRAEIVALLATVKLSPVFVNRMIKGIKLRVSSIREQERNVVNAVMRQVGVPRPSFLKLFVGSETDYDVLDRLKEAHPDKADALEEVRADVKRAQKRLAMIEKAEKMPINQYKTIYKDLSKAESIARIAKREMIEANLRLVISIAKKYTNRGLQFLDLIQEGNIGLMKAVEKFEYRRGYKFSTYATWWIRQAITRSIADQARTIRIPVHMIETINKLNRIQRQLLQKMGREPTPEELAEEMEMPEDKVRKVMKIAKEPISMETPVGDDEDSSLGDFIEDSNILSPQDSADLEGMGETVREMLSTLTPREAKVLRMRFGLGMNTDHTLEEVGKQFDVTRERIRQIEAKALRKLRHPSRAERLKSFLD

SEQ ID NO: 34308 - protein, 302 aa, Antirrhinum majus
MVSSHRSLMEQYEKVEKIGEGTYGVVYKARDRVTNETIALKKIRLEQEDEGVPSTAIREISLLKEMQHGNIVRLQDVVHSEKRLYLVFEYLDLDLKKHMDSCPEFSQDPRLVKMFLYQILRGIAYCHSHRVLHRDLKPQNLLIDRRTNALKLADFGLARAFGIPVRTFTHEVVTLWYRAPEILLGSRHYSTPVDVWSVGCIFAEMVNQRPLFPGDSEIDELFKIFRVMGTPNEETWPGVTSLPDFKSAFPKWPAKELAAVVPNLDASGLDLLDKMLRLDPSKRITARNALQHEYFKDIGFVP

SEQ ID NO: 34309 - protein, 250 aa, Porphyromonas gingivalis W83
MDYNNITEALQAFRTEKAYRHAPLRSCFFDMDGVLFDSMPAHARSWVEAAGECGIAAEPLDFYRWEGQKGSDTIKILFERGYGRLPTEKEIADMYGRKSQLFALYNSGNVIDDAPALVSDVCDRGLRIMLVTGSSQTDILQRLQRSYGDNFSPANMVTGADVHRGKPHPEPYLKALECVGMSPSEAFVVENAPLGVRAAVDAGIFTIAVNTGCLPDADLWDAGASLVLPSMAVLRSLLGELLTESLSSSA

SEQ ID NO: 34310 - protein, 280 aa, Antirrhinum majus
AYGVVYKARDIETNEDIALKKIRLEQEDEGVPSTAIREISLLKEMHHENIVNLKDVVHREKRLYLVFEYLDLDLKKHMDSCPEFSQDLHMVKMFLCQILRGVAYCHSHRVLHRDLKPQNLLIDRGSNTIKLADFGLARAFGIPVRTFTHEVVTLWYRAPEVLLGSRHYSTPVDVWSVGCIFAEMVNQKPLFPGDSEIDELHKIFRIIGTPNEDIWPGVTSLPDFKSSFPKWPPKELATIVPNLGATGLDLLCKMLQLDPSKRITAKKALEHEYFKDIVLP

SEQ ID NO: 34311 - protein, 460 aa, Bacillus subtilis subsp. subtilis str. 168
MKLVLGALQWTAFIIAAAIVVPVAVAQSFHLDHSDSARLIQSTFFVLGIAAVIQCLKGHRLPINESPAGLWWGVYTIYAGLTGTVFATYGDTLRGLQGALLVSAVCFFLLSVFKVIDRLAKLFTPVVTGVYLLLLVMQLSQPIIKGILGIGYRQDGVDGLVFGLALVVIAAAFIMTNSNIMFFKQYSILLALFGGWVLFAAAGAAKPIEMPDRLFQLPSLFPFGTPLFNSGLIITSIFITILLIVNMLASMKVVDIAMKKFSKQPDGKHHERHAGFAASFSHLLSGLTGAIAPVPISGAAGFIETTKMPSKKPFMLGSILVIVISVIPFFMNTFASLPSPVGFAVNFVVFSAMGGLAFAEFDSYEKEESKRVRSIIGISLLTGVGIMFVPETALKGLHPVFISLLSNGLVLGTLAAIAADQFQLWRRRNPTISCQRRTNIEFWCRCDKINDMSLTKRRER

SEQ ID NO: 34312 - protein, 312 aa, Antirrhinum majus
MAEEKSKSSAMDAFVKLEKVGEGTYGKVYRAMEKSTGKIVALKKTRLHEDEEGVPPTTLREVSLLRMLSRDPHVVRLLDVKQGQNKEGKTVLYLVFEYMDTDLKKYIRSFKQTGESIAPMNVKSLMYQLCKGVAFCHGHGVLHRDLKPHNLLMDRKTMMLKIADLGLARAYTLPIKKYTHEILTLWYRAPEVLLGATHYSPAVDMWSVACIFAELVTQKALFPGDSELQQLLHIFRLLGTPNEEIWPGVSTLVDWHEYPQWTAQPISSAVPGLDEKGLNLLSEMLHYEPSRRISAKKAMEHPYFDELDKSGL

SEQ ID NO: 34313 - protein, 504 aa, Debaryomyces hansenii CBS767
MSNASLSWLTKLNTSETPDKVLRRSSIIGTIGPKTNNVDVLVKLRKAGLNIVRMNFSHGSYEYHQSVIDNAKQSEEIYKGRPLAIALDTKGPEIRTGTTIDDKDYPILPNHEMIFTTDEAYAKKCDDKVMFIDYKNITKVIEAGKIIYIDDGVVSFEVLQIVDDKTLKVRSVNSGKICSHKGVNLPGTDVDLPALSEKDKADIKFGVKNGVHMIFASFIRTGDDIKEIRKVLGEEGKDIQIIAKIENQQGVNNFDEILVETDGVMVARGDLGIEIPAPQVFVVQKQLIAKCNLAAKPVICATQMLESMTYNPRPTRAEVSDVGNAILDGADCVMLSGETAKGNYPFEAVSMMHNTAIIAEKAIAYQPLHNEIRSLANRPTPTTETCAMASVSAAYEQDAKAIVVLSTSGFTSRLVSKYKPNVPVMMVTRNHRAARYCHLYRGVYPFVYEKKTVDNWQEDVENRLRWAVSEAIDLGIIKKGDSIVTIQGWTRGSGHSNTVRVVQA

SEQ ID NO: 34314 - protein, 170 aa, Methanococcoides burtonii DSM 6242
MEREKLEKDIMRLLEQQPEISAKGIADRLSVSEDIVTRTIESLSDTRHKVLIVDDEPDAVIATKRALEADGYNVIEANNGTMAFDALKSDIPDVILLDVMMPDMDGFEVCRRLKEEPLYENIPVIMLTAKGEINDKVEGLDIGADDYMTKPFNLKELKARIKTVLRRTQD

SEQ ID NO: 34315 - protein, 331 aa, Arabidopsis thaliana
MEESINQNPEAMEALISNLFGNISSLKSAYIELQSAHTPYDPEKIQAADKVVISELKNLSEMKHFYRENNPKPVCVSPQDSRLAAEIQEQQSLLKTYEVMVKKFQSEIQNKDSEITQMLQKIEEANQKRLKLEKNLKLRGMSTNQGSGGDGNLQFPDLTTELFVSTYEAAAKVVHDFSKPLINMMKAAGWDLDTAANSIEPDVVYAKRPHKEYAFESYICQRMFSGFQQKNFSVNSESATVMADDDTDTFFRQFLALKDMDPLDALDQRDYVTGGGHPRTAFYQAFLKLAKSIWILHKLAYSFDPAAKIFQVKKGSEFSDSYMESVVKNIH

SEQ ID NO: 34316 - protein, 381 aa, Phanerochaete sordida
MAFSTLVALVALAAIARAAPTTDSAVCSDGTTVNNAACCAFIPLAQDLQANLFQNDCGEDAHEVIRLTFHDAIAISQSQGPTAGGGADGSMLLFPTVEPNFGANNGIDDSVNNLIPFMQKHNTISAGDLVQFAGAVALANCPGAPRLEFLAGRPNKTTAAIDGLVPEPQDSVTKILQRFADAGNFSPFEVVSLLASHSIARADKVDETIDAAPFDSTPFTFDTQVFLEVLLKGVGFPGAANNTGEVTSPLPTGSGADTGEMRLQSDFALARDSRTACFWQGFVNEQAFMASSFRAAMSKLAVLGHSRSALIDCSDVVPQPKPAVNKPATFPASTGPQDLELACTTSKFPTLTTDPGASETLIPHCSDGSMSCPAIQFDGPA

SEQ ID NO: 34317 - protein, 427 aa, Burkholderia mallei ATCC 23344
MSNNQTLFERAQRTIPGGVNSPVRAFRSVGGTPRFVARAQGAYFWDADGKRYIDYIGSWGPMIVGHVHPDVLAAVQRVLADGFSFGAPTEAEIEIAEEICKLVPSIEQVRMVSSGTEATMSALRLARGFTGRSRIVKFEGCYHGHADSLLVKAGSGLLTFGNPTSAGVPADVAKHTTVLEYNNVAALEEAFAAFGGEIAAVIVEPVAGNMNLVRGTPEFLNALRALTAKHGAVLIFDEVMCGFRVALGGAQQHYGITPDLTCLGKVIGGGMPAAAFGGRGDIMSHLAPLGGVYQAGTLSGNPVAVAAGLATLRLIQAPGFHDALADKTRRLADGLAAEARAAGVPFSADAIGGMFGLYFTEQVPASFADVTKSDIERFNRFFHLMLDAGVYFAPSAYEAGFVSSAHDDATLDATLDAARRAFAALRA

SEQ ID NO: 34318 - protein, 377 aa, Phanerochaete sordida
MAFTTLFAFVALAAMTRAAPTAVCSDGTRVSNAACCAFVPLAQDLQQTLFMGDCGEDAHEVVRLTFHDAIAISQSQGPKAGGGADGSMLLFPTIEPNFGANNGIDDSVNNLIPFMQKHNTISAGDLVQFAGAVALANCPGAPRLEFLAGRPNKTIAAVDGLIPEPQDSVTKILQRFEDAGNFSPFEVVSLLASHSIARADKVDETIDAAPFDSTPFTFDTQVFLEVLLKGTGFPGQTNVTGEVASPIPVGSGEDTGEMRLQSDFALARDSRTACFWQGFVNEQAFMAASFRAAMAKLAVLGHNRNSLIDCSDVVPQPKPAVNKPATFPATKGPKDLELTCNARFPTLTTDPGAQETLIPHCSDGGMDCPAVQFDGPA

SEQ ID NO: 34319 - protein, 482 aa, Arabidopsis thaliana
  misc_feature (271)..(271): Xaa can be any naturally occurring amino acid
  misc_feature (310)..(310): Xaa can be any naturally occurring amino acid
  unsure (1)..(482): unsure at all Xaa locations
MEQEDFYFPDTDLDLSFTSTTTDRTFASSSARTSLTLSFNDRLSTSSAVTTSSTSSSSVNHRRHDPHWSAIKSAKLLSSDGNIHLRHLKLIRHLGTGNLGRVFLCNLRDSSARFALKVIDRNCLTTEKKLSQVETEAEILSLLDHPFLPTLYARIDESHYTCLLIDYAPNGDLHSLLRKQPGNRLPIQPVRFFAAEVLVALEYLHAMGIVYRDLKPENVLLREDGHVMLSDFDLCFKSDVVPTFKSRRYRRSSSSPSLRRRRSGCFSVAAXEKKYEREEIVSEFAAEPVTAFSRSCVGTHEYLAPELVSXGNGHGSGVDWWAFGIFLYELLYGTTPFKGESKEQTLRNIVSTTKTASFHMDGDLDEARDLIEKLLVKDPRKRLGCARGAQDIKRHPFFDGIKWPLIRHYKPPEEVRGLVIKKSTRPHASHVIAVSPRRRKSFLWRALSYLLRGKSSSGGSKNQSNSNYYHYVGKSYASRKRV

SEQ ID NO: 34320 - protein, 382 aa, Phanerochaete sordida
MAFASLLAIFALVAVASARPRPNPGAVCSDGTRVSNGACCAFIPLMQDLQQNVFQNECGEDAHEVIRLTFHDAIAISRSQGPKAGGGADGSMLLFPTVEPNFAANNGIDDSVNNLIPFMQKHNTISAGDLVQFAGAVALTNCPGAPRLEFLAGRPNKTIAAVDGLIPEPQDDVTKILKRFDDAGGFTPFEVVSLLASHSVARADKVDSTIDAAPFDSTPFTFDTQVFLEVLLKGTGFPGLSNNTGEVASPLPVGTGSDTGEMRLQSDFALARDERTACFWQSFVNEQEFMSASFKAAMSKLAVLGHNRNTLTDCSEIIPEPLPAVKKPATFPATTSAKDLQLTCRALRFPTLTTDQGAQQTLIAHCPNGSMNCTSVQFNGPA

SEQ ID NO: 34321 - protein, 318 aa, Burkholderia sp. 383
MAEIVVAGELLAEFVAAERGQGFDAPGLFEGPFPSGAPAIFADQAARLGARVAYAGCVGRDAFGDAIVARLERDGVDVARIRRVARPTGTAFVAYREDGSRSFVYTLSTSAAACVDAPDVDTAMFDGCRYFHVMGSSLTSESAIAAVQRGVIEAARAGAKVSFDPNVRPEMLSFRPMRAALDVMLDACHLFLPSEADLPFFCGPQPAERAIAGLLATHPLLERVVLKRGAQGSVAFDRANRAEAPAFQVDELDPTGAGDCFGGTLVASLVAGMPIEVALRRANAAGAIAVTRRGPMEGNSSAAEIDRFLTERGIACPA

SEQ ID NO: 34322 - protein, 247 aa, Pseudomonas syringae pv. tomato str. DC3000
MTTPIFLSVVIPAKNEAQNLPVLIREICTALTEEHYEIVVVDDGSTDETLHVLTTLKESGLTELRILRHEQSLGQSTSIYHAALAAEGNWLATLDGDGQNDPADIPGMLSLVRARQERSDSIQLVAGHRVNRRDTASKRWASRFANGLRRRLLKDATPDTGCGLKLIERAAFLRLPYFDHMHRFIPALIQRHNGRMIVHPVNHRHRQAGVSKYGNLDRALVGILDLFGVWWLIRRTRLNVPAQEHRP

SEQ ID NO: 34323 - protein, 342 aa, GIBBERELLA ZEAE PH-1
MGDHVDKIRLQPTEDGSFVRPTSSFRHFISNEPDSQFPPEKNRYVLYLSPGCPWSHRAMIIRSLKGLDDMIDLYMCSLHMGKEGWMFEDNPEAAKYGSLPKDPLYGFDTLKQLYLKANPNYQGRYTVPVLWDTKTHTMVSNESSDIVRMLSTEFDRLLPEERREINRPGGGLYPEHLRQGIDELNEWVYETVNNGVYMTGFAMSQAAYEDNVDKVFKSLDRLERVLDKGPFLLGEHITEADLRLYPTIIRFDAAYVPIFMCNLGTIRDHYPNLHLWMRRLYWDNSVRTFGTFKSTTSTWIDQYKILYLKARRRVLGLNDLDIIPKGPLVSIHELKEGEALEG

SEQ ID NO: 34324 - protein, 409 aa, Legionella pneumophila str. Paris
MKKRVVITGMEITSSIGSGIDKFWLAASQGQCGIKRIQSYDPSPYSTQIAGEITDLSLDHLPEFNKSKRYPRAAQYALFCAHHAIEKAGLEKAELNAAGTFIGTSIGGQPELEAGYKLFFTDSWKKIPPLSVIRGMPNSIANHIAIAFGIGGPNSTISNACVSSGEAIGMAYQQIAHGNLTTALCGGTESLVWESVMAAWCKLRVMSTNNENPSQASRPFDLNRDGMVMADGAGILILEELQQAKARGAQILGEIIGYGASCDAFHVTAPNSQGQARAIVAALNDAKLSINDVHYINAHGTGTQLNDSTETETIKMVFGKRAYDIPITAQKAMTGHAIGAAGAMEIIATTLSLQKNTLLPTINLHTPDPACDLDYVPNAAREKTIDIALSNHFAFGGANAALVLRKYIS

SEQ ID NO: 34325 - protein, 191 aa, Legionella pneumophila str. Paris
MLRIFLYFLLLINTTFCLAKTEKAIFAGGCFWCMEADFDHLPGVLSTTSGFDGDTLKNPTYEQVSAGNTHYAESVMVEFDPNKLSYKKLVEYFFMHIDPTVKNAQFCDHGSQYRSAIFYLNDQQKKIAMEYKKELEQKFPTVYTEIVPSTSFYPAEEYHQNYYKKNPVRYKYYRYRCGRDARIQEVWGNKK

SEQ ID NO: 34326 - protein, 484 aa, Pseudomonas syringae
TDTLTRDNGAVVGDNQNSQTAGAQGPVLLQDVQLLQKLQRFDRERIPERVVHARGTGVKGEFTASADISDLSKATVFKSGEKTPVFVRFSSVVHGNHSPETLRDPHGFATKFYTADGNWDLVGNNFPTFFIRDAIKFPDMVHAFKPDPRTNLDNDSRRFDFFSHVPEATRTLTLLYSNEGTPAGYRFMDGNGVHAYKLVNAKGEVHYVKFHWKSLQGIKNLDPKEVAQVQSKDYSHLTNDLVGAIKKGDFPKWDLYVQVLKPEELAKFDFDPLDATKIWPDVPEKKIGQMVLNKNVDNFFQETEQVAMAPANLVPGIEPSEDRLLQGRVFSYADTQMYRLGANGLSLPVNQPKVAVNNGNQDGALNTGHTTSGVNYEPSRLEPRPADDKARYSELPLSGTTQQAKITREQNFKQAGDLYRSYSAKEKTDLVQKFGESLADTLTESKNIMLSYLYKEDPNYGTRVAEVAKGDLSKVKSLAASLKD

SEQ ID NO: 34327 - protein, 325 aa, Nostoc sp. PCC 7120
MSNPRVLCLGEVLFDCLADQLGLKLEQVKSWTAYPGGAPANVACALVKLGTPAGFIGAVGEDEPGNVLVKLLQEVGVDTTGVQRHSTAPTRQVYVVRDLAGDRTFAGFGQYDTSEFADTHLQAKQLPESVFQEADFLILGTLELAYPDSEKAIHRALELAEQYDLKIVLDVNWRPVFWHDENIARQKIQEIFKRVDFLKLAKEEAEWLFDTSDPGAITYRLGSIEGVLVTDGENGCGYCLGENEGKIPAFAVSVVDTTGAGDSFLAGFIHQLSEHGIHNLNDAETAKRIITYASAVGALTTTKAGAIASQPTAMEVETFLASNKI

SEQ ID NO: 34328 - protein, 222 aa, Nicotiana tabacum
MVDEVEKPVSLEESKTNTREVEEEGEIVGESDDTMSSLGNPSMAMKHALEHSWTFWFDNPSGKSKQAAWGSSIRPIYTFSTVEDFWSVYNNIHHPSKLAVGADFHCFKNKIEPKWEDPVCANGGKWTMSFSRGKSDTCWLYTLLAMIGEQFDCGDEICGAVINVRVRQEKIALWTRNAANETAQVSIGKQWKEFLDYNDSVGFIFHDDAKKLDRAAKNRYSV

SEQ ID NO: 34329 - protein, 483 aa, Pichia angusta
MSIDDKPLPADLAKEIETYKELFWVPTETLHKIIDYFIEELERGNADGTDPTGIPMNPAWVLEYPNGSETGDYLAIDLGGTNLRVVLAHLLGDHKFSTEQTKYHIPSHMRTTKNRDELFEFIAQCLEDFLKSKHPDGIPSDAVFPLGFTFSYPATQNSIFEGVLQRWTKGFDIPNVEGHDVVPLLMEQVEKKGLPIKIGALINDTSGTLVASRYTDELTEMGCIFGTGVNGAYYDRIKNIPKLKGKLYDDIDPESPMLINCEYGSFDNAHKVLPRTKFDIRIDDESPRPGQQSFEKMTSGYYLGELLRMIMLDTYKKGLIFKSYTESSEQIKNLETPYFLDTSFLSIAEADDTPSLSVVSNEFSNKLFIDTTFEERLYVRKLSQFIGTRAARLSICGISAVCKKMNYKKCHVAADGSVFLKYPYFPERAAQGLSDVFGWDGIDMKDHPIQIKQAEDGSGVGAAIIAALSHARREKGLSLGLKK

SEQ ID NO: 34330 - protein, 347 aa, Brassica oleracea
MKATLAPPSSLISLPRHKVSSLRSPSLLLQSQRPSSALMTTTATRGSVAVTAAATSSAEALREGIAEFYNETSGLWEEIWGDHMHHGFYDPDSSVQLSDSGHREAQIRMIEESLRFAGVTEEEKKIKRVVDVGCGIGGSSRYIASKFGAECIGITLSPVQAKRANDLAAAQSLSHKVSFQVADALDQPFEDGIFDLVWSMESGEHMPDKAKFVKELVRVTAPGGRIIIVTWCHRNLSQGEESLQPWEQNLLDRICKTFYLPAWCSTSDYVELLQSLSLQDIKCADWSENVAPFWPAVIRTALTWKGLVSLLRSGMKSIKGALTMPLMIEGYKKGVIKFGIIACQKPL

SEQ ID NO: 34331 - protein, 445 aa, Bradyrhizobium japonicum USDA 110
MLRAEDNKFLTESGPGTGMGELLRRFWIPVLLSKELPEADGEPKKIVVLGEELLAFRDSRGVVGVIDQYCPHRGANLWLGRNEECGIRCVYHGWKFDTDGRCVDMPTSYPDLNAKDLIRIKSYPVREWGEMIWAYMGPADVMPELPDLEMAMLPASHRYVSKKWQDCNWVQALEGSIDTAHFTFAHLSFDKEENEILDIKKHFVNPIARMSSDHMRWIAEDPRPVIKIAPHDAGLSIAGGRLTGSDNIYWRIAQFLMPFHAYAPSAMPGENIFGQTFVPVSDTNCWIYTYAWNPERPLTQAERDAYDRGNGVIAEVDDNYVPLRHKGNDYLIDRKLQKTRSYTGIKGVSEQDAAVQDSQGPIADRTREHLGPTDLGIMHFRKVVMDLARALQRGEAPPQAAHQDRYAVRSGACVTSKAKDLPAVMLERFGDVAGFVGRPKVAAAE

SEQ ID NO: 34332 - protein, 308 aa, Azoarcus sp. EbN1
MTTTAFITHRECWLHDMGTFHPECSDRLAAINDRLIAAGLDLYLSFYDAPQATPEQITRAHPAAYLEELMNSVPEHGIRHLDPDTAMNPETMKAALRSAGAGVLATDLVLKGEIENAFCAVRPPGHHAERARAMGFCFLNNVAIAARHALEAHGLERVAIVDFDVHHGNGTEDIFREDPRVMMASIFQHPFYPYSGVDCTAAHMVNVPVPAGARGDTFRQIVSDLWIPALRNHNPQMIFISAGFDGHYEDDMGSLGLVESDYVWATQQVKALAADCGHKNIVSVLEGGYALSSLARSVVAHIKALADL

SEQ ID NO: 34333 - protein, 275 aa, Salmonella typhi
  misc_feature (175)..(175): Xaa can be any naturally occurring amino acid
  unsure (1)..(275): unsure at all Xaa locations
MANPTIIRLQDGNVMPQLGLGVWKASNEEVIAAIHKALEVGYRSIDTATAYQNEEGVGKALKAASVAREELFITTKLWNDDQKRPREALQESLKKLQLDYLDLYLMHWPVPAIDHYVDAWKGMIALQKEGLVKSIGVCNFQIHHLQRLIDETGVPPVINQIELHPLMQQRQLHAXNATHKIQTESWSPLAQGGEGVFDQKVIRELADKYGKTPAQIVIRWHLDCGLVVIPKSVTPSRIAENFAVWDFRLDKDELGEIAKLDQGKRLGPDPDQSGG

SEQ ID NO: 34334 - protein, 311 aa, Azoarcus sp. EbN1
MYDPVSRDDVDSQEPDLPPEVEVFVERVAPAFENEFLSDVTQIYLNEIGANPLLTAAEEAALARRVRTGDFPARQIMIERNLRLVVNIAKHYLNRGIPLLDLVEEGNLGLMHALEKFDPERGFRFSTYATWWIRQNIERAIMNQSRTIRLPVHVVKELNQVLRAQRTLEASGNGEFTLEQVAHRLDKSVDEVRAILALSEHTASLDAPLEIDPTLSIGESLADDQAEPPDTHIQDAEVEKLIQEWIGMLNEKQRLVIRHRYGLDECEVMTLEELASRLCLTRERVRQIQLEALGQLRRTVKRRGISRDELL

SEQ ID NO: 34335 - protein, 2633 aa, Gibberella moniliformis
  misc_feature (1840)..(1846): Xaa can be any naturally occurring amino acid
  unsure (1)..(2633): unsure at all Xaa locations
MARAVEKVVTKAVIRSVAISRLMRRAKIHEINHSRTILTTARVIHEVRPNRMKNKSIMSMLLSLIKTFALRAHFLKGEIAAFDAPFFSITPAEAGGMDPQQRGLLENTYRALENAGCPMNKVLGTNTGVFIGCFTREYEAIMFKETEIQQRYFATGTGTTMLANRLSYFYDLHGPSISLDTACSSSLNACHLACNSLRLGECDMALAAGYNLFYNPDTIIPLTALGFLSPDGRCYSFDERANRYSRGEGFGMVVLKRLSDAIRDGDCIRAIVRGSSSNQDGNSPGITQPTRQAQVDLINAAYRSAGLSKTQTRFFEAHGTGTPVGDPIEASAISGAFLEYCSEQEPMVVGAVKTNIGHLEGSAGIAGLIKAIMVLEKGIIPPNMGFQTPNPKIPVHDWHLKFLTKPEAWPTKGLRRASINAFGYGGSNAHIIIDDAYHYLLVNTSSINGTNGINGHSNGINGHINGHHSASSSSDDEYILVKRFKGHAPPSRLFFFSTFDEAGAARMAKAYKEFLAPTSKSIVAGSEEEQRFLSDLSYTLINHRTSFPWRFSIVADSIAALADKLEANLSPVRTTAEPKLGFVFTGQGAQWYAMGREFLSAYPTFSTSIFAADLYLRELGCPWSLVGELLSNQDKSRIDDPALSQPICTALQVALVDLLASWGNKPAAVVGHSSGEIGAAYATGAISQESAWRLAFYRGALSSRLAKSPDYTNGAMLSVAMSSPDAMAYLEEHVGSAAGRDIVVACINSPRNVTLSGSAAYIDKIKAAADHEGIFARKLKVDNGYHSPLMATIADEYRSAIGDLKAGTNISPVQGAPVFYSSLGGTVSSVSALQNPDHWVDNLVSPVQFSKAFSLMCSNTTSSAPVKKLGSSAKATVKPPKITYVLEIGPHAALRGPIRETMELTPEVSGIGYESVLCRGASAVDTALSAANWLWCRGYEVDMSDASIAKDSSLVVNAPGYPFNHSNIYWNESRISKGYRFCPAMRHELFGAPVPDWDPANAVWRNYMRLSENPWVKHHRITGATIYPVAGMLVMAIEASRQMADITRVVKGFRILDARFNVALRVPATQNGLETHFYMQPSRDYSDTVARTVRKFSLSSYEGGEWREHCHGLVVTEYEQPYTVNRLADVEKASKVETSFRQLYEHLSTVGLDFGATFQTLRDIRCSDIGEAVATVERQDLESLMPLGYLQDHLIHSTVLDGILQSIIVSLTKGGREIDQVMVPSEIGDLWVSADPSTSKFDAVRVSCSGKFLGIRQAEARIVGMDVDTGKAVCTVDNFVITTVARSEGASSSDAARRLCFNLDYKVDPVLLDQETADKTLQPDAKCGATPQQAQLIQEVEMMCFLYIKRFWDRIYDENRDAKSVPYHKKYIAWIKYQLEKYDAGLIPHAMPEWRERAADVLIISQMETKLLTEGSAEGKLVVNVGRELPDILAGKSDALELLFKDKLVENVYRSGVGAEIGYDRMVAYIDALAHKNPALRVLEVGAGTGGATRPILKCLTTQGNGEIGTPRFSHYAFTDISIGFFENAREMFKDSAARMSFRALNIEDDLEQQGFSGPAEQYDVICAANVIHATKNLEATLSNARKLLKPGGKLILYEMTNTGMIRTGFAFGLLPGWWLSVEDFRQFTPLAAPSDWSRSLKASGFSGIDLHIYDFPDHRHQMVSVLICTALGNGSEENAPATSYSSSPIKIITCGVGSTSATQKSLATVLEKQATSLSTSIDVVNLHDAVADLKDLQQTRGIFLGDIKSDFLEHVQDDDYEAFRKLISSTKTLLWVNQGGGPSPKNPGADMVTGFARCMRAENPGLNFVTLSVDDLDSLDKTSSIILQILSSGGGNENXXXXXXXLSSGGGNENTFFEKDGAVYIPRITEANTVNHLIAAKTKGESARSETWQDASKDRALTLQCAVPGLLDSLQFQDDELYEKPLGPYDVEVRVHATGLNLLDVMIALGKVIGEAFGQECAGVVTRVGTDVDRVSVGDRVCGLLRGTFKTFARGSQWQFAKIPSSIDYAVAAAVPVVYTTAYYGLHDLARLQAGESILIHWGAGGVGQAAIQLAKAVGAEVFVTVGSIEKRDFLHEHYGIPLHHVLSSRDLSFVHGIKRLTDGRGVDVILNSTAGQTLRASWDCIAPYGRFIEIGKVDIFANAGLPMGPFKKSVTFSFFDIGLISLERGRLFSRVLQDVVDLLAKGSITPPQPLHVYSYSDIQEAFRIMQSGSHMGKLVLKAQDDDLVMVEPSRKPTYHFDPEASYLLSGGLGGLGRSAARWMASRGARNLILLSRSGTTRPAAQELMEELTDAGVTAAAPQCDVSDRAVLERVLSDCAKAMPPIKGCIQGSMVLKDSIFSNMSQEDYYTAVRPKVVASRNLHELLPQNLDFFILLSSASGVVGNRGQSNYCVGNTYQDSLARHRVALGLPGVAVDLGMILSVGFAAENQESMANLRQEGFNAMREDEFLALLDMLCDPNGKYSTNVNQQTQASSFAQIAVGLEAPATLRIKGIPEPAWMTDPLFKHLYQIRGEGDHEGEGDGEGSATSCSTLLPAAASLADAANIVSAAIVQKLCKALSSSERDIDVSKPLHSYGVDSLVAVELRAWFMKEVGSDVAVFDIMSGQSLEELAELAAKRSSFANFDDEKETE

SEQ ID NO: 34336 - protein, 125 aa, Chlamydia muridarum
MAKKNKKVVTQGIAHIHSTYQNTIVSFSDLKGNVFAWSSSGAIGYKGTKKKTPYAAGLAAAAAVEKAKEFGLKEVSILVKGVGPGKSTARKQIETSGFTIKDVKDVTPTPHNGTRPPKKILKREK

SEQ ID NO: 34337 - protein, 159 aa, Zea mays
MSLIRRGNAFDPFSLDLWDPFEGFFPFGSGDVRSLVPSLPRTSSETAAFAGARIDWKETPEAHVFKADVPGLRKEEVKVEVEDGNVLQISGERNKEHEEKNDRWHRVERSSGKFLRRFRLPDNAKADQIKASMENGVLTVTVPKEEAKKADVKNVQITG

SEQ ID NO: 34338 - protein, 174 aa, uncultured marine gamma proteobacterium EBAC31A08
MNKFYIFGLLFFTLNAFSCSDLLDTDMRVLDSAESRNLCEFEGKALLVVNVASRCGYTYQYAGLQKLYESYKDEDFLVIGIPSRDFLQEYSDESDVAEFCSTEYGVEFPMFSTAKVKGKKAHPFYKKLIAESGFTPSWNFNKYLISKEGKVVSTYGSKVKPDSKELISAIEGLL

SEQ ID NO: 34339 - protein, 385 aa, Oryza sativa
MEDSSLFMEWAMETLQHLHPLPATPPPAGGGYAGDNATFPSLQALRESSVSQNGMAPPEPTAHEGHRASNSWSSGDTDSVSGGGGGAVMEHDGWSTSPNSVRCAAGGGGGGGGGGLWPVSWNFSSAMTQPCNDQATPSNPPTTTRARYGGGGVRYLPAAVSPSPSAQTRRASSKGNGGGGSGSSSAAPYAQEHIIAERKRREKINQRFIELSTVIPGLKKMDKATILSDAVRYVKEMQEKLSELEQHQNGGVESAILLKKPCIATSSSDGGCPAASSAVAGSSSSGTARSSLPEIEAKISHGNVMVRIHGENNGKGSLVRLLAAVEGLHLGITHTNVMPFSACTAIITIMAKVEDGVSVTAEDIVGKLNTVLQQNSRNSARETKS

SEQ ID NO: 34340 - protein, 642 aa, Wolbachia endosymbiont of Drosophila melanogaster
MMSTINDAEDKKKIIKDLVTKSIKKGGFITFDDINDKLSDENFSSDFIDDAISLLQDSGINVLESSEDEEDIPSNSDDSKLDDDDTSPNVTATLVQNDDPVRIYLQDMSSVKLLSRADEIEIAKKIESGKHNMLRAIIETSVTLKVIKVWRDDLSNGALLLREIIDLDAMYNSDFNVVPKEESEESEESAEDVEDSEDVSEDAEYCSDDEKDGNNEDISSVNLNVSILEMESDLLPKVIVALDEIITLTNEALILRKNSKNFSNELENLYNQIWSIALQIKLSDAAVARITQELYKINRSITLEEANLIAEARKYDIDRESFYKVYDDVLLKHELKKISLLKINENQSSFTGELKNKFLRFIDDKSEHIASTLNGIKQHIQEDNVQEFKELIKRIQKHEREVSEAKQEMIKANLRLVVSIAKKYSKRGLDLLDLIQEGNIGLMKAVDKFDYKRGYKFSTYGTWWVRQSITRAIPEQSKVVRIPVHMVEIISKINRALRKMTHEMGREPTLEELSVELTMPLERIRKVMKIARDPVSLEAPTGKDDSSTFGDCIEDKRVSRPEDAAILADLRGITTNVLATLTPKEERILRMRFGLGKDGKEHTLEEVGKIFNVTRERIRQIEAKALRKLKHPSRARKLRGFF

SEQ ID NO: 34341 - protein, 137 aa, Pyrococcus abyssi GE5
MSEEQVNIKKKEKWGIAHIYSSYNNTIIHITDITGAETISRWSGGMVVKADRDEPSPYAAMLAARRAAEEALEKGIVGVHIRVRAPGGSKSKTPGPGAQAAIRALARAGLKIGRVEDVTPIPHDGTRPKGGRRGRRV

SEQ ID NO: 34342 - protein, 117 aa, Arabidopsis thaliana
IGLGYGAHWAIVPATASELFGLKKFGALYNFLTLANPAGSLVFSGMIASSIYDREAERQAHGSVFDPDDALRCNGSICFFLTSLIMSGFCIIACMLSMILVRRTKSVYTHLYGKTRT

SEQ ID NO: 34343 - protein, 883 aa, Shigella flexneri 2a str. 301
MNEQYSALRSNVSMLGKVLGETIKDALGEHILERVETIRKLSKSSRAGNDANRQELLTTLQNLSNDELLPVARAFSQFLNLANTAEQYHSISPKGEAASNPEVIARTLRKLKNQPELSEDTIKKAVESLSLELVLTAHPTEITRRTLIHKMVEVNACLKQLDNKDIADYERNQLMRRLRQLIAQSWHTDEIRKLRPSPVDEAKWGFAVVENSLWQGVPNYLRELNEQLEENLGYKLPVEFVPVRFTSWMGGDRDGNPNVTADITRHVLLLSRWKATDLFLKDIQVLVSELSMVEATPELLALVGEEGAAEPYRYLMKNLRSRLMATQAWLEARLKGEELPKPEGLLTQNEELWEPLYACYQSLQACGMGIIANGDLLDTLRRVKCFGVPLVRIDIRQESTRHTEALGELTRYLGIGDYESWSEADKQAFLIRELNSKRPLLPRNWQPSAETREVLDTCQVIAEAPQGSIAAYVISMAKTPSDVLAVHLLLKEAGIGFAMPVAPLFETLDDLNNANDVMTQLLNIDWYRGLIQGKQMVMIGYSDSAKDAGVMAASWAQYQAQDALIKTCEKAGIELTLFHGRGGSIGRGGAPAHAALLSQPPGSLKGGLRVTEQGEMIRFKYGLPEITVSSLSLYTGAILEANLLPPPEPKESWRRIMDELSVISCDLYRGYVRENKDFVPYFRSATPEQELGKLPLGSRPAKRRPTGGVESLRAIPWIFAWTQNRLMLPAWLGAGTALQKVVEDGKQSELEAMCRDWPFFSTRLGMLEMVFAKADLWLAEYYDQRLVDKALWPLGKELRNLQEEDIKVVLAIANDSHLMADLPWIAESIQLRNIYTDPLNVLQAELLHRSRQAEKEGQEPDPRVEQALMVTIAGIAAGMRNTG

SEQ ID NO: 34344 - protein, 461 aa, Sorghum bicolor
MDERRTILMDRYEIGRQLGQGNFAKVYFARNLTDGQSVAIKMIDKDKITRVGLIVQIKREISIMRLVKHPNVLQLFEVMASKSKIYFVLEYAKGGELFNKISKGKFSEDVARRYFHQLISAVDYCHSRGVYHRDLKPENLLLDENENLKVSDFGLSALAESKRHDGLLHTTCGTPAYVAPEVLSRRGYDGTKADIWSCGVILFVLVAGYLPFHDPNLIEMYRKISKAEYRCPRSFSGELKDLLFRMLDPDPSTRISISRIKRSTWYRKPIEVNSAKIKHDTTRDKVCNGEATTSNSIECSNSEETRGSSSLPNLNAFDIISLSTGFDLSNLFEEKYGRREERFTTRQPAGTVFAKLNELAERLKLKIKKKENGVLKLASPKEGIKGFLELDAEIFELAPSFLLVELKKTNGDTIEYQRLVKEEIRPALKDMVWAWQSDRHQQRNESVQGEQQLSSPLPPQQ

SEQ ID NO: 34345 - protein, 138 aa, Arabidopsis thaliana; identical to SEQ ID NO: 1228

SEQ ID NO: 34346 - protein, 343 aa, Bacillus cereus ATCC 14579
MKKIGVRIVRFGFSSTTFHIPLLQTIEEYDIRAVLSSKEEVVKDTLPNANVVSTIDELVKRADVGLVVITSPNTTHFPYVKEAILKGKHVVVEKPFVVSIEEGEELISLAEQHNVMLSVYHNRRFDNDFLTIKKLLGENRVGNVYAYESNFDRFRPHVRDRWREKNLPGSGILYDLGSHLIDQALSIFGKPDAISADVIKQRPGAEVDDYFHIVLHYGVKRVILRSSSYVKKAGPHFIVHGEKGSIVKYGMDSQEEQLKNGMKPGDNGYGVDDEENFATLETEESLERIPTEVGCYDNYYKGVRDSILNGEELPVTAKEGLDVIKMIQLAIESSEKGRVISIK

SEQ ID NO: 34347 - protein, 293 aa, Medicago truncatula
MAIFSPFKHNSVFFILLMWILLSCVFVGGRPATFNQDFHVTWSEPHIKQIDQGRTIQLTLDQGSGCGFASKVKYLFGRVSMKIKLVPGDSAGTVTAFYMNSDTDSVRDELDFEFLGNRTGQPYTVQTNIYAHGKGDREQRVNLWFDPSADFHTYSILWNHHHIVFYVDEVPIRVYKNNEAKGIPYPKMQAMGVFSTLWEADNWATRGGLEKINWSKAPFYAYYKDFDIEGCAIPGPTTCSTNPKNWWEGVEYQALSAIEARRYRWVRMNHVIYDYCQDKSRYPMTPHECLSGI

SEQ ID NO: 34348 - protein, 392 aa, Triticum aestivum
  misc_feature (105)..(105): Xaa can be any naturally occurring amino acid
  misc_feature (299)..(299): Xaa can be any naturally occurring amino acid
  misc_feature (310)..(310): Xaa can be any naturally occurring amino acid
  misc_feature (334)..(334): Xaa can be any naturally occurring amino acid
  misc_feature (353)..(353): Xaa can be any naturally occurring amino acid
  misc_feature (362)..(362): Xaa can be any naturally occurring amino acid
  misc_feature (366)..(366): Xaa can be any naturally occurring amino acid
  misc_feature (371)..(371): Xaa can be any naturally occurring amino acid
  misc_feature (374)..(374): Xaa can be any naturally occurring amino acid
  misc_feature (382)..(384): Xaa can be any naturally occurring amino acid
  misc_feature (387)..(387): Xaa can be any naturally occurring amino acid
  unsure (1)..(392): unsure at all Xaa locations
MQIFFKTLTGKTITLEVESSDTIDNVKAKIQDKEGIPPDQQRLIFAGKQLEDGRTLADYNIQKESTLHLVLRLRGGMQIFVKTLTGKTITLEVESSDTIDNVKAXKIQDKEGIPPDQQRLIFAGKQLEDGRTLADYNIQKESTLHLVLRLRGGMQIFVKTLTGKTITLEVESSDTIDNVKAKIQDKEGIPPDQQRLIFAGKQLEDGRTLADYNIQKESTLHLVLRLRGGMQIFVKTLTGKTITLEVESLDTIDNVKAKIQDKEGIPPDQQRLIFAGKQLEDGRTLADYNIQKESTLHLXLRLRGGMQIFXVKTLTGKTITLEVESSDTIDNVKXKIQDKEGIPPGTSSALIFXGKQLEDGPXPLVXYNIQXGVXPFTLAWVXXXGLXIFGKT

SEQ ID NO: 34349 - protein, 291 aa, Medicago truncatula
MAIFYPFKNNGVFFMLLLWIVVSSVWGRPATFNQDFHVTWSEPHIKQIDQGRTIQLTLDQGSGCGFASKVKYLFGRVSMKIKLVPGDSAGTVTAFYMNSDTDSVRDELDFEFLGNRTGQPYTVQTNIYAHGKGDREQRVNLWFDPSADFHTYSILWNHHHIVFYVDEVPIRVYKNNEAKGIPYPKMQAMGVFSTLWEADNWATRGGLEKINWSKAPFYAYYKDFDIEGCAISGPNTCSTNPKNWWGGVEYQAFSAIEARRYRWVCMNHVIYDYCQDKSRYPMTPHECLSGI

SEQ ID NO: 34350 - protein, 284 aa, Chlorobium tepidum TLS
MKYKTLTPEEKRVIIDKGTERPFSGKYYLTKEKGVYQCKQCGADLFRSDAKFDSGTGWPSFDDAIPGAVRQETDRDGMRIEILCANCGGHLGHVFYNEGFTSKNARYCVNSVSLSFEPSDKPATATEKAVFAGGCFWGVEYHFKKMKGVLSTTVGYTGGKTAHPTYEQVCSGRTGHAEAIEVEFDPSVVSYEELAKLFFEIHDPTQVDRQGPDVGEQYRSAVFYQNDQQKKIAEALIEQLKKRGYDVVTSVEKGGEFWPAELYHQDYYEKTGHKPYCHIYQKRF

SEQ ID NO: 34351 - protein, 457 aa, Alkaliphilus metalliredigenes QYMF
MKVAVIGGGPGGYVAAIKAAMLGAEVTLIEKKRVGGTCLNVGCIPTKSLLASSDVLEVVRDAKNYGINIDGTIEPDLPAIMKRKEKIVEQLVKGIEFLFDKKGVKLINGFGKLVDKNKIEVTKEDGSKEEIEADKIILATGSVPIVPPIFPHDGKKIITSDEALFLEEIPKSMSIVGGGVIGCEFGQFFSKMGTKVTIVEMAEQLLPFEDKDVAKQLERSFKRDKIKMLTGQKINKCEVQDNKVIAYLEGDKTLEADIMLVSVGRKPYLENLGLEDLGIEMEKGKVVVNKNMETNIKGIYAIGDIVDTPFLAHVASKEGLIAAENALGKDKAISYRAVPRCIYTGPEVAAVGMTEKEAEAKGMIYHVGKFEFRGLGKAQAIGHFQGFVKVLVDDQDVIIGAAIVGPHATDLLAELSLAVELQLTAERVGDIIHPHPTLSEGIMEALHDVHKACIHAV

SEQ ID NO: 34352 - protein, 496 aa, Zea mays
MVLSHASSGRDDDAVASTFASRYVRERLPRYRMPERSIPREAAQQIISDELMLDGNPRLNLASFVTTWMEPECDKLIMDSINKNYVDMDEYPVTTELQNRCVNMIAHLFNAPIKEDETAIGVGTVGSSEAIMLAGLAFKRKWQNKRKEQGKPCDRPNIVTGANVQVCWEKFARYFEVELKEVKLSEGYYVMDPVKAVEMVDENTICVAAILGSTLTGEFEDVKQLNDLLTDKNKETGWDVPIHVDAASGGFIAPFLYPELEWDFRLPLVKSINVSGHKYGLVYPGVGWVIWRSKEDLPEELIFHINYLGTDQPTFTLNFSKGSSQIIAQYYQLIRLGFEGYRNIMQNCQDNAAILREGIAATGRFGVLSKDAGVPLVAFSLRDSSRFSVFDVSENLRRFGWIVPAYTMPADAEHVAVLRVVVREDFSRSLAERLVSDVRKILRELDARATHAVRVATATAEQSGDGVVAKKSVLEIEREVAARWMNAVNKKKTGVC

SEQ ID NO: 34353 - protein, 328 aa, Arabidopsis thaliana
  misc_feature (123)..(123): Xaa can be any naturally occurring amino acid
  unsure (1)..(328): unsure at all Xaa locations
MYSAIRSSLPLDGSLGDYSDGTNLPIDACLVLTTDPKPRLRWTSELHERFVDAVTQLGGPDKATPKTIMRTMGVKGLTLYHLKSHLQVLMLLPSISNYASLATYNKQSSLLFDCVVLWFFARXKFRLGRQSCKESIDNSKDVSCVAESQDTGSSSTSSLRLAAQEQNESYQVTEALRAQMEVQRRLHEQLEVQRRLQLRIEAQGKYLQSILEKACKAIEEQAVAFAGLEAAREELSELAIKASITNGCQGTTSTFDTTKMMIPSLSELAVAIEHKNNCSAESSLTSSTVGSPVSAALMKKRQRGVFGNGDSVVVGHDAGWVMPSSSIG

SEQ ID NO: 34354 - protein, 411 aa, Asparagus officinalis
MNALAATSRNFKQAAKLLGLDPKLEKSLLIPFREIKVECTIPKDDGTLASFVGFRVQHDNARGPMKGGIRYHSEVDPDEVNALAQLMTWKTAVANIPYGGAKGGIGCSPGDLSLSELERLTRVFTQKIHDLIGVHTDVPAPDMGTNAQTMAWILDEYSKFHGYSPAIVTGKPVDLGGSLGRDAATGRGVLFATEALLAEYGKGISGQRFVIQGFGNVGSWAAQLITKAGGKVVAVSDVTGAIKHSNGLDIENLLKYSVKNRGIKGFSGGDAIDSNSLLTEDCDVLIPAALGGVINRENANDVRAKFIIEAANHPTDPEADEILSKKGVCILPDILANSGGVTVSYFEWVQNIQGFMWDEEKVNSELKTYMTKGFKHVKEMCKTHNCDLRMGAFTLGVNRVARATLLRGWEA

SEQ ID NO: 34355 - protein, 531 aa, Arabidopsis thaliana
MESQLWNWILPLLISSLLISFVAFYGFFVKPKRNGLRHDRKTVSTVTSDVGSVNITGDTVADVIVVGAGVAGSALAYTLGKDKRRVHVIERDLSEPDRIVGELLQPGGYLKLLELGIEDCVEEIDAQRVYGYALFKNGKRIRLAYPLEKFHEDVSGRSFHNGRFIQRMREKAASLPNVQLEQGTVLSLLEENGTIKGVRYKNKAGEEQTAFAALTIVCDGCFSNLRRSLCNPQVEVPSCFVGLVLENCNLPYANHGHVVLADPSPILMYPISSTEVRCLVDVPGQKVPSIANGEMKNYLKTVVAPQMPHEVYDSFIAAVDKGNIKSMPNRSMPASPYPTPGALLMGDAFNMRHPLTGGGMTVALADIVVLRNLLRPLRDLSDGASLCKYLESFYTLRKPVAATINTLANALYQVFCSSENEARNEMREACFDYLGLGGMCTSGPVSLLSGLNPRPLTLVCHFFAVAVYGVIRLLIPFPSPKRIWLGAKLISGASGIIFPIIKAEGVRQMFFPATVPAYYYKAPTVGETKCS

SEQ ID NO: 34356 - protein, 273 aa, Agrobacterium tumefaciens
MVKLAAGEVSAMSYNELIGVVRETNRPPGGAGTLREVAEKAFIGPTSRILDIGCSTGFTAVEFARLTGAETIGIDINATSVEVAKDRATRAAAHTASFEVADAMALPFEDGTFDLVFCGNVTSLIDDQSKALTEYLRVLKPNGCLAAVPMYYLEPPPKEVVEKVRSAIQVPIAVKYRREATDFFRPSGLELVHESDWAFDKKTDQEIAAFCRKILGQVEHARFEEEALDVLKSLYASYMSLFRENLSYMGYTIMILRRDAGIDEGELFTGTRR

SEQ ID NO: 34357 - protein, 217 aa, Glycine max
MENGGNLCDGKEVDQFYQPSGGIEVVVANEDGLSCGSDLKEIDKVKIIQESDLFRGDASEGALWDIFRRQDVPKLQEYLKKHFREFRHIHCCPLKQVIHPIHDQTFYLTMEHKKKLKEEYGIEPWTFTQKLGDAVFIPAGCPHQVRNLKSCIKVALDFVSPENVGECFRLTEEFRTLPINHRSTEDKLEVKKMTIYAMQEVITKLEKARSRQTIVPK

SEQ ID NO: 34358 - protein, 336 aa, Streptococcus thermophilus LMG 18311
MAILVLGGAGYIGSHMVDRLVEKGQEKVVVVDSLVTGHRAAVHPDAIFYQGDLSDQDFMRKVFKENPDVDAVIHFAAYSLVGESMEKPLKYFDNNTAGMIKLLEVMNECGVKYIVFSSTAATYGIPEEIPILETTPQNPINPYGESKLMMETIMKWSDQAYGIKYVPLRYFNVAGAKPDGSIGEDHDPETHLLPIILQVAQGVREKIMIFGDDYNTPDGTNVRDYVHPFDLADAHLLTVEYLRKGNESTALDLGSSTGFSNLQILEAACKVTGKEIPAEKADRLRGDPDILIASSEKARTVFGWKPQFDNIDNIIASAWAWHSNHPKGYDDRGLLK

SEQ ID NO: 34359 - protein, 416 aa, uncultured marine gamma proteobacterium EBAC31A08
MPGGVNSPVRAFKNINGNPIFFERASGAYLYDADHNEYIDYIGSWGPMIMGHSHPDIVGAIKNQVALGTSYGAPTSLESDVARLIKKCIPSIEKIRMVNSGTEATMTTIRLARGFTGRNKIIKFDGCYHGHVDSLLIKAGSGVATFGLPDSPGVPADLAKYTFSCEYNNKEQFLEIFNEIKDDLAAVIVEPVAGNMGFVPGHEDFLKLLRETTSANNSILIFDEVMSGFRVSLGGAQEIYNITPDLTALGKVIGGGLPVGAFGGKEEIMNYLAPSGPVYQAGTLSGNPLAMAGGTALLQLLIKENPFKELERNASVLLDGMKTLMIESGIPFSINRIGGMFGFFFSEELPNNINDVAKTDDVLFSNFLNSCIRSGIYFAPSKYEAGFISAMHKDQEINRTLETVKQIIQKGITHEI

SEQ ID NO: 34360 - protein, 371 aa, Populus alba
MSFLQQQETHNQSPALALDGLYCEEDGFGEDYSCGLDDETSQVYDQNVKKEQNLSSVLLEQDLFWEDSELLSLISKEKETHVVFDSVGSRDGSLMVVRREAVEWFLRVKAHYGFSALTGVLAVNYFDRFISSSRFRRDKPWMGQLAAVACLSLAAKVEETQVPLLLDLQVEDAKYVFEAKTIKRMELWVLSTLHWRMNPVTSISFFDHIIRRLGLKTHMHWEFLWRCERLLLSVISDSRFMSYLPSILATATMLHVIKEVEPRNQLQYQTQLMAVLKTNEDEVNECYRLILEQPGSQNQRHKRKYLSTPSSPNGVIDASFSSENSNDSWAVASSISSSSSVPQFKRSRAQVQQMRLPSLNRMCVDVLSSPH

SEQ ID NO: 34361 - protein, 433 aa, Saccharophagus degradans 2-40
MLFELPHVAGNYFLIALYFLEGKVSRKRVVVTGIGMVSALGNSVDETWSRILNGESGIREITAFDASAFATRISGSVQNLDITPYLQEKEARKLDPFIQYGMAAGIQAVEDSGLVVTDENAARIGCIVGSGIGGLGSIEDTAVLIEEKGPRRISPFFVPGAIINMIAGNLSIRYGFKGINLAVSTACTSGTHSIGLAAREIFYGTADVMIAGGAEMATTKVGIGGFAAARALSRRNDEPTKASRPWDKDRDGFVLGDGAGILVLEEYEHAKARGAKIYAELTGVGTSADAYHITSPSGDGAELSMRNAIADSGMSLEEINHVNAHGTSTPAGDTAECKALKNVFGSHAPNLAVSSTKSMIGHLLGAAGAVEAIFTVLAIRDQVAPPTINLDNPDEGCDLNFVAHKAQKMEINGAMSNSFGFGGTNGTLVFKKV

SEQ ID NO: 34362 - protein, 237 aa, Solibacter usitatus Ellin6076
MNRSISIIIPAYNEEKRLPATLIKVREYLDAAKWDFAEILVVDDGSRDGTTKVAYGAGVRLLRNPGNRGKGYSVKHGMLEAKGEWCLFTDADLSSPIGELEKLWNSAQRERASVAVGSRGVDRSLVGVHQSPLRELSGRIFNLAMRIVTGLPFKDTQCGFKLFESKAARDVFSRQQLDGFGFDVEVLFIARKLKYKAIEVPVRWDNVEGTKVSLFLGVTAFLDPLRVRWHALTGKYK

SEQ ID NO: 34363 - protein, 228 aa, Arabidopsis thaliana
MPFIASMGIYVVSRDVMLDLLRNQFPGANDFGSEVIPGATSLGLRVQAYLYDGYWEDIGTIEAFYNANLGITKKPVPDFSFYDRSAPIYTQPRYLPPSKMLDADVTDSVIGEGCVIKNCKIHHSVVGLRSCISEGAIIEDSLLMGADYYETATEKSLLSAKGSVPIGIGKNSHIKRAIIDKNARIGDNVKIINSDNVQEAARETDGYFIKSGIVTVIKDALIPTGTVI

SEQ ID NO: 34364 - protein, 322 aa, Neurospora crassa
MVPAIKLNSGFDMPQVGFGLWKVDGSIASDVVYNAIKAGYRLFDGACDYGNEVECGQGVARAIKEGIVKREELFIVSKLWNTFHDGDRVEPIVRKQLADWGLEYFDLYLIHFPVALEYVDPSVRYPPGWHFDGKSEIRPSKATIQETWTAMESLVEKGLSKSIGVSNFQAQLLYDLLRYAKVRPATLQIEHHPYLVQQNLLNLAKAEGIAVTAYSSFGPASFREFNMEHAQKLQPLLEDPTIKAIGDKYNKDPAQVLLRWATQRGLAIIPKSSREATMKSNLNSLDFDLSEEDIKTISGFDRGIRFNQPTNYFSAENLWIFG

SEQ ID NO: 34365 - protein, 252 aa, Triticum aestivum
MGRGRIEIKRIENTTSRQVTFCKRRNGLLKKAYELSVLCDAEVALIVFSSRGRLYEYSNNSVKATIDRYKKAHACGSTSGVPLIEVNAQQYYQQEAAKLRHQIQMLQSTNKHLVGDSVGNLSLKELKQLESRLEKGIAKIRARKNELLSSEINYMVKREIELQSDNIDLRTKIAEEEQQLQQVTIARPSAALELNPFTALDMKCFFPANLFEAAVQAHAQARTQAQAQASLQLNLRYQQLAPPGAGDVAHQF

SEQ ID NO: 34366 - protein, 436 aa, Psychrobacter arcticus 273-4
MTTVSTNDFDQQHLWHPYASLPPRYPNIMIDHADGIHIVTQDGTRLIDGMSSWWASVHGYNHPKLNAAIIEQLGKMAHVMFGGLTHQPAIDLGKKLLSIVPAGIDAIFYADSGSIAVEVALKMALQYQIAAKRPNKQQFASTHSGYYGDTWHAMSVCDPINGMHSLYGKQLPMQHFVAAPPMGFERDITQNERDELTAFFAKNSHQLAGFIIEPIIQGAGGMRFYSPEYLQLLRQLCCEHDVLLIADEIATGFGRSGKLFACEHANISPDIMTIGKALTGGYMTFAATLCTRSIADTISQSDYSALMHGPTFMGNPLACAVACASIDLILSYDIEARTENMHALMVEQLASAAKLEGVKEVRCLGAVAVIELDDAVDMPTFQSLLIEHGIWVRPFGKLVYIMPPYIITDSELITLCQALLKVVSIYLTQTSLSAKG

SEQ ID NO: 34367 - protein, 202 aa, Pyrococcus abyssi GE5
MADEYLVPLDQYLAAGVHIGTQQKTKDMKKFIYRVRQDGLYVLDVRKTDERLKVAGKFLARFDPQSILAVSVRLYGQKPVKKFGEVTGARAIPGRFLPGTMTNPAVKNFFEPDVIIITDPRADHQAMKEAIEIGIPIVALVDTENLLSYVDLAIPTNNKGRKALALIYWILAREILYNRGEISSREEFKIPVEEFEMKIVRR

SEQ ID NO: 34368 - protein, 257 aa, Glycine max
SITSESHNQIVGNGLILGTGLIPYCATFFVFTDYMRGAIRLSALSEAGVIYVMTHDSIGLGEDGPTHQPIEHLASFRAMPNTLMLRPADGNETAGSYKVAVVNRKRPSILALSRQKLTQLPGTSIEGVEKGGYTISDNSSGNKPDVILIGTGSELEIAAAAAEDLRKEGKAVRVVSFVSWELFDEQSDEYKESVLPASVTARVSIEAGSTFGWHKIVGSKGKAIGIDRFGASAPAGKIYKEFGITKEAVIAAAKELS

SEQ ID NO: 34369 - protein, 503 aa, Colwellia psychrerythraea 34H
MKALTLKVFYENSDPNKSSSKQAKYLAIADALRKAIRERQIAPTEALPSARKLAQQLSVNRHTIMAALAELVAQGWVEVRERSGYRVVENLPIQGSRTINKVAKTPQSFDWKFRVKQTFAVTPKVKASEYPYNFSGGQPDIRKFPFDEFKSHFSQTCQRPKIDDLSYGDSRGEAELIEEIATYLRRVRSITDKELMICNGSQEALYMISQLLLQPGDKVAVEQLGYPPAWAAFERTGATLIAVKQDERGINPEHLAQVFAKGKVKLLYLTPLHQYPTTVSLDISRRMQIYQLAVQYGVAIVEDDYDHEFHYDSQPIAPMAADDPAGLVIYISTFSKLMFGGARIGYVVANNALIEQVAAYKMVMNHKCNVLVQQAVAKWMQQGGFEAHLRRMTRLYQKRRDFMVQQLRSFQDKGLPIHFEVPAGGMAIWLDTGKSIIGLKEKLLPQQVYLQTEVEFSRFNELPDDLPRTKYRFIRLGFAAMNEAEVTQGLDIVMNTLYGLVSE

SEQ ID NO: 34370 - protein, 582 aa, Bifidobacterium adolescentis
MAKMIAYDDEARQGMLAGLDKLADTVKVTLGPKGRNVVLDKTYGAPTITNDGVSIAKEIDLDDPYERIGAELVKEVAKKTDDVAGDGTTTATVLAQSLVHEGLKNVTAGSNPIALRRGIEKAADAIVKELVAAAKDVETKDQIAATATISAADPEVGEKIAEALDKVGQDGVVTVEDNNRFGLDLDFTEGMRFDKGYIAPYFVTNAEDQTAVLEDPYILLTSGKLSSQQDVVHIAELVMKTGKPLLIIAEDVDGEALPTLILNNIRGTFKSCAVKAPGFGDRRKAMLQDMAILTGAQVVSDELGLKLDSVDMSVLGTAKKVIVSKDETTIVSGGGSKEDVAARVAQIRGEIANTDSDYDREKLQERLAKLAGGVAVIKVGAATEVEAKERKHRIEDAVRNAKAAIEEGLLPGGGVALIQAAAKAKDDVKLEGDEATGAAIVFRAVEAPIKQIAENAGLSGDVVIDKVRSLPDGQGLNAATNEYEDLLAAGVTDPVKVTRSALQNAASIAGLFLTTEAVVANKPEPPAAAPAAVFPLRRNAGTRRFPAPSSTTRAWLTSNGLMVATSMSTIGCVLAIMRMALK

SEQ ID NO: 34371 - protein, 487 aa, GIBBERELLA ZEAE PH-1
MTSPQPPYWQNPQGQPGYPGQGQPGQGYYQPPQGQQQQQQQPYGYPQQGQPGVPPNQQYGYSAPPGQQHYPPPGQQGQFQQPPQGYPQQAPYGQPPAPQSHYGQQPPQAPYSQGQYPQSHYPPQPHGAPQQVQPPHPDQQWHQQAGQQQHGAPAFNAQPTPASPGYDSAQKAWVQPVDTSADAEALRKAMKGMGCDERALIRVLVNPKYANPWTMAQLVRDYNSRFMRDLAKDIESETRGDFETCLLALIRGPLENDVHNLSKALNRAGTDEDALNDVLLCRSNADIRAICAEYRRVRGKELHVDVKDDVDDTLYRLYSMVLSATRAEDGAPVIPAEIDHKVTEIQKATEGMIGANAVAVAQIFTSSNDAQMRAINEAYQFKYHRSLETVIEKEFRGDMEDALLRILYHALDRARSDAGRLQRPLNKSFGKNRLFINRLVGLYWDQGRLHQTNMAYKPVTGATLAGNIKSELSGDYKDFALAIIGEK

SEQ ID NO: 34372 - protein, 207 aa, Zea mays
MVSLKLQKRLAASVLKCGKGKVWLDPNEVSEISMANSRQNIRKLVKDGFIIRKPQKVHSRSRARRAHEAKQKGRHSGYGKRRGTREARLPTKILWMRRMRVLRRLLRKYREAKKIDKHMYHDMYMKVKGNMFKNKRVLMESIHKSKAEKAREKTLSDQFEAKRAKSKASRERKIARREERLAQGPREPTAPVAAPAPSTGVPKKAKK

SEQ ID NO: 34373 - protein, 418 aa, Haemophilus somnus 129PT
MNLKEMGKNAKQAATILAQLSQQQKNTALQIIAEQLELQSNKILVENAKDIQLAKENGLSDAIIDRLLLTKERINSIANDVRHIISLPDPIGQIIDGGILESGTKLERVRVPLGVIGVIYEARPNVTVDVATLCLKTGNAVILRGGKETSYSNKILVTVIQDALEQTGLPKNAVQAITDPDRNFVLELLKLDKYVDMIIPRGGAGLHEFCKQNSTIPVIIGGVGVCHVFVEESAEQDKALAVIDNAKTQRPSTCNTLETLLVQESIATEFLPKLVAHLKHKNVKYHADPTALSILEKQNAEVSIVQEQQLRQEWGSLDLNVVIVKDIQQAIAHITEYGTQHSEAILTSSPRLAHQFVSLVDAAAVYVNASTRFTDGGQFGLGAEVAVSTQKLHARGPMGLEALTTYKWVCSGDYTVRQ

SEQ ID NO: 34374 - protein, 537 aa, Parascardovia denticolens
MAKIIKYDEEARQGMLEGLDELANTVKVTLGPKGRNVVLDKSYGAPTITNDGVSIAKEIDLEDPYQRIGAELVKEVAKKTDDVAGDGTTTATVLAQALVHEGLKNVTSGSNPIALRRGIEKASQTIVKNLLENAKPVETKDQIAATATISAGDPEVGEKIAEALDKVGQDGVVTVEDNNKFGLDLDFTEGMRFDKGYISPYFVTNADDQTAVLEDPYILLTSGKVSSQQDIVHIADLVIKSGKPLLIVAEDVDGEALPTLVLNKIRGTFNTVAVKAPGFGDRRKAMLQDMAILTGAQVVSDELGLKLDSIDDTVLGHAAKVIVSKDETTIVSGAGSKEDIAARVAQIRSEIEASDSDYDREKLQERLAKLAGGVAVIKVGAATEVEAKERKHRIEDAVRNAKAAIEEGLLPGGGVALVQAAGEAEKSVKLDGDEATGADIVFRAIEAPLKQIAENAGLSGEVVIDKVRTLPAGSGLNAATGEYEDLMKAGVTDPVKVTRSALQNAASIAGLFLTTEAVVANKPEPPAPAAAQPDMGY

SEQ ID NO: 34375 - protein, 481 aa, Haemophilus somnus 129PT
MNIQHLLKTQAYINGEFISAKNHRTFPVINPANQQVICEIACCGKEETELAIKSAKQAQVHWKKYTAKERSKILKKWFELIMQHQESLAYLLSLEQGKPLSESRAEIAYGASFVEWFAEEAKRAYGEIIPQVREDHRLLVIKQPVGVVAAITPWNFPNAMITRKAAPALAAGCAIIIKPAPETPLSALALAALAEQAGIPKGIFNVLPTVYAEEVGSVLTRSTDVRKLTFTGSTKIGKILMQQCADTVKKISLELGGNAPSLIFNDADLDRTVDSVIASKFRNSGQTCICTNRIYVQSEIYRAFADKLKQKVRSFIVGDFQQEAVNIGPLINESAVRKIERHIEDALSKGAILTLGGQRHSLGGTFFEPTILENVSQDMLVCHEETFSPLAALIPFDTEEQAISMANDSEFGLAAYVYTQDFSRIWRLSEELECGLVGVNEGIISNEVSPFGGVKQSGLGREGSRHGLDEFLEMKYLCMKV

SEQ ID NO: 34376 - protein, 354 aa, Pseudomonas sp.
MFPKNAWYVACTPDEIADKPLGRQICNEKIVFYRGPEGRVAAVEDFCPHRGAPLSLGFVRDGKLICGYHGLEMGCEGKTLAMPGQRVQGFPCIKSYAVEERYGFIWVWPGDRELADPALIHHLEWADNPEWAYGGGLYHIACDYRLMIDNLMDLTHETYVHASSIGQKEIDEAPVSTRVEGDTVITSRYMDNVMAPPFWRAALRGNGLADDVPVDRWQICRFAPPSHVLIEVGVAHAGKGGYDAPAEYKAGSIVVDFITPESDTSIWYFWGMARNFRPQGTELTETIRVGQGKIFAEDLDMLEQQQRNLLAYPERQLLKLNIDAGGVQSRRVIDRILAAEQEAADAALIARSAS

SEQ ID NO: 34377 - protein, 483 aa, Nicotiana tabacum
MGFISSIDNELLSKVATNNGHGENSAYFDGWKAYEIDPFHPTQNSDGVIQMGLAENQLCFDLIQEWVVKNPKASICTAEGSQDFKDIAIYQDYHGLPEFRSAVARFMGKVRGDRITFEPERIVMSGGATGAHELLAFCLADPGEAFLVPTPYYPGFDRDLRWRTGVQLFPVVCESSNNFKVTKEALEAAYQKAQESNITVKGLLLNNPSNPLGTILDRETLKDTVRFINEKNIHLVCDEIYAATIFNKPDFISISEVIMEEDVECDRDLIHIVYSLSKDLGFPGFRVGIIYSYNDVVTNCARKMSSFGLVSTQTQFLISNMLSDENFVTKFIGESSERLQKRHGMFTRGLAQVGINTLKSNAGLFIWMDLRRLLKELTFEAELELWRIIINEVKLNVSPGCSFHCSEPGWFRVCFANMDDETMRIALRRINNFVIQRKGIEGGVKKLQCRRSKLEISLSFRKLDDFMNSPHSPMSSPLVQART

SEQ ID NO: 34378 - protein, 262 aa, Arabidopsis thaliana
  misc_feature (164)..(164): Xaa can be any naturally occurring amino acid
  unsure (1)..(262): unsure at all Xaa locations
LHEYRYECIISVFVFRRILFRRAVVEELAKFGAKVHTCSRNQEELNACLNDWKANGLVVSGSVCDASVRDQREKLIQEASSAFSGKLNILINNVGTNVRKPTVEYSSEEYAKIMSTNLESAFHLSQIAHPLLKASGVGSIVFISSVAGLVHLSSGSIYGATKGXALNQLTRNLACEWASDNIRTNCVAPWYIKTSLVETLLEKKEFVEAVVSRTPLGRVGEPEEVSSLVAFLCLPASSYITGQVISVDGGFTVNGFSYAMKP

SEQ ID NO: 34379 - protein, 160 aa, Triticum aestivum
QKSAGEKTIACLDKLRNANGSLPTSKIRLNMQRVMQNNAAVFRTQETLEEGCKLITKAWESYHDVKISDRSLIWNSDLIETIELENLLINACITMHSAEARKESRGAHAREDFTKRDDEQWMKHSLGYWENEKVRLAYRPVHMNTLDSEVESFPPKARVY

SEQ ID NO: 34380 - protein, 418 aa, Desulfotalea psychrophila LSv54
MTLEETIVEVGVRAKAAAADLMSLATRQKDAVLSQVGELLVAEKAFLQEENEKDLAAGREKGLSDAMLDRLALTDSVIESMVKGLKEVIALPDPVGRTLGSVKRPNGLSVGRMCVPLGVIAMIYESRPNVTIDAAALCLKAGNAIILRGGSEAIHSNLALASILRRALEEAEVNPDSVQVIPMIDREAITIMLGLEDSIDLVIPRGGEGLIRFVSKNSSIPVLKHYKGVCHAYIDKDADLAKVAPIVINAKTQRPGVCNALEGILIHEDIVADVLPGLATELAELGVEMRGCSQSLPFSEHIVAASEEDWGTEFLRLCLCVKVVRSFEDAKSYIRKYGSQHTEAIITENYTTAHRFVAEVDASAVVVNASTRFNDGGELGLGAEIGISTTKLHAYGPMGLEELTTKKFVILGDGQIRS

SEQ ID NO: 34381 - protein, 384 aa, Desulfotalea psychrophila LSv54
MMVDVTEELQLRREIFDKARRVVVKVGSAILTNVGGIHTSFIADLAREISYLRQSGHEVILVSSGAVAAGRKKISWQDSAPLGMKEKQALAAIGQSHLMRTYEEAFGFYELDVAQILLTHADLSHRDRYLNIRNTILTLLKFGVTPIINENDTVSVEELKFGDNDTLAALLTNLLEADICICLTDVDALYDKNPQKDPTARPLHIVTKISPEIEAMAGNSNSLFGTGGMQSKIRAAKIVFSGGGTAIIGPGRAPRVLQRLFAGEDIGTIFLPCKERMKSKKQWIAHVLKPKGTLLLDAGACKALLQGGKSLLPSGIVGISGEFDRGDSVNCCRLDGSRIAVGLVNYASVDVNAIKGLQSREIASVLKCCDNEEVIHRDNLVILS

SEQ ID NO: 34382 - protein, 209 aa, Triticum aestivum
MAEVEAALPVAATETPEVAAESDAGAAEAKGPHKLQRQWTFWYDIQTKPKPGAAWGTSLKKGYTFDTVEEFWCLYDQIFRPSKLVGSADFHLFKAGVEPKWEDPECANGGKWTVISSRKANLDTMWLETCMALIGEQFDESQEICGVVASVRQRQDKLSLWTKTASNEAVQVDIGKKWKEVIDYNDKMVYSFHDDSRSQKPSRGGRYTV

SEQ ID NO: 34383 - protein, 282 aa, Craterostigma plantagineum
MKTQNTSETLGALISICPNTTDEERVSNVETSAMFGLDDECFASEKKRRLSNEQVKALEKYFEVENKLEPERKVKLAQELGLQPRQVAVWFQNRRARSKTKNLERDYGVLKSNYNALKHDFETLKRDNESLLKEIHELKSKLNEDDDSKSVEEEPFVEALELDANSDDVEPDSNQLFGSSDSDSSAILNEDNNNSRSSFLDDHRRKLSKIHGGSSPPSSAKIASEKNGSDESCKRAAAYKPQFVKIEEQHNLFREEDESCTTTFFSDEQAPTLNWYTPDEWN

SEQ ID NO: 34384 - protein, 996 aa, Nostoc sp. PCC 7120
MVLQVQTSTYEAKTQEIARQLLGATQENRSFFASLRDQMRWDDKLLAWAMSNPGLRVQLFRFIDTLPALHSKAEIAAHLQEYLGDESVELPAALKGMLNFANPDSVPGQVAATTVSTAVETLAHKYISGENIKQVIKTVERLRKEKMAFTIDLLGEAVITETEAQSYLERYLELIAQLTEASKNWGTIAAIDEADGEQLAKVQVSVKLTAFYSQFDPLDAKGSEEKVSDRIRILLRRAKELGAAIHFDMEQYAYKDLTLNILQKILLEDEFRQRTDIGITIQAYLRDSEQDARNAIAWLKQRGYPLTIRLVKGAYWDQETIKAAQKHWPQPVFNDKAATDANFEAITQLLLENHQYVYSAIGSHNVRSQALAMAIAETLNVPRRRFEMQVLYGMGDKLAKALVDRGYRVRVYCPYGDLLPGMAYLIRRLLENTANSSFLRQNLENRPVEELLAAPKVDLAQAKVHSPEAFPQGKHFVGAADTDYAEEEDRTKAARAFAVVRGELGKTYLPLINGEYVQTAEVIDSVNPSNFSEVIGKVGLISVEQAEQAMQAAKAAFPGWRRTSVKERAGILRRAGDLMEQRRAELSAWIVLEVGKPVKEADGEVSEAIDFCRYYADEMERLHQGINYDVDGETNRYIYQPRGIVVVISPWNFPLAIACGMTVAALVTGNCTLLKPAETSSVITAKLTEILVEAGIPKGVFQYVPGKGSQVGAYLVSHPDTHLIAFTGSQEVGCRIYAEAATLKPQQRHMKRVIAEMGGKNAIIVDESADLDQAVVGVVQSAFGYSGQKCSACSRVVVVEAIYDAFIHRVVEATKSLNIGEAELPSTQVGPVIDANARDRIREYIEKGKAESQVALELSAPNHGYFVGPVIFGEVPPHGTIAQQEIFGPVLAVIKAKDFAQALAIANDTDYALTGGLYSRTPSHIQQAQEEFEVGNLYINRNITGAIVARQPFGGFKLSGVGSKAGGPDYLLQFLEPRTITENIQRQGFAPIEGAE

SEQ ID NO: 34385 - protein, 102 aa, Castanea sativa
MAALVGGVSDVKGHENSLQIDDLARFAVDDHNKKANTLLQFKKVVNAKQQVVSGTIYILTLEVEDGGKKKVYEAKIWEKPWLNFKEVQEFKLIGDAPTHHSA

SEQ ID NO: 34386 - protein, 618 aa, Haemophilus somnus 129PT
MKNLKYFAQKYVDWVIRLGRIRFSLLGVCILAVVALLTQIVVSLIFIGTIYWQDVARSIIFGLFSAPFVLYFFTLLVEKLEKSRLDLAKLVDNLRNEVSERILAERKLSVALSEIEKTSQDKTALMTTISHELRTPLNGIIGLSQILLDDKLTEQQRNYLKTINVSAISLTHIFSDIIDLEKIDANRIELHYQPTNLCSFLNDITNFATLMAAQRKLKFELVCDKDLPDWLMLDSARLSQILWNLINNAVKFTPAGKIKLKVSRLTDDTFSFALSDTGVGIAKGELDKIFTMYYQVQETDHKPIGSGIGLAVSKAIAGLMGGDLTVESQLHQGATFTLTLQAKAVEKPAESESNVPNTLTILLVEDIEVNIIVAKSVLEKLGYCVDVAMTGKEAIQKFEQNYYDLVLLDIQLPDMSGFTIAQYLREKYEQGVYDFLPPLIALTANIMQSKTEYQKQGMDDVLRKPLSLEALVNCLSDYFGDELNTKIIKKSSFVEFSALSDVLNMELLVELNDILGKEFIGKNLLLFKQTMPSYVNELLDSYEQYKQDSAVKKDLLSNVHKIKGAAASVGLLRLQQVASLAQDANHENWETHIDEWINTLANDWLVDTATLEDWLNDL

SEQ ID NO: 34387 - protein, 687 aa, Oryza sativa
MHNVVNMESKTARKSVLVSALTRFLKLGKKTTKLKGQHVAVNQSPASVQTAERMLVPLISITMSPPRGPTNTPAGETQTTQLPPQHTNNQLHSAQQVQQTVETMRNSVARTNHVSNQTSQQMRLKEQVNGQTTTSSSASIKRSPNDFIFGKTIGEGSFSSVYLAKDIHTNKEYAIKVCDKRHIIREKKTEYVKLEKEVLNILSSNSNPLAPFFVKLFCTFQDAERLYFVLTYAKNGELLPYINKVGSFDIACSRFYTAEIIMALEHLHRLRIIHRDLKPENILLDENMHILVTDFGSAKILPPEQPKDEVDGKVTRSERRNSFVGTANYVCPELLTDKASSYCSDLWALGCILYQMVGGLPPFRSRSEYIIFQQITKVEYEFPDGFHPLARDLVEKLLVLDPKQRIGAKDPAGQGYPSLRAHPFFEDIDFDSLHQTTPPPILPYLPGTSEHEELRSQYRVPDHLEPGLDDRQLTRLLGLELQSGSGGNSGGNSCSSGSSNTSSSCSSSSSERTPEANPRRKASPGPGPAPTDRDKDREKRDAKESSARESTRAAQRQRRDKLPNYSPEQALIQLDRQARENKWHPFVENNLILKEGFVEKRKGLFSRRRMLLLTEGPHLYYVDPNNMVLKGEIPWSKELRVEPKSFKIFFVHTPNRTYYLEDPEGFALDWCNVIEEMRIKTYGASRS

SEQ ID NO: 34388 - protein, 240 aa, Cicer arietinum
NSARGGNQNDGDTMIDHLLKLRVTQPEYYSDHMIKGLIQAMLLAGTDTSAVAIEWVMSELLNHPDVLNKAKEEIETQIGRDKLKEEHDLSKLPYLQNIINETLRLHPPAPLLLPHYSSEDFTLGGFNVPKDTIILSNVWAIHRDPNLWSDPLSFKPERFEIEGELNKLIAFGLGRRACPGLNLAQRSVGLTVGMLIQCFEWKRESDEKLDMMEDKGITMPKKVPLEAMCKPLPIVNDIMK

SEQ ID NO: 34389 - protein, 207 aa, Cicer arietinum
IRHEIQAMLLAGTDTSAVTIEWVMSELLNHPDVLKQSKRRNRTQIGKDKLIEEHDLSKLPYLQNIINETLRLHPPAPLSLPHYSSEDFTLGGFNVPKDTIILTNVWAIHRDPKYWSDASSFKPERFEIDGELNKLIAFGLGRRACPGQSLAHRTVGLTLGLLIQCFEWKRETEEKIDLREGKGLTMPMGVPLKAMCKPLPIANYIIS

SEQ ID NO: 34390 - protein, 248 aa, Gossypium hirsutum
MAGIAFGRFDDSFSLGTVKAYLAEFISTLVFVFAGVGSAIAYNKLTTDAALDPDGLVAIAVCHGFALFVAVAIGANISGGHVNPAVTFGLALGGQITILTGIFYWIAQLLGSIVACFLLKAVTGGLTVPIHGLGAGVGAIQGVVMEIIITFALVYTVYATAADPKKGSLGTIAPIAIGFIVGANILAAGPFSGGSMNPARSFGPAVASGDFNGIWIYWVGPLIGGGLSGLIYGNVFMNSDHAPLSNDF

SEQ ID NO: 34391 - protein, 366 aa, Hevea brasiliensis
MASLAYSLFILSLFTFTLLNPVCSELDEYLFSFGDGLYDAGNAKFIYPDKYLPSYHHPYGTTFFDYPTGRFSDGRTVVDFVAENVSLPRIPPFKNKEANFTYGANFASEGATASDSNPLIDFRSQIRDFGELKLEWAVQLVNVTELARRLKKAVYLISFGADDYLNYEIPSEASREQLESIVDVVLGNISDRIKELYDFGARKFVVENVAPLGLIPFIKQTSDNSTLFYELASLHAMKLPQILEKIQDGYLFPEFNYTVFNYFGIIKEIIDAPGEHGFKYGDIACCGNSTYRGQACGFLDYEFCVCGNKTEYLFFDGTHNTDAANNLLAELMWDKESGFISPYGVKDFFPSPTTIQTLLTEATALG

SEQ ID NO: 34392 - protein, 424 aa, Thiomicrospira crunogena XCL-2
MFEIAKQRLSDVFKHIDVEEEVITRLSVPKRSIKASIPVRMDDGSLRIFTGYRVQYDDTRGPTKGGIRYHPRVNEDEVTSLSFWMTVKCAVAGLPFGGAKGGITVNPKELSQLEIERLSRGYIRAFADVIGETRDIPAPDMYTNATIMGWMADEYSIISRQQVPGIITGKPVHLNGSEGRTQATGQGALFCLNEYARRQGWDIKNTTVAVQGFGNAGYHFARLAQQEGYRVIAVSDSSGGILTPSGLNIDDVKQYKDQTSELQAVYCDGSVCKVIEHEKLTNEELLELEIDVLVLAAMENQVTQENVDNIQAHTILEIANGPVSPQADEVLYAKNIQIIPDVLANAGGVTVSYFEWVQNRAGFYWEADEIRVKLSKIMKRESNTIYDLAIRYETSLRTAAYIHGIERLAGAINQRGNRKFFKKN

SEQ ID NO: 34393 - protein, 359 aa, Oryza sativa
MATQWFSNMVMDEPSFFHQWQSDGLLEQYTEQQIAVAFGQAGEADAAAAAAAMMVQQQQYAAAAAAEHRPRKAAKVNTSWDSCITEQGSPADSSSPTILSFGGHADAAAAAAFASAGQAQSAPYYGGASAAALKPKQELDAAAAPFSQARPVKRSYDAMVAADVAKAPAAAASRPASQNQEHILAERKRREKLSQRFIALSKIVPGLKKMDKASVLGDAIKYVKQLQDQVKGLEEEARRRPVEAAVLVKKSQLSADDDDGSSCDENFDGGEATAGLPEIEARVSERTVLVKIHCENRKGALITALSEVETIGLTIMNTNVLPFTSSSLDITIMATAGENFSLSVKDIVKKLNQAFKLSL

SEQ ID NO: 34394 - protein, 414 aa, Schizosaccharomyces pombe
MGQTLSEPVTEKHSVNGSNEFVLYGLSSMQGWRISMEDAHSAILSMECSAVKDPVDFFAVYDGHGGDKVAKWCGSNLPQILEKNPDFQKGDFVNALKSSFLNADKAILDDDQFHTDPSGCTATVVLRVGNKLYCANAGDSRTVLGSKGIAKPLSADHKPSNEAEKARICAAGGFVDFGRVNGNLALSRAIGDFEFTNSNLEPEKQIVTALPDVVVHEITDDDEFVVLACDGIWDCKTSQQVIEFVRRGIVAGTSLEKIAENLMDNCIASDTETTGLGCDNMTVCIVALLQENDKSAWYKKIADRVAANDGPCAPPEYAENHGPGWRSGDNNKKVIVPPNFHQVKLNGSDGYDKDANENSKEDDSTNGSLAAGFRWKEHFFPHKAEEENSSSETDIVNSNKDVADDHKEAVSAAD

SEQ ID NO: 34395 - protein, 404 aa, Haemophilus influenzae R2866
MRLFPKSDKLEHVCYDIRGPVHKEALRLEEEGNKILKLNIGNPAPFGFEAPDEILVDVLRNLPSAQGYCDSKGLYSARKAIVQYYQSKGILGATVNDVYIGNGVSELITMAMQALLNDGDEVLVPMPDYPLWTAAVTLSGGKAVHYLCDEDANWFPAIDDIKAKVNAKTKAIVIINPNNPTGAVYSKELLQEIVEIARQNNLIIFADEIYDKILYDGAVHHHIAALAPDLLTVTLNGLSKAYRVAGFRQGWMILNGPKHNAKGYIEGLDMLASMRLCANVPMQHAIQTALGGYQSINEFILPGGRLLEQRNKAYDLITQIPGITCVKPMGAMYMFPKIDVKKFNIHSDEKMVLDLLRQEKVLLVHGKGFNWHSPDHFRIVTLPYVNQLEEAITKLARFLSDYRQ

SEQ ID NO: 34396 - protein, 491 aa, Arabidopsis thaliana
MASEFRPPLHFVLFPFMAQGHMIPMVDIARLLAQRGVTITIVTTPQNAGRFKNVLSRAIQSGLPINLVQVKFPSQESGSPEGQENLDLLDSLGASLTFFKAFSLLEEPVEKLLKEIQPRPNCIIADMCLPYTNRIAKNLGIPKIIFHGMCCFNLLCTHIMHQNHEFLETIESDKEYFPIPNFPDRVEFTKSQLPMVLVAGDWKDFLDGMTEGDNTSYGVIVNTFEELEPAYVRDYKKVKAGKIWSIGPVSLCNKLGEDQAERGNKADIDQDECIKWLDSKEEGSVLYVCLGSICNLPLSQLKELGLGLEESQRPFIWVIRGWEKYNELLEWISESGYKERIKERGLLITGWSPQMLILTHPAVGGFLTHCGWNSTLEGITSGVPLLTWPLFGDQFCNEKLAVQILKAGVRAGVEESMRWGEEEKIGVLVDKEGVKKAVEELMGDSNDAKERRKRVKELGELAHKAVEEGGSSHSNITFLLQDIMQLEQPKK

SEQ ID NO: 34397 - protein, 496 aa, Arabidopsis thaliana
MAFEKTRQFLPPLHFVLFPFMAQGHMIPMVDIARILAQRGVTITIVTTPHNAARFKDVLNRAIQSGLHIRVEHVKFPFQEAGLQEGQENVDFLDSMELMVHFFKAVNMLENPVMKLMEEMKPKPSCLISDFCLPYTSKIAKRFNIPKIVFHGVSCFCLLSMHILHRNHNILHALKSDKEYFLVPSFPDRVEFTKLQVTVKTNFSGDWKEIMDEQVDADDTSYGVIVNTFQDLESAYVKNYTEARAGKVWSIGPVSLCNKVGEDKAERGNKAAIDQDECIKWLDSKDVESVLYVCLGSICNLPLAQLRELGLGLEATKRPFIWVIRGGGKYHELAEWILESGFEERTKERSLLIKGWSPQMLILSHPAVGGFLTHCGWNSTLEGITSGVPLITWPLFGDQFCNQKLIVQVLKAGVSVGVEEVMKWGEEESIGVLVDKEGVKKAVDEIMGESDEAKERRKRVRELGELAHKAVEEGGSSHSNIIFLLQDIMQQVESKS

SEQ ID NO: 34398 - protein, 495 aa, Arabidopsis thaliana
MAFEKNNEPFPLHFVLFPFMAQGHMIPMVDIARLLAQRGVLITIVTTPHNAARFKNVLNRAIESGLPINLVQVKFPYQEAGLQEGQENMDLLTTMEQITSFFKAVNLLKEPVQNLIEEMSPRPSCLISDMCLSYTSEIAKKFKIPKILFHGMGCFCLLCVNVLRKNREILDNLKSDKEYFIVPYFPDRVEFTRPQVPVETYVPAGWKEILEDMVEADKTSYGVIVNSFQELEPAYAKDFKEARSGKAWTIGPVSLCNKVGVDKAERGNKSDIDQDECLEWLDSKEPGSVLYVCLGSICNLPLSQLLELGLGLEESQRPFIWVIRGWEKYKELVEWFSESGFEDRIQDRGLLIKGWSPQMLILSHPSVGGFLTHCGWNSTLEGITAGLPMLTWPLFADQFCNEKLVVQILKVGVSAEVKEVMKWGEEEKIGVLVDKEGVKKAVEELMGESDDAKERRRRAKELGESAHKAVEEGGSSHSNITFLLQDIMQLAQSNN

SEQ ID NO: 34399 - protein, 368 aa, Saccharophagus degradans 2-40
MHAKPELSWQEHNTANAIREQLDAMHIAWRECAQTCTLAWINPTGTEPAIALRGDIDALPIREETNKPWQSKTERCMHACGHDGHTATLLATARWLKKHEHQLERKVVLIFQPAEEGGHGAREMIADGALEGVSEIYGWHNWPAFPYRTIACPNAIIMCGNGTFSIKITGKGGHASQPELCVDPVLAASAITVALQQICSHRIAPQKAAVISVTEIKAGDAPTVIPEYAELKGSIRVPDEETRHIINHAITEIATLTGASYGVQCTVEHSMRYSATINHAKQANLARRQWQALYGEKSLVPGTLLPVMASEDFSYYLRECQGAFALIGSREGNQNAAPCHSPHYDFNDNLIEDVCRWFCRLTGMRLPP

SEQ ID NO: 34400 - protein, 376 aa, Arabidopsis thaliana
MAIRKEEESREEQSNSFLLDALYCEEEKWDDEGEEVEENSSLSSSSSPFVVLQQDLFWEDEDLVTLFSKEEEQGLSCLDDVYLSTDRKEAVGWILRVNAHYGFSTLAAVLAITYLDKFICSYSLQRDKPWMLQLVSVACLSLAAKVEETQVPLLLDFQVEETKYVFEAKTIQRMELLILSTLEWKMHLITPISFVDHIIRRLGLKNNAHWDFLNKCHRLLLSVISDSRFVGYLPSVVAAATMMRIIEQVDPFDPLSYQTNLLGVLNLTKEKVKTCYDLILQLPVDRIGLQIQIQSSKKRKSHDSSSSLNSPSCVIDANPFNSDESSNDSWSASSCNPPTSSSSPQQQPPLKKMRGAEENEKKKPILHLPWAIVATP

SEQ ID NO: 34401 - protein, 541 aa, Gardnerella vaginalis
MAKIIAYEEDARQGMLAGLDRLANTVKVTLGPKGRNVVLDKSYGAPTITNDGVSIAKEIDLEDPYERIGAELVKEVAKKTDDVAGDGTTTATVLAQSLVHEGLKNVVAGSNPIALRRGIEKASEAIVKELLASAKDVETKDQIAATATISAADPEVGEKIAEALDKVGQDGVVTVEDNNKFGLDLDFTEGMRFDKGYISPYFVTNAEDQTAVLEDPYILLTSGKVSSQQDIVHVAELVMKSGKPLLIIAEDVDGEALPTLVLNKIRGTFNTVAVKAPGFGDRRKAMLQDMAILTGAQVVSDDLGLKLDSIDASVFGHAAKVIVSKDETTIVSGAGSKEDVEARVAQIRAEIENTDSDYDREKLQERLAKLAGGVAVIKVGAATEVEAKERKHRIEDAVRNAKAAIEEGLLPGGGVALVQAAAKVEKSADIVALSGEEATGAAIVFRAVEAPIKQIAQNSGVSGDVVLNKVRELPEGEGFNAATNTYEDLLAAGVTDPVKVTRSALQNAASIAGLFLTTEAVVANKPEKPAAAPQAGAEMGY

SEQ ID NO: 34402 - protein, 467 aa, Theobroma cacao
  misc_feature (217)..(217): Xaa can be any naturally occurring amino acid
  unsure (1)..(467): unsure at all Xaa locations
MEGGSKKVKSLALVWLIFALLHPLRLISANVEGDALHSLRTNLNDPNNVLQSWDPTLVNPCTWFHVTCNNDNSVIRVDLGNAALSGQLVPQLGLLKNLQYLELYSNNISGQIPSDLGNLTSLVSLDLYLNSFSGPIPESLGRLSKLRFLRLNNNSLSGPIPMSLTNITSLQVLDLSNNRLSGEVPDNGSFSLFTPISFANNLDLCGPVTGRPCPGSXPFSPPPPFVPPPPISSPSGNSVTGAIAGGVAAGAALLFAAPAIAFAWWRRRKPQEFFFDVPAEEDPEVHLGQLKRFSLRELQVATDSFSNKNILGRGGFGKVYKGRLADGSLVAVKRLKEERTPGGELQFQTEVEMISMAVHRNLLRLRGFCMTPTERLLVYPYMANGSVASCLRERPPSQPPLDWPTRKRIALGSARGLSYLHDHCDPKIIHRDVKAANILLDEEFEAVVGDFGLAKLMDYKDTHVTNH

SEQ ID NO: 34403 - protein, 546 aa, Bruguiera sexangula
MAIAAQTPDILGERQSGQDVRTQNVVACQAVANIVKSSLGPVGLDKMLVDDIGDVTITNDGATILKMLEVEHPAAKVLVELAELQDREVGDGTTSVVIIAAELLKRANDLVRNKIHPTSIISGYRLAMREACKYVEEKLSMKVEKLGKDSLVNCAKTSMSSKLIAGDSDFFANLVVDAVQAVKMTNARGEIKYPIKSINILKAHGKSARDSCLLNGYALNTGRAAQGMPMRVAPARIACLDFNLQKTKMQLGVQVLVTDPRELERIRQREADMTKERIEKLLKAGANVVLTTKGIDDMALKYFVEAGAIAVRRVRKEDMRHVAKATGATLVSTFADMEGEETFDSSLLGQAEEVVEERIADDDVIMIKGTKTTSAVSLILRGANDYMLDEMERALHDALCIVKRTLESNTVVAGGGAVEAALSVHLEYLATTLGSREQLAIAEFAESLLIIPKVLAVNAAKDATELAAKLRAYHHTAQTKADKKHLSSMGLDLSKGTIRNNLEAGVIEPAMSKIKIIQFATEAAITILRIDDMIKLVKDETQNEEE

SEQ ID NO: 34404 - protein, 98 aa, Rhizobium leguminosarum
MASTNFRPLHDRVVVRRVESEAKTKGGIIIPDTAKEKPQEGEIVAVGSGARDESGKVVALDVKAGDRILFGKWSGTEVKIDGEDLLIMKEADIMGIIG

SEQ ID NO: 34405 - protein, 449 aa, Bruguiera sexangula
MGKEKIHINIVVIGHVDSGKSTTTGHLIYKLGGIDKRVIERFEKEAAEMNKRSFKYAWVLDKLKAERERGITIDIALWKFETTKYYCTVIDAPGHRDFIKNMITGTSQADCAVLIIDSTTGGFEAGISKDGQTREHALLAFTLGVKQMICCCNKMDATTSKYSKARYDEIVKEVSSYLKKVGYNPEKIPFVPISGFEGDNMIERSTNLDWYKGPTLLEALDMIQEPKRPSDKPLRLPLQDVYKIGGIGTVPVGRVETGVLKPGMVVTFGPSGLTTEVKSVEMHHEALQEALPGDNVGFNVKNVSVKDLKRGYVASNSKDDPAKEASSFTSQVIIMNHPGQIGNGYAPVLDCHTSHIAVKFSEILTKIDRRSGKELEKEPKFLKNGDAGFVKMIPTKPMVVETFSEYPPLGRFAVRDMRQTVAVGVIKSVEKKEPSGAKVTKSAAKKGGK

SEQ ID NO: 34406 - protein, 571 aa, Pyrococcus abyssi GE5
MGERFDKYEYLQDLMRRRGFAWGSFEIYGGSRGFYDYGPLGATIKRKIEKKIREAFIREGFFEIETPDITPEQVFIASGHVEKFVDPIVECKKCGARFRADHLIEETLGIDVEGKSAEEMTKIIREHNIKCPECGGELGDVFYFNLMFETYIGPYKDKKAYLRPETAQGIFVNFKRLNAFARNKLPFGVFQIGKAYRNEISPRQGMIRLREFTQAEVEIFFNPNETEHPHFDEVKHEKLRLYPIENQLKDLGMIELTAEEAVKKGYLMNTFFAYYLVMIKKILLDIGIPEDKIRFRQQLPEERAHYSADTWDAEVYSERFGWVECVGLAYRTDYDLSRHMKMSGADLTVMIHYDKPKIVKRLKVSLNMKSVGPKLKKDAKRINEKIQAMSEEELRELVKKLNEEGKIVIDGYELSKDDFIIKEVEEKVTGEKIIPHVLEPSFGIDRPFYLLLENSLTIDEDGRIYLKIKKDMAPIEVAVLPLVAKEPLTKIAYDLFRKLQKEGFIVVYDEKDSIGKRYMRYDEIGTPYCVTIDNQTPIDGTVTIRDRDTREQIRVKLEDVPRKLKELIFGS

SEQ ID NO: 34407 - protein, 256 aa, Brevibacterium sp. HCU
MNRLGGKVAVITGGAAGMGRIQSELYASEGAQVAVVDVNEQEGRATADAIRASGGVANYWKLDVSDESEVEIVVSDIAKRFGAINVLVNNAGVTGADKPTHEIDERDLDLVLSVDVKGVFFMTKHCIPYFKQAGGGAIVNFASIYGLVGSQELTPYHAAKGAVVALTKQDAVTYGPSNIRVNAVAPGTILTPLVKELGSRGPDGLDGYTKLMGAKHPLGRVGTPEEVAAATLFLASEEASFITGAVLPVDGGYTAQ

SEQ ID NO: 34408 - protein, 447 aa, Suaeda japonica
MGKEKIHISLVVIGHVDSGKSTTTGHLIYKLGGIDKRVIERFEKEAAEMNKRSFKYAWVLDKLKAERERGITIDIALWKFETNKYYCTVIDAPGHRDFIKNMITGTSQADCAILIIDSTTGGFEAGISKDGQTREHALLSFTLGVRQMICCCNKMDATTPKYSKARYDEIVKEVSSYLKKVGYNPEKVPFVPISGFEGDNMIERSTNLDWYKGPTLLEALDMINEPKRPSDKPLRLPIQDVYKIGGIGTVPVGRIETGVLKPNMVVTFGPTGLTTEVKSVEMHHESLPEALPGDNVGFNVKNVSIKDLKRGYVASDSKNDPAKGASSFTAQVIIMNHPGQIGNGYAPVLDCHTSHIAVKFAELLTKIDRRSGKELEKEPKFLKNGDAGMVKMIPTKPMVVETFAEYSPLGRFAVRDMRQTVAVGVIKSVDKKEPTSAKVTKAAMKKK

SEQ ID NO: 34409 - protein, 469 aa, Chlorobium tepidum TLS
MQQADTLAAQFDVAVIGSGPGGYEAAIHAARYGLKTCIVEKAVLGGVCVNWGCIPTKALLRSAEVFDLAKNPETFGVNVGNVSFDLAQAVKRSRNVALKSSKGVAYLLKKAAVEVLAGEAVLTGGAGVMVTMPDGSVRMLGAKNIIVATGSTPRVIPGLEPDGKKIITSREALILKEVPKSMIVVGGGAIGVEMAWFYAKAGSKVTIVELMPRMLPAEEAEVSEALKRSFEKAGITVHCGAKLDNVAVSESGVSAELVVEGSAPQTLNASCLLVAVGVTGAIDGLGLDAVGVETERGFIRTDGQCRTSAPGIYAIGDVRGGMLLAHKASAEAAIAVEAIAGKSPEPLSEPLIPRCVYAQPSVASVGLTEEAAVNAGYQVAVGRSQFAASGKANAYGQLEGFVKLVFDAATGKMLGGHLIGHDAVELIGELGLACRYGVTAGGLVNTVHAHPTLSETVREAAFDALQSMG

SEQ ID NO: 34410 - protein, 447 aa, Salsola komarovii
MGKEKIHISLVVIGHVDSGKSTTTGHLIYKLGGIDKRVIERFEKEAAEMNKRSFKYAWVLDKLKAERERGITIDIALWKFETNKYYCTVIDAPGHRDFIKNMITGTSQADCAILIIDSTTGGFEAGISKDGQTREHALLAFTLGVKQMICCCNKMDATTPKYSKSRFDEIVKEVSSYLKKVGYNPDKIAFVPISGFEGDNMIERSTNLDWYKGPTLLEALDMINEPKRPSDKPLRLPLQDVYKIGGIGTVPVGRVETGVLKPGMVVTFGPTGLTTEVKSVEMHHESLPEALPGDNVGFNVKNVAVKDIKRGFVASDSKNDPAKEAANFTAQVIIMNHPGQIGNGYAPVLDCHTSHIAVKFAELVTKIDRRSGKELEKEPKFLKNGDAGMIKMVPTKPMVVETFSEYPPLGRFAVRDMRQTVAVGVIKNVEKKDPTGAKVTKAALKKK

SEQ ID NO: 34411 - protein, 322 aa, Arabidopsis thaliana
MNCGGKVVCVTGASGYIASWIVKLLLLRGYTVNATVRDPKDKKKTEHLLALDGAKERLKLFKADLLEESSFDQAIDGCDAVFHTASPVLFTVTDPQTELIDPALKGTINVLNTCKQVSSVKRVILTSSTAAVLSRQPPIGPNDLVDETFFSDPSLCRETKNWYSLSKILAENAAWQFAKDNGIDMVVLNPGFICGPLLQPTLNMSVELIVDFINGKNPFNKRYYRFSDVRDVALVHIKALETPSANGRYIIDGPNMSVNDIIDILRKLFPDLSIADTNEESEMNEMICQVCVEKVKNLGVEFTPMKSSLRDTIVSLKEKCLL

SEQ ID NO: 34412 - protein, 105 aa, Rhizobium leguminosarum
MKFRSLHDRVVIRRAEGDVKSKGGIIIPDTAKEKPQQGEVVAVGPGLRDKSGNLVPLDVEVGDLILFGKWSGTEVTIDGETLLIMKETDIMGIVEKTEAAADKAA

SEQ ID NO: 34413 - protein, 1553 aa, Trichodesmium erythraeum IMS101
MRIEALVVGINEHVFEPGLNLKAPVKDAEAIAEMLEKYGNFHVQGLPKDYDETGRERFISDGFVYRKNLKIKVSNLFNPISKNEIPDVALFFFAGHGFVTTEGGVREGFLVTSDVQLKRDIYGISLSWLKDLLRQSPVKKQIVWLDCCFGGELLNSQEADPGTGKEVSRCFITSSRSFEKSVSEIDGKHGVFTANLLKGLNPESSIDGWVTNYILADSIKNNMLNISQSPVFHNSGDAIILTTNTQTKSLDGRWKKTPPYRALSYFTEQEKDGVFFYGRTQLTDELIDRVRTNNFVAVLGASGSGKSSLLRAGLLYQLKRGQKISGSDRWLYIKPFTPSSSPLESLQKAVNIKSEKIENLTEKLIDFINEVKAEKVLMVIDQFEESFTLCETDEKRREFFDCFLSVLANEKTKNKFCLVLGMRADFLDQCSKYSGLATEIKEHQLLVTPLEKDEIEEAIKKPAELVGMGVEPKLVAQMAADFLRNPGSLPLLQYTLDALWKSATQGEDKSQYLTLASYEKLGGIQGTLTKQADAVYESLNKEKKSVAKRIFLELVQPGERSVNFLKVTDTRRRVILEKLPNKEHTLELLLEVSDNLADPNNRLITKDKSEAGTLLDIIHEDLIRSWKTLRKWVEEYQEALPVERKIEADAAGWEKDGKNEGLLLRETQLTKAEEYVTKYGDMGLLDGLAYEFIEASQELRIREEKEEKERKERELEQEKKARKLAQRRNQILGVSLVLMTGVSGYAWMQQNIAKHNSEIFFTRQLAAKAELLTTYNSYDTTVLLGVQSMNRIQEFKEWQDSGWRKVVRKFLGSQFSDIPQNAADGAIRKGLTQLPDHLHTLNHQDRVIAVAFSPDGKTIATASYDNTARLWDTENGNVLATLNHQSRVRAVAFSPDGKTIATASSDKTARLWDTENGKELATLNHQDSVRAVAFSPDGKTIATASNDKTARLWDTENGKELATLNHQDSVRAVAFSPDGKTIATATSDKTARLWDTENGNVLATLNHQSRVRAVAFSPDGKTIATASYDKTARLWDTENGKELATLNHQFWVNAVAFSPDGKTIATASSDNTARLWDTENGFELATLNHQDRVWAVAFSPDGKTIATASDDKTARLWDTENGKELATLNHQSSVNAVAFSPDGKTIATASRDNTARLWDTENGKELATLNHQDRVWAVAFSPDGKTIATASLDKTARLWDTENGFELATLNHQDWVRAVAFSPDGKTIATASYDNTARLWDTKTRKELATLNHQDWVIAVAFSPDGKTIATASRDKTARLWDTENGKVLATLNHQLDINAVAFSPDGKTIATATSDKTARLWDTENGKVLATLNHQSRVFAVAFSPDGKTIATASYDKTARLWDTENGKVLATLNHQSSVNAVAFSPDGKTIATASYDKTARLWDTENGKVLATLNHQSSVNAVAFSPDGKTIATASSDKTARLHWTTPKGLIQEGCRRLSRNLTAEEWQQYINSDLETYQKTCKNIPVHPSLIAEAKNLAKTGEKPKIKQAISIFKKALELEPEIDLDPDTETRETDPQLVANKLAASAKLK

SEQ ID NO: 34414 - protein, 293 aa, Glycine max
MHIQFFNICKKFVCCSHHNIWRQAEIPVKTFHYYHPDTKGLDFAALLNDVKNAPDCSFFLLHPCAHNPTGVDPTEEQWREISYHFQVKNHFPFFDMAYQGFSSGDLDKDAIALRIFLEDGHLIGCAQSFAKNMGLSEHKAGCLSVLCQSIKQVAALKSQLQLMSHAMYSSIPFQGISLVTMILSEPDTEALWRKEIKVMAKRIQTMRTTLRHCLENLHSSFNWEHITDQVGMFCFSGLTPDQVQQMEKLFHIYMTPDGRMSMSGVTSSNVDYLANAIHQVTRIDEEALRSCYV

SEQ ID NO: 34415 - protein, 377 aa, Streptococcus thermophilus CNRZ1066
MTLDLIKIRRDLHQIPEIGLEEFKTQAYLLERIAEMTEGKDFVEQRTWRTGILVFLHGSAPEKTIGWRTDIDGLPIVEETGLDFKSIHEGRMHACGHDIHMTTALGLLDQMLQVQPKNNMLFLFQPAEENEAGGMLMYEDGAFGDWLPDEFYGLHVRPDFKVGDIATNTNTLFAGTCEVLVTFKGKGGHAAFPHEANDALVAASYFITQVQTIVSRNVDPIQGGVVTFGSFHAGTTNNVIAETAEVYGTIRTLTQEMSLLIQKRVRQIAEGVAASFGMEVDIMLKQGGYLPVENNPALAKELMAFFDASPAVNLIDCLPAMTGEDFGYLLSKVPGVMFWLGIDTPYALHHPKMSPNEEALAFAVSEIGKFLKYKAED

SEQ ID NO: 34416 - protein, 398 aa, Monilinia laxa
MREIVHLQTGQCGNQIGAAFWQTISGEHGLDGSGVYNGTSDLQLERMNVYFNEASGNKYVPRAVLVDLEPGTMDAVRAGPFGQLFRPDNFVFGQSGAGNNWAKGHYTEGAELVDQVLDVVRREAEGCDCLQGFQITHSLGGGTGAGMGTLLISKIREEFPDRMMATFSVVPSPKVSDTVVEPYNATLSVHQLVENSDETFCIDNEALYDICMRTLELSNPSYGDLNHLVSAVMSGVTTCLRFPGQLNSDLRKLAVNMVPFPRLHFFMVGFAPLTSRGAHSFRAVTVPELTQQMYDPKNMMAASDFRNGRYLTCSAILRGKVSMKEVEDQMRNVQNKNSSYFVEWIPNNVQTALCSIPPRGLKMSSTFVGNSTSIQELFKRVGDQFTAMFRRKAFLHWY

SEQ ID NO: 34417 - protein, 271 aa, Nostoc sp. PCC 7120
MKSYLAAAIQMTSVPDLHKNLAQAEELIDLAVRRGAELVGLPENFSFMGEEQDKLAQAEAIARESEIFIKTMAQRYQVTLLGGSFPVPVSDTGRVYNTTILISPSGEELARYNKVHLFDVNVPDGNTYRESSTVVAGQQLPPVHFSEYLGNIGVSICYDVRFPELYRHLSDKGTDIIFIPAAFTAFTGKDHWQVLLQARAIENTAYVIAPAQTGNNYGRRLTHGHAVVIDPWGTILADAGDKPGIAIAEINPSRLEQVRRQMPSLQHRVFS

SEQ ID NO: 34418 - protein, 434 aa, Escherichia coli O157:H7 EDL933
MFDFVCNHMSAKSEWFKNYLQQQPGFEDFFIAVDPQTDLSAVTRPRALPLLTPFQMDDNSTRHLWTTFSDDQIDLNYRSPDVLLAMVDVLLCYLEKGAEYVRLDAVGFMWKEPGTSCIHLEKTHLIIKLLRSIIDDIAPGTVIITETNVPHKDNIAYFGEGDDEAHMVYQFSLPPLVLHAVQKQNVEALCQWAQSLSLPSGKTTWFNFLASHDGIGLNPLRGLLPESEILALVEALQQEGALVNWKNNPDGTRSPYEINVTYMDALSRRESSDEERCARFILAHAILLSFPGVPAIYIQSILGSRNDYAGVEKLGYNRAINRKKYHSEEITRELNDEATLRHAVYHELSRLITLRRSHNEFHPDNNFTIDTVNSSVMRIQRSNAEGNCLTGLFNVSKNIQHVNITGLHGRDLISEVDILGNKITLRPWQVMWIK

SEQ ID NO: 34419 - protein, 87 aa, Brassica napus
MDTNTSGDELLTKARKPYTITKQRERWTEDEHDRFLEALRLYGRAWQRIEEHIGTKTAVQIRSHAQKFFTKLEKEAEAKGIPVCQAL

SEQ ID NO: 34420 - protein, 159 aa, Oryza sativa (japonica cultivar-group)
MGRGKIEIKRIDNATSRQVTFSKRRSGLFKKARELSILCDAEVGLLVFSSTSRLYDFASSSMKSIIERYNETKEDPHQTMNASSEAKLWQQEAASLRQQLHNLQEYHRQLLGQQLSGLDVEDLQNLESKLEMSLKNIRLRKDNVMMDQIQELSRKVVTT

SEQ ID NO: 34421 - protein, 356 aa, Legionella pneumophila str. Lens
MLIKLMLGLLEFKKKPFIGMRDLFEQLSTGQNPETLFITCSDSRIVPSLITQADPGDLFSIRNIGNIIPPYPSSYSEAGAIEYALKVLEIKDIIICGHSNCGAMKGLLNSHIEEHLPCVASWLNHSQAVLQEVHEERETETNTPDRELEIATKKNILLQMEHLKTYPLVIEKTAHKELTIHGWYYELETGKVFIYEPDLKEFINLEYALDRALESRKNKIVSGLCMNYLQQMIPLKSEKEYCRLMELITNLQEDILPIWEFIREPAKQQLWKELGGFYASPEDEEFIAMVESSTSIKLTELEEFKKKVSFANNNTATSLLLNSSIFKKPTKDIGKLNVEPVISRDARVALSGDRGS

SEQ ID NO: 34422 - protein, 1135 aa, Psychrobacter arcticus 273-4
MAYKKRFDTSSAYGQLVILVFLPICLLAAVGGILVFYETMRASNSEQAVLAEAVLIRYSPTIAEIVPELLAQNDAKAQTTENNNESTTNSVLQAAMATLEGIQDKLGRMRAEQHVQRIAIVNQNNEVLATVGYGTDEAWPAVDPSERFLAQQPTPIGTAYGSILGEFDGQTLWLLVDMDSEPLYIARYRIAMALVITGLFTLLILLLSLNIYSKRWIAPIYELRLQLQRTHVDNLYQPIPVESNGELNLLQQDLVRTLRRLYVSFQELKEHAEQTEDDLRLAFDEMEMQNISIRNARDAAISTSQAKSAFLANISHELRTPLNSIDGFINLLARHGELNPEQDLYVQTIRKSSAHLLALVNDVLDFSKIEAGKLVLDRHEFDLYDTIYDVVDMLSPVSAEKGLRMAVLFYNDVPMRVNGDALRLKQVLTNIVGNAIKFTDSGDVVVRVSLDDYQDNYLMISVQDSGKGISLSDQKMLFQSFSQGDPSITRQYGGTGLGLVISKQLTRLMGGDIGFYDNMQENISNQGATFWFRMPAHVDVLEAATGQTIELPVLAPLASATDEFNVLIWINHTASIQVLKASLHHLPITLTQANSLPGLLESLKEHGNYWDWVIVDDDTQDDMMALLKQIRLHYQGKLAVFGYQVAADQALLNRYHANILYEPLDKRQLYAMLDTQKRSVPTGIAEPRWKGVTVLAVDDHLPNLLVLDALLSELGIHVITASNGFDAIEMISKQQTKNIKSAKTEKQSLSKKTQISKAVTRDDVSKSAVSALHIEDTTTEEKGKAQHKNSIDLIFMDIQMPRMSGHEAARQIRKIEAADSHIPIIALTAHGLADERDKLIASGINDYVGKPISQPQLLQVLQKWLGRSASSSPLTAENDEHSQSLSIASGAPPTYQMIRSEQVKSYKPTKMSNEKRVTRPLSLKKIRDDYLRDSQPREDYRRESRRDTQPRYESLRFQEQGQSVFGTRSIQTLDDNKDELLVNTAYLQKNSHLNASVFNTLDILNWQDALMRSANKPDLAAKLIIMMLDTINDEKQALTQAWEAHNRSMLAQIAHRILGGSRYTGVPQLRQASQDLEERCLLNIQHTTPAQFAMLEPYYEALLTALNNLQTLDLSAYPQLNYHRLSENDMTWKMI

SEQ ID NO: 34423 - protein, 159 aa, Glycine max
MAEQTEKAFLKQPKVFLSTKKTGKGKRPGKGGNRFWKSIGLGFKTPREAIEGTYIDKKCPFTGNVSIRGRILAGTCHSAKMNRTIIVRRNYLHFIKKYQRYEKRHSNIPAHISPAFRVKEGDHVIIGQCRPLSKTVRFNVLKVIPAGSSSGAKKAFTGM

SEQ ID NO: 34424 - protein, 86 aa, Salmonella enterica
VDAMRTRIISMRQTLVKELKAEMPDRNFDYLLQQRGMFSYTGLSAEQVDRLRDEFGVYLIASGRMCVAGLNASNVHRVAKAFAAVM

SEQ ID NO: 34425 - protein, 538 aa, Scardovia inopinata
MAKIIKYDEEARQGMLEGLDELANTVKVTLGPRGRNVVLDKTYGAPTITNDGVSIAKEIDLEDPYARIGAELVKEVAKKTDDVAGDGTTTATVLAQSLVHEGLRNVTAGSNPIALRRGIEKASDAIVERLLSNAKPVETKEQIAATATISAGDPEVGDKIAEALDKVGQDGVVTVEDNNKFGLDLEFTEGMRFDKGYISPYFVTNADEQTAVLEDPYILLTSGKVSSQQDIVHIAELVMKSGKPLLIVAEDVDGEALPTLVLNKIRGTFNTVAVKAPGFGDRRKAMLQDMAILTGAQVVSDELGLKLDSIDDTVFGHASKVIVSKDETTIVSGAGSKEDVAARVAQIRSEIEDSDSDYDREKLQERLAKLAGGVAVIKVGAATEVEAKERKHRIEDAVRNAKAAIEEGLLPGGGVALVQAAADVQKNVKLEGDEATGAGIVFRAIEAPLKQIAQNAGFSGEVVIDKVRTLPAGSGLNAATGEYEDLLSAGVTDPVKVTRSALQNAASIAGLFLTTEAVVANKPEPPAPAAAPNPDMGY

SEQ ID NO: 34426 - protein, 524 aa, Capsicum annuum
MGNCCAVPKTSDTEEKKRGKNKPNPFSVDYAHGNGHKSYVLDNPTGCDIEATYELGRELGRGEFGVTYLSTDKATGDVYACKSISKKKLRTRVDIEDVRREVEIMKHLPKHPNIVTLKDTYEDDNAVHIVMELCEGGELFDRIVARGHYTERAAAAVTRTIVEVIQMCHKHGVMHRDLKPENFLFENKKETAPLKAIDFGLSVFFKPGERFNEIVGSPYYMAPEVLKRDYGPEVDVWSAGVILYILLCGVPPFWAETEQGVAQAIIRSVVNFKRDPWPKVSDNAKDLVKRMLNPDPSKRLTAQEVLDHPWIQNAKKNPNVSLGETVKARLKQFSMMNKLKKRALRVIAEHLTVDEVAGIKEGFQLMDIGNKGKIDINELRVGLQKLGHQIPESDVQILMDVGDVDKDGFLDYGEFVAISVHLRKMANEEHLKAAFEFFDKNQNGYIEIDELREALDDEIETNSEEVINAIMQDVDTDKDGRISYDEFSAMMKAGTDWRKASRQYSRERYNSLSLKLMKDGSLQS

SEQ ID NO: 34427 - protein, 520 aa, Arabidopsis thaliana
RESLCLCKRYLSLRRTEETSRINQSINFSELTLDFSFEVMESVPESVPSPNSNTPSIPPPVNSVPPFLSKTYDMVDDPLTNEVVSWSSGNNSFVVWSAPEFSKVLLPKYFKHNNFSSFVRQLNTYGFRKVDPDRWEFANEGFLRGRKQLLKSIVRRKPSHVQQNQQQTQVQSSSVGACVEVGKFGIEEEVERLKRDKNVLMQELVRLRQQQQATENQLQNVGQKVQVMEQRQQQMMSFLAKAVQSPGFLNQLVQQNNNDGNRQIPGSNKKRRLPVDEQENRGDNVANGLNRQIVRYQPSINEAAQNMLRQFLNTSTSPRYESVSNNPDSFLLGDVPSSTSVDNGNPSSRVSGVTLAEFSPNTVQSATNQVPEASLAHHPQAGLVQPNIGQSPAQGAAPADSWSPEFDLVGCETDSGECFDPIMAVLDESEGDAISPEGEGKMNELLEGVPKLPGIQDPFWEQFFSVELPAIADTDDILSGSVENNDLVLEQEPNEWTRNEQQMKYLTEQMGLLSSEAQRK

SEQ ID NO: 34428 - protein, 537 aa, Bifidobacterium animalis subsp. lactis
MAKIIEYDEEARQGMLAGLDKLADTVKVTLGPKGRNVVLDKTYGAPTITNDGVSIAKEIDLEDPFERIGAELVKEVAKRTDDVAGDGTTTATVLAQSLVHEGLKNVVAGSNPIALRRGIEKASDALVKQLVASAKPVETKEQIAATATISAGDPEVGEKIAEALDKVGQDGVVTVEDNNRFGLDLDFTEGMRFDKGYISPYFVTNAEDQTAVLDDPYILLTSSKVSSQQDVVHIAELVMKTGKPLLIVAEDVDGEALPTLILNNIRGTFKSCAVKAPGFGDRRKAMLQDMAILTGGQVVSEDLGLKLDSIDLSVFGTAKKVIVSKDETTIVSGGGSKEDVAARVAQIRAEIEKTDSDYDREKLQERLAKLAGGVAVIKVGAATEVEAKERKHRTEDAVRNAKAAIEEGLVPGGGVALVQAAEKVEKDFNLEGDEATGAAIVFSGIEAPIKQIAENAGLSGAVVIDKVRSLPEGEGFNAATDTYEDLMAAGVTDPVKVTRSALQNAASIAGLFLTTEAVVANKPEPAAAPAAGHNMGY

SEQ ID NO: 34429 - protein, 377 aa, Oryza sativa
  misc_feature (300)..(300): Xaa can be any naturally occurring amino acid
  misc_feature (324)..(324): Xaa can be any naturally occurring amino acid
  unsure (1)..(377): unsure at all Xaa locations
MQIFVKTLTGKTITLEVESSDTIQNVKAKVQDKEGIPPDQQRLIFAGKQLEDGRTLADYNIQKESTLHLVLRLRGGLNVKVRTLTGKEIDIDIEMTDTVDRIKERVEEREGIPPVQQRLIYGGKQLADDKTAHDYKIEAGSVLHLVLALRGGMQIFVKTLNGRTITLVVDSCDSVENVKARIHDREGVPPHQQRLIFAGKQLEDGRTLADYNIQKESTLHLVLRLRRGMNDIKVKMLTGKEIDVDIEPTDTMGRIKERIDEREGRLVYGGKQLADDKTVHEYDIEAGSVLLHDRPCSQGXMQIVVETQMGKLITLEVESSDTIXKEKVQEKEGIPIPPDQQLLFFDHKLLENGCTVAGYNIQDGSTLSLYLRLLPGS

SEQ ID NO: 34430 - protein, 957 aa, Lotus corniculatus
MANRNLEKMASIDAQLRQLAPAKVSEDDKLIEYDALLLDRFLDILQDLHGEDLKETVQEVYELSAEYERKHDHEKLEELGKVITSLDAGDSIVVAKSFSHMLNLANLAEEVQISRRRRNKLKKGDFADENNATTESDIEETLKKLVFKLKKSPQEVFDALKNQTVDLVLTAHPTQSVRRSLLQKHARIRNSLSQLYAKDITPDDKQELDEALQREIQAAFRTDEIKRTPPTPQDEMRAGMSYFHETIWKGVPKFLRRVDTALKNIGINERVPYNAPLIQFSSWMGGDRDGNQVTPEVTRDVCLLARMMASNLYYSQIEDLMFELSMWRCNDELRVHADELHRNSKKDEVAKHYIEFWKKVPPNEPYRVVLGEVRDRLYKTRERSRYLLAQGYSEIPEEATFTHVEEFLEPLELCYRSLCDCGDRAIAGSLLDFLRQVSTFGLSLVRLDIRQESDRHTDVMDAITKHLEIGSYQEWSEEKRQEWLLGELSGKRPLFGPDLPQTEEIRDVLDTFHVIAELPSDNFGAYIISMATAPSDVLAVELLQRESHALRVVPLFEKLDDLEAAPAALARLFSIEWYRNRINGKQEVMIGYSDSGKDAGRFSAAWQLYKAQEDLIKVAKKFGVKLTMFHGRGGTVGRGGGPTHLAILSQPPDTIHGSLRVTVQGEVIEQSFGEEHLSFRTLQRFTAATLEHGMNPPFSRKPEWRALMDQLAVIATEEEEYRSIVFKEPRFVEYSLATPELEYGRMNIGSRPAKRRPTGGIEIRAIPWIFAWTQTRFHLPVWLGFGAAFRQLIEKDVRNLHTLQEMMYNQWPFFRVTIDLVEMVFLKGDPGIAALNDRLLVSEDLWPFGEQLRNKYEETKKLLLQVAGHKEVLEGDPYLKQRLRLRDSYITTMNVFQAYTLKRIRDPNYDVKHISKEKSKPADELVRLNPTSEYAPGLEDTLILTMKGIAAGMQNTG

SEQ ID NO: 34431 - protein, 400 aa, Zea mays
YRFLVDGVWRCDETKPFVRDEYGLISNEVLVENNVLPVVQPEPSIRGTNMDKGTILKTMPLEPLTQNPSMQIAVIRHVVSGILLHNTIYDVVPLSSKLTVLDTQLPVKQAFKIMHDEGLALVPLWDDRQGTITGMLTASDFVLILRKLQRNIQVIGNEEPISAWKEAKLQFYGGPDGAAMQRRPLIHVKDSDNLVDVALTIIRNEISSVPIFKCMADSSGVPFLNLATLQGILKFLCSKLQEEAEGCSLLHNQLLSIPIGTWSPHTGRSSSRQLRTLLLSSPLNTCLDILLQDRVSSIPIVDDNGSLRDVYSLSDIMALAKNDVYARIELEQVTVQNALDVQYQVHGRRQCHTCLQTSTLLEVLEGLSIPGVRRLVVIEQSTRFVEGIISLRDVFTFLLG

SEQ ID NO: 34432 - protein, 303 aa, Brucella suis 1330
MAQMKLPSITSGDGGLTRYLEEIRRFPMLEPQEEYMLAKRYHEHADPKAAHKLVTSHLRLVAKIAMGYRGYGLPIGEVISEGNVGLMQAVKRFEPERGFRLATYAMWWIKASIQEYILRSWSLVKMGTTANQKRLFFNLRKMKSKIQALDDGDLNPDQVKQIATKLNVSEDEVVSMNRRLSGDASLNAPLRASEGESGEWQDWLVDDSNSQEQVLIEQDELESRRSMLEQAMETLNDRERRIFEARRLAEEPMTLEDLSGEFGISRERVRQIEVRAFEKVQAAVKAAAHKQQKALNHIEEAHV

SEQ ID NO: 34433 - protein, 189 aa, Leptospira interrogans serovar Copenhageni str. Fiocruz L1-130
MKEGASFMYSKYFIWFMTLGIFLPLAGIFAKGSFYDFKVKDIKGNEVSLSKYKGKVVMVVNVASKCGYTYQYEHLEKVYKKYKDQGFAVVGFPANNFGGQEPGTDQEIETFCRIQKGASFDMMSKISVKGKDIHPLYFYLIQNSPNPGEVEWNFEKILISKSGTIEARYRSSVEPDSSAVTQKIETLLK

SEQ ID NO: 34434 - protein, 630 aa, Solibacter usitatus Ellin6076
MKGYASLRRKLATLIAGGGVVTALIAAAGFSWLDLQRFQQQANAQVTAIANIVAGQVEPSIALGDRRVAAEILQSLRGDRMIRDAILYDGEGECFAVARALLAACPPRPRDGLKREREAIVLVRPVLSGGERVGTLVLAASVPSIREVLGQYLGGAALIMALTLLVAGVLAMVLQARVSAPILAIARVAERITQTHQFDDRVAVDSSDELGVLARSFNTMLEEIARSGAELEQQIMERNRVNAELLAAKERAEDAARQKTQFLANMSHEIRTPMNGVMGMISLVLDHELDSQDREHLLMAQSAAQSLIIILNDILDLSKIEAGKMTFETVDFDLHRLIGDAMGIFSSAAIAKGLDLGIDLAPDSPRWVRGDPVRLRQILINLVGNAVKFTAAGSVRLTLAPHLDNLVRFAVRDTGIGVPKDQMEAIFEAFVQADGSHTRQFGGTGLGLAITRRLVALMEGTLWAESQSGCGSTFFVELPVQPGSAVQSLVAMAESAPGELPPVLRVLVAEDNVINQKVICSMLRRQGWTVTLALNGEEAYRRFLESRFDLILMDVQMPEVDGLESSRRIRQAERNHKLGRIPILALTAHAATAQHKQCLAAGMDAVITKPVNFPAMLAQIAAVLPEGQTA

SEQ ID NO: 34435 - protein, 753 aa, Azoarcus sp. EbN1
MLIATDLDGTFLAGHPEARLRLYQLINAHPEIKLVFVTGRGLEVVLPLLSDPSIPTPDYIVCDVGATVVDGRTLQPVQPLQAGIDALWPGERVVAAAMASFVGIERQEVPQQRRCSYFCAPGTVGSDLRGIAAELGCDMLYSAERYLDILPRGVNKGSTLDALVRLLEIDRDAVLVAGDTLNDLSMYERGFVGVCVGESEAALLDATRERAHVLHARHPGCGGILEAIAHFGFLGPAGVEAELRETDTPGRSELVMVYHRLPYEEVFENGRITRAAPSSPNGIIPTLLSYFSDGRPGAWIAWSMHDPKKAIPFEVHTTVDRERYPHLVAARVPLTKDDIDIFYKRFSKEAFWPTLHTFWERAQFREDDWHVYLKVNRLFAERAAAEAAEGAVVWLHDYNLWMVPAVLRELRPDVKIAFFHHTYFPSADVFNVLPWRREIIGSLLQCDYIGFHIPRQAENFVDVARGVAPLTVLERRNCAPRYLTYGCAVGLDEVTTAIEVHGRRIGLGAHPVGLDVERVRKILDQPSTRKRMAELRADLVDTRVILSVERLDYTKGTLEKLLAFERLLDAHPELQGKVSLMAVCVPAAKEMTIYDALQTQIEQAVGRINGRFSRVSWTPVQFFFRALPFEEVVAWYAMADVMWITPLRDGLNLVAKEYVATQGMIEGRGVLVLSEFAGAAAELHGAVLTNPHDLADLAARLYQAIAMNDAEAEARLRELFAIVEHNDIHRWGRNFLEAVTTPVGEDSLAGTGC

SEQ ID NO: 34436 - protein, 389 aa, Saccharomyces cerevisiae
  misc_feature (95)..(95): Xaa can be any naturally occurring amino acid
  misc_feature (220)..(220): Xaa can be any naturally occurring amino acid
  misc_feature (233)..(233): Xaa can be any naturally occurring amino acid
  misc_feature (268)..(268): Xaa can be any naturally occurring amino acid
  misc_feature (309)..(309): Xaa can be any naturally occurring amino acid
  misc_feature (377)..(377): Xaa can be any naturally occurring amino acid
  misc_feature (381)..(381): Xaa can be any naturally occurring amino acid
  unsure (1)..(389): unsure at all Xaa locations
GSHHHHHHSSGLVPRGSFNELNAINENIRDDLSALLKSDFFKYFRLDLYKQCSFWDANDGLCLNRACSVDVVEDWDTLPEYWQPEILGSFNNDTXKEADDSDDECKFLDQLCQTSKKPVDIEDTINYCDVNDFNGKNAVLIDLTANPERFTGYGGKQAGQIWSTIYQDNCFTIGETGESLAKDAFYRLVSGFHASIGTHLSKEYLNTKTGKWEPNLDLFXARIGNFPDRVTNXYFNYAVVAKALWKIQPYLPEFSFCDLVNKEIKNKXDNVISQLDTKIFNEDLVFANDLSLTLKDEFRSRFKNVTKIXDCVQCDRCRLWGKIQTTGYATALKILFEINDADEFTKQHIVGKLTKYELIALLQTFGRLSESIESVNXFEKXYGKRLLER

SEQ ID NO: 34437 - protein, 230 aa, Oryza sativa (japonica cultivar-group)
MVRGRTELKRIENPTSRQVTFSKRRNGLLKKAFELSVLCDAEVALIVFSPRGRLYEFASAPSLQKTIDRYKAYTKDHVNNKTIQQDIQQVKDDTLGLAKKLEALDESRRKILGENLEGCSIEELRGLEMKLEKSLHNIRLKKTELLERQIAKLKEKERTLLKDNENLRGKHRNLEAAALVANHMTTTTAPAAWPRDVPMTSSTAGAMDVETDLYIGLPGTERSSNRSETG

SEQ ID NO: 34438 - protein, 327 aa, Saccharophagus degradans 2-40
MKAPVRVAVTGAAGQISYSLLFRIAAGEMLGKDQPVILQMLEITPALEALKGVAMELDDCAFPLLAGMVCSDDPNVAFKDADYALLVGARPRGPGMERKDLLEANAAIFSVQGKAINDHASRDIKVLVVGNPANTNALIAQRNAPDINPRQFTAMMRLDHNRGLSQLAAKLDVTLEDITKMTIWGNHSATQYPDLFHTLVKGDVAVEQVEKDWYENDFIPTVQQRGAAIIKARGASSAASAANAAIFHMRDWALGTPENDWVSMGVYSDGSYGIEEGLIYSFPCVCKNGDWEIVQGLTIDEFSRAKMTATENELKEERDAVKSLLPA

SEQ ID NO: 34439 - protein, 175 aa, Brassica napus
  misc_feature (55)..(55): Xaa can be any naturally occurring amino acid
  misc_feature (90)..(90): Xaa can be any naturally occurring amino acid
  unsure (1)..(175): unsure at all Xaa locations
MRDNSIASFSLLDRRLAPRISGFEFWRMEFFRSVAAFTRLRSRVGQQSSLGSTVXRWIQMQSSTDVDPEGRSMQELIPEQQDGLKKLKSXEHGKVPTGETSLLYMVIGGMKGMTGLPWATSLLDPEEGIRFRGLSIPECQKVLPAAQSGGEPLPEGLLWLLLTPPLHRPTLPPLP

SEQ ID NO: 34440 - protein, 386 aa, Saccharomyces cerevisiae
GSHHHHHHSSGLVPRGSFNELNAINENIRDDLSALLKSDFFKYFRLDLYKQCSFWDANDGLCLNRACSVDVVEDWDTLPEYWQPEILGSFNNDTMKEADDSDDECKFLDQLCQTSKKPVDIEDTINYCDVNDFNGKNAVLIDLTANPERFTGYGGKQAGQIWSTIYQDNCFTIGETGESLAKDAFYRLVSGFHASIGTHLSKEYLNTKTGKWEPNLDLFMARIGNFPDRVTNMYFNYAVVAKALWKIQPYLPEFSFCDLVNKEIKNKMDNVISQLDTKIFNEDLVFANDLSLTLKDEFRSRFKNVTKIMDCVQCDRCRLWGKIQTTGYATALKILFEINDADEFTKQHIVGKLTKYELIALLQTFGRLSESIESVNMFEKMYGKRL

SEQ ID NO: 34441 - protein, 607 aa, Triticum aestivum
MKYVLVTGGVVSGLGKGVTASSIGVVLKACGLRITSIKIDPYLNTDAGTMSPFEHGEVFVLDDGGEVDLDLGNYERFLDIKLTRDNNITTGKIYQSVINKEREGEYLGKTVQVVPHITNAIQDWIERVAMVPVDGQEGPADVCVIELGGTIGDIESMPFIEALGQFSYRVGAGNFCLVHVSLVPVLNVVGEQKTKPTQHSVRGLRGLGLTPNMLACRSTKELEENVKEKLSQFCHVPAANIFTLYDVSNIWHIPLLLRDQKAHNAILKVLNLESVAQEPKLDEWVARATLYDTLQDEVRIAMVGKYTGLSDSYLSVLKALLHASVSCHKKLVVDWVASTDLEDSTASEAPDAYKAAWTLLKGADGVLVPGGFGDRGVKGKMMAAKYARENNVPYLGICLGMQLAVVEFARHVMKFPDADSTEFNPNTKTPCVIFMPEGSKTHMGGTMRLGSRRTFFKVTDCKSAKLYGDVNFVDERHRHRYEVNPDMVPAFENAGLQFVGKDETGQRMEIIEIPDHRFFVGVQFHPEFKSTPSKPSPPFVGLIAAACGQLDQVLQDSCNGHVVAAKHKLGDSSSTPLVHQNGHAQKQANGGVANGTCHANGNGSTHG

SEQ ID NO: 34442 - protein, 871 aa, Pirellula sp. 1
MPALLIRCGSTTRGIRSRWSNVAVPSEPMSSVSEFQTSSTYRALANALPLNLLIKAADGRRVFANDSYLKWRGVTWQELAGKHDEDLFPPEIARKYREDDQKVMQTGESLHSVESAKLADDSIGWIERVKTAVHDHHGNLLGVQVLFWDVTAKVEEEKATQFEQSLLKTLLANIPDSIYFKDIDSRFIRVSHAMAMKFGRASVDEVHGRTDADIFTPEHAEGARLDELRVIETGEALVDRVERETWPDREDTWCMTTKMPLRNDTGEIIGTFGISRDITDLKRSEAALHEAVRMADAANRSKSEFLANMSHEIRTPMNALIGMADLLSQTKLDPDQQDYVQIIQESSNGLLRLINDILDFSKIEARRLELESVPFSLGKTIESTLRSFSFKASEKGLELQRDISPELPDRLIGDPGRVRQVLTNLIGNAIKFTDHGGVRVRVEVLRREERADRDLAATHSGRESPERDDMVELRLSVCDSGIGIPPAQQDAVLNPFTQADASTTRRFGGTGLGLSISRQLVELMGGELHLQSEVGVGTTFSFQLKMPVCPASMPNEVDDEEEDLGGPARQRLAPLHVLVAEDGVTNQHVIAGLLRSLGHKCSIASDGRETLTKWRSESYDVVLMDMHMPVMDGLEATRAIRQEEWGTERHTPIVALTAAAMSEDAAACREAGMDSYLTKPIHSRKLRDALAPYQRELPPADDGSHEETLEQAFSPAAHLATEQDSTTINAAHAAFPSLGSTSDAISLSPENIGCLDLDSARSRIPGGTAGVLRLAFVFRTECAQLVDQLSNEIPAGLNDETRRNAHTLKGACGLLGAKQLQEAAERIEEAGRENRVQDSPELLADLQHEAQRVLRAIDELLSQSDNADQPK

SEQ ID NO: 34443 - protein, 352 aa, Arabidopsis thaliana
MGSNFHYTIDLNEDQNHQPFFASLGSSLHHHLQQQQQQQQHFHHQASSNPSSLMSPSLSYFPFLINSRQDQVYVGYNNNTFHDVLDTHISQPLETKNFVSDGGSSSSDQMVPKKETRLKLTIKKKDNHQDQTDLPQSPIKDMTGTNSLKWISSKVRLMKKKKAIITTSDSSKQHTNNDQSSNLSNSERQNGYNNDCVIRICSDCNTTKTPLWRSGPRGPKSLCNACGIRQRKARRAAMATATATAVSGVSPPVMKKKMQNKNKISNGVYKILSPLPLKVNTCKRMITLEETALAEDLETQSNSTMLSSSDNIYFDDLALLLSKSSAYQQVFPQDEKEAAILLMALSHGMVHG

SEQ ID NO: 34444 - protein, 420 aa, Pyrococcus abyssi GE5
MVEQDPFEIAVKQLERAAQYMKISEEALEFLKRPQRIVEVTIPVEMDDGSVKVFTGFRVQYNWARGPTKGGIRWHPEETLSTVKALAAWMTWKTAVMDLPYGGGKGGIIVDPKKLSDREKERLARGYIRAIYDVISPYEDIPAPDVYTNPQIMAWMMDEYETIARRKTPAFGIITGKPLSIGGSLGRNEATARGASYTIREAAKVLGWDDLKGKTIAIQGYGNAGYYLAKIMSEDYGMKVVAVSDSKGGIYNPDGLNADEVLKWKREHGSVKDFPGATNITNEELLELEVDVLAPAAIEEVITKKNADNIKAKIVAEVANGPVTPEADEILFEKGILQIPDFLCNAGGVTVSYFEWVQNITGYYWTLEEVREKLDKKMTKAFYDVYNTAKEKNIHMRDAAYVVAVQRVYQAMLDRGWVKH

SEQ ID NO: 34445 - protein, 681 aa, Zea mays
MGGLSVIAPPARDTASPQHRRARRAFLVSNYLILGCASGCGFLTLSLRLVPSVDGFLLILLHALTVAAAVAGCAVIAAPDPPRGRCYTAHMSATAVVSILQGAAAVLAFSRTSEFLAGGLRSYVREEDGAVILRMVGGLGVAIFCLEWVALALAFVLRYYAYVDRECGGNPQRRSAKVGGEDGAGTWPFQKAVPVPAWLGKGFSADRVGSGVTGRPGRAGRQDQFIGGLWRLARAVGVPTYGLRVETLNDLGCLSLSLGNSARALRAMDYSGTKESPPSGAWWSRETVAVVTGANRGIGHALAARLAEHGLTVVLTARDGERGEAAAAPLLARGLAVVFRRLDVSDAASVAEFAAWLRDAVGGLDILSPLPGSPKRLHLCSVHRTAGTRVHWPVDTCRSPLTDVQHAAALLPAPPPQQRTTPPRSPGPPRTPATRRIKASRRSNGWQATALGQVVLQRLLSFTPLVGRLTSRRTAPAPAGDTWTVTTDEEVNNAAVSFNEIDTNSVEHAETVLRTNFYGAKMLTEALLPLFRQSSATSRILNISSQLGLLNKVGDPSLKALLLDEERLTEAGIEAMVSRFLAQVKDGTWGEQGWPKVWTDYSVSKLALNAYSRLLARRLEARGVSVNCFCPGFTRTDMTRGWGKRTAGEAADVGARLALLPPTELPTGTFFKWRTPQLYSK

SEQ ID NO: 34446 - protein, 196 aa, Arabidopsis thaliana
  misc_feature (16)..(16): Xaa can be any naturally occurring amino acid
  unsure (1)..(196): unsure at all Xaa locations
PKKNQSSLLEFEKMGXSKSKGNTHNIFLLCNYILLGSASSCIFLTISLRLFPSLSGLSLIFLYTLTIATAVSGCSIFASTTSATASDRLYGSHMVATVLTAIFQGAVSVLIFTRTGDFLRFLKSYVREEDGAVILKLAGGLCVLMFCLEWIVLVLAFLLKYSDYLDESVVDDDDFKVRRQEEDLKDWPSYPFQLKI

SEQ ID NO: 34447 - protein, 282 aa, Mesembryanthemum crystallinum
MSLIANFESDFAVLESIRRHLLEDWDPRAGAPAITTGSGPVYHRNSSFSSLYPCLTDNWGELPLKEDDSEDMVLFGVLRDAVHTGWSPQSGSESGSGSPAPVTVKPEPVDSPVSSPAPVRVAGGEAPVAAAPARGKHYRGVRRRPWGKFAAEIRDPAKNGARVWLGTFETAEDAALAYDRAAFRMRGSKALLNFPLRVNSGEPDPVRITSKRSSPERSVSSSSSESASPKRRKKEEVVVGPVAGQARPGLQQVGNVVEGMQVGVGCQVGVGTMPLGDQLLVT

SEQ ID NO: 34448 - protein, 294 aa, Magnetospirillum magnetotacticum MS-1
MLGAVFHLARGAHVGFVLAREGGLALIDPAPLPPHLRLALKLGRSLERRGIAEAPGASPLERAMTRLGPSYVKFGQFLATRPDIVGMAAARDLERLQDRVPPFPQEIALKVVEQELGKPVPALFSSFSAPIAAASIAQVHKATVLDADGTQRSVAVKVMRPGVRERFAKDLQAMRFMARIVHALLPDAERLRPREVVEILARSVTMEMDFRLEAAAMSELAQNTAGDEDFRTPKPEWGLTARDVLTSEWIDGVRLNDRAGIVAAGHDPKALGRVVIQSFLRHGDPRRLLPRGIL

SEQ ID NO: 34449 - protein, 263 aa, Prunus ilicifolia
AHYKTEVDVGNAIAEAIRSGLVKREELFITSKASNHGHVVEACKNSLEKLQLDYLDLYLVHYPLATKHSGVGTTASLLDENKVLDIDVTVSLESTWHDMEKTVSLGLVRSIGLSNYELFLTRDCLSYAKIKPQVSQFETHPYFQRESLVRFCKKHGVTPMAHTPLGGATANVKSFGSISPLEDPVLLGLAKKYKKSVAQIALRWNIERDTPVIPKSSKVERLKENLEVLNFKLEKEDIELINTIDKKSRTTLPSKTWGLDVYA

SEQ ID NO: 34450 - protein, 102 aa, Posidonia oceanica
ISGGHINPAVTFGLFLARKLSMTRALFYMVMQCLGAICGAGVVKGFVNKDNFAMWKGGANVVSHGYTKGGGLGAEIVGTFLLVYTVFSATDAKRNARDSHVP

SEQ ID NO: 34451 - protein, 250 aa, Prunus andersonii
LKSEADVGNAIAEAIQSGLVKREELFITSKASNHGHVVEACKNSLKKLQLDYLDLYLVHYPLATKHSGVGTTASLLDENKVLDIDVTVSLETTWHDMEKTVDLGLVRSIGLSNYELFLTRDCLSYAKIKPQVSQFETHPYFQRESLVRFCKKHGVVPMAHTPLGGATANVNAFGSISPLEDPVLIGLAKKYQKSVAQIALRWNIERGTPVIPKSSKVERLKENLEVLNFKLEKEDIELINTIDKKSRTTL

SEQ ID NO: 34452 - protein, 142 aa, Posidonia oceanica
ISGGHLNPAVTFGAFVGGNITFLRGILYWHGQLLGSIVACLLLKFVTGGMTTGGFAVSGVSVWNALVFEIVMTFGLVYTVYATAIDPKKGAIGTIAPLAIGLIVAANIFDGGVFTGASMNPAVAFGPALVSWNWVNQWVYWV

SEQ ID NO: 34453 - protein, 371 aa, Azoarcus sp. EbN1
MRDKIRNARRIVVKVGSALVTNNGAGLDKAAMGDWARQIATLRGAGKQVVLVSSGAIAAGMQRLGWQKRPHEMHKLQAAAAVGQMGLVKAYEDAFSRHNLHTAQILLTHDDLADRKRYLNARSTLTTLLELGVVPIINENDTIVTDEIKFGDNDTLGALVANLIEAHALVILTDQQGLYTADPRRDPNATLVCEGRAEDRSYEAMAGGAGTGISRGGMITKIRAAQRAARSGAHTCIASGNEVDALIRLTQAEPLGTLLYATSSPLQARKQWLADHLQLAGDLILDDGAVVALRSGRSLLPVGVVEVGGEFERGAAVACRSAGGDEIARGLVNYSSSECRRIARKSSTQIEKLLGYIDEPELVHRDNMVLR

SEQ ID NO: 34454 - protein, 275 aa, Escherichia coli O157:H7
MANPTVIKLQDGNVMPQLGLGVWQASNEEVITAIQKALEVGYRSFDTAAAYKNEEGVGKALKNASVNREELFITTKLWNDDHNRPREALLDSLKKLQLDYIDLYLMHWPVPAIDHYVEAWKGMIELQKEGLIKSIGVCNFQIHHLQRLIDETGVTPVINQIELHPLMQQRQLHAWNATHKIQTESWSPLAQGGKGVFDQKVIRDLADKYGKTPAQIVIRWHLDSGLVVIPKSVTPSRIAENFDVWDFRLDKDELGEIAKLDQGKRLGPDPDQFGG

SEQ ID NO: 34455 - protein, 462 aa, Solibacter usitatus Ellin6076
MQKFDIIVIGSGPAGQRAAIQGAKCGRRVAVIEQREIVGGACVNTGTIPSKTMREAVMHLSGFQYQGIYGSNYHVKEKILMADLGFRVKQVIKTEVDVTQAQLTRNGVEVITGRAGFLDSTHVRVESSRGQTDLEAPIIIIATGTKPSTSPTVPLNGRTIVNSDQILDIPEIPKTLIVVGGGVIGVEYTCIFAILGVRVILIEKRPRLLEFADSEMVEALSYHLRDHRVTMRLNEEVAAVEEQAGGGVVARLKSNKVISGDALLYAVGRQGNVEDLNLPAAGLEADGRGRITVDSDYRTKTSNIYAAGDVIGFPSLASVSMEQGRLAAANAVGLKIQSNPATYPYGIYTIPEISFVGKTEEQLTADDVPYEVGVAYYRETARGQIRGDTTGRLKLIFHRETREILGVHIIGEGATELLHIGQAVMILKGTVDYFVETVFNYPTLAECYKQAAFNGINKLMRF

SEQ ID NO: 34456 - protein, 185 aa, uncultured marine gamma proteobacterium EBAC31A08
MKHYINGLNLLEDYIQDNNKILFGAGCFWGVERKFWDIPGVNITTVGYAGGDTDNPSYEDVCYKNTNHAEVVEVVYDVNKISLKELLKVFWECHDPTQGMRQGNDKGTQYRSVIYCSSNEDLEISLKSKTQYQETLQANGYGDITTEIVLSPKYFLAEEYHQQYLAKNPNGYCGLGGTNCSFPND

SEQ ID NO: 34457 - protein, 328 aa, Clostridium perfringens str. 13
MAILVCGGAGYIGSHMVAELIENNKEVVILDNFEKGHEDAILGGKLYKGDLRDRKILDKIFTENNIEAVIDFAAYSLVGESMTEPLKYFNNNVSGTISLLEAMRDHNVKYIVFSSTAATYGEPENIPILETDKNLPTNAYGESKLLVEKILKWCDTAYGIKYTALRYFNAAGAHVNGKIGEDHSPETHLIPLILQVALGKRDKIMMFGDDYDTKDGTCVRDYIHVSDLASAHSLALERLMNGGESRIYNLGNGTGFTVKEVVEVARKVTGHPIPAEVAPRRAGDPAILIASSDKAIEELNWKPKFNSLETIIETAWNWHKNHPNGYEK

SEQ ID NO: 34458 - protein, 329 aa, Cytophaga hutchinsonii
MKILFYSARSYDKKHFEAANPGTFTFEYIEEALSIETAHYAEGAFAVCIFVNDDACAPVLEKLASYGVKGIAIRAAGHDQTNHVAAHRLGMHVANVPAYSPHAIAEHTVTMILALTRHIVEADNRVKQSNFILDPLVGFNIHHKTVGIIGLGKIGGLTAKILHGFGCTLQAFDPYPNQEYTDKYGLQYKSIEEVLATSDIIVIHAPLNAHTKYLIHADSIKTMKDGVMIVNTGRGAIINTKDAIDGLTSGKIGYLGLDVYENEKGLFFSDHSVNKPTDEVFLALTKFKNVLITGHMAFLTTNALTSIAQTTLENLRAWSNGKDADHEIR

SEQ ID NO: 34459 - protein, 700 aa, Debaryomyces hansenii CBS767
MSVLLKETFARCKKEGRNALVNFITAGYPTIEDTLPILKGMQKAGVDIIELGVPFSDPIADGPTIQAANVVALNNGITVTKCLDLVAQARAEGVTVPILLMGYYNPILKYGEQRMIEDSAKAGANGYIVVDLPPEEAVKFRSLCTTNGLSYVPLVAPATTDERLKLLGEIADSFIYVVSRMGTTGATVSVTNDISELCNRVRKFAGDTPIAVGFGVSTREHFLTVGEAADGVVIGSKIITLIGESKPGERGDTAYKYVRSILGNDYQTNAPELFKASERSEAKSTNPSFEEIHKYNPRFGDFGGQYVPEALHTCLAELERGFEDAVADPKFWEEFKSLYSYIGRPSSLHRADRLTEYAGGAQIWLKREDLNHTGSHKINNALAQVLIARRLGKKKIIAETGAGQHGVATATAAAKFGLECTVFMGAEDVRRQALNVFRMRILGAKVVAVTNGTQTLRDATSEAFRFWVSNLESTHYVVGSAIGPHPYPTLVRTFQSVIGNETKEQFKELNGGKLPNVVVACVGGGSNSTGMFSPFENDTEVKLLGVEAGGDGIDTERHSATLTAGIPGVFHGVKTYVLQDSDGQVHDTHSVSAGLDYPGVGPELAFWKSTGRATFVAATDAEALHGFKLLSQLEGIIPALESSHAIFGAVEVAKNLPKDQHIVINVSGRGDKDVQSVAEVLPKLGDKIGWDLRFEDDPSK

SEQ ID NO: 34460 - protein, 182 aa, Azoarcus sp. EbN1
MQTDHLRRAQLPLWRLTLAHALRESGADLSLLEPAFEAFYAARNQVECYSDSLDALQRIAARMPVAAITNGNADLQRIGLTAHFAFHLGAREHGAAKPDPGIFLAACTRLGCMPAEVLHVGDHVEMDVAGAVRAGLRACWLNRVGGRWEREDLRPDLEFVTLTELADWVEAQAREDGCGEGL

SEQ ID NO: 34461 - protein, 270 aa, Nocardioides sp. JS614
MDEVTAPELARRIREHVLRMTSRGRSSHVASGLSVADILAVLYGDVLRVDPADPEANDRDRFVMSKGHAGAAVYAVLAERGFLERESLLSHYQNGSTFSGHVSHVDVPGVEVSTGSLGHGLSIATGMAWRARSTGATWRAYALLSDGECDEGSTWEAALFAGHHGLSNLVAVIDYNKYQSLATTDETLTLEPFADKWVAFGWDVVEVDGHDTVELFAALSVDPSRHTRPRCVLAHTIKGKGVSFMENNVLWHYRPPSEDELALALTEIAT

SEQ ID NO: 34462 - protein, 140 aa, Lycopersicon esculentum
AHNYHPIPIVFSKAKGSSVWDPEGKKYLDFLSAYSAINQGHCHPKIMKVLAEQAQMLTLSSRAFYNDKFPVFAERITSMFGYDMVLPMNTGAEGVETALKLARKWGYMKKSIPKNEALIVSCCGCFHGRTLAAISMSCDN

SEQ ID NO: 34463 - protein, 145 aa, Oryza sativa
MVRGRTELKRIENPTSRQVTFSKRRNGLLKKAFELSVLCDAEVALIVFSPRGRLYEFASAPSLQKTIDRYKAYTKDHVNNKTIQQDIQQVKDDTLGLAKKLEALDESRRKILGENLEGCSIEELRGLEMKLEKSLHNIRLKKVYI

SEQ ID NO: 34464 - protein, 389 aa, Arabidopsis thaliana
MNHNSNLVLPSHQTETQTQDETDISVWRFRGSDNAAKASSVTMRVIVYKLFDECSLDVKKPLLPLAHGDPSVYPCYRTSILVENAVVDVLRSGKGNSYGPAAGILPARQAVADYVNRDLTNKVKPNDVFITVGCNQGIEVVLQSLARPNANILLPRPSYPHYEARAVYSGLEVRKFDLLPEKEWEIDLPGIEAMADENTVAMVIINPNNPCGNVYSYDHLKKVAETAKKLGIMVITDEVYCQTIFGDKPFVPMGEFSSITPVITLGGISKGWIVPGWRIGWIALNDPRGILKSTGMVQSIQQNLDITPDATTIVQAALPEILGKANKELFAKKNSMLKQNVELVCDRLKEIPCLVCNKKPESCTYLLVPPPTSLILFHDSRSIWMILIS

SEQ ID NO: 34465 - protein, 441 aa, Shigella flexneri 2a str. 301
MTHDNIDILVVDDDISHCTILQALLRGWGYNVALANSGRQALEQVREQVFDLVLCDVRMAEMDGIATLKEIKALNPAIPVLIMTAYSSVETAVEALKTGAQDYLIKPLDFDNLQATLEKALAHTHSIDAETPAVTASQFGMVGKSPAMQHLLSEIALVAPSEATVLIHGDSGTGKELVARAIHASSARSEKPLVTLNCAALNESLLESELFGHEKGAFTGADKRREGRFVEADGGTLFLDEIGDISPMMQVRLLRAIQEREVQRVGSNQTISVDVRLIAATHRDLAAEVNAGRFRQDLYYRLNVVAIEVPSLRQRREDIPLLAGHFLQRFAERNRKAVKGFTPQAMDLLIHYDWPGNIRELENAVERAVVLLTGEYISERELPLAIASTPIPLGQSQDIQPLVEVEKEVILAALEKTGGNKTEAARQLGITRKTLLAKLSR

SEQ ID NO: 34466 - protein, 131 aa, Lycopersicon esculentum
GTAVVARADGRLALGRLGALCEQLQELNSQGYEVILVTSGAVGVGRQQLRYRKLLNSSFLDLQKPQTELDGKACAAVGQNGLMALYDSLFSQLDVTSAQPLVTDNDFRDPDFRRQLNDTVNSLLSLKVIPI

SEQ ID NO: 34467 - protein, 266 aa, Corynebacterium glutamicum ATCC 13032
MRIALLQISTNSDKMDNFALLRDAAEKAAEQGARVLVFPEATSQSFGTGRLDTQAEELDGEFSTAVRKLADELDVVIVAGMFTPADTVQRGEKTISRVNNTVLISGAGLHQGYNKIHTYDAFGYRESDTVKPGDELVVFEVDDIKFGVATCYDIRFPEQFKDLARNGAQIIVVPTSWQDGPGKLEQWEVLPRARALDSTCWIVACGQARLPEELRDERKGPTGIGHSMVTNPHGEVIASAGYEPEMLIADIDVSGLAKIREALPVL

SEQ ID NO: 34468 - protein, 146 aa, Lycopersicon esculentum
TTIQPAIDYFAYSAAIKYHKDDQPLIFGTIQAYLKDAKERMVIAKKAAEKMGVPMGFKLVRGAYMCSEKELASTLGFNSPIHDSIEQTHACFNSCAEFMIEEIANGSGAVVLATHNIESGKLAATKAIDLGIKDERQNLQFAQLYS

SEQ ID NO: 34469 - protein, 134 aa, Griffithsia japonica
GTRHRDYADKVEAALDGKPFDVLLLGLGPDGHTCSLFPEHPLLDVDDRTVAHITDSPKPPPQRVTLTLPVLNAARAAIFVCTGASKAIVVQDILENKYSALPGALVRPTNGELHWLLDEAAAAELSAATRSASV

SEQ ID NO: 34470 - protein, 399 aa, Mycoplasma arthritidis
MAEKNNNEKKNIQEIINHLKTSGFAYQNSEIYGGLVNTWDYGPLAVPMANAIKNYWIREFINRERNFLIDSKIIMNPNVWKASGHLDNFADFLIENKNNQKRYRADHIVKELFPEINVEKATFQELETIIKSRVKEYDGAKCDWSTIRPFNLMFRTEMGAISNSASQVYLRPETAQGIFVNFKNVLRTTRAKLPFGIGQIGKSFRNEITPRDFIFRTREFEQMELEFFCLEQDANKFYEYWINKCHSFVSSLGLKANNIRIRPHEKEELSHYSKGTSDIEYFFPFGWGELLGIANRGNFDLSQHMKFSQESLEYLQEDGSKVVPWVIEPSIGLDRLLLALLVDSYEVEDLGNDDKRTILHLNYNIAPYQLAIFPLTKALAPKAREIYDELIDKSTIRLV

SEQ ID NO: 34471 - protein, 483 aa, Acinetobacter sp. ADP1
MDLQQQPLFRQKALVAGQWCDADNAEKTPIFNPATQELIGYVPNMGRAETERAIEAAYASWEMWKTKTAKERSALLKKWYDLILLNLDVLAEILTTEQGKPFNEAKGEIIYAASFIEWFAEEAKRIYGDIIPSPYPDARIVVNKQPIGVVAAITPWNFPAAMITRKVAPALAAGCPCIVKPAPETPFTALALADLAIQAGIPAEIMSVVTGDAAQIGDAIFASDHVRKFTFTGSTPIGKLLLEKSAKTLKKVSLELGGNAPFIVFDDADIEAAVEGALIAKFRNAGQTCVCVNRFLVQSGVYEKFIQVFKAKIESLKIGNGLEAGSEIGPLINAQAVAKVQSHIEDALSKNGRLITGGQVHATGELFFEPTLIADANTEMMVATQETFGPLAAIFKFDTEQQAIQMANDTEFGLAAYCYTRDLGRAWRMSEQLEYGMVGINKGLISNEVAPFGGIKHSGLGREGSKYGIEDYLEIKYTLFGGL

SEQ ID NO: 34472 - protein, 177 aa, Sulfolobus solfataricus P2
MEVATLGGGCFWCTEAVYKRVKGVISVKPGYSGGHVPNPTYEDVCTDTTGHAEVVQITFDSSIISYREILEIFFEIHDPTTLNRQGNDVGTQYRSIILYHNEEQRKIAEEMIREVEKRIGKKVVTELKPFEVFYEAEDYHHDFYDKHKYNPYCRLVISPKVKKFMKLFPDKVKIHEG

SEQ ID NO: 34473 - protein, 251 aa, Prunus andersonii
AHYKSEADVGNAIAEAIQRGLVKREELFITSKASNHGHVVEACKNSLKKLQLDYLDLYLVHYPLATKHSVGTTASLLDENKVLDIDVTVSLETTWHDMEKTVDLGLVRSIGLSNYELFLTRDCLSYAKIKPQVSQFETHPYFQRESLVRFCKKHGVVPMAHTPLGGATANVNAFGSISPLEDPVLIGLAKKYQKSVAQIALRWNIERGTPVIPKSSKVERLKENLEVLNFKLEKEDIELINTIDKKSRTTL

SEQ ID NO: 34474 - protein, 252 aa, Prunus mexicana
AHYKSEADVGNAIAEAIQSGLVKREELFITSKASNHGHVVEACKNSLKKLQLDYLDLYLVHYPLATKHSGVGTTASLLDENKVLDIDVTVSLETTWHDMEKTVDLGLVRSIGLSNYELFLTRDCLSYAKIKPQVSQFETHPYFQRESLVRFCKKHGVVPMAHTPLGGATANVKAFGSISPLEDPVLIGLAKKYQKSVAQIALRWNLERGTPVIPKSSKVERLKENLEILNFKLEKEDIELINTIDKKSRTTL

SEQ ID NO: 34475 - protein, 251 aa, Prunus fasciculata
AHYKSEADVGNAIAEAIQSGLVKREELFITSKASNHGHVVEACKNSLKKLQLDYLDLYLVHYPLATKHSGVGTTASLLDENKVLDIDVTVSLETTWHDMEKTVSLGLVRSIGLSNYELFLTRDCLSYAKIKPQVSQFETHPYFQRESLVRFCQKHGVVPMAHTPLGGATANVKAFGSISPLEDPVLIGLAKKYQKSVAQIALRWNIERGTPVIPKSSKVERLKENLEVLNFKLEKEDIELINTTDKKSRPL

SEQ ID NO: 34476 - protein, 289 aa, Triticum aestivum
  misc_feature (182)..(182): Xaa can be any naturally occurring amino acid
  misc_feature (217)..(217): Xaa can be any naturally occurring amino acid
  misc_feature (257)..(257): Xaa can be any naturally occurring amino acid
  unsure (1)..(289): unsure at all Xaa locations
MEKSRVLVVGGTGYIGRRIVKASLAQGHKTYLLMRPEIGLDIDKLQMLLSFKAQGARLLEASLDDHRGLVAAVKQVDVVVSAMSGVHFRSHNLHLQLKLLEAIKEAGNVKRFLPSEFGMDPARMGHALEPGRITFDEKMEIRRAIEEGNIPHTYISANCFSAYFVPNLCQMRTLLPTKEKVXVYGDGNVKAIFVDEDDIAAYTIKCVDDPLALNKTXYLRPQENFLSQNELIAKWEKLSGEVLERIPIPSDEFLASXKGTCSTEDGEEASLLYPEVRCTRMEDYMKRYL

SEQ ID NO: 34477 - protein, 252 aa, Prunus fasciculata
AHYKSEADVGNAIAEAIQSGLVKREELFITSKASNHGHVVEACKNSLKKLQLDYLDLYLVHYPLATKHSGVGTTASLLDENKVLDIDVTVSLETTWHDMEKTVSLGLVRSIGLSNYELFLTRDCLSYAKIKPQVSQFETHPYFQRESLVRFCQKHGVVPMAHTPLGGATANVKAFGSISPLEDPVLIGLAKKYQKSVAQIALRWNIERGTPVIPKSSKVERLKENLEVLNFKLEKEDIELINTIDKKSRTTL

SEQ ID NO: 34478 - protein, 252 aa, Prunus subcordata
AHYKSEADVGNAIAEAIHSGLVKREELFITSKASNHGHVVEACKSSLKKLQLDYLDLYLVHYPLATKHSGVGTTASLLDENKVLDIDVTVSLETTWHDMEKTVDLGLVRSIGLSNYELFLTRDCLSYAKIKPQVSQFETHPYFQRESLVRFCKKHGVVPMAHTPLGGATANVKAFGSISPLEDPVLIGLAKKYQKSVAQIALRWNIERGTPVIPKSSKVERLKENLEILNFKLEKEDIELINTIDKKSRTTL

SEQ ID NO: 34479 - protein, 340 aa, Streptococcus thermophilus CNRZ1066
MAVQMEYEKDVKVPALDGKKIAVIGYGSQGHAHSQNLRDTGHDVIIGVRPGKSFDKAKEDGFDTYTVAEATKLADVIMILAPDEIQQELYEAEIAPNLEAGNAVGFAHGFNIHFEFIKVPADVDVFMCAPKGPGHLVRRTFEEGFGVPALYAVYQDATGNAKDIAMDWCKGIGAARVGLLETTYKEETEEDLFGEQAVLCGGLTALIETGFEVLTEAGYAPELAYFEVLHEMKLIVDLIYEGGFKKMRQSISNTAEFGDYVSGPRVITEQVKENMKAVLTDIQNGKFANDFVNDYKAGRPKLTAYREEAANLEIEKVGAELRKAMPFVGQNDDDAFKIYN

SEQ ID NO: 34480 - protein, 247 aa, Populus trichocarpa
MATNGEEQQSQAGRHQEVGHKSLLQSDALYQYILETSVYPREPECMKELREVTAKHPWNIMTTSADEGQFLNMLLKLVNAKNTMEIGVYTGYSLLATALAIPEDGKILAMDINRENYELGLPVIQKAGVAHKIDFKEGPALPVLDQMIEDGKCHGSFDFIFVDADKDNYINYHKRLIELVKVGGLIGYDNTLWNGSVVAPPDAPMRKYVRYYRDFVLELNKALAADPRIEICMLPVGDGITLCRRIQ

SEQ ID NO: 34481 - protein, 335 aa, Cytophaga hutchinsonii
MSKIKVGINGFGRIGRLVFRAAVNNPNIQIVGINDLIDVDYMAYMLKYDSTHGRFSGTVDVTDGKLVVNGNAIRVTAERDPANLKWNEVGAEYVVESTGLFLTMDTADKHIAAGAKRVVLSAPAKDDTPTFVMGVNNKSYTKDMTIVSNASCTTNCLAPVAKVLNDNFGILEGLMTTVHAATATQKTVDGPSAKDWRGGRGAYQNIIPSSTGAAKAVGLVIPQLKGKLTGMSFRVPTPDVSVVDLTCRLEKAASYETIKAAMKAASEGDMKGILGYTEDEVVSTDFLGDARTSIFDAKAGISLNDNFVKVVSWYDNEWGYSNKLVDLIVHMDTVK

SEQ ID NO: 34482 - protein, 132 aa, Glycine max
MGRLFVTHLEGQIYSCKHCRTLLALYEDIVSKSFHSRHGRAYLFSKVVNVTTGENEDRQMAPGMHTVADIFCVGCGSIVGWKYETAHEKSQKFKEGKSVIERYKVSGPDGNNNNNYWVGNEAHVGGSDADDA

SEQ ID NO: 34483 - protein, 172 aa, Triticum aestivum
RQAVYDLYNKRGAEGAAREQEWCKLFEKYCSTYESEAKDLKRRLSGELPEGWEKNLPTYSPKDPAIATRKLSETVLQKIYSSVPELVGGSADLTGSNLTRWKEAVDFQPPSLGIGNWSGRYIRYGVREHAMGAIMNGLAAYGLFIPYAGTFLNFVSYASGAVRLSALSQVRT

SEQ ID NO: 34484 - protein, 274 aa, Clostridium perfringens str. 13
MSNKIQELKSMSKVIRKDIVTMLTESASGHPGGSLSIADIVTILYFDEMNIDPKNPKDPNRDRFVLSKGHAAPVLYSALARRGYFDPAELTTLRKFGSNLQGHPNMNDLPGIDMSTGSLGQGISAAVGMALAGKLDNKDYRVFTILGDGELEEGQVWEAAMSAAHYRLDNLTAFVDFNGLQIDGDIKEVMSPCPIDKKFEAFGWNVIVINGHDYEEIINAIQKAKSTKGAPTCIVCNTVKGKGVSFMENEAAWHGTAPTKEQCEQAIKEIGGDN

SEQ ID NO: 34485 - protein, 314 aa, Clostridium perfringens str. 13
MAKKIATREAYGKALAALANENKNIVVLDADLSKSTKTADFKKACPERFINMGIAEGNMMSVAAGLSTCGKIPFASTFAMFAAGRAFEQIRNSICYPRLNVKICATHAGLTVGEDGASHQAIEDLSLMRSIPNMTVICPSDAVETEAAIRAIAEYNGPCYVRLGRAGVNVINDRPEYKFEIGKGIELKEGNDVTLFATGIMVDVAIEAVEALAKEGINARLINIHTIKPIDSELILKAAKETGAIVTLEEHNIIGGLGSAVAEVVGGEYPVPVVRVGVKDTFGESGKPDQLLKAYGLTSEEAVKAAKKAMSLKR

SEQ ID NO: 34486 - protein, 368 aa, Symbiobacterium thermophilum IAM 14863
MELQTALPRGDQLFPVRRILQADGTLLEPVPAFLSVDQLKDVYRKMVYLRVFDQRCLNLQRQGRMGTFAPFSGQEASQVGSAYLLRPDRDWIFPTYRDHGAMHVMGVPLVNILRYFMGDEQGSHAPQGVNAFPISIPIATQLLHAVGAAWAGRIKGEDTVAVGYAGDGGTSPGDFHEALNFAAVFNVPVIFFIQNNRYAISTPNSRQFKTPTIAQRALGYDIAGVRVDGQDVLAVLAVMHEAIERARSGGGPTLVESVTFRYGPHTTSDDPKRYRSQEELEEWQARDPIERLRLYLVSQGQWSDSDDEALWTAAREQVAAAVAEAEAMPRPSVDDLFDYLYAEPTPNLVRQKEYLKAYLAKKEGGARG

SEQ ID NO: 34487 - protein, 217 aa, Azoarcus sp. EbN1
MTTQDGGFVSRLSGRLASLLGLALIVAAAGAGHAVPATSPATAIFAGGCFWCMEPPFDRLDGVASTTSGYIGGHVPNPAYEAVSSGRTGHAEAVRIEYDPEKISYEQLLDVFWRNIDPTDPGGQFCDRGSQYRAQIFYQNDGQRAAAERSRAALVANKPFAQPVITEIVPATKFYPAEEYHQDYYLKNPLRYKFYRHRCGRDERLEFLWGVDDGEKK

SEQ ID NO: 34488 - protein, 424 aa, Streptomyces murayamaensis
MTTPRRVVITGMEVLAPGGIGTKNFWSLLSEGRTATRGITFFDPTPFRSRVAAEIDFDPYEHGLSPQEVRRMDRAGQFAVVASRGAVADSGLELAGLDPYRVGVTVGSAVGATMGLDEEYRVVSDGGRLDLVDHQYAAPHLYNHLVPSSFAAEVAWAVGAEGPSTVVSTGCTSGIDSVGYAVELIREGSADVMIAGSSDAPISPITMACFDAIKATTNRYDEPETASRPFDNSRNGFVLGEGTAFFVLEELESAVKRGAHIYAEIAGYATRSNAYHMTGLRPDGAEMAEAIRVALDEARMNGDEIDYINAHGSGTKQNDRHETAAVKRILGDHAYRTPMSSIKSMVGHSLGAIGSIEIAASALAMEYNVVPPTANLHTPDPECDLDYVPLTARDRKTDAVLSVGSGFGGFQSAVVLARPERKLA

SEQ ID NO: 34489 - protein, 182 aa, Triticum aestivum
  misc_feature (159)..(159): Xaa can be any naturally occurring amino acid
  unsure (1)..(182): unsure at all Xaa locations
MDHSRSFSSYLQRRVQEVAAQENRVKESASPGSGSGSAGGAAEKMGRGRIEIKRIENTTNRQVTFCKRRNGLLKKAYELSVLCDAEVALIVFSGRGRLYEYSNNSVKATIERYKKATSDTSSAGTVAEINAQHYQQESAKLKQQITTLQNSNRFIFSPXTLIGDTMATMSHRDLKQLEGRLD

SEQ ID NO: 34490 - protein, 403 aa, Streptomyces murayamaensis
MTSSVVVTGLGVASPNGLGIQDYWAATVGGKSGIGRITRFDPSSYPAKLAGEVPGFVAEDLLPSRLLPQTDRVTRLALVAADWALADAGITPSELGEFDMGVVTASAAGGFEFGQGELQALWSKGSQYVSAYQSFAWFYAVNSGQISIRNGMKGPSGVVVSDQAGGLDAVAQARRQIRKGTSVIVSGAIDASVCPWGWVAQLASDRLSTSDEPTRAYLPFDRDASGYVAGEGGAILIMEDAESARARGARVYGEISGYGSTIDPKAGSGRPPGLRKAIELALADAGVAPGEVDVVFADAAADPELDRQEAEAINAVFGTRGVPVTAPKTMTGRLYSGAAPLDLAAAFLAMKDGLIPPTVHIDPAAEYDLDLVTGEPRTAEVRTALVVARGYGGFNSAVVVRAA

SEQ ID NO: 34491 - protein, 472 aa, Pasteurella multocida subsp. multocida str. Pm70
MNKEIKTQVVVLGAGPAGYSAAFRCADLGLETVIVERYSTLGGVCLNVGCIPSKALLHVAKVIEEAKALAEHGIVFGEPSTDVNKIRGWKEKVINQLTGGLAGMAKQRKVQVVNGYGKFSGPNTIIVAGEEGETTIKFDHAIIAAGSRPIQLPFIPHEDPRIWDSTDALKLKEVPENLLIMGGGIIGLEMGTVYHALGSKIDVVEMFDQVIPAADKDMVQIYTKRVAKKFNLLLETKVTAVEAKEDGIYVSMEGKASETRRYDAVLVAIGRVPNGKLIDAGVAGVEVDDRGFIRTDKQMRTNVPHIFAIGDIVGQPMLAHKGVHEGHVAAEVIAGMKHYFDPKVIPSIAYTEPEVAWVGKTEKECKAEGIAYEVAKFPWAASGRAIASDCADGMTKLIFDKNTHRVIGGAIVGTNGGELLGEIGLAIEMGCDAEDLALTIHAHPTLHESVGLAAEVFEGSITDLPNPKAKKK

SEQ ID NO: 34492 - protein, 558 aa, Pirellula sp. 1
MGTMLGWISLHSSIACPILMKSMDALVSLCKRRGFLFQSSEIYGGVQGFWDYGPLGVELKRNLKDAWWHDMISGHNELVSPAGAPSTFEMVGLDCTIIMHPQVWKCSGHYDLFHDHMVDCRESKKRYRFDQVRGRFVEYQGTKIFVSTLAEIEQEEDEVRRRGMKFFKLRPKNADELTVEKESLTLDKLDSTDNVLAPDAKTLGTLTEPREFNLMFKTTLGALGGEEDTTFLRPETAQGIFVNFKNVVDSSRVRIPFGIGQVGKSFRNEITPRNFTFRSREFEQMEIEFFCHPNQSQEWYRYWRDRRMAWYTKLGLSNESLIMREHHTEELAHYSVGTADIEYAFPFLPEGEYGELEGIAHRGDFDLRSHMEGKLDPATNPMTVELNEHGKPKHRGSGKDLAYRDDITNEKFVPHVIEPSAGADRAALAFLCEAYTEDEAPDENGKMQTRTVMKLDPRLAPIKAAVFPLVKKDGMPEVAQEIYGALKEHYNVFYDAKGAVGRRYRRQDEAGTPYCITVDGDSLTDKTVTIRDRDTLEQTRVKIDDVVSEIQSRMKAST

SEQ ID NO: 34493 - protein, 347 aa, Mycobacterium bovis AF2122/97
MTITALTVTLPLLWRRLTTAGVKYADQGHFVGSAGVPAADAGGRDAASEQIARWTQTCTVVLVCGHGPAKWAFRSWCTSRSCDTLPVALRYRLQSNPLVGKLTTKYFLPLGTRQVGDHVVFFNFGYEEDPPMALPLSESDEPNRYCIQLYHQTASQVDLTGKEVLEVSCGAGGGASYIARNLGPASYTGLDLNPASIDLCRAKHRLPGLQFVQGDAQNLPFPDESFDAVVNVEASHQYPDFRGFLAEVARVLRPGGHFLYTDSRRNPVVAEWEAALADAPLRTISQRDIGAQAKRGLDANTARSQEAIGRRAPVLLAGLTRCAVRVLDWDLRRGGGFSYRIYLFAKD

SEQ ID NO: 34494 - protein, 1307 aa, Aspergillus flavus
MKSDKDILMKPLPKSPGTGSTTTGHSVSHAEEVLDRQLHTPVSQIGFFGIYRYATRWDVAILFGSALAAIAGGAALPLFTVLFGRLTSTFQDIATHRITYDHFHHELTKNVVYFIYLGAAEFVAIYLATVGFIYTGDHVVQQIRVEYFQAILRQNIAFFDTLGAGEITTRITADTNLIQDGISEKVGLALTGLSTFVTAFIIAYIKNWKLALICSASLLALLLTMGGCSTLMLIFSKKALEYQGRGASMAEDILDSIRTVAAFNAQETLARKYESHLKDAEGPGMKSKVIFAIMVGALLCIMYLNYGLGFWMGSRFLVEGISNIKAGDVLTIMMAIILGSYNLGNVAPNGQALSDAVAAASKLYGTIDRQSPLDALSDQGKTLEFVRGNIVLQNIRHVYPSRPEVTVAHDLSCYIPAGKTTAFVGPSGSGKSTIISLLERFYDPVAGTIMLDGHDIQTLNLRWLRQQMSLVSQEPRLFATTIAENIRYGIIGSRFEKESTYEIRKRVEAAARMANAHDFIMALPNGYDTNIESFSLSGGQKQRIAIARAIIKDPKILLLDEATSALDTKSEKLVQAALDKASKGRTTIVIAHRLSTIQKAYNIIVLANGQIVEQGPHEHLMDRRGIYCDMVEAHEIKKRYSRYSKRYSQLLTNLSPKHNPMTFFFDKDYPGDDESDIYSILSDDASDIGLHTGEKQRPVSRMSLSHLMQPVKEEAYSFWTLFKFLASFNRPEWPFLLLGLCASILAGGIQPSQAVLFAKAVSTLSLPPLEYPKLRHDANFWCLMFLMIGIVSLVLYSVQGTLFAYSSEKMVYRARSQAFRVILHQDISFFDQQENTTGALTATLSAGTKELTGISGVTLGTILIVSVNLVASLGVALVIGWKLALVCISAVPALLMCGFVRVWMLERFQRRAKKAYQESASSACEAASAIRTVVSLTMETEALQSYQAQLRRQLKSDILPIVKSSLLYASSQALPFFCMALGFWYGGSLLGHGEYSLFQFYVCFSEVIFGAQAAGTVFSHAPDMGKAKHAAREFKRLFSSDTMHASRSKGVPVTSMRGLVEFRDVSFRYPSRLEQPILRHLNLTIKPGQFVALVGASGSGKSTTIALLERFYDPLKGGVYVDGKNIITLEMSSYRSHLALISQEPTLFQGTIRENILLGSNTPHVTDDFLVKACKDANIYDFILSLPQGFNTIVGNKGGMLSGGQKQRIAIARALIRNPKILLLDEATSALDSESEKVVQAALDAAARGRTTIAVAHRLSTIQRADLIYVLDQGEVVESGTHRELLRKKGRYYELVHLQNPDATGTK

SEQ ID NO: 34495 - protein, 238 aa, Zea mays
  misc_feature (216)..(216): Xaa can be any naturally occurring amino acid
  misc_feature (228)..(228): Xaa can be any naturally occurring amino acid
  unsure (1)..(238): unsure at all Xaa locations
MQIFVKTLTGKTITLEVESSDTIDNVKAKIQDKEGIPPDQQRLIFAGKQLEDGRTLADYNIQKESTLHLVLRLRGGMQIFVKTLTGKTITLEVESSDTIDNVKAKIQDKEGIPPDQQRLIFAGKQLEDGRTLADYNIQKESTLHLVLRLRGGMQIFVKTLTGKTITLEVESSDTIDNVKAKIQDKEGIPPDQQRLVFAGRQLEDGRTLADYTSRRXSTLHLVLRLRGXMQIFVKTSLG

SEQ ID NO: 34496 - protein, 442 aa, Oryza sativa
DAGVVVMEALSRTERVGGGGGAMVEVAFASSAGSSAAAPRRLRGELVVRDAIPYAGVAPPPPALPLPQPQLQPQVQATTSGGGGGGKISPAVLFIIVILAVVFFISGLLHLLVRLLMKKQHRRGGGGGAAAGVSRSARGDDAGGGGDAALQRQLQQLFRLHDSGLDQAFIDALPVFAYREIVVGGGGDGDKEPFDCAVCLCEFDAEDRLRLLPLCGHAFHLHCIDTWLLSNSTCPLCRGVLFVPGLTENNPMFDFDEGLEEGRLSEDCDNGFGYPGHKATEGMQTPGTEKRVFPVRLGKFKNVGTQGAVEGGGIGNANGAVLRREEGESSSSSLDARRCFSMGTYQYVLGTSELRVSLQPDRIRNGGGGVTRARPTGLSSVNAEIMEGKKICARNKGESFSVSKIWQWSNLKGKLPTGSDECSEAGSLPWMKRGGIGDTSNM

SEQ ID NO: 34497 - protein, 305 aa, Arabidopsis thaliana
MDGYEKPVKGRKINWMKAAILEAHRVLTVSPYYAQELISGVDRGVELHKYLRMKTVSGIINGMDVQEWNPSTDKYIDIKYDITTVTDAKPLIKEALQAAVGLPVDRDVPVIGFIGRLEEQKGSDILVEAISKFMGLNVQMVILGTGKKKMEAQILELEEKFPGKAVGVAKFNVPLAHMITAGADFIIVPSRFEPCGLIQLHAMRYGTVPIVASTGGLVDTVKDGYTGFHIGRFNVKCEVVDPGDVIATAKAVTRAVAVYGTSAMQEMVKNCMDQDFSWKGPARLWEKDYCPLMWREVKPEPRVKR

SEQ ID NO: 34498 - protein, 252 aa, Prunus pumila var. besseyi
AHYKSEADVGNAIAEAIQSGLVKREELFITSKASNHGHVVEACKNSLKKLQLDYLDLYLVHYPLATKHSGVGTTASLLGENKVLDIDVTVSLETTWHDMEKTVDLGLVRSIGLSNYELFLTRDCLSYAKIKPQVSQFETHPYFQRESLVRFCKKHGVVPMAHTPLGGATANVNAFGSISPLEDPVLIGLAKKYQKSVAQIALRWNIERGTPVIPKSSKVERLKGNLEILNFKLEKEDIELINSIDKKSRTTL

SEQ ID NO: 34499 - protein, 134 aa, Brassica napus
  misc_feature (123)..(124): Xaa can be any naturally occurring amino acid
  misc_feature (127)..(127): Xaa can be any naturally occurring amino acid
  unsure (1)..(134): unsure at all Xaa locations
MTVEQDFEAVDQFPVGMRVLAVDDDQTCLRILETLLHRCQYHVTTTDSAQTALELLRENKNKFDLVISDVDMPDMDGFKLLELVGLEMDLPVIMLSAHSDPKYVMKGVKHGACDYLLKPVRIXXLKXIWQHVVR

SEQ ID NO: 34500 - protein, 252 aa, Prunus salicina
AHYKSEADVGNAIAEAIQSGLVKREELFITSKASNHGHVVEACKNSLKKLQLDYLDLYLVHYPLATKHSGVGTTASLLDENKVLDIDVTVSLETTWHDMEKTVDLGLVRSIGLSNYELFLTRDCLSYAKIKPQVSQFETHPYFQRESLVRFCKKHGVIPMAHTPLGGATANVKAFGSISPLEDPVLIGLAKKYQKSVAQIALRWNLERGTPVIPKSSKVERLKENLEILNFKLEKEDIELINTIDKKSRTTL

SEQ ID NO: 34501 - protein, 139 aa, Glycine max
ATSLESLFDFAHYLFGSNAQFKVLTTVHLTNSTTLLQNYTISEVKVISVPNVIGCHPMPYPYAVFYCHSQHSDTNLYEVMVEGENGGRVQAAAICHMDTSKWDRDHVSFRVLKVEPGTSPVCHFFPPDNLVWVPLPLAP

SEQ ID NO: 34502 - protein, 247 aa, Populus trichocarpa
MAANGEEQQTQAGRHQEVGHKSLLQSDALYQYILETSVYPREPECMKELRELTAKHPWNIMTTSADEGQFLNMLLKLINAKNTMEIGVFTGYSLLATALAIPEDGKILAMDINRENYELGLPVIQKAGLEHKIEFKEGPALPVLDQMIEDGKYHGTYDFIFVDADKDNYINYHKRLIELVKVGGLIGYDNTLWNGSVVAPADAPMRKYVRYYRDFVLELNKALAADPRIEICMLPVGDGITLCRRIK

SEQ ID NO: 34503 - protein, 252 aa, Prunus armeniaca
AHYKSEADVGNAIAEAIQSGLVKREELFITSKASNHGHVVEACKNSLKKLQLDYLDLYLVHYPLATKHSGVGTTASLLDENKVLDIDVTVSLETTWHDMEKTVDLGLVRSIGLSNYELFLTRDCLSYAKIKPQVSQFETHPYFQRESLVRFCKKHGVVPMAHTPLGGATANVKAFGSISPLEDPVLIGLAKKYKRSVAQIALRWNLERGTPVIPKSSKVERLKENLEILNFKLEKEDIELINTIDKKSRTTL

SEQ ID NO: 34504 - protein, 220 aa, Prunus emarginata
  misc_feature (104)..(104): Xaa can be any naturally occurring amino acid
  unsure (1)..(220): unsure at all Xaa locations
NAIAEAIQSGLVKREELFITSKASNHGHVVEACKSSLKKLQLDYLDLYLVHYPLATKHSGVGTTASLLDENKVLDIDVTVSLETTWHDMEKTVSLGLVRSIGLXNYELFLTRDCLSYAKIKPQVSQFETHPYFQRESLVRFCKKHGVIPMAHTPLGGATANVKAFGSISPLEDPVLLGLAKKYQKSVAQIALRWNIERDTPVIPKSSKIERLKENLEILN

SEQ ID NO: 34505 - protein, 470 aa, Symbiobacterium thermophilum IAM 14863
MGSIKTGTDVVVIGAGPGGYVAAQRASQLGLDVTLIEREELGGTCLNHGCIPSKALISVGDLLYKVNNAAERGLVVKGSVEVDFAKTQEWKETKVIKRLTSGVASLMKAGQVEVVKGTARFTDPHSLEVELNDGGTAAYTFKHAIIATGSTAVNPSFFPLDGENVVDARGALAFREIPPRFVVVGGGYIGVELGIAYAKLGSKVTIVEATGQLLPGTDPDLVNVLMRRLRRLGVTVMLNARASGGLQNGKVKVQDGEGKVHEIEADKVLVSVGRVPYTEGLHLDKAGVRVDEKGFIPVDEQMRTNVPHIYAIGDVCSPVMLAHKASAQGRVAAEAIAGRPSAADWQTVPAVIFTDPEIAYVGLTEAQAREKGYDPVVSRYNFAAVGRALTMGESDGMVKLVGDRQSGLLLGAQMVGPEVSELIGEIALAIEMGAQMEDVALTPHYHPTLSEGILEAALSWMHSIEKAGRK

SEQ ID NO: 34506 - protein, 228 aa, Symbiobacterium thermophilum IAM 14863
MSLRVLVVDDDPKITAFLRRSLTLEGYDVAVANSGTEALRSVTASPPDLMVLDIMMPDVDGLEVCRRIRAAGETFPILMLTARDAVSDRVKGLDQGADDYLVKPFALEELLARLRALSRRGAPAQGEDGHRVLQYADLRLDTATREAYRGDRQISLTAKEYELLHLFLSHPRQVLTRDTLMEKVWGYDYSGESNVLEVYVAYLRNKLEAGGEPRLIQTVRGVGYVLKE

SEQ ID NO: 34507 - protein, 231 aa, Arabidopsis thaliana
MEEEQVRAIKIIVFGVISWGVAFILTRRIFSSYSFSFSNRLLSTAHATIAVTLATLSVQDLSCPVCPLASKPSHKQMDVMAFSLSYMIYDLICCHFDQVFSIDNAVHHFVSILGFIAGLAYQKSGSEIVATLWVAEISSPFFHLRGVLKEIGYKDTKLNLAADVCFATIFTLARIVCGPFLVYVSLSADNPIFIKAMGSGLQLVSIFWFYKIFGMMRYKLFKKPKSNKKST

SEQ ID NO: 34508 - protein, 450 aa, Oryza sativa
PGARCRGGRGARSGGIPMAIALHPERGAVESKKPDIKQRRVVVTGMGVVTPLGHDPDEFYNNLLQGVSGISEIEAFDCSKYPTRIAGEIKSFSTDGWVAPKLAKRMDKFMLYLITAGKKALENGGITEEVMNELDKSRCGVLVGSAMGGMKIFSDAIEALRVSYKKMNPFCVPFATTNMGSAILAMDLGWMGPNYSISTACATSNFCILNAANHIRRGETDVMLCGGSDAPIIPIGLGGFVACRALSQRNNDPAKASRPWDVDRDGFVMGEGAGVLLLEELEHAKQRGAQIYAEFLGGSFTCDAYHMTEPHPEGRGVILCIENALADAGVAKEDINYVNAHATSTQMGDLKEFEALNRCFGQNPQLRVNSTKSMTGHLLGAAGGIEAVAAIQAIRTGWVHPNINLDNPEKNVDVSILVGSQKERCDVKVALSNSFGFGGHNSSVLFAPFK

SEQ ID NO: 34509 - protein, 479 aa, Symbiobacterium thermophilum IAM 14863
MYDDKFNDPFGRRPEGNPEEPVDQDRTAASEQPARAEEPMTPVEPVAGGASAEQAESRPELELPEIPETPAVTASPPVLYDPPRFEPRPKEKKGGWGRGWRLAAGAVALVVLSAAVGSGSTYYLLKEHLASQPANYQQPAAPGGSGALQPVAQTVAEVGASVIPEIYNRVAPAVVSVYVESYRGFYRSSGTGSGFVVDPAGYILTNYHVVDGAQRITVQFIDGETMTARVVGKDSTSDLAVLKVDPGDRQLVAATLGDSDRVQVGELAIAIGNPYGHAFTVTAGIVSAIGREIVEPTTSIPGAIQTDAAINPGNSGGPLLNSRGEVIGVNTAIEAPSQWSGNVGLGFAVPINTAKEILPTLMAGQTVQRPYLGVYLEDVDQWYARVLGLRTAEGAVVTQVVPGSAAEEAGLRSPQYDRANRLISADVIVALDGEKVTNADDLVKRIQQRKVGDQVELTVARDGQELKVKATLGARPTDQ

SEQ ID NO: 34510 - protein, 757 aa, Wolinella succinogenes
MSQNIPSVILGFPRIGENRELKVTLESYWAKKVDENTLEESASKLRQTHWGIQSNIALASSNDFSFYDGMLDMIELLGAIPERFADIANPRARYFAMARGDENHTALSMLKWFNTNYHYLVPELGEGMVFAPDTTKLKALYKESLAHRRVPKIQLVGPLTFLALSDRGYEANRGLLNALLVAYGEVLKTVASWGSELYVQFDEPILALDPSSERLQDAKKSYDYLASTPGIKSFVATYFAASTEATEVLLQTPLWGIALDFVHGEENLASLPSIAKSDKVLIAGVIDGRNVWACDLGERLEFLNQLATKLPRERIYPSTSCSLLHLPYSVAPEAKIPLEVKPWLAFAKEKVKELEILSKRFAGVKLGAEEMEWERLNLENAQKRRDSKLTQNRGDHSTAKIALQEAKPRTTPFKERIALQERRFKLPPLPTTTIGSFPQDKEVRALRLAYKKGEITQDIYEEGMRAHIKACIEFQEEAGFDVLVHGEFERTDMVEYFGELLEGALITQNGWVQSYGSRCVKPPVIYGDVSRPKEMTLSWSRYAQSLTSRLMKGMLTGPVTILNWSFVRDDIPRSEVCAQIALAIKEEIRDLEEAGIAIIQVDEAAFKEGYPLKKAQRAAYEEFALKSFWIATSSVKDETQIHTHMCYSVFDDIITTILAMDADVITIETARAGNRLLEAFKKVNYDKQIGPGIYDIHSPRIPSVEEMKRQILALFEVIDPKQIWVNPDCGLKTRGWSETKASLQNLIQATQEVRAGL

SEQ ID NO: 34511 - protein, 117 aa, Streptococcus thermophilus CNRZ1066
MPYLSELGVDMVWLNPFYPSPQRDNGYDISDYTAVNSVFGDMADFEEMVRVGKEHKIDFMLDMVLYHCSTEHEWFQKALAGDKYYQDLYFIQDQTTDWLSKFGGSAWAPFWGYGEIL

SEQ ID NO: 34512 - protein, 670 aa, Nocardioides sp. JS614
MPPVPQYCPTPRELDDLELLVTGALVPTVVFNEPGSPVTLTLPDDVAAAASAAGAVELVDPEGLPLAQVEIPAGTIDPLTHAQYGPFRRYYLTPAQTRERYAGRTFVPVVDALTLPQLEVLKTVGPVVLLPLVGHGTPELSPVALIRATIAAATYLPHADVVAIPLATRGDADVDHDLGLQVVANYAGEDPLVGVSDDPSGDYPPEVAEIVAFDRPAADEQGLVLFFTGLSGSGKSTLARALMDRLLEHGGRTVTSLDGDVVRRNLSAGLTFSKEDRETNIRRIGWVAAEISRHGGVAVCSPIAPFDETRQQVRAMVRDAGGAFFLVHVATPLEECERRDRKGLYAKARRGEIPEFTGISSPYEEPEDADVRVDTTGRTIGDALDDVIQALRASGHLDLTDTPPADTPPVVEQRAPADPPPVEQQPPADPPLAEQRAPAVPPLVEQRAPASVVETPEEKAGPPDLDPTAGQRPSRSDKATSNKSTPKRSTPLRVLYICTANICRSPFMELYSRHLAGHGTHVTFASAGTHGFVGREMDPTMAATLRARGVAGVSRFRSRPFSSDLMPHADLVLTAESTHRQFLLDDHPASFRKVLTIGQFAEAVRASGDDLSGHDLLAAVAERRGQADPSLDVGDPYGQGPEVAAVCADALDELLRVVVPALTGTRKISL

SEQ ID NO: 34513 - protein, 134 aa, Zea mays subsp. parviglumis
MRKHRIVSLVSALLILLALAVSSTRNAQEDSMANNTGTLVGGIQDVPGSENDLHLQELARFAVDEHNKKANALLGFEKLVKAKTQVVAGTMYYLTIEVKDGEVKKLYEAKVWEKPWENFKELQEFKPVEECASA

SEQ ID NO: 34514 - protein, 612 aa, Emiliania huxleyi
MILNLKYFLGYLNKLWLNFRLQTKLILASTFFISIGISGLAFWSANLIQQETLFNKIRLANDVTVLLGANLISLTSENDYKGILPLCERFYKNSPNIKYIIFFDSKNKQTYGVPFTYSELTSKFLLQTKGESPYSDPIKVNTSLLLRSKGNEVGTVIVGINSSQNLITNSKLVRTLLVIIVLIFWLTLILGAMINAITITGPLSELRKGIRRVADGNFSHKINLVFNGELGDLILQFNDMGKKLQKYEEKNIDQLLSEKIKLESLVGTITEGALLLDSSLKLVLVNDAAIKIFSWEKKKNLIGSKLWEHLPRPLQKRMFESLEKMIRTSSNQVFYSALQTTPDNNKPKFFRILLKLVYESQELISRPKGIAITIQDCTKELELNQARNRFMSNISHELRTPLFSIRSFIDTTQEYSYTLTTQQKYQFLETVSLESNRLTRLVNNILNLSRLDYIKLNSFEPVDLNDVITKAATNFYLFAGEKKIIFTTNAKPNLALVQGNVDLITQVLVNLIGNSLKFTYPQGEILLRAYPLRKSLGNKIRIEISDTGIGISPIFRKIIFNRFSREENEVHNLTGTGLGLAIVESILKEHNSRIYVLTKQHVGSIFWFDLNV

SEQ ID NO: 34515 - protein, 263 aa, Mesorhizobium sp. BNC1
MKVALGQFAAANEWRRNAETATAIMAKAKNAKCDLLVLPEGILARDITDPDIVLKAAQPLDGPFMTEMLRASEGSQMTTMFCIHVPIEGETRVHNVLVALRDGKIIAAYRKLHLYDAFAALESTHVMPGTAIPDLVEVAGFKVGLMTCYDVRFPELARHHAVAGADVLALPAAWVRGPGKEHHWETLVTARALENTCYVIAVGECGPRNIGASMIVDPLGVVTHRAGEDPTLIFADIERERLTHARSALPVLANRQFAQPQLA

SEQ ID NO: 34516 - protein, 161 aa, Brassica napus
MGEIVFTEKQEALVKESWEILKQDIPKYSLHFFSQILEIAPAAKDMFSFLRDTDEVPHNNPKLKAHAVKVFKMTCETAIQLREKGKVVVADTTLQYLGSVHFKSGVLDPHFEVVKEALVRTLKEGLGEKYNEEVEGAWSKAYDHLALAIKAEMKQEDSQKP

SEQ ID NO: 34517 - protein, 238 aa, Vibrio cholerae O1 biovar eltor str. N16961
  misc_feature (1)..(1): Xaa can be any naturally occurring amino acid
  misc_feature (21)..(21): Xaa can be any naturally occurring amino acid
  misc_feature (43)..(43): Xaa can be any naturally occurring amino acid
  misc_feature (94)..(94): Xaa can be any naturally occurring amino acid
  misc_feature (119)..(119): Xaa can be any naturally occurring amino acid
  unsure (1)..(238): unsure at all Xaa locations
XINHKIFPTADAVVKSLADDXLAYSQQGQPVHISLSGGSTPKXLFKLLASQPYANDIQWKNLHFWWGDERCVAPDDAESNYGEANALLFSKINXPAQNIHRILGENEPQAEAERFAQAXAHVIPTENGTPVFDWILLGVGADGHTASLFPGQTDYADANLSVVASHPESGQLRVSKTAKVLQAAKRISYLVLGAGKAEIVEQIHTTPAEQLPYPAAKIHSTSGVTEWYLDSDAAAKIA

SEQ ID NO: 34518 - protein, 398 aa, Haematococcus pluvialis
MTCAASLACAASLLLGPYGSNAAHAMSQARSFTAEESTTINLFKKATPSVVSVTNLATRRDAFTMNMMEIPQGAGSGFVWDKEGHIVTNAHVINESANVRVTLGQDEYMARVVGVDMDKDIAVLQVVLPQPAQLGPAGQGVEPTIPATMPGGNTMPRPVYPKLAPVTTPLSQDLPKVQPLCVQLSVDNLEVGQRVYAIGNPFGLDHTLTTGVVSGTGREIQSVSGRPIQGVIQTDAAINPGNSGGPLLDSSGCVIGINTAIYSPSGTNSGVGFAIPADTVRSSVTQILEFGKVVRPMLGIAFAPDQAVEALGVKGIMVLNAREGGPAWKAGIVGTSRDEYGRLVLGDIIRTVNGTVIRSSTDLYRVLDKAQVGETLDIEVLRGSSTEHVNVTLAPSDA

SEQ ID NO: 34519 - protein, 265 aa, Alkaliphilus metalliredigenes QYMF
RISDFAGSTVVHSLGGWAALMGAMIIGPRIGKYTKDGKSKAIKGHSLTLGALGVFILWFGWFGFNGGSTLSGVDYNDIAHIFITTNLSAAVGAIAAMIVSWRRYKKPDVSITLNGALAGLVAITAGTDIVSPVGAVVIGAIGGVVVVFAIEFIDNVLKIDDPVGAVSVHGVCGAVGTIAVGIFATDGGLLYGGGVELLGVQILGVIAVALWTMGTTFILFKAIELTVGLRVTKEEEIEGLDKCEHGTESYADFQPRPVYLATEKN

SEQ ID NO: 34520 - protein, 1349 aa, Aspergillus fumigatus
MPAPETGASSREKSLEDLQVATLEKGRSTSSSGADNEKPHDHHSLSDTIMAPPDGKKKDHGKAVDLNDDSLFAHLQEHEKEVLKRQLDAPSVKVSFFTLYRYASRKDILIILVSAICAIAAGAALPLFTILFGSLASAFQGISLGTMPYHEFYHKLTKNVLYFVYLGIAEFVTVYVSTVGFIYTGEHLTQKIRENYLEAILRQNMAYFDKLGAGEVTTRITADTNLIQDAISEKVGLTLTAFATFVTAFIVAYVKYWKLALICTSTIVALVMVMGGGSRFIVKYSKKSIESYGAGGTVAEEVISSIRNATAFGTQDKLAKQYETHLAEAEKWGVKQQVILGMMIGGMFGIMFSNYGLGFWMGSRFVVGKEVNVGQVLTVLMSILIGSFSLGNVAPNGQAFTNGVAAAAKIYSTIDRRSPLDPYSDEGKVLDHFEGNIEFRNVKHIYPSRPEVTVMEDVSLSMPAGKTTALVGPSGSGKSTVVGLVERFYLPVGGQVLLDGHDIQTLNLRWLRQQISLVSQEPVLFSTTIFRNIEHGLIGTKFEHESKDKIRELVENAARMANAHDFIMALPEGYDTNVGQRGFLLSGGQKQRIAIARAIVSDPKILLLDEATSALDTKSEGVVQAALDKAAEGRTTIVIAHRLSTIKTAHNIVAMVGGKIAEQGTHDELVDRKGTYYKLVEAQRINEEKEAEALEADADMDADDFGQEGVTRIKTAVSSSNSLDAVDEKARLEMKRTGTQKSVSSAVLSKKVPEQFEKYSLWTLVKFIGAFNRPELGYMLIGLTFSFLAGGGQPTQAFLYAKAISTLSLPESMFHKLRHDANFWSLMFFVVGIAQFISLSINGTAFAICSERLIRRARSQAFRSILRQDISFFDREENSTGALTSFLSTETKNLSGVSGVTLGTIIMTSTTLGAAMIIALAIGWKLALVCISVVPILLACGFLRFYMLAQFQQRSKSAYEGSASYACEATSAIRTVASLTREQDVWGVYHDQLQKQGRKSLISVLRSSLLYASSQALVFFCVALGFWYGGTLLGHHEYSIFRFFVCFSEILFGAQSAGTVFSFAPDMGKAKNAAAQFKKLFDSKPTIDIWSDEGEKLESMEGEIEFRDVHFRYPTRPEQPVLRGLNLSVKPGQYIALVGPSGCGKSTTIALLERFYDALAGGVFVDGKDITKLNVNSYRSFLSLVSQEPTLYQGTIKENILLGVDKDDVSEETLIKVCKDANIYDFVMSLPEGFDTVVGSKGGMLSGGQKQRVAIARALLRDPKVLLLDEATSALDSESEKVVQAALDAAARGRTTIAVAHRLSTIQNADIIYVFDQGKIVESGTHHELIRNKGRYYELVNLQSLGKTH

SEQ ID NO: 34521 - protein, 705 aa, Saccharomyces cerevisiae
MSRDLQNHLLFETATEVANRVGGIYSVLKSKAPITVAQYKDHYHLIGPLNKATYQNEVDILDWKKPEAFSDEMRPVQHALQTMESRGVHFVYGRWLIEGAPKVILFDLDSVRGYSNEWKGDLWSLVGIPSPENDFETNDAILLGYTVAWFLGEVAHLDSQHAIVAHFHEWLAGVALPLCRKRRIDVVTIFTTHATLLGRYLCASGSFDFYNCLESVDVDHEAGRFGIYHRYCIERAAAHSADVFTTVSQITAFEAEHLLKRKPDGILPNGLNVIKFQAFHEFQNLHALKKEKINDFVRGHFHGCFDFDLDNTLYFFIAGRYEYKNKGADMFIEALARLNYRLKVSGSKKTVVAFIVMPAKNNSFTVEALKGQAEVRALENTVHEVTTSIGKRIFDHAIRYPHNGLTTELPTDLGELLKSSDKVMLKRRILALRRPEGQLPPIVTHNMVDDANDLILNKIRQVQLFNSPSDRVKMIFHPEFLNANNPILGLDYDEFVRGCHLGVFPSYYEPWGYTPAECTVMGVPSITTNVSGFGSYMEDLIETNQAKDYGIYIVDRRFKAPDESVEQLVDYMEEFVKKTRRQRINQRNRTERLSDLLDWKRMGLEYVKARQLALRRGYPDQFRELVGEELNDSNMDALAGGKKLKVARPLSVPGSPRDLRSNSTVYMTPGDLGTLQEVNNADDYFSLGVNPAADDDDDGPYADDS

SEQ ID NO: 34522 - protein, 420 aa, Saccharomyces cerevisiae
MLAASFKRQPSQLVRGLGAVLRTPTRIGHVRTMATLKTTDKKAPEDIEGSDTVQIELPESSFESYMLEPPDLSYETSKATLLQMYKDMVIIRRMEMACDALYKAKKIRGFCHLSVGQEAIAVGIENAITKLDSIITSYRCHGFTFMRGASVKAVLAELMGRRAGVSYGKGGSMHLYAPGFYGGNGIVGAQVPLGAGLAFAHQYKNEDACSFTLYGDGASNQGQVFESFNMAKLWNLPVVFCCENNKYGMGTAASRSSAMTEYFKRGQYIPGLKVNGMDILAVYQASKFAKDWCLSGKGPLVLEYETYRYGGHSMSDPGTTYRTRDEIQHMRSKNDPIAGLKMHLIDLGIATEAEVKAYDKSARKYVDEQVELADAAPPPEAKLSILFEDVYVKGTETPTLRGRIPEDTWDFKKQGFASRD

SEQ ID NO: 34523 - protein, 151 aa, Alkaliphilus metalliredigenes QYMF
MKEKTYYKPSEKELKEKLTDIQYRVTQEGATERPFKNEYWDHQEDGLYVDISSGEPLFTSQDKFDSSCGWPSFTKTVEEERIVEKKDRGHNMIRTEVKSKAGDSHLGHVFPDGPKEAGGLRYCINSASLRFIPVSELENEGYGEYVKLFEK

SEQ ID NO: 34524 - protein, 377 aa, Acinetobacter sp. ADP1
MIEVIDGQRQLKACKRIVVKIGSSLLTANGQGLDLDAISHWAMQIADLHNAGHEIILVSSGAVAEGMVRMKLTSRPTDLPSLQACAAIGQMGLIHTWSSVLEKHTIQTAQVLLTHDDLADRRRYLNSCDALQNLIEWRVIPVINENDTVSTDEIRFGDNDTLAAMVAGQVHADLLIILTDQQGMFDSDPRSNPNAKLLTTVNAMDDALFEMAGGGGVLGRGGMVTKVRAARLAAKSGCPTLIASGESDHVLSRLMSGELLGTLFSTDKDRITAHQQWLAAHLQTAGRLVIDAGAVEAIKQRHRSLLPVGVKAVEGHFNRGDVVECVDQSGQRVAVGRVNFSSRSAEIIKGLASDKVHQVLGEARSLEMIHRNHMAIY

SEQ ID NO: 34525 - protein, 153 aa, Glycine max; identical to SEQ ID NO: 1060

SEQ ID NO: 34526 - protein, 196 aa, Physcomitrella patens
MSTSRFIKCVTVGDGAVGKTCMLISYTSNTFPTDYVPTVFDNFSANVVVDGNTVNLGLWDTAGQEDYNRLRPLSYRGADVFLLAFSLISKASYENISKKWIPELRHYAPSVPIILVGTKLDLRDDKQFFADHPGAAPITTSQGEELRKSIGAASYIECSSKTQQNVKAVFDAAIKVVLQPPKQKKKKKKQKNCVIL

SEQ ID NO: 34527 - protein, 252 aa, Prunus fremontii
AHYKSEADVGNAIAEAIQSGLVKREELFITSKASNHGHVVEACKNSLKKLQLDYLDLYLVHYPLATKHSGVGTTASLLDENKVLDIDVTVSLETTWHDMEKTVDLGLVRSIGLSNYELFLTRDCLSYAKIKPQVSQFETHPYFQRESLVRFCKKHGVVPMAHTPLGGATANVNAFGSISPLEDPVLIGLAKKYQKSVAQIALRWNIERGTPVIPKSSKVERLKENLEVLNFKLEKEDIELINTIDKKSRTTL

SEQ ID NO: 34528 - protein, 261 aa, Oryza sativa (japonica cultivar-group)
MSLISKLRLITVDVTGTLLAYKGQLGDYYCMAAKAAGKPCPDYQRMHEGFKLAYTEMARQYPCFGFAAKMPNIDWWRMCVKDSFVKAGYEYDEETFEKIFKRIYSSFGSSAPYSVFPDAQPFMRWLRGKGLTVGIVSNAEYRYKDVILPALGLNQGSEWDFGVFSGIVGVEKPDPSIYRIALEMAGKVAPEEALHIGDSMRKDYTPARSIGMHALLLDRFKTADAESWRKSGATVLPDLVAAQEWLSKNLKDEPVAAEQNV

SEQ ID NO: 34529 - protein, 472 aa, Deinococcus radiodurans R1
MARGRPCLSAQRLGEEPRVNSTGRYSGPMRVLHLASEVFPFSRSGGLGDVLGALPAVQARLGEDAEVTVLSPWYASLQGEPQELWRGEAWGEQAWLGELRQDGVRYLFLGLNEFQRPGLYHPDDVERFCAFGRAALPALDAVGVTPDVLHGHDWQAGLVVAHARLRGLRTAFSVHNLQYQGRWNLHEAAGWTGLPDWTFGPDGVEFFGDLNLMKAGLNFAGHVTTVSPTYAQEITTPQYGEGLEGLLVRLTHEGRLSGILNGLDQDRWNPRTDPDIAAYSDPAGKAGAVKALRQEFGLDDAPILATVSRLADQKGMDLLITALPELVRDWNVVVLGGGDPLLEAALTGWANHPRVAFASGMNEPLAHRIYAGAHAFAMPSRFEPCGLSQLIAMRYGTLPIVRETGGLADTVPPEVGFRFADATAPAFLQACREAQAAFQDPAQWQTRATRAMSLDFSWDGPARQYLELYRGL

SEQ ID NO: 34530 - protein, 252 aa, Prunus dulcis
AHYKSEADVGNAIAEAIQSGLVKREELFITSKASNHGHVVEACKNSLKKLQLDYLDLYLVHYPLATKHSGVGTTASLLDENKVLDIDVTVSLETTWHDMEKTVSLGLVRSIGLSNYELFLTRDCLSYAKIKPQVSQFETHPYFQRESLVRFCKKHGVVPMAHTPLGGATANVKAFGSISPLEDPVLIGLAKKHQKSVAQFALRWNLERGTPVIPKSSKVERLKENLEVLNFKLEKEDIELINTIDKKFRTTL

SEQ ID NO: 34531 - protein, 506 aa, Zea mays
LLTTGWSAFVNQKRLVAGDSIVFMRTGNGDLCVGIRRAKKGGIGGGPEFPHHQPPDGGGYGYGYAGFSTFLRGEEDDAAARGKVRVLVRPEEVVEAANLAASGQPFEVVYYPRASTPEFCVKAGAVRAAMRTQWCAGMRFKMAFETEDSSRISWFMGTVAAVQVADPIRWPNSPWRLLQNVKRVSPWLVELVSSTPAIHHLTPFSPPSRKKLCIPLYPEGHQLPAPMFHGSPLVGRGVGPMRYFPDGGTPPAGIQGARHAQFGISLPDLHHLTRLQSSLSPHAHGLRHQLDHGARPRIAGGLIVGHPAARDDISCLLTIGTAPHKKPSDVKSAAAAPAPQLMLFGKPILTEQQISLGFRPLPAPKKSPSDDAAETERTVSNNSDASSPAGTASGSTPSISGGAPSSCQDNKAAATATATDDDDLLGHCKVFMQSEDVGRTLDLSAVASYEELYQRLADMFGVDRAELTSHVFYRDGASGALKHAGDEPFSEFTKTARRLTIQTDAR

SEQ ID NO: 34532 - protein, 233 aa, Prunus persica
NAIAEAIQSGLVKREELFITSKASNHGHVVEACKNSLKKLQLDYLDLYLVHYPLATKHSGVGTTASLLDENKVLDIDVTVSLETTWHDMEKTVSLGLVRSIGLSNYELFLTRDCLSYAKIKPQVSQFETHPYFQRESLVRFCKKHGVVPMAHTPLGGATANVKAFGSISPLEDPVLIGLAKKYQKSVAQIALRWNIERGTPVIPKSSKVERLKENLEVLNFKLEKEDIELINT

SEQ ID NO: 34533 - protein, 390 aa, Magnetospirillum magnetotacticum MS-1
  misc_feature (389)..(390): Xaa can be any naturally occurring amino acid
  unsure (1)..(390): unsure at all Xaa locations
MSDDPSRSLDAFASGKLASLEASALRRRLVETARGPQASAERGGRGLVSFSCNDYLGLSHDPRVVAAASEALARYGAGAGASRLVTGNAPPLVALEERLARHKGKEAALVFGSGYLANLGISPALVGADDLILIDDLGHSCLFAGARMSGARTLRFAHNDLDQLRSLLAEHRGAARRALILTERVFSMDGDRAPLPEILALAAEYDAWTLVDDAHGLGVVEAGARAPLEMGTLSKTLGSYGGYLCASQAVIDLLTSRARSFVYTTGLPPASAAAALAALAIVEAEPERAARPLALARRFTARLGLPDAESPIVPVLVGEAEAALALSAALEARGFLVVAIRPPTVAPGTARLRVAFSAAHDETQVDALAEALAESLAELRPSGSAGGSXX

SEQ ID NO: 34534 - protein, 332 aa, Sulfolobus solfataricus P2
MFQDIPKSKLLDMYKKMLLIRYHELTAKELFASGKIPGFVHLYVGEEAVAVGVMSTLRDDDYITSTHRGHGHCIAKGLDVKRMLAEIMGKKTGVCKGKGGSMHIFDYSKGMLGANGIVGGGAPHAVGAALAFKLKGLDRVAVAFIGDGAMNQGVVLESLNLSAIWKLPVIFVVEDNMYAMSTRSLVPGKLQPRHSAAKSYVERALGFGIPAVEVDGMDVLAVYEVAKEAVDRARRGGGPSLLHCKTYRFFGHFEGDPLVYRDKEEEEMWRKRDPITLFRDKLVSNNIINSEELDKIDREAKAEIEQALKFAEESPYPEVEEALTDVFTDNSY

SEQ ID NO: 34535 - protein, 252 aa, Prunus maritima
AHYTSEADVGNAIAEAIQSGLVKREELFITSKASNHGHVVEACKNSLKKLQLDYLDLYLVHYPLATKHSGVGTTASLLDENKVLDIDVTVSLETTWHDMEKTVDLGLVRSIGLSNYELFLTRDCLSYAKIKPQVSQFETHPYFQRESLVRFCKKHGVVPMAHTPLGGATANVKAFGSISPLEDPVLIGLAKKYQKSMAQIALRWNLERGTPVIPKSSKVERLKENLEILNFKLEKEDIELINTIDKKSRTTL

SEQ ID NO: 34536 - protein, 317 aa, Arabidopsis thaliana
MAALCCCPTTIIVSGKVSSRIKTAGPLPRINPFKNQKRLITERRNLIVKSIIEDREAIDVKNDNFKAEEELSEDKVEDTDRLMSRGINAAIVLAAGTVAVTKLLTIDHDYWQGWTLYEILRYAPEHNWFAYEQILKTNPVLTKMAISGIVYSLGDWIAQCYEGKPLFEFDRTRVLRSGLVGFTLHGSLSHYYYQFCEALFPFQEWWVVPAKVAFDQTVWSAIWNSIYFTVLGLLRFQSPADIFSEIKTTFLPMLTAGWKLWPLAHLVTYGVIPVDQRLLWVDCIELIWVTILSTYSNEKAEAQASEETNSSSHSSED

SEQ ID NO: 34537 - protein, 231 aa, Prunus maritima
  misc_feature (6)..(7): Xaa can be any naturally occurring amino acid
  unsure (1)..(231): unsure at all Xaa locations
NAIAEXXQSGLVKREELFITSKASNHGHVVEACKNSLKKLQLDYLDLYLVHYPLATKHSGVGTTASLLDENKVLDIDVTVSLETTWHDMEKTVDLGLVCSIGFSNYELFLTRDCLSYAKIKPQVSQFETHPYFQRESLVRFCKKHGVVPMAHTPLGGATANVKAFGSISPLEDPVLIGLAKKYQKSVAQIALRWNLERGTPVIPKSSKVERLKENLEILNFKLEKEDIELI

SEQ ID NO: 34538 - protein, 120 aa, Arabidopsis thaliana
MAISSFKHEHPLEKRQAEAARIREKYPDRIPVIVERAEKSDVPDIDKKKYLVPADLTVGQFVYVVRKRIKLSPEKAIFIFVKNILPPTAAIMSAIYEEHKDEDGFLYMSYSGENTFGIFF

SEQ ID NO: 34539 - protein, 80 aa, Oryza rufipogon
MSCCGGNCGCGSSCQCGNGCGGCKYSEVEPTTTTTFLADATNKGSGAASGGSEMGAENGSCDCNTCKCGTSCGCSCCNCN

SEQ ID NO: 34540 - protein, 423 aa, Acetabularia peniculus
IPPDQQRLIFAGKQLEDGRTLADYNIQKESTLHLVLRLRGGMQIFVKTLTGKTITLEVQSSDTVENVKSKIQDKEGIPPDQQRLIFAGKQLEDGLTLADYNIQKESTLHLVLRLRGGMQIFVKTLTGKTITLEVESSDTVENVKSKIQDKEGIPPDQQRLIFAGKQLEDGRTLADYNIQKESTLHLVLRLRGGMQIFVKTLTGKTITLEVESSDTVENVKSKIQDKEGIPPDQQRLIFAGKQLEDGRTLADYNIQKESTLHLVLRLRGGMQIFVKTLTGKTITLEVESSDTVENVKSKIQDKEGIPPDQQRLIFAGKQLEDGRTLADYNIQKESTLHLVLRLRGGMQIFVKTLTGKTITLEVESSDTVENVKSKIQDKEGIPPDQQRIIFAGKQLEDGRTLADYNIQKESTLHLVLRLRGGAF

SEQ ID NO: 34541 - protein, 364 aa, Oryza sativa
  misc_feature (343)..(343): Xaa can be any naturally occurring amino acid
  unsure (1)..(364): unsure at all Xaa locations
MDGSSMSSSSTQQQAQVPPGFRFHPTDEELVDYYLRKKVAARRIDLNVIKDVDLYKIEPWDLQERCRINGGSAAEEQNEWYFFSHKDKKYPTGTRTNRATAAGFWKATGRDKPIYATKQHSLLVGMRKTLVYYRGRAPNGHKSDWIMHEYRLETTETAPPQEEGWVVCRVFKKRLPTTRRDSDHDAPCGSWYVDEDAPGAFMSPMMITRSSILRPHQHHAGITLQEQHLHTTYKHRDLTTKIQQLQVPAAGHHLLNTMPHDLESSTSSFHSLLVSPDHHQINMHHAQADPFFDDMHAVDQATTTDWRVLDKFVASQLSNDATNKPADHYTDEGDILQVSDKQXEVAAADYASTSTSSSQIDPWK

SEQ ID NO: 34542 - protein, 418 aa, Solibacter usitatus Ellin6076
MRIRVLGIVLAGGKGTRLSPLTRERAKPAVPFGGKYRIIDFVLSNFINSGIYSIYVLTQFRSQSLLQHLAEGWQFGSLLKNQFVIPVPAQMRSEDETWYQGTADAIYQNINLVEQADPHVVAIFGGDHIYRMNIASMIEYHVAKAAEVTIAAIPMPKKHADEFGVIEAADDDRILGFHEKNPDAPTMPGDPDQVYASMGNYIFSTRTLLSLLEEDSKLPHSHHDFGKDILPRLAGKGRMYAYNFETNRIPGEPADASPYWRDVGTIEAYYEANMDLRYVSPALNLYNREWPLRSTSYSDPPAKFTFDDANRRGQAIDSIVSGGCILSGGVVRNSVLGRGVRVHAGAMVEDSVILDNCDIGRRAKIRRAILDKNVRVAEDAMIGYDLEVDRAKGYHVTETGIVVVGGERSQVDITGLVV

SEQ ID NO: 34543 - protein, 316 aa, Gracilaria lemaneiformis
MAIPKVGINGFGRIGRLVLRAAIEKNTCTVVAINDPFIDLEYMAYMFKYDSTHGRYPGTVEASGGKLVVDGNVIQIFGCRDPAEIQWSAAGAEYVVESTGVFTLKEKAEKHFVGGAKKVIISAPSKDAPMFVCGVNEEKYTPDLNVISNASCTTNCLAPLVKVIHEKYGIEEGLMTTVHATTATQKTVDGPSHKDWRGGRGAGANIIPSSTGAAKAVGKVMPELNGKLTGMAFRVPTPDVSVVDLTVRLAVDTTYDDIKATMKAASEGKMEGILKYTEDSVVSTDFIHDDASCVFDAGAGIMLNSKFCSVLYDMMG

SEQ ID NO: 34544 - protein, 285 aa, Arabidopsis thaliana
MAKDVEGPEGFQTRDYEDPPPTPFFDADELTKWSLYRAVIAEFVATLLFLYITVLTVIGYKIQSDTKAGGVDCGGVGILGIAWAFGGMIFILVYCTAGISGGHINPAVTFGLFLARKVSLIRAVLYMVAQCLGAICGVGFVKAFQSSYYDRYGGGANSLADGYNTGTGLAAEIIGTFVLVYTVFSATDPKRNARDSHVPVLAPLPIGFAVFMVHLATIPITGTGINPARSFGAAVIYNKSKPWDDHWIFWVGPFIGAAIAAFYHQFVLRASGSKSLGSFRSAANV

SEQ ID NO: 34545 - protein, 623 aa, Oryza sativa
MAKKNYGQVYNILGWGDPYFTVNSHGHLAVKPHGRDTMSGQDIDVHSVIHRALATTITTNDGDKKPQFPMILRFPDVLKNRLDSLHAAFHGAVDSTGYASRYQGVFPIKVNQNKAVVQDLVTFGHGYSYGLEAGSKPELLIAMSCLAKAKPGAYLVCNGYKDADYVALALSARAMGLNAIIVLEMEEELDIVVEQSARLGVEPVIGVRAKLLTKIPGHFGSTAGKHGKFGMLADKIYEVAGKLKKMGKLHWLKLLHYHVGSMIPTTDIVYNAAAEAAGIYCALVKEHGATGMTTLDCGGGLGVDYDGTRSGSSDMSVAYGLEQYASSIVQAVRLTCDDNGVPHPVLCTESGRAMASHHSMIILEALSAIPEPQDEEDTHHRLLSKIQDLSSKQPRTAHTVNGGGGVDAMHSHAVELKKHGIEMYKLAKKLSKRVTGDANGIYNYHMNLSVFSLVPDFWGIGQLFPMMPVSRLNEKPTINGTLVDITCDSDGKVEKFIRDAVTLPLHPLDDAAAEHGGYYVAALLSGAYQEALACKHNLFSGPTLVRVESAGGGGAFKIVSVELGPTAEEVIGTMRYDVKNDISDVIEKVATENGVWPMVEPLMKKGLTTMPYLNDYKPPKTTF

SEQ ID NO: 34546 - protein, 105 aa, Cryptococcus adeliensis
LGSGISLFIATNICESIVWKAFSPTTVNTGRGPEFEGAVIALFHNLFTWNDKSRALKESFYRERLPNIMNLLATAGVFAAVIYLQGFRIEIPVKSNRARGARGSY

SEQ ID NO: 34547 - protein, 423 aa, Streptomyces sp. WP 4669
MSAKRVVITGVGVTAPGGVGTKNFWNLLSEGRTATRGITFFDPSSFRSRVAAEIDFDPEEHGLGPQEIRRMDRAAQLAVVTAREALADSGLDLSGADPHRVGVTIGSAVGATMGLDQEYRVVSDGGRLELVDHAYAVPHLYNYLVPSSFAAEVAWAVGAEGPATVVSTGCTSGLDSVGHAAELIREGSACAVVAGATDAPISPITLACFDAIKATTPRNDDPEHASRPFDGTRNGFVLGEGSAVFVLEELEGALRRGAHIYAEIAGYASRCNAFHMTGLRPDGVEMAEAITVALDEARMNPEAVDYVNAHGSGTKQNDRHETAAFKKSLGEHAYRTPVSSIKSMVGHSLGAIGSIEIAASVLAMEHGVVPPTANLHTPDPECDLDYVPLTAREHRTDAVLTVGSGFGGFQSAMVLARPERSAA

SEQ ID NO: 34548 - protein, 134 aa, Zea mays subsp. parviglumis
MRKHRIVSLVFALLILLALAVSSTRNAQEDSMADNTGTLAGGIKDVPGNENDLHLQELARFAVDEHNKKANALLGFEKLVKAKTQVVAGTMYYLTIEVKDGEVKKLYEAKVWEKPWENLKGLQEFKPVEEGASA

SEQ ID NO: 34549 - protein, 406 aa, Streptomyces sp. WP 4669
MSTAATRTVVTGLGIAAPNGLGTTDYWAATRSGKSGIGRITRFDPTGYPAKLAGQVPGFHADDHLPSRLLAQTDHMTRLALVATDWALADAGVTPAELPAYDMGVVTASSSGGFEFGQGELQKLWSQGSQYVSAYQSFAWFYAVNSGQISIRNGMKGPSGVLVSDQAGGLDAIAHARRQIRKGTQLIVSGSIDASICPWGWVAQLASGRLSEGEEPDRAYLPFDAAAAGHVPGEGGAILILESAEGAARRGVRVYGEIAGYAATFDPAPGSGRPPGLRKAIELALADAGVDAGDVDVVFADGAAVPELDRIEADALNEVFGPHGVMVTAPKTMTGRLYSGAAPLDVATALLAIRDGVVPATTHVHPDASYDLDLVTGEARATEVRTALILARGHAGFNAATVLTAP

SEQ ID NO: 34550 - protein, 341 aa, Glycine max
  misc_feature (24)..(24): Xaa can be any naturally occurring amino acid
  unsure (1)..(341): unsure at all Xaa locations
SAYQHGNTTPANISGGRGGGDARXGTTMSGQSMSTSRSVGSPSSRSEQTMATPASDSTFLRLNHLDIHGDDAGSQGTVAKKKKRGQRAVGGDKSGRGLRQFSMKVCEKVESKGRTTYNEVADELVAEFADPINGVSTPDQQQYDEKNIRRRVYDALNVLMAMDIISKDKKETPWKGLPRSPPPHIEELKSERLGLRNRIEKKAAYLQELEEQYIGLQKLIQRNEQLYSSGNAPNGGVSLPFILVQTRPHATVEVEISEDMQLVHFDFNSTPFELHDDNYVLKAMKFCERSQNDNTTDNSTDGGEGSSIYAQVPTSVSNPPNRPPSSPPLPGILKARVKNEH

SEQ ID NO: 34551 - protein, 492 aa, Glycine max
  misc_feature (255)..(255): Xaa can be any naturally occurring amino acid
  unsure (1)..(492): unsure at all Xaa locations
MLEMEKDFDSKLKIQGNSSSSNGAGNVQRSKSFAFRAPQENYTIQDFELGKIYGVGSYSKVVRAKKKDTGIVYALKIMDKKFITKENKTAYVKLERIVLDQLDHPGIVRLYFTFQDSFSLYMALESCEGGELFDQITRKGRLSEDEARFYAAEVVDALEYIHNLGVIHRDIKPENLLLTAEGHIKIADFGSVKPMQDSQITVLPNAASDDKACTFVGTAAYVPPEVLNSSPATFGNDLWALGCTLYQMLSGTSPXAGHATEWLIFQRIIARDLRFPDYFSDEARDLIDRLLDLDPSRRPGAAPDGYAILKRHPFFKGVDWDNLRAQIPPKLAPEPGTQSPVADDVHDSSWSPSHIGDGSAASVRQPDGATSSEGTGHITRLASIDSFDSKWQQFLEPGESVLMISMVKKLQKLTSKKVQLILTNKPKLIYVDPSKLIVKGNIIWSDNPNDLSIQVASPSNFKICTPKKVMSFEDAKQRACQWKKAIEGLQNR

SEQ ID NO: 34552 - protein, 230 aa, Triticum aestivum
  misc_feature (4)..(5): Xaa can be any naturally occurring amino acid
  misc_feature (7)..(8): Xaa can be any naturally occurring amino acid
  misc_feature (15)..(15): Xaa can be any naturally occurring amino acid
  misc_feature (17)..(17): Xaa can be any naturally occurring amino acid
  misc_feature (34)..(34): Xaa can be any naturally occurring amino acid
  misc_feature (51)..(52): Xaa can be any naturally occurring amino acid
  misc_feature (83)..(83): Xaa can be any naturally occurring amino acid
  unsure (1)..(230): unsure at all Xaa locations
MQIXXKXXSGKTITXEXESSDTIDNVKAKIQDKXGIPPDQQRLIFAGKQLXXGRTLADYNIQKESTLHLVLRLRGGMQIFVKXTLTGKTITLEVESSDTIDNVKAKIQDKEGIPPDQQRLIFAGKQLEDGRTLADYNIQKESTLHLVLRLRGGMQIFVKTLTGKTITLEVESSDTIDNVKVKIQDKEGIPPDQQRLIFAGKQLEDGRTLADYNIQKESTLHLVLRLRGGQ

SEQ ID NO: 34553 - protein, 464 aa, Arabidopsis thaliana
MEDAAEQERGFHVITIRKQIVTAALPLQDHWLPLSNLDLLLPPVQISVCFCYKKPRHFLSVAETLKASLAEALVSYYAFAGELVKNSSGEPEILCNNRGVDFLEAVADVELRELNLHDPDESIAKLVPKKKHGVIAIQVTQLKCGSIVVGCTFDHRIADAFSMNMFLVSWAEISRFNAPISSVPSFRRSILNPRRPLIIDSSIDKMYMPVTSLPLPQETTNDLDNILTSRIYYIKENALEDLQTLASGSSPKTGYGQRTKLESFSAFLWKLVAKHTGRDLVSNKNSKMGIVVDGRRRLMEKEDNTYFGNVLSIPFGGQSIDDLIDKPLSWVTNEVHRFLEEAVTKEHFLNLIDWVEIHRPIPAVSRIYSTGTDDGPAFVVSSGRSFPVNKVDFGWGLPVFGSYHFPWEGSSGYVMPMPSPVDDGNGDWVVYLHLTKGQLKFIEEEASHVLKPIDNYYLKINTIN

SEQ ID NO: 34554 - protein, 540 aa, Arabidopsis thaliana
MMTLWRHKLELLVNDRWLVFVCAMWVQSVAGVGYLFGGSMSPAIKTSLGYNQKQIALLGVAKNLGDAIGFVSGALSEVSPSWVVLLVGATQNLFGYGVVWLVVTGQLPNLPLWMLFVAIFVGTNGETYYNTASLVSCIHNFPESRGPVVGILKGFSGLSGAILTQVYLMFNPSHDSSVILMVALGPPVVVLALLFIVRPVERSCRTNLRSDDLRFLAIYGFCVVLAVYLLGLLVLQSVFDMTQTIITTSGAILVIFMVVPVLVPFSSVFISGNNVTSVKPEEGTSNVDQHEARTLIERSDRPPEKKRAPCIGEDFTLLQALGQADFWLIFMSLVLGVGSGITIIDNLGQICYSLGYSNTKIFVSLISISNFLGRVAGGYFSELIIRKLSLPRTLAMSVVQAIMSLGLIYYAIDWPGKIYVVTIVIGMGYGAHWAIAPASVSDIFGLKSFGSLYNFQITALPIGSFVFSGVIASNIYDYYARKQAGPTTETESLVCTGSVCYSVTCSLMSMLCLMAMVLSLSVVYRTRKFYLRLHHRVSKT

SEQ ID NO: 34555 - protein, 412 aa, Thermotoga maritima MSB8
MKRVVITGMGIVSPFGVGKERNLEGLRETKVTIDRISSFDASNLPVQIAAEVRDFKPEEYINPKLVRRTDRFVHFALVSAKEAVEDAGINFEPYADRTATIIGSGMGGFLTLDSENNKFLSQGPSRVSPFLIPMILIDMASGVVAMEYGLKGPNFSSVSACASSLHAVALGALLIRHGYADVAVVGGTEATIAPLPITGFANMRALSRRNDDPKRASRPFDKDRDGFVMGEGGAVLILEAEEVAKSRGAKILAEIKGVGMTDDAYHFSAPDPEGRGAAEAMKLALKESSLAVEDIDYVSCHATSTPAGDEAELKAIKKVLGEHVKNVAINSSKALIGHLLGAAGASELVLAILQMQNSFVHGMPNLDNPIDEAKGTGLVGKEPVQMEIKNFIKNSFGFGGHNVSIVVGRYES

SEQ ID NO: 34556 - protein, 306 aa, Synechococcus sp. CC9605
MDRVTWSYLGHAVYTVQQHPEHESADRPALLLVHGFGASTDHWRHNIPVLAETHAVHAIDLLGFGRSAKPAGLNYGGALWRDQLVAYVRERIGRPTVIAGNSLGGFAALAAGAALGSDCAGVVLLNAAGPFSDEQKPPQGWGAIARQSIGTALLKSPVLQRLLFENLRRPATIRRTLNQVYVDKTNVDDWLVESIRRPSLDPGAFGVFRTVFDIPRGQPLDELFAELTAPLLLLWGIRDPWINAPGRRSTFQRHAPEATTEVVLEAGHCPHDEVPDQVNAALLQWLEGLKSAAAPTNPDLLAKGVN

SEQ ID NO: 34557 - protein, 514 aa, Capsella rubella
MDNSRTRQNMNGSAAATNWSQQNGRTSTSSLEDLEIPKFRSFAPSSISISPSLVSPSTCFSPSVFLDSPAFVSSSAHVLASPTTGALITNESNTKLINEGEKKDNNINFFDFSFQTQSSGVSAPTTTTTTTNNSSIFQSQEQQRKNQSDQWSQNESRQNNQAVSYNGREQRKGEDGYNWRKYGQKQVKGSENPRSYYKCTFPSCPTKKKVERSLEGQITEIVYKGSHNHPKPQSTRRSSSSSSSTFHSAVYNASLDHHRQASSDQPNSNNSFHHSDSFAMQQDDNTTSDSVGDDEFEQGSSIVSRDEEDCGSEPEAKRWKGENETNGGNGGGSKTGREPRIVVQTTSDIDILDDGYRWRKYGQKVVKGNPNPRSYYKCTTIGCPVRKHVERASHDMRAVITTYEGKHNHDVPAARGSGYATNRAPQDASSVPIRPAAIAGHSNSTTSSPAPYTLQTLHNNNTNSTARSWLRYDNNNNNNNNNPQTLQNCVCGDAFSRATEEPNEETSFFDSFMP

SEQ ID NO: 34558 - protein, 524 aa, Thermotoga maritima MSB8
MKKYVIVTGGVLSGIGKGIFSASLARLMKEHGVDVNVLKIDPYLNVDAGTMNPNQHGEVFVTEDGYEADLDLGHYERFLGRDMTRQNNMTAGQVYLRVIEKERQGKYLGNTVQIVPHLTEEIKDRIRALEAELLVVEIGGTVGDIEGEVFLEAVRELQMEEGKENFLFAHVTYVPYLRTTNEFKTKPTQQSVQLLRRIGITPDMVIVRSEFPLDVPSMNKVALFSGVPRDFVINLPDTKNVYEVPEILRDMGLHEKIASKLNVELKKSTFNWSYPKAFKPYRIALVGKYLGTDDAYKSIIESVFLTGIEKPTVVDSQMLEDMNDEEVKKVLDEYDALIIPGGFGRRGVEGKIKAIKYARENKKPILGICLGMQLMVIEFARNVFGYKEANSTEFDPNTPYPVVDLMEEQKRILKLGGTMRLGAQKVKIFPKTKLYEVYGGVEEVYERHRHRYEANEEAFPELFKKPGEEGYKLVVSAKSDFIEAVELEDHPFFVGVQFHPEYKSKVGAPHPIFVYLRKVLEGSQ

SEQ ID NO: 34559 - protein, 324 aa, Mycobacterium tuberculosis H37Rv
  misc_feature (21)..(21): Xaa can be any naturally occurring amino acid
  misc_feature (176)..(176): Xaa can be any naturally occurring amino acid
  unsure (1)..(324): unsure at all Xaa locations
ANMPPGSVEQVAAKVVPSVVXLETDLGRQSEEGSGIILSAEGLILTNNHVIAAAAKPPLGSPPPKTTVTFSDGRTAPFTVVGADPTSDIAVVRVQGVSGLTPISLGSSSDLRVGQPVLAIGSPLGLEGTVTTGIVSALNRPVSTTGEAGNQNTVLDAIQTDAAINPGNSGGALVNXNAQLVGVNSAIATLGADSADAQSGSIGLGFAIPVDQAKRIADELISTGKASHASLGVQVTNDKDTLGAKIVEVVAGGAAANAGVPKGVVVTKVDDRPINSADALVAAVRSKAPGATVALTFQDPSGGSRTVQVTLGKAEQLEHHHHHH

SEQ ID NO: 34560 - protein, 226 aa, Oryza sativa (japonica cultivar-group)
MDSEHWISRLAAAKRFYAAQLGHADRAGMEEVDMDEEVRPEFACPYCYEDHDVVSLCAHLEEEHPFEPHAAPCPICSDKIAKDMLNHITVQHGYLFKNRRRLRRFVIPGSQALSLLSRDLREAHLQVLLGGGGHRSNNSSNTTNISADPLLSSFGLSFPTSDTEETSKPPISIPDDASVIKETPAQPWDSSIDSSLTREEREQKRKQASVRATFVQDLLLTTLFGD

SEQ ID NO: 34561 - protein, 589 aa, Oryza sativa (japonica cultivar-group)
MHRMASLLLPPQFLCSLPCSTNSIRSHLHYKPHFLGNIMTKPKAKMRLLNRNVSSMAKKSSQDVAEGSSDDESDGETSKTKKRAPRRGRKKATIQASEGETQEGQVSTEEDESPEGTKKIKRRGRKKAATTASSSEEKDKAKEPKKRGRRKVKTVEELSDNEGEDLGEDLVPSNDRQEKISANDLESKIAALLLEDTDDNDINNLIPLVCCFGPAKYSFIPSGRPANRLIDHEIHEGMKDMFWSPDQFVRAPGGSSSNVALALAASGGRVEFMGKLGDDDYGQSTLYHLNVNGVQTRAIKMDPSAFTAMSLMKVTGRGSLKMSCAKPCAEDCFVQTDINPAVLKEAKMFYYNSSALLEPTTRSSLSKAIEVSKKFGGVTFFDLNLPLPLWSSSKETKSLVKEAWEAADIIEITKQELEFLCGIKPSEKFGTKDNDKSKFTHYSPEVVTKLWHENLKVLFVTNGTSKIHYYTKEHDGWVRGTEDAPITPFTGDMSQSGDAIVAALMKMLAINPHLVTDKDYLHTAMKHAITCGVIDQWLLARERGFLPRERADPTSEQFGVRFVTEKEYRTLPDSIHTEDSSESELLYVE

SEQ ID NO: 34562 - protein, 252 aa, Prunus maritima
AHYKSEADVGNAIAEAIQSGLVKREELFITSKASNHGHVVEACKNSLKKLQLDYLDLYLVHYPLATKHSGVGTTASLLDENKVLDIGVTVSLETTWHDMEKTVDLGLVRSIGLSNYELFLTRDCLSYAKIKPQVSQFETHPYFQRESLVRFCKKHGVVPMAHTPLGGATANVKAFGSISPLEDPVLIGLAKKYQKSVAQIALRWNLERGTPVIPKSSKVERLKENLEILNFKLEKEDIELINTIDKKSRTTL

SEQ ID NO: 34563 - protein, 727 aa, Yarrowia lipolytica CLIB122
MKSLLLSLLAVPATAQLLLDLQGHDTTDPRHQSQNHLTKRKTVEQDLVQKFAYYEATVSVGTPGQQIKLLLDTGSSDMWVLGQNVNCGGGGIFSQGIDCTQSGVFDTSKSSTYHKNESIPFDIKYSDGSESKGFYGTDNLGLGGTTLNDFTFAVADSASDGQAVLGIGPIENEQSLYTDNPVAYANLPLALMMDGVTKSSAFSLWLNDKDALKGSILFGGYDRAKVDGDLFTVPIVNLNPGGQGRSREYNVGLDSITVGGKSVGSSTPALLDSGTTLCNLPQEMVDAILAQFSGVSNSLRAGYYTKCSNVPQGSIDFVFSGNKLTVELADLMKPLENPDGSKITTDGEQACGILVTSNTDSHSISDSVVLGASFLRSAYVVYDRDAQKIMMGKAKYGVSSSDIVELKDGSSEGVASAESSAESAAATASSSAGASSGASSSGASSAGASSDSSASASASASASASASASATATSEGDSGQGVSTMAVVVRPSDTRLSAYITNIVVTPSATPALSTVSVVVRPSDTRLSAYITEIVVTPTAVPFSTVVSTTAIESTEIVTVTSCSDGKCEHAKSTVYKIVDATVTQTIWSCEGDESATWAPAPTPEPQNTQVQNTPAYQAPSAPPVFLPVWGTQSDGETVTHTETAFFNPQTYTGPPAQPTGASGGNGGNNGGNNGGNNGGNNGGNGGNDNNGGSSSHSSGITQANGASSISPMISLVVLLLSFLIWA

SEQ ID NO: 34564 - protein, 252 aa, Prunus maritima
AHYKSEADVGNTIAEAIQSGLVKREELFITSKASNHGHVVEACKNSLKKLQLDYLDLYLVHYPLATKHSGVGTTASLLDENKVLDIDVTVSLETTWHDMEKTVDLGLVRSIGLSNYELFLTRDCLSYAKIKPQVSQFETHPYFQRESLVRFCKKHGVVPMAHTPLGGATANVKAFGSISPLEDPVLIGLAKKYQKSVAQIALRWNLERGIPVIPKSSKVERLKENLEILNFKLEKEDIELINTIDKKSRTTL

SEQ ID NO: 34565 - protein, 89 aa, Brassica napus
MMNLSGTSGRTIERPPFTPTQWQELEHQALIYKYMVSGVPVPPELIFSIRRSLDSSLVSRLLPHQSIGWGCYQMGLGRKPDPEPGRCRR

SEQ ID NO: 34566 - protein, 339 aa, Streptococcus gordonii
MKHKILVTGGAGYIGTHTVVELIKAGHELVVVDNFSNSSKKSLEAVEKIVGQSITLYEADICDKEALLKVFKDFKPTGVIHFAGLKAVGESSQIPLTYYENNVAGTLTLLRVMEEVNCKNIIFSSSATVYGDPLTVPILEDFPVSATNPYGRTKLMAEEIMTDIYKADSTWNIVLLRYFNPIGAHESGDLGENPNGIPNNLLPYVTQVAVGRLEQVQVFGNDYPTVDGTGVRDYIHVVDLAKGHVAALKKFDGKQGLNIYNLGTGKGYSVLEIIHSMEKAVGKLIPYKIVERRPGDIATSYANPAKAKAELGWEAQFDISRMCQDAWRWQSKHPNGFDE

SEQ ID NO: 34567 - protein, 120 aa, Deinococcus radiodurans R1
MKALGGKKLAGTTLRHSISLTGGPHMLKPLGDRVLVEIIEEAEQKTAGGLYVPDSAKEKSQRGKVVAVGTGKTLDNGTKVAMEVKEGDTVYFAKYGGTEVSLEGKNYSLLSERDLLAIVE

SEQ ID NO: 34568 - protein, 250 aa, Posidonia oceanica
MPFSRIAMGRREEVTHGDALKATLAEFISTLIFVFAGEGSGIAYNNLSGDGDTTASSLIAAALAHGLGLFVAVSVGANISGGHVNPAVTFGAFVGGNITFLRGILYWHGQLLGSIVACLLLKFVTGGMTTGGFAVSGVSVWNALVFEIVMTFGLVYTVYATAIDPKKGAIGTIAPLAIGLIVAANIFVGGVFTGASMNPAVAFGPALVSWNWVNHWIYWVGPLVGAAIAGIVYQLLFINHTHEQLPTTDY

SEQ ID NO: 34569 - protein, 231 aa, Prunus maritima
AHYKSEADVGNAIAEAIQSGLVKREELFITSKASNHGHVVEACKNSLKKLQLDYLDLYLVHYPLATKHSGVGTTASLLDENKVLDIDVTVSLETTWHDMEKTVDLGLVRSIGLSNYELFLTRDCLSYAKIKPQVSQFETHPYFQRESLVRFCKKHGVVPMAHTPLGGATASVKAFGSISPLEDPVLIGLAKKYQKSVAQIALRWNLERGTPVIPKSSKVERLKENLEILNF

SEQ ID NO: 34570 - protein, 548 aa, Deinococcus radiodurans R1
MAKQLVFDESARRSLERGVNAVANAVKVTLGPRGRNVVIEKKFGSPTITKDGVTVAKEVELEDKLENIGAQLLKEVASKTNDITGDGTTTATVLGQAIVKEGLRNVAAGANPLALKRGIDKAVAVAIEEIKKLAVSVEDSEAIKKVAGISANDETVGQEIASAMDKVGKEGVITIEESKGFDTEVDVVEGMQFDKGFINPYFITNPEKMEAVLEDAYILINEKKISNLKDMLPVLEKVAQTGRPLLIIAEDVEGEALATLVVNKLRGTLNIAAVKAPGFGDRRKEMLRDIAAVTGGEVVSEDLGHKLENVGMEMLGRAARIRITKDETTIVDGKGEQAQIDARVNAIKGELDSTDSDYAREKLQERLAKLSGGVAVIRVGAATETELKEKKHRYEDALSTARSAVEEGIVAGGGTTLLRVIPAVRKAAESLTGDEATGARILIRALEEPARQIAANAGEEGSVIVNAVVGSDKARYGFNAATGEYVEDMVAAGIVDPAKVTRTALQNAASIGALILTTEAIVSDKPEKAAPAMPQGGGDMGGMGGMDF

SEQ ID NO: 34571 - protein, 221 aa, Salmonella enterica subsp. enterica serovar Thompson
VDLDDQGERTFTFMVRPSADLFLVEEDLPQFAAGQWLHVCSIALSAEPSRSTTFAAMESIRSAGGRVSFDPNIRPDLWQDQALLLACLDRALHMANVVKLSEEELVFISSSNDLAYGIASVTERYQPELLLVTRGKAGVLAAFQQKFTHFNARPVASVDTTGAGDAFVAGLLASLAANGMPTDMTALEPTLTLAQTCGALATTAKGAMTALPYQRDLNRQF

SEQ ID NO: 34572 - protein, 372 aa, Streptococcus suis 89/1591
MTETNGLKDAIACDTRISAIENDRLSYAGYDIAELMENNASFEEVIYLLWNLHLPTQIELNYFEKSLRKEYAISDAVEQCILIQSRRHLHPMSVLRSTVSLLGVYNVHAEENSLEALYEQSIQIMGKVPTIIATFARLRRGLVPIEPRSDLGFAANFLYMLNGEEPSDLQIKAFNKALVLHADHELNASTFAARVTASTLTDLYSCVTTAIGTLKGSLHGGANERVFDMLLAIRESGDAERYLQKKLDSKEKIMGFGHRVYKTVDPRQEYLKEMARDLTFGTDDEAFYRLSEEVESFIKNKKGLIPNVDFYSATVYHVLGIDSDIFTLIFAMSRMAGWIAHVQEQRKNNKLIRPRSSYLGGRNLVYIPIGKR

SEQ ID NO: 34573 - protein, 290 aa, Posidonia oceanica
MEGKEEDVKLGANKFSERQPIGTAAQTGDDRDYKEPPPAPLYEPGELISWSFYRAGIAEFMATFLFLYITILTVMGYEKVDNKCKTVGTQGIAWAFGGMIFALVYCTAGISGGHINPAVTFGLFLARKLSMTRALFYMVMQCLGAICGAGVVKGFVNKDNFAMWKGGANVVSHGYTKGDGLGAEIVGTFLLVYTVFSATDAKRNARDSHVPILAPLPIGFAVFLVHLATIPITGTGINPARSFGAAVIYNKQHAWDDHHWVFWVGPFIGAALAAIYHQIVIRAIPFKTGP

SEQ ID NO: 34574 - protein, 252 aa, Prunus takesimensis
  misc_feature (18)..(18): Xaa can be any naturally occurring amino acid
  unsure (1)..(252): unsure at all Xaa locations
AHYKSEADVGNAIAEAIXSGLVKREELFITSKASNHGHVVEACKNSLKKLQLDYLDLYLVHYPLATKHNGVGATASLLDENKVLDIDVTVSLETTWHDMEKTVSLGLVRSIGLSNYELFLTRDCLSYAKIKPQVSQFETHPYFQRESLVRFCKKHGVIPMAHTPLGGATANVKAFGSISPLEDPVLLALAKKYQKSVAQIALRWNLERDTPVIPKSSKVERLKENLEVLNFKLEKEDIELINTIDKKSRTTL

SEQ ID NO: 34575 - protein, 307 aa, Vibrio alginolyticus
MNQVWVTGDAVVDLIPESETSLLKCPGGAPANVAVAIARLSGKSAFFGRVGDDPFGRFMQSILDQEGVCTEFLIKDPEQRTSTVVVDLDDQGERSFTFMVKPSADQFMSVEDMGNFKQGDWLHVCSISLANEPSRSSTFEAIKRAKAAGGFISFDPNLRDEVWQDQSEIQAVVMKAVAMADVVKFSEEELLFLTDSTSMAQGLQQIAAMNIALVLVTQGAKGVWRVFESQSELITGQVVSPIDTTGAGDAFVGGLLACLSRHADWKNHPVVSSAIQWANGCGALATTQKGAMTALPTQTELLRFIGQ

SEQ ID NO: 34576 - protein, 107 aa, Synechocystis sp. PCC 6803
WPRILYVNEAFTKIAGYTAEEMLGKTPRVLQGPKTSRTELDRVRQAISQWQSVTVEVINYRKDGSEFWVEFSLVPVANKTGFYTHWIAVQRDVTERRRTEEVRLALE

SEQ ID NO: 34577 - protein, 215 aa, Wolinella succinogenes
MKSLFEGAVKFREEDFKEHKELFERLGQKQEPHTLFVGCADSRVVPNLITNTLPGELFVVRNIANVVPPYREAEEFLATTSAVEYALNVLNVRNVIICGHSNCGGCSALYLEESSFKKTPHVKKWLELLEPTRKKVLSLEPDTIAKRSWMTEQINIEKQLENLFTYPGVKERFLKGELGVFGWYYIIETGEVFSYDFDKHQFVLVEESPKIEQER

SEQ ID NO: 34578 - protein, 463 aa, Delftia acidovorans
MNTVDITEIIEKQKPNRKVLALLILSFLIMFCDGYDLQAIAFASPTIIADWGIQKASFGFIFSGGLFGVMVGGFLFGYVADRIGRRPALLWGTLLFGVFTLAAVLATNITQLAVLRFVAGLGIGGITPIAIALNVEYAPKRFRASVVGLVMIGYVVGTSSGGIFAAWLVPTFGWQVLFYIGGLAPLLLLPFLAMSLPESIKYLVLSGQKAEAVARVVNAIDPSIRASSQTRFVLGTAEESARIAGWKDSVKALFGGQLSKITPALWGAFVCSSVTVFFLASWIPVLTVGTGRSASLAAVGLALFSAGGAFGGIFSSRIIDRFGIGAMASIPLIAAVFVVSVGSFEFSDTGFLSMLCLIGFFVLGGHVGLMGAMGLFYSNANRANGVGWAISIGKFGSIIGPAIAAVLIAANTAISYLFMAAAAPLLMAGMGILVLGRLQKAADHEHRMSADRANDPEARPIVA

SEQ ID NO: 34579 - protein, 361 aa, Arabidopsis thaliana
MAALCCCPTTIIVSGKVSSRIKTAGPLPRINPFKNQKRLITERRNLIVKSIIEDREAIDVKNDNFKAEEELSEDKVEDTDRLMSRGINAAIVLAAGTVAVTKLLTIDHDYWQGWTLYEILRYAPEHNWFAYEQILKTNPVLAKMAISGIVYSLGDWIAQCYEGKPLFEFDRTRVLRSGLVGFTLHGSLSHYYYQFCEALFPFQEWWVVPAKVAFDQTVWSAIWNSIYFTVLGLLRFQSPADIFSEIKTTFLPMLTAGWKLWPLAHLVTYGVIPVDQRLLWVDCIELIWVTILSTYSNEKAEAQASEETNSSSHSSEVCQVFLFSKNLSSKISLERLNVCSECSSKLICACKYLTGLGDISM

SEQ ID NO: 34580 - protein, 424 aa, Mesorhizobium sp. BNC1
MTDTKTRPLRNLLLAARERLARHGTVLAVSAAACLVLDLSLGGSGLGAAIAIAIIVPIALFLPQKTQGIQPEERREGGGRRMETLLALDLAAAVHDPLIFCDANGDVVHANEAASLAFGSLAPGMPLQLKFRAPEMQNFILRIMEGGAGPFGIDYIERVPVERAYRVSATRISDGSGLFVLLFKDQSEARRIDRMRADFIANASHELRTPLASIAGFIETLRGPARDDAKARDSFLQIMQDQTSRMARLIDDLLSLSRLEVKPYGKPTEKIDLRPVIGGVRDALATLAKDSGVTIELDMPDEPLEVLGHQDELVQVFENLLENACKYGSPGGRVIVSAGKPVEGLERTVTVTDFGPGIPEEHIPRITERFYRVTVEKGRAPKGTGLGLAIVKHILTRHDARLSIRSKIGEGSSFTIHFPAPNHA

SEQ ID NO: 34581 - protein, 647 aa, Mycobacterium bovis AF2122/97
MGRHGSRWSRPPCFRVLRLWTYAHRCDLGHTDPLSRRTEMTTTERPTTMCEAFQRTAVMDPDAVALRTPGGNQTMTWRDYAAQVRRVAAGLAGLGVRRGDTVSLMMANRIEFYPLDVGAQHVGATSFSVYNTLPAEQLTYVFDNAGTKVVICEQQYVDRVRASGVPIEHIVCVDGAPPGTLSLTDLYAAASGDFFDFESTWRAVQPEDIVTLIYTSGTTGNPKGVEMTHANLLFEGYAIDEVLGIRFGDRVTSFLPSAHIADRMTGLYLQEMFGTQVTAVADARTIAAALPDVRPTVWGAVPRVWEKLKAGIEFTVARETDEMKRQALAWAMSVAGKRANALLAGESMSDQLVAEWAKADESVLSKLRERLGFGELRWALSGAAPIPKETLAFFAGIGIPIAEIWGMSELSCVATASHPRDGRLGTVGKLLPGLQGKIAEDGEYLVRGPLVMKGYRKEPAKTAEAIDSDGWLHTGDVFDIDSDGYLRVVDRKKELIINAAGKNMSPANIENTILAACPMVGVMMAIGDGRTYNTALLVFDADSLGPYAAQRGLDASPAALAADPEVIARIAAGVAEGNAKLSRVEQIKRFRILPTLWEPGGDEITLTMKLKRRRIAAKYSAEIEELYASELRPQVYEPAAVPSTQPA

SEQ ID NO: 34582 - protein, 583 aa, Mycobacterium bovis AF2122/97
MTAQHNIVVIGGGGAGLRAAIAIAETNPHLDVAIVSKVYPMRSHTVSAEGGAAAVTGDDDSLDEHAHDTVSGGDWLCDQDAVEAFVAEAPKELVQLEHWGCPWSRKPDGRVAVRPFGGMKKLRTWFAADKTGFHLLHTLFQRLLTYSDVMRYDEWFATTLLVDDGRVCGLVAIELATGRIETILADAVILCTGGCGRVFPFTTNANIKTGDGMALAFRAGAPLKDMEFVQYHPTGLPFTGILITEAARAEGGWLLNKDGYRYLQDYDLGKPTPEPRLRSMELGPRDRLSQAFVHEHNKGRTVDTPYGPVVYLDLRHLGADLIDAKLPFVRELCRDYQHIDPVVELVPVRPVVHYMMGGVHTDINGATTLPGLYAAGETACVSINGANRLGSNSLPELLVFGARAGRAAADYAARHQKSDRGPSSAVRAQARTEALRLERELSRHGQGGERIADIRADMQATLESAAGIYRDGPTLTKAVEEIRVLQERFATAGIDDHSRTFNTELTALLELSGMLDVALAIVESGLRREESRGAHQRTDFPNRDDEHFLAHTLVHRESDGTLRVGYLPVTITRWPPGERVYGR

SEQ ID NO: 34583 - protein, 151 aa, Haemophilus influenzae
MVSSLIFSCHYLTMAFTRIEKRKVKMAYSEKVIDHYENPRNVGSLDKKDSNVGTGMVGAPACGDVMQLQIKVDDNGIIEDAKFKTYGCGSAIASSSLITEWVKGKSLEEAGAIKNSQIAEELELPPVKVHCSILAEDAIKAAIADYKAKQG

SEQ ID NO: 34584 - protein, 935 aa, Acinetobacter baumannii
MSNFNKTLSKRLRLNHAYGQLIALIFVPIMILTCVGAFLVLTETSRSAKQQQLHHASAILARYNQIAKDLYTLVELQPDEYDHAQHIMQSMFSEKNLKRAALIDSNGQTYLSIGYRDNRYWPNFTQNNNFFGPISYNHNNIYGVRIIDTAGKPPVWLLIEMDNQPLELARYRILIALVITGLMTLLLLLLCLNFYSRRWIAPMYEIRMQLQRLNADTLDQHIVINSSGELRLLQRDIANVVKRLHFSFLELKEHTEQTEEDLRRTLDTLEVQNITYRQARDQAISSNQAKSVFLANISHELRTPLNSIDGFIHLLLRQQNLSNEQNLYLQTIRKSSAHLLALINDVLDFSKIDAGKLELETAPFDLEEAVFDVMDMLSPLAAQKHIAMAFYYADNIPQQVIGDALRFKQILTNLISNAIKFTPDGEIIVRVRMEHDDIGQCLLHFSVQDSGIGLSGTDRKKLFESFSQGDASVTRQFGGTGLGLAISKQLVHLMHGQIGFEDNQERAPTEKGSTFWFTAQFAVDEEHEIEHPHFEHLQVVSYLAHPATASVLRYYLENYQVPHIETQSILDLFSRLKHLDQKDNTWLIVDHSGDTEALLKEIRSRYQGNLAVYGYQMTLEPNMLTEYRARPLYQPLSRSGLIQLLSDQPIFEEEQQDFNGQGLHILAVDDHLPNLIVLEALLGELNVKTTKALSGQEALNIIQERIDQKLKPFDLVFMDIQMPVMSGIDTTRAIRSLESTLDGEMQLPIIALTAHALADEKQKLLKVGMNDYVTKPIQMEQIIQILTQWTKNNFTAQNLAKDHHVVAEALDPEILNWQQSLQLAANKEDLAQDLLKMLVDSFPTELEEMQQLIELEDFPQLEHVLHRLYGATRYVGTPKLQQVTGDFEQFISTLRKERRRADDGFIEEVMRRFDELGLVIKEVESAAHQILVIPD

SEQ ID NO: 34585 - protein, 292 aa, Zea mays
MGKDDVVESGAGGGEFAAKDYTDPPPAPLVDAAELGSWSLYRAVIAEFIATLLFLYVTVATVIGYKHQTDASASGATADAACGGVGVLGIAWAFGGMIFVLVYCTAGISGGHINPAVTFGLFLARKVSLVRALLYVVAQCLGAVCGVGLVKAFQSAYFDRYGGGANSLASGYSRGAGLGAEIVGTFVLVYTVFSATDPKRNARDSHVPVLAPLPIGFAVFMVHLATIPVTGTGINPARSLGAAVVYNKDKPWDDHWIFWVGPLLGAAIAAFYHQYILRAGAIKALGSFRSNA

SEQ ID NO: 34586 - protein, 226 aa, Psychrobacter arcticus 273-4
MLKFYFHQTPNPLKVAAFLEETGLPYEVVAVDTLKGEQHTPEYRAINPNGKTPAIEDDGMRVFDSTAILMYLSEKTGKLAGKPEDRGEMLSWLLFLATGLGPFSGQSVHFRHKAPEKIPYAINRYLREAERHYEVLDTHMEGREYIVGDEYSIADISAWGWIDKATFVLGEEGLENYPNLKRWFANVNARPTIEKARALAKNIEFKTEFDDVAARALYPQNFDKKA

SEQ ID NO: 34587 - protein, 237 aa, Synechococcus sp. CC9605
MSVALAAQLREGTKKSHTMAENTGFVSCFLKGVVDKASYRKLVADLYFVYSAMEDEISKLTDHPVVAPVAMAQLNRREALEQDLTYYFGDSWQDNIQPSPSAAAYVERIHAVAKDSPELLVGHHYTRYLGDLSGGQILKNIAQKAMNMDGDDGLRFYVFDDIADEKAFKTTYRFAMDTLPIDQAMADRIVEEANHAFHLNMNMFKELEGNLVAAIGKVLFGFLTRRQRAGSTEAVAA

SEQ ID NO: 34588 - protein, 532 aa, Pseudomonas aeruginosa PAO1
MCGILGYVGTGFSVSRFAGALRLLAHRGPFGEGIAALPNGAIGMTRLPMSGAAAVPLPPQEGQRRVAYNGEVYQAGCEIHGEIRLLLDGLQRGVLPDGMYALASWDPQTRQLTLLRDEFGIKPLYYSYQPERGLLAFASEPRALLHLLGGARADAEAIAQVVAAGVPLEGQTLFQQVRLLLPGEVLRFDLSQERPRLCQRQRLATAPASEVDSLDEQLGETLERCRQTFRPCALLVSGGVDSNLLGSYLDPQLQRFHLCLEGDEESLLPHPRLQRFELRQEAFMPLLRRAVGNFGGATRMSSLLMYQRLADGIGEQGYHCVLLGEGADELFWGYPRHLELWRRRDTPEPRRFAAAWFGEYRRKAALLAEPAGRRVAERIEELAHEALGQGLEAAIGQFDLHYSLEPLLRRADHLLMSRTIEARTPYLHGALAQRAGRLQRIVGDTAKAPLVALLEQREKRWQAQPKRHFRLPFERWPQALGEMRRHLAERLPALHDLGLEGLDAPSVAALPGDQLFTLTTLSLWQQEYGASL

SEQ ID NO: 34589 - protein, 139 aa, Glycine max
IMDNCQENAMVLKEGLEGTGRFNIVSKDQGVPLVAFSLKDSSRHDEFEISEFLRRFGWIVPAYTMPPDAQHVTVLRVVIREDFSRTFAERLVIDIEKVLHELDALPSRSSGPALQHPNGDTVSEKDLARQREVVSVWKR

SEQ ID NO: 34590 - protein, 464 aa, Thermotoga maritima MSB8
MRYSLFKNYLPKEEVPEIRKELIKLALPAMGENVLQMLFGMADTAFLGHYSWKAMSGVGLSNQVFWVVQVVLIAASMGATVTIANAIGAGNRKAVRSLAWNSVFLAIFTGVILTALTPLSDVLINIFPNLEGEIESSAKEYLKVILSGSMGFSIMAVFSAMLRGAGDTRTPMIVTGLTNFLNIFLDYAMIFGKFGFPEMGVRGAAVATILSRFVGAGILTYVIFKREEFQLRKGLVPPKWSSQKEILRVGFPTAIENFVFSTGVLMFANILLIAGAEAYAGHRIGINVESLSFMPAFGISVAITTLVGRYNGMGNKEHVLGVIRQGWILSLLFQVTVGIIIFLFPEPLIRIFTSDPQIIEISKLPVKIIGLFQFFLAIDSTMNGALRGTGNTLPPMIITFISIWTARLPVAFVMVKYFQLGLLGAWIGMIADIIFRSTLKLLFFLSGKWEKRAVLTRERVKELG

SEQ ID NO: 34591 - protein, 520 aa, Brassica napus
  misc_feature (69)..(69): Xaa can be any naturally occurring amino acid
  misc_feature (96)..(96): Xaa can be any naturally occurring amino acid
  misc_feature (118)..(118): Xaa can be any naturally occurring amino acid
  misc_feature (140)..(140): Xaa can be any naturally occurring amino acid
  misc_feature (233)..(233): Xaa can be any naturally occurring amino acid
  misc_feature (252)..(252): Xaa can be any naturally occurring amino acid
  unsure (1)..(520): unsure at all Xaa locations
RPVASTIPKPQTLYLGIISASSSLWILSKYRPSIPFHAPFYTTNGGAPVSYNISSLTIGQRDPVLLEDXHLNLKVDNFNRERIPERVVLARGSSAXGFFEVTHDNSKLTCADVLRAPXGFQTPFIVRFSISRSRCRACPXESMRDIRGFAVKFYTREGNFDLVGNNTPVFFIRDGIQFPDVVHALKPNPNTNIQEYWRILDYMSHLPESLLTWCWMFDDVGIPQDYRHMEGFXGVHTYTLVSKSGKVLFVKXHWKPTCGIKNLTDEEAKVVGGANHSHATKDLHDAIASGNYPEWKLFIQTMDPADEDKFDFDPLDVTKIWPEDILPLQPVGRLVLNRTIDNFFNETEQLAFNPGLVVPGIYYSDDKLLQCRIFAYGDTQRHRLGPNYLQLPVNAPKCAHHNNHHEGFMNFMHRDEEINYYPSKFDPVRCAEKVPIPNKSYTGIRTKCIIKKENNFKQPGDRYRSWAPDRQDRFVKRWVEILSEPRLTHEIRSIWISYWSQADRSLGQKLASRLNVRPSI

SEQ ID NO: 34592 - protein, 405 aa, Haemophilus ducreyi 35000HP
MKRVVITGLGIISSIGNNKEEVLASLKEGKSGIEFVPEFAEVGMRSQIAGTVKLNPAELIDRKIYRFMGDAAAYAYLAMKEAIEDSALTETQVSNDRTGLVIGAGTGSAHSQLVACDAVRGPRGIKAVGPYAVTKTMASSVSACLATPYKIRGVNYSISSACATSAHCIGHAMELIQLGKQDIVFAGGAEELSWECATEFDAMGAVSTKYNDTPTKASRAYDANRDGFVIAGGGAVVVVEELEHALARGAKIYAEIVGYGATSDGYDMVAPSGEGAERCMRQALATVNGEIEYINVHGTSTPVGDVKELAAIKNVFADKKPAISSTKSMTGHSLGAAGAHEAIYSLLMLDNNFIAPSINITTLDEQAEGLNIVTECQHTPLTTVMSNSFGFGGTNAALVFQKYKG

SEQ ID NO: 34593 - protein, 252 aa, Prunus fruticosa
VDYKSEADVGNAIAEAIQSGLVKREELFITSKASNHGHVVEACKNSLKKLQLDYLDLYLVHYPLATKHNGVGATASLLDENKVLDIDVTVSLETTWHDMEKTVSLGLVRSIGLSNYELFLTRDCLSYAKIKPQVSQFETHPYFQRESLVRFCKKHGVIPMAHTPLGGATANVKAFGSISPLEDPVLLALAKKYQKSVAQIALRWNLERDTPVIPKSSKVERLKENLEVLNFKLEKEDIELINTIDKKSRTTL

SEQ ID NO: 34594 - protein, 330 aa, Oryza sativa (japonica cultivar-group)
MGRPPCCDNGVGVKKGPWTPEEDIILVSYIQQHGPGNWRSVPENTGLMRCSKSCRLRWTNYLRPGIKRGNFTPHEEGIIIHLQALLGNKWAAIASYLPQRTDNDIKNYWNTHLKKKVKRLQQQQQSHPDHHHHHSFQTTPSSSNAAAVATTSPNYYNPNNSNSNSSNYLHNNNHNLESMQSMATAPSNEATTIPKLFQFQTWMKPSPATTSSAATAAAGSCYKQAMAMQELQEEQEGSAAAAAMASSIDGVSKDQDYHMCAVISGDDKSSSSEMMTAAAMAGHGEAATTTFSLLENWLLDDMPGQAAMSAAMDGFLEISAGYCCADPIMF

SEQ ID NO: 34595 - protein, 661 aa, Oryza sativa (japonica cultivar-group)
MEETYTVKVGEATPAAGGKPSAGPVYRSIYSKDGLMKLPEDILSPWDFFSGAVKQYPKNKMLGQRKVSDGKAGDYVWLTYEEVYQKVIKIGSAIRSLRVKPGGHCGIYGSNCPEWVMAMQACNSQGICYVPLYDTLGANAVEFIMDHAEISIAFVQESKIQSVLSVVKRCRAHIKAIVSFGDVTSELKREAEQLGVSCFSWEEFSSMGKQNYELPKKQKDDICTIMYTSGTTGDPKGVIITNRALIAGVMTTEHLLKVTDKVVAEDDSYFSYLPLAHIFDQVIGNYCISKGASIGFWQADIRYLMEDVQMMKPTVFCGVPRVYDRIYTGINQKIQSGGMIAKSLFQYAYNYKLGNLRKGLKQDEASPFFDKIVFSKIKEGLGGRIRLLLSGAAPLPRHVEEFMRVTSCSVLVQGYGLTESCSGCFTSIANVFSMIGSVGPPVTTIEARLESIPEMGYDALSNVPRGEICLRGHTLFSGYYKRPDLTEEVFSDGWFHTGDIGEWQPDGTMKIIDRKKNIFKLSQGEYVAVEVLESAYVQSPLVTSVWVYGNSFESFLVAVVVPEKQAIEDWAAQNNKTGNFAELCNDPKARMYIQDELNKTGKRLGLRGFEMLKAIHLETTPFSIEKDLVTPTFKLKRPQLLKYYKDCIDQLYKDAKVGNKQ

SEQ ID NO: 34596 - protein, 255 aa, Sulfolobus solfataricus P2
MIRMELFSLKGRTAVVIGAGSGIGKAIAKLFTDLGGKVVASDVKGLEDLQSTYDTFKADITNVNDVRQLVEFSLNKLGEIYALYITPSINIRKRIENYTLDEFDRVVNLNLRGNFIVLKEFLKVMKENKNGGSIVLFSSIRHLVTEPGQAVYASTKAAIVQLAKTAAAEYGKYGLRVNVIAPGVVDTPFTQQIKNNPEWYRAYTEKTILKRWADPMEIASVAVFLAMPASSYITGTVIYVDGGWTAIDGRYEPDI

SEQ ID NO: 34597 - protein, 736 aa, Magnaporthe grisea 70-15
MSEAPQARRVGSVDDHSVYDDAKTYYTSEERHNNSRSGPRQRTYSQNSLLGQMERLGLKEPFRRGSHDESNHNRRFLIQVDPTLESLKSQEDTDGNMQITIEDNGPKVLTLRTAGSNGHNRFDIRGTYMLSNLLQELTLAQEYGRKQVILDEARLNENPVNRLSRLIRDHFWDALTRRIDASSIEVAAKDPKDWTDDPRPRIYVPKGAPEQLEYYKKLAADKPDIRLDVVELPETITPEYVVGINKAPGLLAVDMEETVDPKTGERVMSGRPFVVPGGRFNELYGWDSYMESLGLLVNDKVYLAKSMVLNFCFCIKHYGKILNATRSYYLCRSQPPFLTDMALRVYDKIRHEPDATEFLRTAILAAIKEYHSVWVAEPRLDPVTGLSRYRPEGTGVPPETEADHFLHILEPYYKKHNMTFKEFVEAYNFGRIREPELDKYFLHDRAVRESGHDTSYRLEGVCADLATVDLNTLLFKYETDIARTIRNVFGDKLVIPAEYCVGSLQPGQVETSAIWDRRSKRRKLAIDKYLWNEEAGMYFDYDTAKRQQCNYESCTTFWALWAGVASPKQAAIMVTRALPKFEAYGGLLSGTEESRGQIGLDRPNRQWDYPYGWAPQQMLAWTGLYRYSFTEEAERLAYKWLFMITKAFSDFNGVVVEKYDVTRPVDPHRVDAEYGNQGLGFKGVAKEGFGWVNASYIYGLQIINAHMRRALGTLTPYDTFIKALEDNRNRALSEMV

SEQ ID NO: 34598 - protein, 337 aa, Phaeosphaeria nodorum
MVVKVGINGFGRIGRIVFRNAIEHNDVEIVAVNDPFIEPHYAAYMLKYDSQHGQFKGDIKVEGNDLTINGKTIRFYTEKDPANIPWSETGAYYVVESTGVFTTTDKAKAHLKGGAKKVVISAPSADAPMFVMGVNNETYTKDIEVLSNASCTTNCLAPLAKVIHDKFTIIEGLMTTVHSYTATQKVVDGPSAKDWRGGRTAAQNIIPSSTGAAKAVGKVIPDLNGKLTGMSMRVPTSNVSVVDLTVRLEKGATYDEIKEAVKAAADGPLNGILGYTEDEIVSTDLNGDTRSSIFDAKAGISLNKNFVKLVSWYDNEWGYSRRVLDLLVYIAKVDGNA

SEQ ID NO: 34599 - protein, 80 aa, Fragaria x ananassa
MSCCGGKCGCGAGCKCGSGCNGCGNYADITEQSSASETLVMAVVGTQKLNYEQAEAGVATEGSCGGCKCVNCTCDPCTCK

SEQ ID NO: 34600 - protein, 512 aa, Arabidopsis thaliana
  misc_feature (282)..(282): Xaa can be any naturally occurring amino acid
  unsure (1)..(512): unsure at all Xaa locations
MEISVASVTISVVLAVVSWWIWRTLQWVWFKPKMLEHYLRRQGLAGTPYTPLVGDLKKNFTMLSEARSKPLKLTDDISPRVVPYPLQMFKTYGRTYFTWFGPIPTITIMDPEQIKEVFNKVYDFQKAHTFPLGRLIAAGLVSYDGDKWTKHRRIINPAFHLEKIKNMVPAFHQSCSEIVGEWDKLVTDKQSSCEVDIWPWLVSMTADVISRTAFGSSYKEGQRIFELQAELAQLIIQAFRKAIIPGYRYLPTKGNRRMKAAAREIKFILRGIVNKRLRARDXGEAPSDDLLGILLESNLGQTKGNGMSTEELMEECKLFYFAGQETTTVLLVWTMVLLSQHQDWQARAREEVKQVFGDKEPDAEGLNQLKVMTMILYEVLRLYPPVVQLTRAIHKEMQLGDLTLPGGVQISLPILLIQRDRELWGNDAGEFKPDRFKDGLSKATKNQVSFFPFAWGPRICIGQNFTLLEAKMAMSLILQRFSFELSPSYVHAPYTIITLYPQFGAHLMLHKL

SEQ ID NO: 34601 - protein, 543 aa, Gluconobacter oxydans 621H
MTRFVFITGGVVSSLGKGIASAALAALLQARGYKVRMRKLDPYLNVDPGTMSPYQHGEVFITDDGAETDLDLGHYERFTGVHASRADNTTTGRIYSDVIARERRGDYLGGTVQVIPHITDAIKDVVVTGTDDYDFVLVEIGGTVGDIESLPFLEAIRQLRNDLGHAQTMCVHLTLLPYIPAAGELKTKPTQHSVKELQNVGIQPQMLLCRSDRPIPDNERRKIANFCNVRPEAVIAALDVDTIYACPISYHNEGMDQEVLRYFDLPYDSKPDLSRWEKIVHAIREPEGEVRVAIVGKYTALLDSYKSLAEALLHGGIANHVKVKLDWIESEEFEKNGNIAERLKDADAILVPGGFGERGAEGKIQAVRYAREHNIPFLGICFGMQMAVIECARSLAGLPKASSTEFGPTDEPLVGLMTEWARGSEMLRRREGGDLGGTMRLGAYPAKLVPGSRVAEIYGRTEIRERHRHRWEVNAHYKDRLEKTGLRFSGLSPDGVLPEVVEYPDHAWFVAVQYHPELLSKPFDPHPLFAGFIAAAVKEAHRK

SEQ ID NO: 34602 - protein, 549 aa, Mycoplasma mobile 163K
MKLLKWQDKIIYQIFPRSFFDTSNDGNGDIKGIIKKLNYLSWLGVDALWLCPVYETEFADAGYDVLDYYKVWEKFGTLKDFKTLIKKAKELNIEIIMDIVLNHTSTSHEWFKKAIEDPTSKEFNYYIWQDKATDEKSIFGSSAWEYVPSIKKYYFHLFSISQADLNWENPATIDAMADVINYWYTLGVKGFRLDAIQHIHKDFSEKDTSFFSFGKKMTSLLQDLKSKIDKEDIFLIGESSGIQPELIPNWTEGKNKIVDNFFNFSWWWIGWNQISGRNGYNPDWSFKDFYSKQFIEYQESNKILDNAFTVFWSNHDTSRALSRWGNENIFWEESAKTLALFQFTLKGLMCIYYGEEIGMLNTFFDSKEELRDVDAINSFSFWVDEKKYYTENEMLRAHNINSRDNTRTPMLWDEKQVNFGFSKAKNTWIKLNQNSKNTSVEKQIKNPNSILNFYRKLIQLRKDSKFKNILLFGTSKVQTFNNFEVSSITREFNGEKIISYINLSSHSHSIVFPKNAEIILSSYSEQPFKIDYLRAYESIMFYTNEKKND

SEQ ID NO: 34603 - protein, 394 aa, Wolinella succinogenes
MMGEALDKEYVLHSYGRNYVQFTQGKNATLWDSEGKDYIDFASGIAVCSVGHGNERLAGAICDQAKKLIHTSNLYYIEPQARLAEKLVKLSGYDMRVFFANSGAEANEGAIKIARKFGESHEGEVKRYKIITLESSFHGRTITALKATGQEKMHHYFGPYPDGFVYAKNLDHVFKLVDEKTCAVLLELVQGEGGIEPQDREGIKKLERFLKERGVLLMVDEVQTGIYRSGELFASQAYGIVPDVITVAKGLAGGVPIGAVMTTLKDIFAPGDHGSTFGGNFLSTRAGLEVLSILESLYQEGTLQKSIDRFSAELRALCVEFPSLFECEVGLGLMRGIRAKSAEIQKSVIDEAFKKRVLVLRSGRNTVRFLPPLTLSEREMQEGFSRLREALKGI

SEQ ID NO: 34604 - protein, 124 aa, Oryza sativa
  misc_feature (91)..(91): Xaa can be any naturally occurring amino acid
  unsure (1)..(124): unsure at all Xaa locations
QSYAKNMGLYGERVGALSIVCGSADVAVRVESQLKLVIRPMYSNPPIHGASIVATILKDSAMFNEWTVELKGMADRIISMRQQLFDALKTXRETPGDLVTSFKPDPDMFTFQLGLKQVIQVGFH

SEQ ID NO: 34605 - protein, 391 aa, Mycoplasma mobile 163K
MNSKVSKIQAIIDTQDNGLNLSGIDSRKSFPLVNVLSRYRMIDFCLSNIVNSKINSVFIVIDKPNRHIFNYIDNGIFWDLNRINSGIKYLFAAGDTQNKKFSNIDAIFNNYTFLTEIDNNTEYVLFTNSDSVNRIDYEDMFKQLIENKADVIWAYKSIEIFDYNAENYKRAKILSFESNSKKIKTFGKNTFKNIKINLDIGIFILKKELFYQALIESMADNKINSIQEFIRNFYVSKWEIIGYEIKNFVGNFWTIEEYFRGQISLLLDEKNLSEILKPPLYTHEYNYSPSYYSKTANINNSLLGQNCVIDGEVINSIISNNVKIEKGAKVENCILLDNVIIKKNANLKNIIVDNDSIVSENKKIIAIEESPLVLKKSIHRKDQNEIIKVTR

SEQ ID NO: 34606 - protein, 593 aa, Arabidopsis thaliana
  misc_feature (378)..(378): Xaa can be any naturally occurring amino acid
  unsure (1)..(593): unsure at all Xaa locations
MEAKIVKVLDSSRCEDGFGKKRKRAASYAAYVTGVSCAKLQNVPPPNGQCQIPDKRRRLEGENKLSAYENRSGKALVRYYTYFKKTGIAKRVMMYENGEWNDLPEHVICAIQNELEEKSAAIEFKLCGHSFILDFLHMQRLDMETGAKTPLAWIDNAGKCFFPEIYESDERTNYCHHKCVEDPKQNAPHDIKLRLEIDVNGGETPRLNLEECSDESGDNMMDDVPLAQRSSNEHYDEATEDSCSRKLEAAVSKWDETDAIVVSGAKLTGSEVLDKDAVKKMFAVGTASLGHVPVLDVGRFSSEIAEARLALFQKQVEITKKHRGDANVRYAWLPAKREVLSAVMMQGLGVGGAFIRKSIYGVGIHLTAADCPYFRYLXSARYCDVDENGVRYMVLCRVIMGNMELLRGDKAQFFSGGEEYDNGVDDIESPKNYIVWNINMNTHIFPEFVVRFKLSNLPNAEGNLIAKRDNSGVTLEGPKDLPPQLESNQGARGSGSANSVGSSTTRPKSPWMPFPTLFAAISHKVAENDMLLINADYQQLRDKKMTRAEFVRKLRVIVGDDLLRSTITTLQNQPKSKEIPGSIRDHEEGAGGL

SEQ ID NO: 34607 - protein, 381 aa, Mycoplasma mobile 163K
MVKKEMIAMILAGGQGTRLKNLTKKIAKPAVPFGAKYRIIDFTLSNCINSGIDTVGVLTQYRPLSLLKHIGSGIPFDLNRLNGGVVLLSPYVKESEGYWYAGTAHAIFENIDFMNEYDPTYALILSGDHIYKMDYSKMLDFHKEKNANVTIATINVSFEEASRFGILNTNENNMVEEFEEKPKIPKSTKASMGVYIFNYQLLKDTFEELKSKGNNFQDFGHNILPYILKKYSKIFAYEFNGYWKDVGTISTFYEANLDLIKNHKNLDLREKNWTIFTKSSSHSPQYITSGGNVVNSLVANGAKIEGHVSNSVIFENVKIGKNTIIEDSVIMSNAIIGENSFIKKTIIMENTVVKEKMVLNSLNNQSLNEEDGIILYDGKEK

SEQ ID NO: 34608 - protein, 546 aa, Wolinella succinogenes
MASKEINFSDSARNKLYEGVRQLADAVKVTMGPRGRNVLIQKSFGAPSITKDGVSVAKEIELADAISNMGAQLVKEVASKTADAAGDGTTTATVLAHGIFKEGLRNITAGANPIEVKRGMDKATAAIIDELKKLSKKVNDKKEIAQVATISANSDENIGSLIAEAMEKVGKDGVITVEEAKGINDELNVVEGMQFDRGYLSPYFVTNSDKMEAVLENPYILLTDKKITSMKDILPLLEGTMKSGRPLLIVAEDIEGEALTTLVVNKLRGVLNVAAVKAPGFGDRRKEMLKDIATLTGGSVISEEIGKTLESATIADLGQAARVVIDKDNSTIVDGKGSKDEVNARVAQIRTQIEATTSDYDREKLQERLAKLSGGVAVIKVGAASEVEMKEKKDRVDDALSATKAAVEEGIVIGGGAALIRAAAKVKLELSGDEKIGYEIIKRAISAPLKQIAQNAGFDAGVVANNVEQNGNENFGFNAANGEYVDMFAEGIIDPLKVARIALQNAVSVSSLLLTTEATISEIKEDKPAMPDMSGMGGMGGMGGMM

SEQ ID NO: 34609 - protein, 237 aa, Pseudomonas fluorescens Pf-5
MAISDLQLPAGVRAHEFRSPTLLAEGQALKVAELLREAIAARGNAILVVSGGRSPVAFFQALVKQELDWSKVLITLADERWVPVEHADSNAGLLKRYLLQGPVAKARFLGLYSAAANLEEAALQADSLLAELPGIDVLVLGMGDDGHTASLFPNSPNLAEALKADGTRRCWPMLAPSVPHQRLSMSRALLASARNSLLSISGQSKLTTLSAALAGDAVAEMPIRAFLQTPLEIYWCP

SEQ ID NO: 34610 - protein, 89 aa, Wolinella succinogenes
MNFKPLGQRVLVERLEEDTKTASGIIIPDNAKEKPLMGTVKALSEEVAKEGLLKAGSQVVFAKYSGTDVKLEGKEYLILKVEDLLGTIE

SEQ ID NO: 34611 - protein, 528 aa, Oryza sativa
METRATECRTMQLLRELQTNKLDTSSKIIYAPRQQDDIYAGIMPELPLDKLPEDILHHVYSLMPLKDAARAACVSHGFLRCWRRYPILVLNSKTIGLAKRKLSLYAEDVPLYEPALKVDDMESYAISKIDHIINNHSGIGVKVFKLQLFACPNIDAAVLDKWFVHVIKAGIKELSLEMSLCKKRTEYNFPCSILSSKAGGGTIQSLFLSSCSFHPTVALGCNISLTSLHLYEVHISGEEIGQFLSNSFALERLVISDCNDIIQFKVPCLMQQLKYLQVTKCEMLEVISIDAPKLSSFIYGDVGIQISLGDPLQVKDIRLMGYNQPNTVCFARTELPSIMPNVESLIVSSTDEMISTPMVPIKFLHLKLLEIYLAELLAFPPNYDFFSLVSFLDGSPALETFILHVKQRCERRDSILDGEHTNLRQILHPRHANLQNVTITGFNSTKSMIELTSHILENAPSLKCITLDTANFYDKSLLTMGECLPMRKGGILEARKAFDAAKRYIAGKVPSHVEYKFLEPCRKCHIGY

SEQ ID NO: 34612 - protein, 208 aa, Pyrobaculum aerophilum str. IM2
MTEEMQYEYLVPLEKYLSAGVRLGTRLSNKYLEDRGFIFAVRPDGLRIFDIKKIDERLKIAAKFIARYRPERVLVHTTRPYGFKPVQMFCKFVGCKALTGRFIPGTLTNPNLPHYQEVDLLFVVDPKLDAQAVAEAAKMGIPVIALVDTDTPHQYIDFMIPCNNKGRKSLALIFWILARQVLRERGELKPDQDLPVPPEEFETKLVQS

SEQ ID NO: 34613 - protein, 130 aa, Pasteurella multocida subsp. multocida str. Pm70
MKKREDMTEMQVHVCLNQGTEYPFTGKLLDQQKKGLYRCVVCHSPLFVSDTKFDAGCGWPSFFQAISPEAIRYLDDYTLSRPRTEIRCGQCDAHLGHVFEDGPPPTGLRYCVNSVSMAFEDSETGELIEG

SEQ ID NO: 34614 - protein, 461 aa, Pyrobaculum aerophilum str. IM2
MSAPRGDHAILRARNLTKRVATLGPSTDVLRPDELIKFLDLVDGVRINLAHASPNEVKFRIEAVRSYEKAKNRPLAVIVDLKGPSIRVGSTSPINVQEGEVVKFKLSDKSDGTYIPVPNKAFFSAVEQNDVILMLDGRLRLKVTNTGSDWIEAVAESSGVITGGKAIVVEGKDYDISTPAEEDVEALKAISPIRDNIDYVAISLAKSCKDVDSVRSLLTELGFQSQVAVKIETKGAVNNLEELVQCSDYVVVARGDLGLHYGLDALPIVQRRIVHTSLKYGKPIAVATQLLDSMQSSPIPTRAEINDVFTTASMGVDSLWLTNETASGKYPLAAVSWLSRILMNVEYQIPQSPLLQNSRDRFAKGLVELAQDLGANILVFSMSGTLARRIAKFRPRGVVYVGTPNVRVARSLSIVWALEPLYIPAENYEEGLEKLISLKGTTPFVATYGIRGGVHSVKVKL

SEQ ID NO: 34615 - protein, 334 aa, Pasteurella multocida subsp. multocida str. Pm70
MAIKIGINGFGRIGRIVFRAAQHRDDIEVVGINDLIDVEYMAYMLKYDSTHGRFDGTVEVKDGNLVVNGKTIRVTAERDPANLKWNEIGVEIAVEATGLFLDDATARKHITAGAKKVVLTGPSKDATPMFVSGVNFDTYAGQDIVSNASCTTNCLAPLAKVINDKFGIKDGLMTTVHATTATQKTVDGPSAKDWRGGRGAAQNIIPSSTGAAKAVGKVIPALNGKLTGMAFRVPTPNVSVVDLTVNLEKPATYAEICAEIKRASENEMKGVLGYTEDAVVSTDFNGCALTSVFDAAAGIALTDTFVKLVSWYDNETGYSNKVLDLVAHVYNYKG

SEQ ID NO: 34616 - protein, 656 aa, Burkholderia cenocepacia
MCGIDGFLNSVAFDEETARGTLARMTASLAHRGPDGQGIWVDPEAGIALGHRRLAIVDLSVHGRQPMASACGRYVLVFNGEIYNHRELRAELERAGRAPAWRGHSDSEVLIAAIVAWGVEATLRRATGMFAFALWNRASRVLTLARDRIGEKPLYYGRIGDALVFASELKALRGYPGFDGTVDRDALCLYLRQSSVPAPYTIYRGIRKLPPGTYIQFEHARDTPRLRAYWTLEQVIEAGRAQPFEGTPDEAVGQLDAILRQAVARQMEADVPLGAFLSGGVDSSAIVALMQAQSATPVDTFTIGFHEAGYDEAGYAKAVARHLGTRHTELYVTADHALGVVPKLPSIYDEPFSDASQIPTFLVSELTRRHVKVSLSGDGGDELFGGYTRYFLTPRLWRKLHRVPGAVRARIAAALHALRPDHADQLAAVAQGAWGGGVEARESTSRIGDRLHKLGHVMTAESRIGLYRLLMSSVHHPERIALSGQEPPTPLDTVSAWPAHLSFAEQAMAIDTLTYLPTDILAKVDRAAMAVSLETRMPFLDHHVVEFAWRVPASVRLPEGQSKALLRRLLDRYVPSALIDRPKQGFCAPVDHWLRGALRDWAEALLRPSRLREEGFFDAAAVERLWRQHQTGRMNWQHQLWTVLMFQAWLEAQRAA

SEQ ID NO: 34617 - protein, 606 aa, Pasteurella multocida subsp. multocida str. Pm70
MTNLNLHFVNRIREQAKLLLNETALRYHTPSGWENISWHQFQQDLDTFSYALLANHIGVQDKIAIFAHNMPRWTIADIGTMQVRAVVVPIYATSAAKQVEYILNNADVKILFVGDQEEYNCTLEIIDACPQIQKIVAMKDNLDLKNHPKACDWQTFLLEGSPLQQTALQERLEQKQLTDLFTLIYTSGTTGEPKGVMLDYANLAHQLKAHDEAFTTLNVSQYDSSLSFLPLSHIFERAWVAYVLHRGAVNCYLEDTNRVREALSEIRPTLMCAVPRFYEKIYTAVWDKVQKAPLFRRMIFNWAIAVGQKRFQFISQKKPIPFVLRQQYALADKLVLSKLRQLLGGRIRMMPCGGAKLEPNIGLFFHSIGINVKLGYGMTETTATVSCWEEGHFEPNSIGTLMPGAEVKIGENNEILVRGGMVMRGYYKKPQETADSFTEDGFLKTGDAGEFDPQGNLYITDRIKELMKTSNGKYIAPQYIETKVGKDKFIEQIAVIADAKKYVSALIVPCFNSLEEYAKQLNIKYHDRLELIKHSDILQMFEQRINDLQKELPSFEQIKKFTLLPQAFTTKMEEITPTLKLRRKVILERYKAQIEAMYKEYTHKKD

SEQ ID NO: 34618 - protein, 467 aa, Acinetobacter sp. ADP1
MCMGMVFMKSGFLQKGMYAVAFTMVTVQAEAAAPVDFSNLVEQVSPAVVSVSVVKKMTQEELLQQQVPEILRRFFGNQVVIPQQQAPQEKTGYGSAFFISKDGYLLTNHHVVEDASRITITLNDRREIDAKVVGSDERTDVALLKVEGNNYPALKIGNVDQLKVGQPVLAIGSPFGFDYSASAGIVSAKSRNMIGETSVPFIQTDVALNPGNSGGPLFNQQGEVVGVNSRIFSGTGGYMGLSFSIPIDVAMDVAQQLKTTGKVTRSYLGVMLQDIDRNLADAYNLPKPEGSLINQVAPNSPAAKAGLKAGDIIMKYNGSPISRTSQLLNYLNRTMPKQVIQLEILRDGKPYNISATLTTAPDDTPATGEKASAANGPLLGMAIRNLTETEQARLDVRGGIFVEDVTRGGLAAMSNIMPRDVITQVNSTAILNTNDFSKAVATLPKNSVARIALIRQGQRAMLGLRIK

SEQ ID NO: 34619 - protein, 602 aa, Thiomicrospira crunogena XCL-2
MCGICGEIYWDGQMASETKLVPMLAELEKRGPDDGGTWVQNHVGLGHRRLSIIDLSDGGHQPMLDDEISLVFNGCIYNYETLSAELIELGHEFRSHSDTEVILKAYRQWGMECVSRFEGMFAFAIWDDHQHQLLLARDRFGIKPLYYAPVEGGVRFASNTQALLASGGINTDIDPVGLHHQFTLHAVVPAPHTILKGIRKLEPGHWMIVNPDGQMYKKSYWHLEAKRPTADNAPQTEKEWIDAIHESLKQAVHKRLTAADVPVGVLLSGGLDSSLIVALLAEAGVEDIRTFSIGFEDVPEEKGSEFEYSDLVVEQYQTAHQKYLIPNETVLPRLTEAVDAMAEPMFGQDAIAFYLLSEKVSEDVKVVMSGQGADEVFAGYFWYPMMAKAAESLKDASRPVDAFAPYYFDRSHEEWLEMIEDEFHVYDVTSELINDRLSDKGADSYLDQVLRLDTTTLIVDDPVKRVDNMTMAWGLEARVPFLDHHLVELAMSAPTDLKLKDFKYILKKIARGIVPNEVIDRPKGYFPMPALKYVRGPFYEMMKSILTSPQAKARGIFKPAYIQKLLDHPEADESFTAIKGSKLWHAALLELWLQRHVDPYVQ

SEQ ID NO: 34620 - protein, 567 aa, Arabidopsis thaliana
MLTKPGKKLDSSEFDIFFFFVIIVQSTHHTTSSNYPPLDIVHQTPQPRKEMQQKPLFDPKKMDNLIKPEPAGFTNHHRPNPSPKIPSSPGSNMTESQSNLNTKPNNNNSNNNSNMSSRSNSIESTSSNPSKPHTGGDIRWDAVNTLTSKGVQLGISDFRLLKRLGYGDIGSVYLVELRGTITYFAMKVMDKASLASRNKLLRAQTEREILSQLDHPFLPTLYSHFETDKFYCLVMEFCGGGNLYSLRQKQPNKCFTEDAARFFASEVLLALEYLHMLGIVYRDLKPENVLVRDDGHIMLSDFDLSLRCSVSPTLVKSSSVHAAGGGSGSSRPVGLIDEDAAVQGCIQPSTFFPRILQSSKKNRKAKSDFGLFVNGSMPELMAEPTNVKSMSFVGTHEYLAPEIIRGEGHGSAVDWWTFGIFIYELLYGATPFKGQGNRATLHNVIGQALRFPEVPHVSSAARDLIKGLLVKEPQKRIAYKRGATEIKQHPFFEGVNWALIRSATPPHVPEPVDFSCYASKDKESMAAVDGGGKKNNNGAGGGCSTGGGDNKPNGDCNDPDYIDFEYF

SEQ ID NO: 34621 - protein, 207 aa, Hypocrea jecorina
MLEAPIMVSSGSSDLPLQLNPWEAQALNYGFPQEPSTNGHAGSNSNNNNNTPAWIQLPDPIIYPGIYSASGIDVMGILLRIASRPNPTIDLGPLDCSVSLTLCDISLPDAPIVYASPGFYQLTGYSAPEIMGRNCRFLQNSPHMPPPGRVSDAVQEMRRAIRAHQEVQVRIVNYKKNGTPFTNVVTILPLWADPSGHHFAVGLQAEL

SEQ ID NO: 34622 - protein, 298 aa, Arabidopsis thaliana
VISGCSNTGGPSLELTSLFPIFSTPRLSINDPSYLSRALAVSGVGKLHQAYSFWKWGALLLLAFFASFTSLTTRIKTLVFRLRNVNVSLPSQTLLCNYDSDSDWSFSSDSSDEEKDEDDNKEDDSVNGDSRVQRFGYYHDDDDKGISGSVPWLRRCSGSFGDLLDLGSSGVVKLWDNLDFNGEGSPVASFFSKCGSYSLLSSAVLLAAEKKGSDGLEVSAWDARVGFGVPALLAEWKQPGRLLGKIIRVDVGDVDKIYVGDDVEGEITVGDMRMVNGALTELTESEVERMVRRRRRRH

SEQ ID NO: 34623 - protein, 334 aa, Gluconobacter oxydans 621H
MDETPSASGRSNGPALSPETMKRAYRDMLLVRRFEEKAGQLYGMGLIGGFCHLYIGQEAVVVGIGLNMKQGDKSITSYRDHGQMLVAGMTPRGVMAELTGRSGGYSHGKGGSMHMFSREKEFYGGHGIVGAQVALGTGLAFANKYRGTDEVSIVYFGEGASAQGQVYESFNLAALHKLPCIYVIENNRYGMGTSIERASASKDLSRNGEPWGIASRKVDGMDIFAVHEAAQEAMEYCRSGKGPFLLEMETYRYRGHSMSDPAKYRQRAEVEEMRRTRDPIETLKAEMLRSGIEESVFKDIETDVKAIVADATEFAQTSPEPDVSELWTDILVEA

SEQ ID NO: 34624 - protein, 386 aa, Oryza sativa
MDHRLLLLGLLLLSPAVAAASVPGEEEPLIRQVVGGGDDNELELNAERHFASFVQRFGKSYRDADEHAYRLSVFKANLRRARRHQLLDPSAEHGVTKFSDLTPAEFRRAYLGLRTSRRAFLRGLGGSAHEAPVLPTDGLPDDFDWRDHGAVGPVKNQGSCGSCWSFSASGALEGANYLATGKMDVLSEQQMVDCDHEVYEIREFMHPCVLCDSSEPDSCDAGCNGGLMTNAFSYLLKSGGLESEKDYPSPGRDGPCKFDKSKIVTSVQNFSVVSVDEDQIAATLVKHGPLAIGINAGYMQTYIGGVSCPYICGRPLDPGVFFVGYGASGFAPIPLKDKAYWIIKNSWGENWGEHGYYKICRGSNVRNKCGGDFMVSPVFAIPPSKE

SEQ ID NO: 34625 - protein, 219 aa, Glycine max
MSSTAAPVLPISNPQTTAAGGGAIEAPANNPAFRAFINNLSASLRHGLDQRRPWSELGDRSAFSKPESFSEATLRVRKNFSYFRVNYYAVVSLILAVSLLTNPFSLILLVGLLASWTFLYLFRPSDQPLVILGRTFSDFETLALLSAFTVFVVFLTSVGSVLVSALMLGVAVVCLHGAFRVPEDLFLDDQDNSQATGFLSFLRGPAASATAVPTVAARV

SEQ ID NO: 34626 - protein, 468 aa, Gluconobacter oxydans 621H
MCDTFDLIVVGGGPGGYVAALRASQLGMSVALVESTHFGGVCLNWGCIPTKALLRSSEIHHLLHELGTFGLSADNISFDLSKIVGRSRSIARRMGGGIAHLLKKTKVTTFDGRAKLAGRSGEAHQVAITKDGAAVATIKAPHVILATGARGRQLPGLETDGTLIWGAREAMTPKELPKRLLVIGSGAIGIEFASFYRNMGSEVTIAEVADRILIAEDPEISAAARKAFEKQGMKIITSAKVGPLNKGENEVSTTIESPTGKVDLTVDRVICAVGIVGNVEDLGLEGTKVQVERTHIVTDGFCRTGEPGIYAIGDVAGAPWLAHKASHEGILCVEKIAGRSPQPLHPLNIPGCTYSRPQIASVGLSEEKAIAAGHKVKVGRFPFIANGKAVAMGETDGMVKTVFDATSGELLGAHMIGAEVTEMIQGYVITRTGELTEAELVETVFPHPTISETMHEATLAAFDGPLHI

SEQ ID NO: 34627 - protein, 249 aa, Xylella fastidiosa Temecula1
MTRKLVLLRHGQSQWNSMNRFTGWVDIGLTEQGHQEATMAGHLMKKEGLEFDVAHTSLLKRAIHTLQDALKALDQDWLPIYKSWRLNERHYGALQGLDKIDTAAKHGEEQVNIWRRSYDIQPPPIDLDDPSHPMRDRRYAALDRKVLPVRESLKNTLERVLPYWNDAIAPQLNDNKTVLISAHGNSLRALYKYLNKESDEKILNVNIPTGIPLLFELSDTLQVVSYRYLGDPDAAQRAAEMVANQGKAK

SEQ ID NO: 34628 - protein, 348 aa, Zea mays
MAKYGEGDKRWIVEERADGTNVHNWHWAERDCLEWSRARLSSLLAGLTILDGEGGLSLRTVALDKLDGEAYVNIRKGKVIPGYELSLTLSWEAEAASESGAAKVTGTAEVPYLADENADEDPDLRVTVRGDETPLALRAKDAFLSRGKPMVLEKIREFVAAMAKGGPAKDELDSKKTPTKVAGSAPAKEAVLAPAPAVEKKKAKGKDKEGFKTIEMTEKFYCRSKDIYEILMDENRWKGFTQSNARISREVGGEFSLFDGSITGVNEELQEGKLIAQKWRFGSWPDGLYSSVRLVFDEPESGVTIIKLKQTDVPEEDKYGNSTVVENTERGWRELIFQRIRGVFGFGI

SEQ ID NO: 34629 - protein, 340 aa, Schizosaccharomyces pombe
MFKRRRNPKGLVLNPNASVKSSDNDHKEELINNQKSFESNVEAFMEQCAHMNRRPAWISDLDNSSLEVVRHLGEGNGGAVSLVKHRNIFMARKTVYVGSDSKLQKQILRELGVLHHCRSPYIVGFYGAFQYKNNISLCMEYMDCGSLDAILREGGPIPLDILGKIINSMVKGLIYLYNVLHIIHRDLKPSNVVVNSRGEIKLCDFGVSGELVNSVAQTFVGTSTYMSPERIRGGKYTVKSDIWSLGISIIELATQELPWSFSNIDDSIGILDLLHCIVQEEPPRLPSSFPEDLRLFVDACLHKDPTLRASPQQLCAMPYFQQALMINVDLASWASNFRSS

SEQ ID NO: 34630 - protein, 150 aa, Triticum aestivum
MSSPSRRSSSPESNIDGGSGSGSAGDERKRKRMLSNRESARRSRARKQQRMEELIAEASRLQAENARVEAQIGAYTTELTKVDGENAVLRARHGELAGRLQALGGVLEIFHVAGAPVDIPEIPDPLLRPWQSPFAPQLAAAGGMPDAFQF

SEQ ID NO: 34631 - protein, 168 aa, Xylella fastidiosa Temecula1
MSSIYTFTFTRLDGRPQALADWRGQVLLLVNVASRCGFTPQYAGLEMLWQRYRDAGLIVIGFPCDQFAGQEPGDEAKIAEFCTLTYGVDFPMAAKIKVNGADAHPLWQWLKHRRRGLFGVAAIKWNFTKFLIGRNGQPIARYSPIKSPEQLEVHIVRALGEEGGGNTH

SEQ ID NO: 34632 - protein, 334 aa, Glycine max
MSSGSVRRVSRQDIQLVQNLIERCLQLYMSQKEVVETLLAQAKIEPGFTELVWQKLEEENEEFFKAYYARLVLKQQIMQFNKLLDQQVQLMQLHSSAVASLPMSNGSHIPAVTSLPNSNGSHIPAIPENPACYTSDRTQTSLKPENMQHAVDSRLSNVFNNGGSSLHTSMPAAVDMSVHGNRINGPASVLSAQSANMGLIQGINGGGMIKSEPGYSGCSPYMFSTDGNVLETRPTIGGASVTSFTNVESNSHSLNEAVLDPDTSSFGFLGQIPRNFSLSDLTADFSQSSDILETYSRSPFLATDNENFLDRGEQDNNRLDSISEGLSYEDFGSE

SEQ ID NO: 34633 - protein, 540 aa, Mycoplasma mobile 163K
MEEKMSKTKFIFVTGGVVSGLGKGVSAASLGNILKARGFSIFVQKLDPYLNVDPGVMSPYEHGEVFVTSDGGETDLDLGHYERFINTKFTKESNYTSGSILNNIIQREREGEFLGKTVQVIPHVTDEIIAVIKNAANKYQPDFIITEIGGTVGDIESNPFFYAIAQLGAKNRDDIFFIHVSYIIYLQSSQEWKTKPSQVSLEKLRSFGINANMLFLRSEKELPSFIREKASTFSLLSYENVIPIPDSSSIYKIPLYLEAQNVAKIILDHFKMENPIPNLEKWEKFVNLIDKPKGLEIKLAMLGKYTEFPDAYKSIVEALFVSSTYENVKVVLTWLSSENIKEDNIELTLGKFDGVVILPGFGIRGWHGKIVASSWLKKVNIPTFGICLGFQAMVIAQAREKGIKDADSAEFSKKGTMVLNTIQESTKGSSLGGTLRLGEYDVNVEKNTLAFDIYKSTKISERHRHRYEVQPEFQKILSDDEFIFSGFNKKLNTPEICEVKNLDFYLGTQYHPEFNSTPLEPQKLFSAFIQSIKKRKLNSK

SEQ ID NO: 34634 - protein, 332 aa, Cicer arietinum
MAKDPVRVLVTGAAGQIGYALVPMIARGVMLGPDQPVILHMLDIPPAAESLNGVKMELVDAAFPLLKGVVATTDVVEACTGVNIAVMVGGFPRKEGMERKDVMSKNVSIYKSQASALEQHAAANCKVLVVANPANTNALILKEFAPSIPEKNISCLTRLDHNRALGQISERLSVQVSEIKNVIIWGNHSSTQYPDVTHATVKTPAGEKPVRELVSDDAWLNGEFIPTVQQRGAAIIKARKLSSALSAASAACDHIRDWVLGTPEGTFVSMGVYSDGSYNVPAGLIYSFPVTCAGGEWKIVQGLSIDEFSRKKLDLTAEELSEEKNLAYSCLS

SEQ ID NO: 34635 - protein, 312 aa, Arabidopsis thaliana
MQIFVKTLTGKTITLEVESSDTIDNVKAKIQDKEGIPPDQQRLIFAGKQLEDGRTLADYNIQKESTLHLVLRLRGGMQIFVKTLTGKTITLEVESSDTIDNVKAKIQDKEGIPPDQQRLIFAGKQLEDGRTLADYNIQKESTLHLVLRLRGGMQIFVKTLTGKTITLEVESSDTIDNVKAKIQDKEGIPPDQQRLIFAGKQLEDGRTLADYNIQKESTLHLVLRLRGGMQIFVKTLTGKTITLEVESSDTIDNVKAKIQDKEVFLRTSSVSSSLESSLRMDVLWPTTTSRRSLLFTWSCVFVVVSKSRLCYA

SEQ ID NO: 34636 - protein, 468 aa, Chromobacterium violaceum ATCC 12472
MKTPPQSSCPFHAVGRPPTPPRSSAGRWPPGPESGLTGWGLLKLMSRDLMGTLAGWQREFGDLVHVRTWPEHQVIVSDPQLARELLVNQADALQRWERALTVYRRVHGHSVLIAEGQVWREKRQALQPDFTRKSVQAFSPSIVEAARRAFEQWPARHAAWPIESELTSVTMEVILRMMFSSGVGSEAQQAEEAVHTLMVASTEELWRPASLPDWVPWQRKRRRARLLMNGLIERHLQARLAMPQDAWPEDLLSRLLRLHLQQPQSWPLQAVRDECKTAFLAGHETVATSLTWWAWCMASHPEIQERAREEALAALSGGGQADPAALQYVSQTLLETMRLYPAVPLLMSRRALKPVTLGDWTFPAKTVFMVPMQLMQHDERWFPEPRSYRPERFGPDAARPQQGAYLPFGGGPRVCLGQHLAMAEMALVAAQLLLRYRLSAPEGAEPPRPVFHVSQRPSQPLTLGIARI

SEQ ID NO: 34637 - protein, 543 aa, Clostridium tetani E88
MEMAKSIMFGEDARRSMQKGVDILADTVKVTMGPKGRNVVLDKKFGAPLITNDGVTIAREIELEDAYENMGAQLVKEVATKTNDVAGDGTTTATLLAQAIIREGLKNVTGGANPMLVRRGIQMAVEEAVKGIKEISKPVEGKEDIARVAAISADDKEIGKLIADAMEKVGNEGVITVEESNTMGTELDVVEGMQFDRGYVSPYMVTDTEKMEASLDDAYILITDKKITNIQEILPVLEQIVQQGKRLLIISEDIEGEALATLVVNKLRGTFTCVAVKAPGFGDRRKEMLEDIATLTGGQVISEEIGRDLKDVTVDMLGRAESVKITKETTTIVNGKGNKKEIEDRVNQIKAQIEETTSEFDREKLQERLAKLAGGVAVIKVGAATETELKERKLRIEDALAATKAAVEEGIIPGGGTAYAMVIKEVEKLNSETHDIKLGIDIVKKSLEEPVRQIACNAGVEGSIVIEKVKHSEAGIGYDALNNEYVNMIKAGIVDPTKVSRSALQNAASVASTFLTTEAAIADIPEKNDTPMPGAPGMMDGMY

SEQ ID NO: 34638 - protein, 93 aa, Pirellula sp. 1
MQPLGERIVVQREESETTTAGGIVLPDSAKEKPARGTVVALGTGKLLDDGSRADFQLAAGDRVLFSSYAGETVEVDDTEYLLMREDDVLAVIE

SEQ ID NO: 34639 - protein, 539 aa, Pirellula sp. 1
MPKIIAFDQEAREAIRRGVSKLARTVKVTLGPKGRNVILQKSFGSPTVTKDGVTVAKEIELEDPYENMGASMVREVASKTSDVAGDGTTTATVMAEAIFNEGLKAVVAGVNPIQMKSGIETAVSDITEQLHSMAVKVKDQEAMANVATIASNNDREIGTLLADAMSKVGKDGVITVDEGKSLQTEQEWVEGMQFDRGYLSPYFVTDSTSMEVVLEDAYVLVFEKKISNIKDMVPLLEKVVQQGKPLLIIAEDVDGEALATLVINRLRGTFTVCAVKAPGYGDRRKAMMEDIAILTGGQAIFEALGVKLESVDLPQLGRAKKIIVDKDNTTVIEGGGKSADIKARIDQIRREIELSTSDYDREKLEERLAKLAGGVAKVNVGAATESEMKEKKARVEDALHATRAAVEEGILPGGGVALLRASGKVKAADTLTDDQLVGYNIVLRACRAPLTMISENAGQDGGIVCEKVLAMKGNEGYNALTDVYEDLVKSGVIDPTKVTRTALGNAASVATLLLTSDALVAEKPEKSGKAGHGGDHDMY

SEQ ID NO: 34640 - protein, 434 aa, Oryza sativa
MESRGKILMERYELGRLLGKGTFGKVHYARNLESNQSVAIKMMDKQQILKVGLSEQIRREITTMRLVAHKNIVQLHEVMATRNKIYFVMEYVKGGELFEKVAKRGKLTEVVAHKYFQQLISAVDYCHSRGVYHRDLKPENLLLDENENLKVSDFGLSALSESKRQDGLLHTTCGTPAYVAPEVISKIGYDGAKSDIWSCGVILFVLVAGYLPFQGPNLMEMYRKIQHGEFRCPGWFSRKLQKLLYKIMDPNPSTRISIQKIKESTWFRKGPEENRILKERTLNENTTKNVAPVLGVRRKKNAHEDVKPMSVTNLNAFEIISFSKGFDLSGMFIVKEWRNEARFTSDKSASTIISKLEDVAKALNLRVRKKDNGVVKMQGRKEGRNGVLQFDIEIFEVTTSYHIIEMKQTSGDSLEYRQLLEEGIRPALKDIVLA

SEQ ID NO: 34641 - protein, 420 aa, Pasteurella multocida subsp. multocida str. Pm70 [sequence omitted]

SEQ ID NO: 34642 - protein, 222 aa, Saccharomyces cerevisiae
SELLPKLRQIFQQFGKDLLATHGNDIQVPESQVKSNYTRGNQKSSFTEIKDSASKPKKNALPSSTSTSAPVSSTNKVPQNGSGNSTSIYLEPTFNVPSSELYETFLDKQRILAWTRSAQFFNSGPKLETKEKFELFGGNVISELVSCEKDKKLVFHWKLKDWSAPFNSTIEMTFHESQEFHETKLQVKWTGIPVGEEDRVRANFEEYYVRSIKLTFGFGAVL

SEQ ID NO: 34643 - protein, 305 aa, Pyrobaculum aerophilum str. IM2
MIVASIGNLNFDIYLKVSELPGPDENVEALDLYTGGGGSAANFAVAIAKMGLSARFIGAVGEDPLGEISLRELRAEGVDVSFVKRVRGVRSGVVVVLVHPDGVKRMVSYRGANLGLTPADLTVDKFAGVKHIHLATGRTELILKAKEIAREIGASISVDGGTALARKGLEIVRAAVEGVDVVFMNHVEAQLVANAGDHKSAVEKLARELKVGELVVTLGPIGAVAFKNGRLLHVDAFKVNAVDTTGAGDCFAAAYITMYLRGRDLYERLLFANAAAAIKVTRPSARASPRYDEVVAFLESLGYKI

SEQ ID NO: 34644 - protein, 225 aa, Pyrobaculum aerophilum str. IM2
MKAVILAAGLGTRLRPLTFFIPKPLAFINSKPLISHVIEWLRLNGVREIAVVGFYMQVLLERFLSERHPDVVFFKSRKLLGTAGQLYYAKEWVDGDVAVVNTDVLTNLDLKYPLELHKRESALLTIVGQRYKASLRFGVLEVENAVLRAWREKPSFEYITSTGIYIISAEAVKKLGEEFLDMNTFAASLMPRVAVYIAREAYFHDVGTLEDLQRGSALGTRGLKP

SEQ ID NO: 34645 - protein, 167 aa, Arabidopsis thaliana
MMLKQAAKKALGLTSRQSTPWSVGILRTYHENVIDHYDNPRNVGSFDKNDPNVGTGLVGAPACGDVMKLQIKVDEKTGQIVDARFKTFGCGSAIASSSVATEWVKGKAMEDVLTIKNTEIAKHLSLPPVKLHCSMLAEDAIKAAVKDYKEKRVKTNGAAAAGETTQA

SEQ ID NO: 34646 - protein, 344 aa, Synechococcus sp. CC9605
MGRRVLITGGAGFIGSHTCLVLLEQGHELVVLDNFDNSSPEALRRVQELAGSTQLTLVEGDVRDPSAVDQAFSSGGAVDGVIHFAGLKAVGESVANPLRYWDVNVNGSRVLAAAMERHGCRTLVFSSTSTAYGEPETFPLREDMPTAPVHPYAQTKVAVEQMLAALCRSGSWQVACLRYFNPVGAHPSGRIGEDPLGIPNNLFPFITQVAAERRERLRIFGNDYPTPDGTGIRDYLHVMDLAEAHGSALDHLFKRQASDPLTLNIGTGCGLSVLDVVHGFEQATGLAIPYEIVERRPGDVPRLEACPQTAQTVLGWRARRSLEEMCRDGWAWQQANPSGYRGPT

SEQ ID NO: 34647 - protein, 533 aa, Chlamydomonas reinhardtii
  misc_feature (532)..(532): Xaa can be any naturally occurring amino acid
  unsure (1)..(533): unsure at all Xaa locations
MAAAGAPAEGASAYEYDLVVIGGGSGGLACAKEAAKLGKKVCLLDYVVPSPAGTSWGLGGTCVNVGCIPKKLMHNAGLLGEGFSDARGYGWKLPEKIEMNWEDLVMGVQNHIGSLNWGYRVALREASVKYLNAKGSFVDAHTVEAVERNGTKHTLTAERVVIAVGGRPKYLGVPGDKELCITSDDIFSRATPPGKTLVVGASYIALECAGFLRALGYEVAVMARSIFLRGFDQEIAELIGKDMERRGVRMIKPAVPTAFERDGEQIKCTFKNLDFGVEMSESFDTVLLAVGRDACTFDLGLEKVGVTYDKSSGKIPVTAEQTNVPSIYAIGDVLESRQVPGQGGRKLMGLTCSLAQTLSPPDPLAQELTPVAIKAGIRLARRLYAGATLQMDYDAVPTTVFTPLEYGCVGYSEEAATVKYGADNIEVYVSYLKPLEWTMNHEEHNGEPVRADNSVFVKLITNTADNERVVGAHYLGPNAGEIIQGVAVAVKANATKADFDDCIGIHPTVAEEFTILEVTKRSGKSALKKGCXG

SEQ ID NO: 34648 - protein, 75 aa, Brassica napus
  misc_feature (42)..(42): Xaa can be any naturally occurring amino acid
  unsure (1)..(75): unsure at all Xaa locations
MSCCGGNCGCGSGCKCGSGCGGCKMYPDMAEQVTTTTTIMGXAPSKGGFEAAAGAENGGCKCGAASCTCDPCTCK

SEQ ID NO: 34649 - protein, 160 aa, Chlamydomonas reinhardtii
  misc_feature (20)..(20): Xaa can be any naturally occurring amino acid
  unsure (1)..(160): unsure at all Xaa locations
MATNGNGASGAELATFALGXFWHPEASFANVPGVVKTRVGYTGGSRPNPTYESVCAGDGHTEAMRVWFDPAIISYEDLLKQFFREHDPTQKSKCQYKSAVWYHSEAHGTALAAVMKELEGKYRVRLATTVDPAGDWWDAEEYHQKYIEKSMMRRGSAGWW

SEQ ID NO: 34650 - protein, 387 aa, Mucor hiemalis f. corticola
IGQKFWETISQEHGLDTNGAYAGDNDPQLERINVFYNEGSKGQYVPRSVLVDLEPGTMDTVRSSPYGKLYRPDNFIFGQNGAGNSWARGYYTEGAELVEQVLGVVRKEAENTDCLQGFQLAHSLGGGTGSGLGSLLLSKIREEYPDRMLCTYSVVPSPKVSDTVVEPYNAVLSVHQMVENCDATFCIDNEALYDICFRTLKLTNPDYGQLNQLVSTVMSGVSTSLRFPGQLNSDLRKLFVNMVPFPRLHFFMVGFAPLTAFGSQQYRNLSVPELTTQMFDAKNMMAASDPRHGRYLTAATIFRGRLSTKEVENQMLAVQQKNSSYFVEWIPNSVKTSLCDIPPVGLKMSGTFIGNSTAIQDLFKRVNEQFTAMFRRKAFLHWYTGEG

SEQ ID NO: 34651 - protein, 260 aa, Arabidopsis thaliana
  misc_feature (130)..(130): Xaa can be any naturally occurring amino acid
  misc_feature (155)..(155): Xaa can be any naturally occurring amino acid
  unsure (1)..(260): unsure at all Xaa locations
MATESYEAAIKGLNDLLSTKADLGNVAAAKIKALTAELKELDSSNSDAIERIKTGFTQFKTEKYLKNSTLFNHLAKTQTPKFLVFACSDSRVCPSHILNFQPGEAFVVRNIANMVPPFDQKRHSGVGAAXVEYAVVHLKVENILVIGHSCCGGIXKGLMSIEDDAAPTQSDFIENWVKIGASARNKIKEEHKDLSYDDQCNKCEKEAVNVSLGNLLSYPFVRAEVVKNTLAIRGGHYNFVKGTFDLWELDFKTTPAFAFS

SEQ ID NO: 34652 - protein, 663 aa, Brucella suis 1330
MTNTDKQNQMANAIRFLSMDAVEKANSGHPGLPMGAADIATTLYTRFLSHDPKNPHWPDRDRFVLSAGHGSMLLYSLLYLSGYEDITIDEIKKFRQLGSRTAGHPEYGHAAGIETTTGPLGQGIANAVGMAISERILNAQFGDSLVNHYTYALVGDGCLMEGISQEAIALAGHLKLNKLIVLWDDNNISIDGPITLSDNTDQPARFAASGWNTMAVDGHDQDAIAKAIELARVSDRPTLIACKTTIGFGAPNKAGTNKVHGSPLGAEEIAATRKALGWSSEPFVVPAEVLDAWRVAGLNAAKKRLEWEKRLSAVEAETRAEFERRMRGELPSGFDAAIVEYKKKLSADKPKVATRKSSEMALEVINGVVPETVGGSADLTGSNNTKTSQTKAVTPENYDGRYIHYGIRELGMAAAMNGITLHGGLIPYSGTFLCFSDYARPAMRLSSLMGIRVVYVMTHDSIGLGEDGPTHQPVEHLAALRAIPNHNVFRPADAVETAECWQLALHSRKTPSTLALTRQNLPTVRTEHREENLCAFGAYELAAASSDAKVTIFATGSEVEIALKARDLLEGKGIATRVVSVPCFELFEQQSDAYKEATIGDAPIKLAIEAAISLGWERFIGENGIFIGMKGFGASGEINDLYKHFGITAEHAVEAAEKKLNAA

SEQ ID NO: 34653 - protein, 455 aa, Silicibacter sp. TM1040
MTAHQPDANFLKEHNARSLWHPMAHPGDSLANPPTIVTGASGVRIKDVDGHEVVDAVGGLWNVNLGFSCQPVKDAIAAQLDVLPYYSIFRGTTNDQVIQLAEELRDFFAPDGLSRAFFTSGGSDSVETALRLARQYHKVRGEPARVKYLSLKKGYHGTHFGGASVNGNANFRTAYEPLLAGCHHIPAPYTYRNPFNETDPERLAQLCLAALEDEIAFQGAGTIAAFIMEPILGAGGVIPPHESFMPGVAEICRRHGILLIADEVITAFGRTGSWSGSRHWGVQPDMMCTAKAITNGYFPFGALMLSERLVEVFEKDDTGKAAIGHGYTYSGHPVGAAAALACLAETKRLNVPENAAARGAQIFEGLQDLAARYDLIGDVRGGHGLMSALELVSDRATKAAVDKKVINRLQEVAYQNGAMVRVSGPNIILSPPLVLTEADAAQILSALDAGFAAVN

SEQ ID NO: 34654 - protein, 584 aa, Astragalus sinicus
MCGILAVLGCADASRAKRVRVLELSRRLKHRGPDWSGLHQHGDCYLAHQRLAIVDPASGDQPLFNEDKSVIVTVNGEIYNHEDLRKQLPNHTFRTGSDCDVIAHLYEEYGEDFVDMLDGIFSFVLLDTRDNSYIVARDAIGVTSLYIGWGLDGSVWISSEMKGLNDDCEHFECFPPGHLYSSKNGGFRRWYNPLWYSEAIPSAPYDPIVLRQAFEKAVIKRLMTDVPFGVLLSGGLDSSLVASITSRYLATTKAAEQWGSKLHSFCVGLEGSPDLKAGKEVADYLGTVHHEFTFTVQDGIDAIEDVIYHVETYDVTTIRASTPMFLMSRKIKSLGVKWVISGEGSDEIFGGYLYFHKAPNKEEFHRETCRKIKALYQYDCLRANKSTFAWGLEARVPFLDKEFINVAMNIDPANKMINLDEGRIEKYILRKAFDDEEHPYLPKHILFRQKEQFSDGVGYSWIDGLKAHAAKHVTDKMMRNAANIYPHNTPSTKEGYYYRMIFERFFPQNSARLTVPGGPTVACSTAKAVEWDAAWSKNLDPSGRAALGVHASAYENQNNSVNKSIEFEKIIPLEASSVGVAIQT

SEQ ID NO: 34655 - protein, 483 aa, Rhodospirillum rubrum
MDQSGRWARGVLAGASVAVLLAFGGPAAGAAEQVPGAGTAEQVPMAAAEIKLTFAPVVRAVAPAVVNIFSQRVITESQVPPMFADPLFRRFLEERGMLGKPRERVQRSLGSGVILRSEGVVVTNAHVVNGASEITVALNDRREFPAELVGLDPRADLAVLRIKSDTPLPSLALADGEPPEVGDLVLAIGNPFGVGQTVTSGIVSAQARTTAGISDYRFFIQTDAAINPGNSGGALVDLSGRLVGINTAIYSRDGGSVGIGFAIPVEMVRSVVEGILEDGKVRHPWLGADGQSVTTELASHMGLDRPLGVAITDVAKGGPAAKAGLAEGDVILALDGRPVFEGETLRYRIATHRPGDKVVLGIRRDGKDTTLAVTLEAPPEDPPRDTTLLKGSHPFDGAEVSNMNPALAEELGLEKASRGVTVTGLGDGVAARIGIRPGDRVIEVNGKAIDAVRDLKAAISKPSRVWQVVVDRDGRAVRLVLGG

SEQ ID NO: 34656 - protein, 395 aa, Bacillus halodurans C-125
MNIGKIPVTVLSGYLGAGKTTVLNHVLANKEGMKVAVIVNDMSEVNIDATLVKQGGFTRTDEKLVELQNGCICCTLREDLIIEVEKLARLGNIDYILIESTGISEPIPVAQTFTYLDEELGIHLGDRCTLDTMVTVVDANRFWEDYESGESLLDRKQTDDEADTREVVDLLIDQIEFANVILLNKVDLVEEDDVRELTAVLHKLNPEAEILPVSHGRVDLNRILHTGLFDFDKASQGAGWIKELNEEHTPETEEYGISSFVYKRQRPFHPERWMEWLENWPQEVVRAKGFFWLATRNEMAGLISQAGTSIVIQGAGLWVAAYDKEEQQQVLAEEPELAARWHRKYGDRMNELVFIGLDMDRKEIEKSLDTCLLTDEELGQDWSALPDPLPSFTEQ

SEQ ID NO: 34657 - protein, 765 aa, Thermotoga maritima
  misc_feature (70)..(70): Xaa can be any naturally occurring amino acid
  misc_feature (75)..(75): Xaa can be any naturally occurring amino acid
  misc_feature (77)..(77): Xaa can be any naturally occurring amino acid
  misc_feature (105)..(105): Xaa can be any naturally occurring amino acid
  misc_feature (125)..(125): Xaa can be any naturally occurring amino acid
  misc_feature (134)..(134): Xaa can be any naturally occurring amino acid
  misc_feature (202)..(202): Xaa can be any naturally occurring amino acid
  misc_feature (376)..(376): Xaa can be any naturally occurring amino acid
  misc_feature (453)..(453): Xaa can be any naturally occurring amino acid
  misc_feature (500)..(500): Xaa can be any naturally occurring amino acid
  misc_feature (542)..(542): Xaa can be any naturally occurring amino acid
  misc_feature (561)..(561): Xaa can be any naturally occurring amino acid
  misc_feature (569)..(569): Xaa can be any naturally occurring amino acid
  misc_feature (651)..(651): Xaa can be any naturally occurring amino acid
  misc_feature (714)..(714): Xaa can be any naturally occurring amino acid
  misc_feature (753)..(753): Xaa can be any naturally occurring amino acid
  misc_feature (760)..(760): Xaa can be any naturally occurring amino acid
  unsure (1)..(765): unsure at all Xaa locations
MHHHHHHGKPIPNPLLGLDSTENLYFQGIDPFTKAYAFGFPKIGEKREFKKALEDFWKGKITEEQFEEEXNKLRXYXVENYRKNVDVIPSNELSYYDFVLDTAVXVGAVPERFGEYRGLSTYFDXARGGKALEXTKFFNTNYHYLVPEIETEEFYLLENKPLEDYLFFKSKGIETAPWVIGPFTFLYLSKRNGEWIRRPNQXEKLLESLVSVYKEVFEKLVENGCKEILVNEPAFVCDLEKAHWDLILNVYRELSEFPLTVFTYYDSVSDYEACVSLPVKRLHFDFVSNEENLKNLEKHGFPEDKKLVAGVINGRQPWKVDLRKVASLVEKLGASAISNSCPLFHLPVTLELENNLPGGLKEKLAFAKEKLEELKXLKDFLEGKTFDLPNVSFEDFAVDLQAVERVRNLPEDSFRREKEYTERDRIQRERLNLPLFPTTTIGSFPQTPEVRKXRSKYRKGEISKEEYEAFIKEQIKKAIELQEEIGLDVLVHGEFERTDXVEFFAEKLNGIATTQNGWVLSYGSRCYRPPIIYGTVTRPEPXTLKEITYAQSLTEKPVKGXLTGPVTIXSWSYYREDIPEREIAYQIALAINEEVKDLEEAGIKIVQIDEPAFREKAPIKKSKWPEYFEWAINAFNLAANARPETQIHAHXCYSDFNEIIEYIHQLEFDVISIEASRSKGEIISAFENFKGWIKQIGVGVWDIHSPAVPSINEXREIVERVLRVLPKELIWINPDCGLKTRNWDEVIPSLRNXVALAKEXREKFA

SEQ ID NO: 34658 - protein, 124 aa, Zea mays
MGRVFIVDLEGQIYSCKHCNTHLTKEQDIMSKSFQCRYGQAYLFNEVVNISTGNEEDRMLMTGLHTVTDIFCVGCGSNVGWKYVTAHDINQKYKEGKSVLELYKIVGPYDSNDLVCQEISRLEI

SEQ ID NO: 34659 - protein, 469 aa, Zea mays
GRVGGTFAKVYHARHVDTGDNVAIKVLDKEKAVKSGLVPHIKREIAVLRRVRHPNIVHLFEVMATKTKIYFVMELVRGGELFSRVSKGRLREDTARRYFQQLVSAVGFCHARGVFHRDLKPENLLVDEQGNLKVSDFGLSAVAEQFRPDGLLHTFCGTPAYVAPEVLGRRGYDGAKADVWSCGVILFVLMAGYLPFHDKNIMAMYKKIYKGEFRCARWFSKDLTSLLMRILHTNPNTRITLPEIMESRWFKKGFKPVKFYIEDDQLHNVIDDEDGLLDMGPAGPVPPPLPPPPPPLPPPKVDGDESGSDSDSSISSCPASMLSDESQRPRGSLPRPASLNAFDIISFSRGFNLSGLFEEKGDEVRFISAEPMSDIITKLEDIAKLKSFKLRRKDWRICLEGTREGVKGPLTIGAEIFELTPPLVMVEVKKKAGDNEEYENFCDKELKPGMQHLVHHMVRAPSMLLTDAK

SEQ ID NO: 34660 - protein, 404 aa, Haemophilus influenzae Rd KW20
MRLFPKSDKLEHVCYDIRGPVHKEALRLEEEGNKILKLNIGNPAPFGFEAPDEILVDVLRNLPSAQGYCDSKGLYSARKAIVQYYQSKGILGATVNDVYIGNGVSELITMAMQALLNDGDEVLVPMPDYPLWTAAVTLSGGKAVHYLCDEDANWFPTIDDIKAKVNAKTKAIVIINPNNPTGAVYSKELLQEIVEIARQNNLIIFADEIYDKILYDGAVHHHIAALAPDLLTVTLNGLSKAYRVAGFRQGWMILNGPKHNAKGYIEGLDMLASMRLCANVPMQHAIQTALGGYQSINEFILPGGRLLEQRNKAYDLITQIPGITCVKPMGAMYMFPKIDVKKFNIHSDEKMVLDLLRQEKVLLVHGKGFNWHSPDHFRIVTLPYVNQLEEAITKLARFLSDYRQ

SEQ ID NO: 34661 - protein, 246 aa, Oryza sativa (japonica cultivar-group)
MDAERRQAELIEQFSAQAAALSSSAPQLAALVLEATSHPALFAFSELLSLPALSKLTGTQYASSLDVLRLFAYGTLKDYKSNSGNLPALLPDQVRKLKQLSVLTLAESTKVLPYDQLMQELDVSNVRELEDFLINECMYSGIVRGKLDQLRRCFEVQFATGRDLTPDQLNNMIDTLSDWLGTSDNLLHQIQEKIKWADTMSEVNKKHQKEFEDKVEEAKKSIKLNNLSRQTSTYGGMTTFSLNLEE

SEQ ID NO: 34662 - protein, 438 aa, Sulfolobus tokodaii str. 7
MFRKTKIIATLGPSSENHIDELVKYVDVIRLNFAHGDKEQHEKYFNLVKNRVPILVDLPGPKLRIGDLGKNMILLKPGDTIEFGTQIPVDDILFFKLIRKGSEVLISDGRIRVKIIEAGNNYAKGLVEEGGILTSRKGINIPDSEIPVGLTDRDLELLKYALEMGATFIGLSFVTSPEEIRKAKEIVKDQAWIIAKIEKKSALKKLKEIIREADGVMVARGDLGVEVGLANLPQTQRRIVRLTRLYGKPVILATQVLESMVTSPIPTRAEVIDVANSIIQGVDAIMLSDETAMGQYPIDAVRTLHELILSVERSFKPRPPPPLKNIDDAIAYSAVSASNLASSSGIVVYTRTGASALRISRLRPVVPIIVLTQNQRVYERLKLCYGIYSFISEELNSLDNIVEKSKNIARQVGLKNTIIIIAGGIEEGSTRFLKVEEI

SEQ ID NO: 34663 - protein, 460 aa, Frankia sp. CcI3
MANSAAGPVDLVILGGGSGGYAAALRAAELDLSVVLIEKDKLGGTCLHRGCIPTKALLHSAEIVDNINESEAFGVRSTLDGIDMAAVNSYKDSVIAGLFKGLTGLIKSRGIEVVEGFGRLVSPTAVAVGDRVIEGRHVLLATGSYSKTLPGLDIDHDKVITSDDALTLDHVPASAVVLGAGAIGCEFASVWRSYGAEVTIVEALPHLVPLEDESSSKLLERAFRKRGIKQHLGARFSGVKSTDQGVTVSLENGTTIEAELLLVAVGRGPVSEGLGYEEVGIATDRGYVLVDRQLRTNIPTVSALGDLRPGLQLAHVGFAEGIFVAEQLAGLGPVPVDYDNVPRVTYSHPEVASVGLTAAVARERYGEIKTVTYNLAGNGKSQILRTSGAVTVIAVPDGPVVGVHMVGDRVGELIAEAQLITNWEAFPAEVAQLIHPHPTLSEALGEAHLALAGKPLHVHG

SEQ ID NO: 34664 - protein, 314 aa, Nocardioides sp. JS614
MVSKRYDVEFVTIHGYRRAYVKAGSGPVVLLLHGLGCDHTTWEPVIEALSRRYTVIAPDLLGHGRSDKPRADYTLGGYANGMRDLLTVLGIDKVTVIGHSFGGGVAMQFAYQYPERTERLMLVASGGLGPEVSPGIRAISTPGFHQVMGLLTLPGVRHLGMAGLRTVAKGPWRLTRDLDEVADIYDTFKDPQARHAIRHVVRAVVDWRGQIVTMTDRAYLTEEMPMWVVWGRDDRVIPVRHANTAAALAPNARVEVIPDAGHFPHKDHPHRFARIVQDFIRSTEPAKYSRARFRSLLRSGGTAPRLRSVSSDTA

SEQ ID NO: 34665 - protein, 420 aa, Bacteroides fragilis YCH46
MELKRVVVTGLGAITPVGNNVPEFWENLVNGVSGAGPITHFDASQFKTQFACEVKGFDATQYIDRKEARKMDLYTQYAVAVAKEAVADSGLDIENEDLNRIGVIFGAGIGGIRTFEEETSNYALHKENGPKYNPFFIPKMISDIAAGQISIMYGFHGPNYATCSACATSTNAIADAFNLIRLGKANVIVSGGSEAAIAAAGVGGFNAMHALSTRNDEPQSASRPFSASRDGFVMGEGGGCLILEELEHAKARGAKIYAEVAGVGMSADAHHLTASHPEGLGAKLVMKNALEDAEMSPEEVDYINVHGTSTPVGDISEAKAIKEVFGEHAFELNISSTKSMTGHLLGAAGAVESIASILAIKNGIVPPTINHAKGDNDENIDYNLNFTFNKAQKREINVALSNTFGFGGHNACVIFKKYAE

SEQ ID NO: 34666 - protein, 312 aa, Arabidopsis thaliana
MKRSRGSSDSLSGFLPIRHSTTDKQISPRPTTTGFLYSGAGDYSQMFDALEDDGSLEDLGGVGHASSTAAEKKRRLGVEQVKALEKNFEIDNKLEPERKVKLAQELGLQPRQVAIWFQNRRARWKTKQLERDYGVLKSNFDALKRNRDSLQRDNDSLLGQIKELKAKLNVEGVKGIEENGALKAVEANQSVMANNEVLELSHRSPSPPPHIPTDAPTSELAFEMFSIFPRTENFRDDPADSSDSSAVLNEEYSPNTVEAAGAVAATTVEMSTMGCFSQFVKMEEHEDLFSGEEACKLFADNEQWYCSDQWNS

SEQ ID NO: 34667 - protein, 514 aa, Yarrowia lipolytica CLIB122
MSSNTGQGPGIASPAPLTNGHTSQPSNTHQDAPVRPTLENGRSYINLDNLSKEKHLRTGSSSTIQEEEPSTRARRSASTSKPPLLVNQNQIQNHQHQQSQYNPQYQPPRVATPKRTPLFDSGQSYSQRFHNRSSSFSVRSARARSLSASSQEALKHLAPPVSVPLVVCCLMWYLSSAMSNTLGKAILTKFGYPVTLSQIQFLVAVCCGATTIQLSQMSPKFRQALPPGMVGPQGLIFPPTRDMLKTTAPMGCFQLSGHILSHMATGMIPVSLVHTIKALSPLFTVAAYRLLFNVQYSPSTYLSLIPLVTGVILTCSTSFRAQFMGIIYALLAALVFVSQNMFSKKLLTSGTTAGPGGPASATHTRKLDKLNILCYCTALAFLFTSPLWFFSEGWTLLKLFFRGEALVKDDSSLFVLMIQLLLNGVVHFAQNLLAFQVLSMVSPVTYSVASLLKRIVVIVWAIIWFGQSVSGIQGFGIFLTFTGLYLYDRCGGDKKKGGQGSSVDGTEKDAQLPK

SEQ ID NO: 34668 - protein, 498 aa, Nostoc punctiforme PCC 73102
MTTPLSCRNYINGQWLNAVGEATLESRNPADKTEIVATYPRSQVNDVDTAVASARKAYRSWRTVPAPARAEYIFRVGEILLQHKEELAQLISREMGKPLTEARGDVQEGIDCAFYSAGEGRRLFGQTTPSEMSNKFAMTVRMPIGVCALITPWNFPVAIPCWKAMPALVCGNTVILKPAEDTSACATKLIEIFQQAGLPPGVINLVHGVGEEAGKALVEHPNVDLVSFTGSSETGAFVGATCGRTHKRVCLEMGGKNAQIVMEDADLELALDGAVWGAFGTTGQRCTATSRLILHRDIKEKFTTMLYERTSKLRLGAGNDTDTDIGPIINEKQLQQVSKYLDIAREEGAKVLIGGEIASEGSLKNGYFFQPTILDRVTPDMRVAREEIFGPVVALIEVSSFEEAIAILNDSNYGLSSSVYTRDINRAFTAMRDIEAGITYINGPTIGAEVHLPFGGVKQTGNGHREAGTTALDVFTEWKSVYVDFSGSLQRAQIDNRS

SEQ ID NO: 34669 - protein, 586 aa, Astragalus sinicus
MCGILAVLGCSDDSQAKRVRILELSRRLKHRGPDWSGLHQHGDNYLAHQRLAIVDPASGDQPLFNQEKSIIVTVNGEIYNHEELRKQLPNHKFRTDCDCDVIAHLYEEYGENFVDMLDGIFSFVVLDTRDNSFLVARDAIGVTSLYIGWGLDGSVWIASELKGLNDECEHFEVFPPGHLYSSKEREFRRWYNPKWFSETVPSSPYDPLVLRHAFEKAVIKRLMSDVPFGVLLSGGLDSSLVASVTARYLEDTKAAKQWGAKLHTFCVGLKGAPDLKAGREVADYLGTVHHEFEFTIQDGIDAIEDVIYHTETFDVTTIRASTPMFLMSRKIKSLGVKMVLSGEGSDEIFGGYLYFHKAPNKKEFHEETCRKIKALYKYDCLRANKSTYAWGLEARVPFLDKDFINVAMDIDPEEKMIKRDEGRIEKWVLRKAFDDENKPYLPRHILYRQKEQFSDGVGYGWIDGIKDHAAKHVTAKMMLNASHIFPDNTPTSKEGYYYRMIFERFFPQNSARLTVPGGASIACSTEKAIEWDASWSNNLDPSGRAALGVHVSAYENQVNSSVGKGVEPEKIIPKMKVSPLGVAILG

SEQ ID NO: 34670 - protein, 549 aa, Erwinia carotovora subsp. atroseptica SCRI1043
MAAKDVKFGNDARVKMLRGVNVLADAVKVTLGPKGRNVVLDKSFGAPTITKDGVSVAREIELEDKFENMGAQMVKEVASKANDAAGDGTTTATVLAQSIITEGLKAVAAGMNPMDLKRGIDKAVIAAVEELKKQSVPCSDFKAIAQVGTISANSDETVGKLIAEAMEKVGKEGVITVEEGTGLQDELDVVEGMQFDRGYLSPYFINKPETGSIELESPFILLADKKISNIREMLPVLEAVAKAGKPLLIIAEDVEGEALATLVVNTMRGIVKVAAVKAPGFGDRRKAMLQDIATLTAGTVISEEIGLELEKATLEDLGQAKRVVINKDTTIIIDGVGDEVAIQGRVTQIRQQIEDATSDYDKEKLQERVAKLAGGVAVIKVGAATEVEMKEKKARVEDALHATRAAVEEGVVAGGGVALIRAAASISVSGLKGDNEDQNVGIKVALRAMESPLRQIVINAGEEASVIANTVKAGEGSYGYNAYTEEYGDMIAMGILDPTKVTRSALQYAASIAGLMITTECMVTDLPKGDAPDLGAGGMGGMGGMGGMM

SEQ ID NO: 34671 - protein, 316 aa, Yarrowia lipolytica CLIB122
MVDLNHYQKLEKVGEGTYGVVYKARDTLNNNRLVALKKIRLEAEDEGVPSTAIREISLLKEMRNDNIVSLYNIVHSDSHKLYLVFEFLDLDLKKYMESISPGVGLGADMVKKFMNQLILGTRYCHAHRILHRDLKPQNLLIDREGNLKLADFGLARAFGVPLRTYTHEVVTLWYRAPEILLGGRQYSTGVDMWSIGCIFAEMVTRKPLFPGDSEIDEIFKIFRLLGTPTEETWPGVTALPDYKPTFPQWSRKDIGRTVTPLDHEGLDLLEHLLAYDPACRISAKRAADHAYFDVGTNMKSGYNAAAGPGLMMSTRA

SEQ ID NO: 34672 - protein, 478 aa, Zea mays
MAIASRATKRALSTFAAAKLPEEAIAATAAVPVPLAPAPASSERALLQFEDTGRLFAGEPTPALLRTLAALQALSVGPLVDAATAALRSPAVAGSALGRAAARATAYRHFCAGETAGEAAAAVRRLWRGGMGGILDYGIEDAEDGGACDRNAAGFASAVDVAAKLPPGSASVCIKITALCPIALLEKASDLLRWQKRHPSLNLPWKTHDFPILSDSSPLHLTASEPPALSAEEERELELAHERVLAVCARCAERGVPLLVDAEYAAVQPAIDYLTLAGALACNAERSIVHGTVQAYLRDARERLETMARGVERARVRLGVKLVRGAYLAREARVAAALGVPSPVHGSIRETHDCYNGCAAFLLDRVRRGSASVVLATHNVESGQLAAARAEELGIPRGDRNLQFAQLMGMADGLSLGLRNAGFQVSKYLPYGPVEQIVPYLIRRAEENRGLLSASSFDRQLLREELVRRFKAAVLGRE

SEQ ID NO: 34673 - protein, 403 aa, Onion yellows phytoplasma OY-M
MFDFMINHLSSKSLMYQDFKKNHNNSQYKDFFLRWEKFWQQVGPNRPTKQDVDSIYKRKDKAPTHLIEFDDGTTEHLWNTFGTDQIDLNVKEPIVKEFIKTTLTNMVKQGASIIRLDAFAYACKKADTSFFVEPDIWQLLDEVRDVLKPLDVELLPEIHENHSISHKISEHGYFIYDFALPLVVLYTLYSKNPQRLVEWLKKSPMKKFTTLDTHDGIGVIDAYDILTDKEIKYTSEQLYKQGANVKKVYSSSLYNNLDIYQINFTYYSALGNDDDAYLLSRAFQIFAPGIPQVYYVCLFAGENDIKLLESSKEGRNTNRHYYSRQEIKEEVKRPVVANLFKLLAWRNKSNAFDLDGVMECSAYASKIKILRKDKLGNNVAVLDADLMNKKFVIVENDKQIFSN

SEQ ID NO: 34674 - protein, 331 aa, Escherichia coli CFT073
MVKAVCAVVNGESMNPIAVTLLTGFLGAGKTTLLRHILNEQHGYKIAVIENEFGEVSVDDQLIGDRATQIKTLTNGCICCSRSNELEDALLDLLDNLDKGNIQFDRLVIECTGMADPGPIIQTFFSHEILCQRYLLDGVIALVDAVHADEQMNQFTIAQSQVGYADRILLTKTDVAGEAEKLRERLARINARAPVYTVTHGDIDLGLLFNTNGFMLEENVVSTKPRFHFIADKQNDISSIVVELDYPVDISEVSRVMENLLLESADKLLRYKGMLWIDGEPNRLLFQGVQRLYSADWDRPWGDEKPHSTMVFIGIQLPEEEIRAAFAGLRK

SEQ ID NO: 34675 - protein, 398 aa, Zea mays
KFELEFESSLEAIVLLQRSMLEKQWELPFEDDISTEDEDERSTVVVARSGVSARQRRMSGRRRGAFVGRKSVTVSPELMQSRNRIYLRGTVSKDLLTHKQVVQLSRKIKDGIWLQHQRSKLKEKLGNEPSYKQLAQSLRIPAPELRARMRESFLAREMLAMSNTRLVISIAQKYDNLGVELPDLIQGGLIGLLRGIEKFDASRGFRISTYVYWWIRQGVSRALADNSRSFRLPTYLHERLVAIRGAKYALEDQGIAPTVENIAESLNISEKKVHNATEAVHKVISLDQQAFPSLNGLPGDTLHSYIEDQNVANDPWHGFEERYLKEEVNSLINSTLNERERDIIRLYHGIGKQCHTWEDISRQFGLSRERVRQVGLVAMEKLKHAARREHLDALLEEY

SEQ ID NO: 34676 - protein, 356 aa, Securigera parviflora
MSLLSDLINLNLSETTDKIIAEYIWIGGSGLDLRSKARTLPGPVSDPSELPKWNYDGSSTGRAPGEDSEVILYPQAIFKDPFRRGSNILVICDAYTPAGEPIPTNKRHAAAKVFSHPDVVAEVPWYGIEQEYTLLQKEVNWPLGWPLGGFPGPQGPYYCGTGADKALGRDIVDAHYKACLYAGVSISGINGEVMPGQWEFQVGPSVGISAGDEVWVARYVLERITEIAGVVLSFDPKPIKGDWNGAGAHTNYSTKTMREDGGYEIIKKAIEKLGLRHKEHIAAYGEGNERRLTGRHETADINTFLWGVANRGASIRVGRDTEKAGKGYFEDRRPASNMDPYVVTSMIADTTILWKP

SEQ ID NO: 34677 - protein, 184 aa, Saccharomyces pastorianus
MSSLISKTIKYDPKKDKLITLACGCFWGTEHMFRKYLNDRIVDCKVGYANGAESKKDSAHGVSYKMVCGGDTDFAEVLQVSYNPKIVTLKELTDFFFRIHDPTTSNSQGPDQGTQYRSGLFAHSDADLKELTQIKAEWQPKWGNKIATLVEPIKNFYDAEEYHQLYLDKNPQGYACPTHYLRDI

SEQ ID NO: 34678 - protein, 789 aa, Hordeum vulgare subsp. vulgare
MKMMAMAEAPCLCARPFLAARAWRPGPAPRLRRWRPNATAGKGVGEVCAAAVEAATKAEEEEDEEEEPVAEDRYALGGACRVLAGMPAPLGATALAGGVNFAVYSGGATAAALCLFTPEDLKADRVSEEVPLDPLMNRTGDVWHVFLEGELHGMLYGYRFDGTFAPHCGHYFDVSNVVVDPYAKAVISREEYGVPAHGNNCWPQMAGMIPLPYSTFDWEGDLPLRYPQKDLVIYEMHLRGFTKHDSSNVEHPGTFIGAVSKLDYLKELGVNCIELMPCHEFNELEYATSSSKMNFWGYSTINFFSPMTRYTSGGIKNCGRDGINEFKTFVRESHKRGIEVILDVVFNHTAEGNENGPILSFRGVDNTTYYMLAPKGEFYNYSGCGNTFNCNHPVVRQFIVDCLRYWVMEMHIDGFRFDLASIMTRGSSLWDPINVYGAPIEGDMITTGTPLVTPPLIDMISNDPILGGVKLIAEAWDAGGLYQVGQFPHWNVWSEWNGKYRDIVRQFIKGTDGFAGGFAECLCGSPQLYQAGGRKPWHSINFVCAHDGFTLADLVTYNTKYNLPNGEDIRDGENHNLSWNCGEEGEFARSSVKRLRKRQMRNFFVCLMVSQGVPMFYMGDEYGHTKGGNNNTYCHDSYVNYFRWDKKEEHSDLHRFCCLMTKFRKECEGLGLEDFPTAEQLQWHGHQPGKPDWSEKSRFVAFSMKDETKGEIYVAFNTSHLAAVVELPERIGHRWEPVVDTGKPAPYDFLTDDLPDRALTVQQFSHFLNSNLYPMLSYTSVILVSRPDV

SEQ ID NO: 34679 - protein, 769 aa, Staphylococcus aureus subsp. aureus MSSA476
MDIGKKHVIPKSQYRRKRREFFHNEDREENLNQHQDKQNIDNTTSKKADKQIHKDSIDKHERFKNSLSSHLEQRNRDVNENKAEESKSNQDSKSAYNRDHYLTDDVSKKQNSLDSVDQDTEKSKYYEQNSEATLSTKSTDKVESTDMRKLSSDKNKVGHEEQHVLSKPSEHDKETRIDFESSRTDSDSSMQTEKIKKDSSDGNKSSNLKSEVISDKSNTVPKLSESDDEVNNQKPLTLPEEQKLKRQQSQNEQTKTYTYGDSEQNDKSNYENDLSHHMPSISDDKDNVMRENHIVDDNPDNDINTPSLSKTDDDRKLDEKIHVEDKHKQNADSSETVGYQSQSSASHRITEKRNNAINDHDKLNGQKPNAKTSANNNQKKATSKLNKGRATNNNYSDILKKFWMMYWPKLVILMGIIILIVILNAIFNNVNKNDRMNDNNDADAQKYTTTMKNANNTVKSVVTVENETSKDSSLPKDKASQDEVGSGVVYKKSGDTLYIVTNAHVVGDKENQKITFSNNKSVVGKVLGKDKWSDLAVVKATSSDSSVKEIAIGDSNNLVLGEPILVVGNPLGVDFKGTVTEGIISGLNRNVPIDFDKDNKYDMLMKAFQIDASVNPGNSGGAVVNREGKLIGVVAAKISMPNVENMSFAIPVNEVQKIVKDLETKGKIDYPDVGVKMKNIASLNSFERQAVKLPGKVKNGVVVDQVDNNGLADQSGLKKGDVITELDGKLLEDDLRFRQIIFSHKDDLKSITAKIYRDGKEKEINIKLK

SEQ ID NO: 34680 - protein, 416 aa, Nocardioides sp. JS614
MSKRVVVTGLGTTSPVGGDVPSTWDALVNGRSGVRFLTDDWAEQMPVKIAGRIAVEPTEILERVKARRLDRSSQFAMVAAMEAWKDAGLEGSDVDRDRLGVAMASGIGGVTTLLDNYDALREKGPRRVSPLAVPMLMPNAPAAQLSLYVGARAAVNTPVSACASGNEAISLAVDQIRLGRADVVLAGGTEAAIHPLPMAAFANMMALSKTASGPDGGDPTAVSRPWDVARDGFVLGEGAGVLVLESEEHARARGARIYATVLGAGITADSHDIAQPDPEGRGGSRAILRALAEADISPGDIAHVNAHATSTPQGDIAEGLMLHATLGAHATDVVVTSTKSMTGHLLGGAGALEAIATVLALHHRVAPPTINLDNQDPQVELDIATKARDLPLGDIAALNNSFGFGGANVAVAFGSV

SEQ ID NO: 34681 - protein, 379 aa, Chlorobium tepidum TLS
MKKRLFTPGPTPVPENVMLRMAAPIIHHRNPEFMEILERVHENLKYLFRTTQPVVVMTCSGTGGMEAAISSLFRQGDKLITINGGKFGERWSELARIYTGNCVEEKIEWGTAISPERIAELLDEHPDAMGVCITHSETSTGTASDVRALCAAIRERSEALILVDGITAIGAHEFHFDDWGADICITGSQKGLMMPPGLALVAVSERAQEIIHNRKHQPQYYLSLRKALKSHAGNDTPFTPAVSLIIGLDEALQMLRAEGIENVWARHEALAGACRLGCQALGMELFSESPSYAVTAVWLPEGADWKEFNTTLKIKNGITVAAGQDDFKGRIFRISHLGYYDELDMLTLMGGLERSLKMMEIPFRVGAGVSAVQRAFLGE

SEQ ID NO: 34682 - protein, 454 aa, Vibrio vulnificus CMCP6
MTITNPFNDEVIGTVPNMGEKETQEVIAGADKAFQQFKALTAQERANLLHRWHQLILEHSDELAHIMTLEQGKPLAEAKGEVLYAASFIEWFAEEARRAYGTLVPSHKANAKILVTKEPIGVVAAITPWNFPAAMITRKCGPAFAAGCPVILKPAPDTPFTALALAVLAEKAGFPAGVFNVITGDAVAIGGELTSNKRVRKLSFTGSTPVGKLLMRQSADNIKKLSLELGGNAPFIVFEDADLDAAVEGAMIAKFRNAGQTCVCANRLYVQRSVYSEFCQKLVAKVSALKVGNGFDQGVHIGPLINDAAVAKVVQHVEDAQSKGAQIECGQLPTAGSRLVQPLVLSGVTDEMLVAQEETFGPMAPLFVFDSEEEVLARANNTDFGLAAYFYTQSLSRAWRMSEALEAGIVGINEGLISTTVAPFGGVKESGLGREGSFLGMDDYMESKYILMGL

SEQ ID NO: 34683 - protein, 425 aa, Alkaliphilus metalliredigenes QYMF
MSESTIKKTTVQVKESSNLFQLSKKVILALQHLIAMFGATVLVPMLTGFDPAVALIAAGAGTLLFHAVTKGKVPVFLGSSFAFIPVVITVRETYNGDLSYAQGGIIVAGIIYILMSLLIKKVGVKNITKFLPAQVVGPMIMVIGLSLVPVAIDMSSNHFAIALLTLGTALVINFTAKGFIRQLSILIAVVVGYVVSLQLGLVDTAVMREASLVAMPNFSTPKFEIGAIMVIAPIVLAVFMEHIGDITTNGEVVGQNFIEEPGLNRTLLGDGLATLFAGFIGGPANTTYGENTGVLAITKNYDPSILRLAAVFAIILGFVAKVGGFLSSIPVAVMGGISLMLFSMIAIVGVKTIKNSETALNGKNIIIIATILILGLGSDYIGGALNMTVGIPIPFAQGIAITGLSFAGLVGVLLNVVLNRNEQQA

SEQ ID NO: 34684 - protein, 365 aa, Yarrowia lipolytica CLIB122
MSELRKRNQAAIADLSENIEVTETVELTEKKPETTKSTKGHIIDLIICVSGIYASFLTWAVLQERIATTPYGPDNKIFRASLVINTVQSFLAAAVGYAYLQYKQSRRAAKGLKKNTTVFDSMYTLKQLSLVALSQSLASPLSYTALKYVDYLTSILAKSCKLIPLMALQVTLYRRKFPAYKYAVVVLVTIGVSMFTIFHAAPKKASGAGSEHQLYGLGLLGISMLLDGLTNSTQDQIFRKNADITGPHVMCGLNLLTGVFTTVSLLTFSRPQLDTAIAFIRLHPEIMRDIVLFGLCGAVGQVFIFQTLEKFGSVVLVTVNVTRKMFSMLLSVVWFNHRLTLGQWAGVAAVFGGIGFEAWMKMKKN

SEQ ID NO: 34685 - protein, 331 aa, Erwinia carotovora subsp. atroseptica SCRI1043
MGQLVDGVWHDTWYETKSTGGHFKRSESAFRNWVTPDGAPGLTGKGGFPAQSGRYHLYVSLACPWAHRTLLMRQLKGLEDHIAVSVVHPLMLDHGWTFGTDFEAATGDSLYQHEFLYQLYLHAKPDYSGRVTVPVLWDTEQHTVVSNESADIIRMLNSAFDGVGAIAGDYYPEALRTQIDELNSWIYDKVNNGVYKAGFATTQSAYDESASTVFAALSDLETILAKQRYLTGEQLTEADLRLWTTLIRFDPVYHTHFKCDKYRLSDYPNLFGFLRDIYQMPGIAETVDMAHIRHHYYRSHGTINPHGVISLGPEQDLNQPHQRDKKFVDLY

SEQ ID NO: 34686 - protein, 922 aa, Neurospora crassa
MNGDFSLSQALGGLRIANLDDDDSVHSTENDQTTPDAPANQSSASRQDATTNNAPQTTPPQPAQPAQPPSQRTPLDLERQVTPQDPPQRPPHTYETAAAILKNAQDNLSARGYPPTSQQLPAGNGNWPPNSRPTPGGALQSMEGDPQRGAYHPHGHGTAYGDLRNELRNEIQTDTSRTSLYGVPTISRSESRRAPPGAPTREPSRSYRQGRPGPGPPMGVDPNGALPPRRSSRGVQGGYSQIPGIPVAAPGTYTSEARLGEVPPMLSTSSEEWKDRGAAVGVRREVDADGRVTMKPVKKGVRDFTFGRILGEGSYSTVYLATDRQTLREYAVKVLEKKHIIKEKKIKYVNIEKNTLNRLTEHPGIVRLYYTFQDETSLYYVLDLCTGGELLGVLKKTGTFDVECTRFYGAQILDAIDYMHSRGIIHRDLKPENVLLDEQMHVKITDFGTAKLLRDPRDPRPPEETPGQSGEDDERAASFVGTAEYVSPELLTEKSASTASDIWAFGCIIYQLLAGRPPFKAGTEYLTFQKIVKLEYEFPPGFPSAARDLVERCLVLDPAQRFTVEHIKKHEFFAGQMFGKELWRMKAPRLRPYVPGSQEQQPQMMHLGGGGSNSNHSHHSMPMGNPSSTRGNTTTQGGPANNNVNRPARIITELPPPTQLDLDWSPVLTKNNERILKLGDLMVVSSPIPHSPHGKEGGEGHKKLARFFGGSTTKKRQRLVMITSSGRIVFAPAGGEEKKAKQEISLLASDCTWKAQIDAKGQPVWTPQIQGGVHYTFEEPKSSEKQHKDKSDKSSDGGAGRDGANNSSSSKSTVDEWIESLERAKDLALSQNLVGSNDNFGDMSMSSSPAGSMVNIGGGGGHHHNGRGHGNFSGGEGGYSISDRSGRNQLTKSQASLDDSSSVTKRNRFSRRQSKNGLGAAF

SEQ ID NO: 34687 - protein, 417 aa, Ralstonia eutropha JMP134
MLTREDNNVLTQVGRGTPMGELIRRFWIPALLASEIAEPGGKPVRVRLLGEDLVAFRDTDGKVGLLDEQCPHRRASLALGDNSDGGLRCLYHGWKFATDGTCLDTPTEPSGSAFCSRIRAQAYPTREAGGVIWTYMGPAAEEPQFPKFEWLSYPAVNAVPFKVLEDCNYAQAVEGTIDSAHAGVLHREQPWSAPAKYDHERDLQPKIEVEYTKYGLRYAGVRNFREEGKLHARVTEVVLPFFTLIPPDGFGVRKNRRMANAFVPRDDESTWHVQWFFDDTQPVDVAYRIEEGGHWVDENFRKKLNIDNWYQQDREWMKTGSMSGIKGILTQDHAVSETQGRILDRTKEHLGTSDVAVVAWRRQMIRTARALAERGEAPSVLTAPIPFPQIRAATVIFSNERTWKQEVPLNPDVALTA

SEQ ID NO: 34688 - protein, 450 aa, Frankia sp. EAN1pec
MSKPTQRSRPDDAHGPASRDGGPRRTAVTGVGVVAPGGSNRKEFWTLLTDGRTATRRLSFFDPSPFRSQVAAECDFDPLAAGLTRQEIARNDRFVQFALAAAAEAVADSGLDLGLGVGGTEREPGDGPVVGVSMGSAVGATTRLENEYVVVSDGGKHWEVDPRYASSFLYHALVPSCLATEIACRFGAHGPSFVVSTGCTSGIDAVGYGHQLIVDGEADIVIAGASDAPLSPISIACFDAIRATSARNDDPEHASRPFDASRDGFVMGEGSAVLILEELESARARGAHIYCEVGGYASRSNAFHMTGLRPDGVEMAEAIRIALDQARLDPSAVDYVNAHGSGTKQNDRHETAAFKRSLGAHAHEVPVSSIKSMVGHSLGAIGSIELAACALAIEHNVVPPTANWSTRDPECDLDYVPNTARDHTVDAALSVGSGFGGFQSAIVLTSADRA

SEQ ID NO: 34689 - protein, 623 aa, Oryza sativa (japonica cultivar-group)
MLEKKATRSTRVDGVSGEAVIEEFERVTRDAANVQRETLRRILAENGGVEYLRGLGLAGATDPATFRARVPLATHADLEPYIDRIADGDASPVLTAKPATSISLRSVSPPAAACCSLTSIENVADHGGDHLTAGACSSGTTQGKRKYLLFNEELVKSTMQIYRISYAFRNREFPVENGKALQFIYSSRETRTKGGLTATTATTNVYRSEEFKATMRDIQSQCCSPDEVIFGPDFAQSLYCHLLAGLLAAGDVQIVSATFAHSVVLAFQTFERAWEDLCADIRRGEVSPSRVTSPAVRRAMAALLAAPNPGLADEVARKCAALSNWYGVIPALWPNARYVYGIMTGSMEHYVKKLRHYAGGLPLVAAEYGASEGWVGANVEPGTPPERATFTVLPDIAYFEFIPLKPVAGDGGYAEAEPVGLTEVAAGELYEVVMTTFAGLYRYRLGDVVKVAGFYNATPKLKFVCRRNLMLSINIDKNSEQDLQLAVDAAARAVLAGEKLEVVDYTSHADVSSDPGHYVVFLELNAADPAAVDGDVMQACCDELDRAFADAGYVGSRKSGAIAPLELRVLQRGTFQKVLRHYLSLGAPVSQFKSPRCVSRSNSGVLQILAGCTVNVFFSSAYD

SEQ ID NO: 34690 - protein, 294 aa, Glycine max
MSEALEEVVPSMKGGCEEEGLNLEATELRLGLPGCESPEREGVFKSVVVSGAKRGFSDAIDGNWNGGGSEKDAAALFSPTSRGAVSVSVSAAKSLTLTATDCTNQPTALGASVLKETVPHSPKPLHENKPQISAPAAKAQVVGWPPIRSFRKNSMASQPQKNDAAADAEAKSGCLYVKVSMEGAPYLRKVDLNSFTTYKDLSLALEKMFSCFTLSQCGSYGVSSRENLSESRLMDLLHGSEYVLTYEDKDGDWMLVGDVPWEMFTESCKRLRIMKSSEAIGLAPRAMEKCKSRY

SEQ ID NO: 34691 - protein, 340 aa, Escherichia coli CFT073
MSTMKVLICQEIKNLVWEVRERPVPGDNEALIKIKTVGICGTDIHAWAGNQPFFSYPRVLGHEICGEIIESGKNIHNFNIGQQVAVIPYISCQQCPACKSGRTNCCEKISVIGVHQDGGFSEYLSVPVANILPADGIDPQAAALIEPFAISAHAVRRAAIAPSEQVLVVGAGPIGLGAAAIAKADGAQVVVADTSPARREHVATRLELPVLDPSAEDFDAQLRAQFGGSLAQKVIDATGNQHAMNNTVNLIRHGGTVVFVGLFKGELQFSDPEFHKKETTMMGSRNATPEDFAKVGRLMAEGKITADMMLTHRYPFATLAETYERDVINNRELIKGVITF

SEQ ID NO: 34692 - protein, 347 aa, Camellia sinensis
MKDSVASATASAPGTVCVTGAAGFIGSWLVMRLLERGYIVRATVRDPANLKKVKHLLDLPKADTNLTLWKADLNEEGSFDEAIEGCSGVFHVATPMDFESKDPENEVIKPTINGVLSIIRSCTKAKTVKRLVFTSSAGTVNVQEHQQPVFDENNWSDLDFINKKKMTGWMYFVSKTLAEKAAWEAAKENNIDFISIIPTLVVGPFIMPTFPPSLITALSPITRNEGHYSIIKQGQFVHLDDLCESHIFLYERPQAEGRYICSSHDATIHDLAKLMREKWPEYNVPTEFKGIDKDLPVVSFSSKKLIGMGFEFKYSLEDMFRGAIDTCREKGLLPHSFAENPVNGNKV

SEQ ID NO: 34693 - protein, 2062 aa, Streptococcus suis 89/1591
FLSGAGQLVQAEEVVLPASTSSTTLSEQDGGAVEATTTAIEATDSMVAEATAVTETADATAPEEAPIEEGSIRLHFENVDETAPESQGLWTWGGVAEPSDSNQWPTDTANFSSSQVDDYGHYVDIKKSETPGTIGYLVLKNGEKITESDQKVELLVPEQNEAWISSDYSVSSYEPLKDENVLRINYTREDNNYEGWGVWTWGDTTEASDGWPTGAVDFKLGKYGAYVDIPLSNGLDSKLGFLLINQNNPDLAGNKTIDLAFADRKRHSQIFLRNGDDKVYTNPYFIEEKVELDTSKATPGTKNVTVEASVKAPFNYNESGLVSVTVTNPENAEIVKMEVDTSAIGGGLVPISTELNRVTIKATSSTAPGTYSLPVKVYDKDNGYYETKLDVTITERVKADGEKDWDEQVIYFMMTDRFYNGDTSNDKLVEGTVTNPRGLYQGGDFKGVTAKLDYLKELGVDSIWLTPIVENIPQNVGSVKDGEYYAYHGYWASNFEKLNPHLGSLADFHELIDAAAEKGINIVVDVVLNHAGYGTEETFAGMVRTKEEDKQADDQLGSLSGLPDFKTEEAAVRNQLVAWQASWLERSTTAKGNSIYAFRVDTVKHVDDTTWQHFKNELVDRDPDFHLIGETWGANYKDTKGDLGIGTMDSLLDFGFKDIAKYLVNGQLKAAGKELEERSKVLTSAASLGQFLGSHDEDGFLYSLGGAEKEGNLDKLKLAASLLITAKGQPVIYYGEEVGQSGQNNWPVYDNRYDFDWSKVETSDITDHYQKLLAFRNANSTLLSRGDTSTLAGNDSQGWLISKRSYQDQAAYLVFSTNTESKEMALEVSSKDVVVTDAYTGKSYQAIEKGGKWVVQVELPTIGQGGTMLLQTEAGDIVNASVQGATEEPIEAGYFRVHFKTLPSDNLSSLGLWTWDDVEKPSSDVGAWPTGATNFSTAKQDDYGYYLDIKMKDETASKISLLINNTSGDNITGDKTIERISTKMNEAWFDENYQLSLYQPLKEGCIRINYFRTDGNYDQKGLWIWGDVTDLTLGDWPNGIDFENQGKYGAYIDVKLTDLPSSIGFLLLDESKSGDDVKIQQKDYSFKDLKNQTQIFLKDDDATIYTNPYFVNNVRVTGVSHVSLTALEAAFTTLEGADKDSILEKLSVTDKNGQTVAVTDLVLDLTSNKVRVLGDFNQENAGYTLKYGNDSFTTTMSWQLKDELYAYDGELGARVRQAGSVVDMTLWSPSADSVAVVLYDKDDQSKVVGKLAMTKGDKGQWDLELNSQSGLGIADYRGYYYHYEITRGGQSVLVLDPYAKSLAEWNSDLADTDPSYRIAKAAIVDPAEVGPSDLNYATIPNFNQREDAIIYEAHVRDFTSDPAISDELTAQFGTFAAFAERLSYLKDLGVTHIQLLPVMSYYFVNELKNAERMSEYASSNSNYNWGYDPQSYFAFTGMYSTDPTDPMKRIEEFKNLVNEIHKQGMGVILDVVYNHTSKTFLFEDLEPNYYHFMEADGTAKSSFGGGGLGTTHYMSRRVLVDSIKYLVDEFKVDGFRFDMMGDHDAEAIELAFTEAQKLNPNIIMLGEGWRTFTGDANQPVQPADQDWMSSTDTVAVFSDEIRNTLKSGYPNEGQPAFITGGAKSVESVFNNIKAQPGNFLADDPGDVIQYIAAHDNLTLFDIIAQSIKKDPSIAENYTEIHQRQRLGNLLVLTAQGTPFIHSGQEYGRTKQFRHPDYKEPVSEDKVPNKAHLLTNADGTPFDYPYYIHDSYDSSDAVNKFDWTKATDEALYPENTRTQAFTKGLIALRKSTDAFRLGTKEEVEQKVSLISIPGQNGIAKNDVVIAYQTIASNGDRYAVFVNADSKERSFVLSDIYKELLKGHVLVDGKRAGIAALTDLVGVTLTDDAVVLAPLTATVIRLPYITTAVPDTAPTAEEKPSLDFTTKERTEEKILPIVEEIRYDASLSTDQSYVLQEGKTGKKVLVYQDVLIDGKVVATNLLSETVVDSETRIVVKGSMEAKKEAEKPSLSTTAQASGQATSGASKASLPITGDRQSDLALLGLGLAGLGLTVAAQGRTKKSEE

SEQ ID NO: 34694 - protein, 284 aa, Securigera parviflora
GQATGEDSVVILHPQAVFKDPFRRGNNILVICDSYTPSGVPIPTNKRHDDAKIFSHPDVVAEEPWYGIEQEYTLLQKDTLWPYGWPVGGYPDSQGPYYCGNGADKAFGRDIVNAHYKACLYAGINISGINAEVMPGQWEFQVGPAVGISAGDEIWVARYILERITEMAGVVLSFDPKPIKGDWNGAGAHANYSTKSMRNDGGYEVIKSAIAKLEKRHKEHIAAYGEGNERRLTGKHETADINTFLWGVANRGASVRVGRETEKAGKGYFEDRRPASNMDPYVVT

SEQ ID NO: 34695 - protein, 572 aa, Arabidopsis thaliana
MAAVSVASAELPPPPQDGETLSNVPQTLSGEDCKKQRIQRPKSKNAEKCTVKCVNTCIRSGDGEGPINIRRFQRIAWQIEGIQVTVSCFFVTCGKTRSSSNNPHHTTFFILSENNNQMGEAAEQARGFHVTTTRKQVITAALPLQDHWLPLSNLDLLLPPLNVHVCFCYKKPLHFTNTVAYETLKTALAETLVSYYAFAGELVTNPTGEPEILCNNRGVDFVEAGADVELRELNLYDPDESIAKLVPIKKHGVIAIQVTQLKCGSIVVGCTFDHRVADAYSMNMFLLSWAEISRSDVPISCVPSFRRSLLNPRRPLVMDPSIDQIYMPVTSLPPPQETTNPENLLASRIYYIKANALQELQTLASSSKNGKRTKLESFSAFLWKLVAEHAAKDPVPIKTSKLGIVVDGRRRLMEKENNTYFGNVLSVPFGGQRIDDLISKPLSWVTEEVHRFLKKSVTKEHFLNLIDWVETCRPTPAVSRIYSVGSDDGPAFVVSSGRSFPVNQVDFGWGSPVFGSYHFPWGGSAGYVMPMPSSVDDRDWMVYLHLTKGQLRFIEEEASHVLKPIDNDYLKI

SEQ ID NO: 34696 - protein, 491 aa, Candida glabrata CBS138
MTQIDKKEVSGNIIVVSNRLPVTISKDDTGKYQYKMSSGGLVTALQGLKKTATFKWYGWPGLEIPDDEKEQVKQDLLEQFNAVPVFLSDEVADLHYNGFSNSILWPLFHYHPGEINFDENAWLAYNEANRAFAEVIFETMQDDDLIWVHDYHLMLLPQMLQEEITKRKLRNVKLGWFLHTPFPSSEIYRILPVRQEILRGVLSCDLLGFHTYDYARHFLSSVQRVLNVNTLPNGVEYQGRFVNVGAFPIGIDVSTFQDGLLKQQVKDRISQLKETFKGQKIIIGVDRLDYIKGVPQKLHAMEVFLSEHPEWRGKVVLVQVAVPSRGDVEEYQYLRSVVNELVGRINGQFGTAEFVPIHFMHKSVPFEELISLYAVSDVCLVSSTRDGMNLVSYEYIACQEETKGSLILSEFAGAAQSLNGAIIVNPWNIDEMSDAINEALTLPEVKREVNWEKLFKYISKYTSAFWGENFVHELYNTSSSSGSIKSSEEKH

SEQ ID NO: 34697 - protein, 230 aa, Novosphingobium aromaticivorans DSM 12444
MNPFEESHLVERIGWLRAAVLGANDGIVSTASLIIGVAASGADRQAIIVAAMAGLVAGAMSMAAGEYVSVSSQADTEKADLARETAELAADPEFEHRELAAIYVARGVDADTADKVAAQMMAHDPLTTHARDELHITSTTAARPVVAALASAATFTAGALLPVLLAALLPMSLLAAGEAVGSILFLALLGTLGARAGGAPAGRPVARVVFWGALAMALTAGIGRLVGAVV

SEQ ID NO: 34698 - protein, 349 aa, Ralstonia eutropha JMP134
MFLRNCWYMVGWSTDFTADAIVPFTVMDEPLAIYRKTDGSLAALEDRCCHRLAPLSVGRKEGDELRCMYHGLKFAADGRCTEVPGQDRISPRVCVRAYPIVEKHGAAWVWMGEAEKADEALVPPIIGPDNAEWAMQCSTFDMDVNAELISDNLLDLSHAPFVHEATFGASDPVALKMMKESETKRGVTQLERGVLADRWQLGRQSNPYFGARPCDDHVVSLFLVPGVFILTITSYEPGVLERSEGGDVTETPIFKRCTCQMITPISKNKSRFFFNFGPWAAAADLKQHCFGIADAAFQEDKRIIEAQQDMIHRSPGRKFVLLPMDQPVVRYNEIYARLLAVEKPVAEPA

SEQ ID NO: 34699 - protein, 407 aa, Candida glabrata CBS138
MGQLLSHPLTEKTIEYNDYKTKSSAAGSVPRFYNCVGSMQGYRLSQEDAHKVQNEDTILRVRFFNPFTGKHEKMMISMFAVFDGHGGDSCSKFLSGTSNPHLRAGLAKWVVYSFENHRYGAKKNISSVDNGGANNYTNTPNNSINGSNADNSTSYTRHFRTMEGLISQIIKDAYIKQDQELHQHFANSACGSTAVVALIINGTMLYVANCGDSRCILSSKARGIKTMSYDHKPQNIGELIRINDNGGTVSLGRVGGVLALSRAFSDFQFKRGVVYKNTNPMRISANGNHNSPTPPQEAQVSVEPDVLMHKLDFNKDEFLVLACDGIWDIYNNTRLIQFIKYHLMQGMKLDGIMTKLLDHGIAQANSSTGVGFDNMTAIVVVLNRPDESLHDWMNKMKLRLEREKGII

SEQ ID NO: 34700 - protein, 766 aa, Thermotoga maritima
MHHHHHHGKPIPNPLLGLDSTENLYFQGIDPFTKAYAFGFPKIGEKREFKKALEDFWKGKITEEQFEEEMNKLRMYMVENYRKNVDVIPSNELSYYDFVLDTAVMVGAVPERFGEYRGLSTYFDMARGGKALEMTKFFNTNYHYLVPEIETEEFYLLENKPLEDYLFFKSKGIETAPWVIGPFTFLYLSKRNGEWIRRPNQMEKLLESLVSVYKEVFEKLVENGCKEILVNEPAFVCDLEKAHWDLILNVYRELSEFPLTVFTYYDSVSDYEACVSLPVKRLHFDFVSNEENLKNLEKHGFPEDKKLVAGVINGRQPWKVDLRKVASLVEKLGASAISNSCPLFHLPVTLELENNLPGGLKEKLAFAKEKLEELKMLKDFLEGKTFDLPNVSFEDFAVDLQAVERVRNLPEDSFRREKEYTERDRIQRERLNLPLFPTTTIGSFPQTPEVRKMRSKYRKGEISKEEYEAFIKEQIKKAIELQEEIGLDVLVHGEFERTDMVEFFAEKLNGIATTQNGWVLSYGSRCYRPPIIYGTVTRPEPMTLKEITYAQSLTEKPVKGMLTGPVTIMSWSYYREDIPEREIAYQIALAINEEVKDLEEAGIKIVQIDEPAFREKAPIKKSKWPEYFEWAINAFNLAANARPETQIHAHMCYSDFNEIIEYIHQLEFDVISIEASRSKGEIISAFENFKGWIKQIGVGVWDIHSPAVPSINEMREIVERVLRVLPKELIWINPDCGLKTRNWDEVIPSLRNMVALAKEMREKFES

SEQ ID NO: 34701 - protein, 356 aa, Securigera parviflora
MSLLTDLVNLNLSESTEKIIAEYIWVGGSGLDIRSKARTLPGPVSDPAKLPKWNYDGSSTDQAPGEDSEVILYPQAIFRDPFRRGSNILVICDVYTPAGEPLPSSYRYNAAKIFSHPEVAAEEPWYGIEQEYTLLQKDINWPLGWPVGGFPGQQGPYYCGIGADKAYGRDIVDAHYKACLYAGINISGINGEVMPGQWEFQVGPSVGISAGDEIWAARYILERITEIAGAVVSFDPKPIPGDWNGAGAHTNYSTKSMREDGGFEIIKKAIEKLGLKHKEHIAAYGKGNERRLTGKHETADINTFSWGVANRGASVRVGRETEKEGKGYFEDRRPASNMDPYIVTSMIAETTILWKP

SEQ ID NO: 34702 - protein, 169 aa, Zea mays
  misc_feature (144)..(144): Xaa can be any naturally occurring amino acid
  unsure (1)..(169): unsure at all Xaa locations
NFEMAAATSSSPKSVHDFTVKDAKGNEVDLSIYKGKVLLIVNVASQCGLTNSNYTELAQLYQKYKDHGFEILAFPCNQFGNQEPGSNEEIVQFACTRFKAEYPIFDKVDVNGDKAAPIYKFLKSSKGGLFGSGIKWNFSKFLVXKDGNVVDRYAPTTSPLSIEKDLKKL

SEQ ID NO: 34703 - protein, 444 aa, Burkholderia vietnamiensis G4
MTTVFHRAPRATLPVAVAGDGIEIIDSTGKRYIDACGGAAVSCLGHSNQRVIDAIKRQVQQLPYAHTSFFTTDVAEELADRLVEAAPAGLEHVYFVSGGSEAIEAALKLARQYFVEKGEPQRRHFIARRQSYHGNTLGALAIGGNAWRREPFLPLLIEAHHVSPCYAYRDQAAGETDEAYAQRLADELEQKIVALGAENVAAFVAETVVGATAGAVPPVRTYLKKIRAVCDKYGVLLILDEIMSGMGRTGYLFACDEDDVAPDLLTIAKGLGAGYQPIGATLVSDRIYRTIVDGSGFFQHGHTYLGHATACAAALEVQRVIADEKLLDSVKARGEQLRASLREHYAAHPHVGDVRGRGLFVGVELVRDRDSKAPFDPKLKLHAAVKREAMQRGLMVYPMGGTIDGVHGDHILVAPPFICTAQQIDTIVERLSGAIGAALASAGA

SEQ ID NO: 34704 - protein, 406 aa, Kluyveromyces lactis NRRL Y-1140
MDSSAPLLSSTGAGIRRSSSALVRCIEVSKVVFHSSPVNYLLVFVPLGLIFGYGQLSTTWVFVFNFMAIIPLAAILAFATEQLSEKAGSTLGGLLNATLGNAVELIVSIIALKEGQIRIVQASMLGSLLSNLLLVLGFCFLFGGYNRVQQKFNQTAAQTMSSLLAISSASLLIPAAFKATLPHDKGTSHLVDDKILSLSRSTSIVLLVVYVLFLIFQLGSHRVMFEEQTEETEEVLNIHQQHEQISESMSLRSSLIFLAITTILVSICADFLVGTIDDIVVSTGLSKTFIGLIVIPIVGNAAEHVTSVIVAMKDKMDLALSVAIGSSLQIALFVTPFMVLVGWAIDVPMTLNFSTFETVIMLVSVFLSNYLILDGESNWMEGSMSLAMYALVALAFFYYPDEQAVN

SEQ ID NO: 34705 - protein, 330 aa, Mesorhizobium sp. BNC1
MSQYDVLCIGNAIVDIIARCDDAFLVENGIIKGAMNLIDAERSELLYERMGPAIETSGGSAGNTAAGVANFGGTAAYFGKVSNDHLGAIYRHDIRAQGVAFDTPSLDGNPPTARSMIFVTPDGERSMNTYLGACVELGPEDVEEEKARNAKVTYFEGYLWDPPRAKEAIRKTAEIAHAAGREVSMTLSDPFCVDRYRAEFLDLMRSGTVDIVFANEHEVMSLYQTASLDAAISAFREDCRLGLITRSEKGSIAVTREETITIKPVPVSNLVDTTGAGDLYAAGFLFGYTHNRSITDCGRLGSLAAALCIEQIGPRVQVSLKEAAEQAGLL

SEQ ID NO: 34706 - protein, 390 aa, Crocosphaera watsonii WH 8501
MATLLEQLREFTVVVADTGDIQAIETFTPRDATTNPSLITAAAQMPQYQSIVDDTLKTARKELGKDADESAVVTLAFDRLAVAFGLKILEIIPGRVSTEVDARLSYDTEATLEKARYLISEYEKAGVSRDRILIKIASTWEGIKAAEVLEKEGIHCNLTLLFGMHQAVACAEANVTLISPFVGRILDWYKKETGKEYAPTEDPGVMSVTTIYNYYKKFGHKTEVMGASFRNIGEICELAGCDLLTISPKLLDQLNSTEETLPRKLDPEAAAKMDIAKIAMDKAIFDKMHQEDKMAYEKLDEGIKGFTKALETLEEMLKERLTRIEGETRVNNAAADIFRVYDLDGDGFITREEWAGTDVVFDAIDINHDGKITPEEMAAGLGAAICLVEA

SEQ ID NO: 34707 - protein, 339 aa, Cryptococcus neoformans var. neoformans
MVVKVGINGFGRIGRIVLRNAIEHGDLEVVAVNDPFIDLDYMVYMFKYDSTHGRFKGSVEVKDGKLYINNKAIAVFGEKDPANIKWGEAGAEYVVESTGVFTTTEKAGVHLKGSAKKVVISAPSADAPMFVCGVNLDAYKPEYQIVSNASCTTNCLTPLAKVIHDNFTIIEGLMTTVHATTATQKTVDGPSHKDWRGGRGAAANIIPSSTGAAKAVGKVIPSLNGKLTGMSFRVPTSDVSVVDLVCRIEKGASYEEIKNVIKKASESPELKGILGYTEDAVVSTDFIGSTESSIFDAQAGIALNANFVKLVSWYDNEYGYSRRVCDLISYIAGVDAKAQ

SEQ ID NO: 34708 - protein, 127 aa, Brassica napus
  misc_feature (95)..(95): Xaa can be any naturally occurring amino acid
  unsure (1)..(127): unsure at all Xaa locations
MSLMPWFGGGRGGMDPFSSDLWDPFGSPWPLDRSRREGGSRDDATAMARTNVDWHENDKEHIFSAEIPGVRKEDVKVEVEDGNVLKISGEKTREXEHKGDAWNRVERSFGSFMRRFRLPENAKADSI

SEQ ID NO: 34709 - protein, 202 aa, Chlamydophila pneumoniae J138
MYKDIVINKDKLIDPSKIFLFWGDERLAPITSSESNYGQAMSILRDLNIPDEQIFRMETENPDGAKKYQELIENKIPDASFDMIMLGLGEDGHTLSLFSNTSALEEENDLVVFNSVPHLETERMTLTFPCVHKGKHVVVYVQGENKKPILKSVFFSEGREEKLYPIERVGRDRSPLFWIISPESYDIADFDNISSIYKMDIL

SEQ ID NO: 34710 - protein, 359 aa, Zea mays
MGHDEAVVTQNSVKAPSPPKDQPAIYPCFDWSTMQAYYGPGVLPPAFFNPGVAPGHAPPPYVWGPQTMPPAAFGKSYAAIYPPCWYGGFLHPLMPLVVNPLSAEPAKSGNSKDNSLKKKLKEIDGSAVQVATVRKQVGSQLEGSSDGNNPKVSGTPKKRSLDDRTTSETCGESGRLPALSSVRIPDTMMKPCVSTGSDFKVSGATSTEWPAKDDKESKRERRKQSNRESARRSRLRKQAETEELARKVELLTAENTSLRSEISRLTESSQKLRMENSALMEKLADGTSDQAQEASAGHQTTPTAPSSARVVKNFLWMMDGEGASRGGSGSSSRRRDHGAPMLRQLLSSGPLAADAVAAS

SEQ ID NO: 34711 - protein, 225 aa, Brassica napus
  misc_feature (33)..(33): Xaa can be any naturally occurring amino acid
  unsure (1)..(225): unsure at all Xaa locations
KTQTNSPVAGELTIAGEMGVCYKECLKNHAANXGGHALDGCGEFMPTPTATPTDPSSLRCAACGCHRNFHRRDPSDHLNFLPSHPTSSPSGTESPPSQSLHHVASPVPCSYYTSAPHHMLLSLSSGFPGPADQDPAAVRSENSSKGGMRKRTRTKFTAEQKIKMRAFAEKAGWKINGCDEKLVREFCSENGIERGVLKVWMHNNKYSLLNGKNREILSMDQPLCL

SEQ ID NO: 34712 - protein, 477 aa, Synechococcus sp. CC9605
MPTSRVLFWHRRDLRLADNLGLVVAAQISPAVTGVYVLDPAVINPPPELPPMAPARLWFLIESLVELQQRWREAGSRLLVVEGDPVAVLPQVAQQISAEAVVWNRDVEPYARKRDRQVAKTLQADGRRVVADWDQLLIAPELLKTGAGDPYRVYGPFLRNWRGQVLAQKPATVAAPTGLVDLPPELMPAGDPLPALRESHGFQGSEICPCRPGEAAALEQLTTFCNGPLLGYEPDRNFPGTAGTSYLSAALSVGTLSPRQAWCAAQDSREQARSEEQLQAIAVWEQELGWREFYQQALFYFPELADGPYREQWRRFPWENNEDWFDFWKEGQTGMPIIDAAMRQLNQTGWMHNRCRMIVASYLVKDLICDWRWGERAFMELEVDGDLAANNGGWQWSASSGMDTKPLRIFNPATQASKFDSAGDYIRRWVPELRHVNTKDLLSGEIGALERRDYPEPLVDHKNQQARFKALYATIRS

SEQ ID NO: 34713 - protein, 145 aa, Triticum aestivum
  misc_feature (4)..(4): Xaa can be any naturally occurring amino acid
  misc_feature (10)..(10): Xaa can be any naturally occurring amino acid
  misc_feature (13)..(13): Xaa can be any naturally occurring amino acid
  misc_feature (15)..(15): Xaa can be any naturally occurring amino acid
  misc_feature (27)..(27): Xaa can be any naturally occurring amino acid
  misc_feature (33)..(33): Xaa can be any naturally occurring amino acid
  misc_feature (60)..(60): Xaa can be any naturally occurring amino acid
  unsure (1)..(145): unsure at all Xaa locations
RSAXIYTQPXHCXPXKVLDADVTNSVXGEECVXKNCKIHHQVVELRSCISEGAIIEDTCXMGADYYETEADKKLLAEKGGIPIGIGKNSHIKRAIIDKNARIGDNVMIINVDNVQEAARETDGYFIKSGIVTVIKDALLPSGTVI

SEQ ID NO: 34714 - protein, 338 aa, Thiomicrospira crunogena XCL-2
MQVYYDKDCDLSIIQGMKVAIIGFGSQGHAHAANLQDSGVDVTVGLRPGSSSIKKAEGYGLKTADVATAVAGADVVMILTPDEFQSVLYKEEIEPNIKQGAVLAFAHGFAIIYNQIEPRKDLDVIMIAPKAPGHTVRSEFVRGGGIPDLIAIQQDASGKAKEIALSYASGVGGGRTGIIETTFRDECETDLFGEQAVLCGGAVELVKAGFDTLVEAGYEPEMAYFECLHELKLIVDLMFEGGIADMNYSISNNAEYGEYVTGPRVINDESRAAMREALKNIQTGEYAKQFILEGQSNYPSMTAARRLNEEHGIEVVGRKLRAMMPWIASNKIVDQEKN

SEQ ID NO: 34715 - protein, 890 aa, Arabidopsis thaliana
MEDDGGSDGGEGNGGFSPNSSFGAFADTAMDLDFMDELLFDGCWLETTDSKSLKQTEQSPSASTAMNDNSPFLCFGENPSQDNFSNEETERMFPQAEKFLLEEAEVGKSWWIAPSASEGPSSSVKERLLQAISGLNEAVQDKDFLVQIWVPIQQEGKSFLTTWAQPHLFNQEYSSLAEYRHVSETYNFPADEGMKDFVGLPGRVFLQKFPEWTPDVRFFRRDEYPRIKEAQKCDVRGSLALPVFERGSGTCLGVVEIVTTTQKMNYRQELEKMCKALEVYSDFYCAALPEIKDFLATICRSYDFPLALSWAPCARQGKVGSRHSDENFSECVSTIDSACSVPDEQSKSFWEACSEHHLLQGEGIVGKAFEATKLFFVPEVATFSKTNYPLAHHAKISGLHAALAVPLKSKSGLVEFVLEFFFPKACLDTEAQQEMLKSLCVTLQQDFRSSNLFIKDLELEVVLPVRETMLFSENLLCGAETVESLTEIQMQESSWIAHMIKANEKGKDVSLSWEYQKEDPKELSSGRENSQLDPVPNNVPLEAEQLQQASTPGLRVDIGPSTESASTGGGNMLSSRRPGEKKRAKTEKTIGLEVLRQYFAGSLKDAAKSIGVCPTTLKRICRQHGIMRWPSRKIKKVGHSLKKLQLVMDSVQGAQGSIQLDSFYTSFPELNSPNMSSNGPSLKSNEQPSHLNAQTDNGIMAEENPRSPSSSCSKSSGSSNNNENTGNILVAEDADAVLKRAHSEAQLHNVNQEETKCLARTQSHKTFKEPLVLDNSSPLTGSSNTSLRARGAIKVKATFGEARIRFTLLPSWGFAELKQEIARRFNIDDISWFDLKYLDDDKEWVLLTCEADLVECIDIYRLTQTHTIKISLNEASQVKLSGSFGNTGLS

SEQ ID NO: 34716 - protein, 183 aa, Arabidopsis thaliana
MGLISSSSPVEESHYHTHKIFLFSNYILLGAASSCIFLTLSLRLIPSICGFLLILLHATTIAAAVSGCAAASCGRNRWYAAHMVATVLTAIFQGSVSVLIFTNTSKFLGSLKSYVREEDAAVILKLGGGLCIVIFCLDWIVLVCAFFLKYYAYVDGGDGVAMKRTGKVQSEENPKDWPWPFQV

SEQ ID NO: 34717 - protein, 355 aa, Thermotoga maritima MSB8
MKKAIVLCAGKGTRLRPLTFTTAKHLIPIANKPILFYSLENIARAGIEEVGIVVSPHNAEEFKSIVGTGENFGLRISYIIQEEPKGLAHAVWVSREFLGDEDFMMYLGDNLILEDLGKFVKDFENSDYAASILLSPVKDPTRFGVAVMEGDRVIKVVEKPKTPPSNLAIVGLYLFRNKIFEGIKNIKPSWRGELEITDAIEYLIEKGEKVRGYIVYGWWKDTGKPEDLLEANRKILMETTEELLGEMDDKSSIQGPVRIGKASKIVNSVIRGPAVIGENCFIKNSYVGPYSSIGNRVILEDCEVENSIVMDECSITGVEKRIDSSILGKGVSVKGSQKRPASLNLILGNMSRVEL

SEQ ID NO: 34718 - protein, 78 aa, Helianthus annuus
MKSSMKMFAALLLVVMCLLANEMGGPLVVEARTCESQSHKFKGTCLSDTNCANVCHSERFSGGKCRGFRRRCFCTTHC

SEQ ID NO: 34719 - protein, 228 aa, Brassica napus
GMVLGLVKSTFYDHFCAGEDAAAAAQRVRSVYEASGLKGMLVYGVEHADDAASCDENMHHFLRTIEAAKSLPTSHFSSVVVKITAICPISLLKRVSDLLRWEYKTKNFKLSWKLKSFPVFSDSSPLYHTNSEPEPLTAEEERELEAAHVRIQDICRKCQESNVPLLVDAEDTILQPAIDYMAYSSAILFNADKDRPIVYNTIQAYLRDAGERLHLAGQEAEKENVPMG

SEQ ID NO: 34720 - protein, 229 aa, Triticum aestivum
GQERSPDVQQSAAMGEQYPHTYGGGGGKAAAAEQTSVPERRYRGVRQRPWGKWAAEIRDPHKAARVWLGTFETAEAAARAYDEAALRFRGSRAKLNFPEDARLTAPAAPTASAAPTVASSAAAYPASAVSDYLQYQMLLRAGGGGFPPYYGGGGGGGISGSSSGSYSLPESSVTVASVPSSASSASGYGGAAAEHGEAAQWAWPAETAWTYPATTGSWSGSSQYPPPPQ

SEQ ID NO: 34721 - protein, 250 aa, Oryza sativa (japonica cultivar-group)
MAVEAVLEASRSSSEEEAEVIVTHGGGGGGGGGGGQVEGWGKRKRSRRRRPQLPPSEEEYLALCLLMLARGRRDGDDVAASASAAAAAVEHRCSVCGKAFASYQALGGHKASHRKPPPPPPPAMVDDDEVVVETKPAAIATPSSSASGVSGGGGGRAHECNVCGKAFPTGQALGGHKRCHYDGTIGSAAGAGASKPAAKTTVAVAASRGFDLNLPALPDVAAAADQRCAAEDDEVLSPLAFKKPRLMIPA

SEQ ID NO: 34722 - protein, 363 aa, Musa acuminata
MGFTENQLCFDLIESWLENHPDPAAFKKDGALLFRELALFQDYHGLPAFKRALTKYMGEVRGNKVAFDPNRLVLTAGATSANETLMFCLAEPGEAFLLPTPYYPGFDRDLKWRTGAEIVPIHCSSSNGFRITKPALEAAYQDAQKRSLRVKGVLVTNPSNPLGTTLTRHELDILVDFVVSKDIHLISDEIYSGTNFDSPGFISIAEATKDRNNVSHRIHIVCSLSKDLGLPGFRVGAIYSENEAVVSAATKMSSFGMVSSQTQYLLAALLSDKEFTDKYLLENQKRLKERHDMLVEGLRRIGIGCLKGSAALFCWVDVRHLLKSNTFKGAMELWKKIVYQVGLNISPGSSCHCDEPGWFSVTF

SEQ ID NO: 34723 - protein, 347 aa, Oryza sativa (japonica cultivar-group)
MDVDSVECLSLPDSSSSSGAGAGGGGGGGGGGGVGAMDAADDVGLALHAHGALLAAAAAARAAACSKGGGGGGAAAGSGVHELLECPVCTNSMYPPIHQCQNGHTLCSTCKARVHNRCPTCRQELGDIRCLALEKVAESLELPCKYCSLGCPEIFPYYSKIKHEAQCMFRPYNCPYAGSECAVVGDIPYLVAHLRDDHKVDMHSGCTFNHRYVKSNPREVENATWMLTVFHCFGQYFCLHFEAFQLGMAPVYMAFLRFMGDENEARNYSYSLEVGANGRKMVWEGTPRSVRDSHRKVRDSHDGLIIQRNMALFFSGGDRKELKLRITGRIWKEQQTPDGACIPNLCS

SEQ ID NO: 34724 - protein, 343 aa, Photobacterium profundum
MKIKALSKLKPEEGIWMNEVDKPEMGHNDLLIRIKKTAICGTDVHIYNWDEWSQKTIPVPMVVGHEYVGEVVGIGQEVRGFTIGDRVSGEGHITCGHCRNCRGGRTHLCRNTTGVGVNRDGAFAEFLVIPAFNAFKIPAGISDDLASIFDPFGNAVHTALSFDLVGEDVLITGAGPIGIMAAAVAKHVGARHVVITDVNEYRLDLARKMGVTRAVNVANEKLEDVMSELGMTEGFDVGLEMSGVPSAFNGMLASMNHGGKVALLGIPPSDMAVDWTQVIFKGLVIKGIYGREMFETWYKMASLIQSGLDLTPIITHHYKIDDFQKGFDMMRSGMSGKVILDWE

SEQ ID NO: 34725 - protein, 175 aa, Brassica napus
  misc_feature (137)..(137): Xaa can be any naturally occurring amino acid
  unsure (1)..(175): unsure at all Xaa locations
MISSVKPTPSSFSATSTGARRSIPTKLQFSPLRITRSCHNQSFINSNVSHQKPLHISSAQNLSSFKREVRVEAYEADRSRPLDINIELPDEQSAQKLKIGIYFATWWALNVVFNIYNKKVLNAFPYPWLTSTLSLAXGSLMRLVSWASRIAEAPKTDLDFWKTLSRGLGPVAEAS

SEQ ID NO: 34726 - protein, 626 aa, Geobacter sulfurreducens PCA
MSRILDRVDSPSDLKGLTTAELGILAEEIRQEIITVCSRNGGHLAPSLGVVELTLALHRVFTSPEDKIVWDVGHQAYAHKLVTGRRDRFATLRTLGGISGFLKRAESPHDVFDAGHASTSISAALGLAAARDLAGRNNKVVAVIGDGSMTGGIAYEGLNHAGHLNRDLVVVLNDNEMSIAENVGALSNFLSRTVTSEFVHTLKKDVETFLGGLDRIGRNVLKVAKRAEESLKGLFTPGMLFEAFGFEYIGPIDGHDIGRLTETFEKVKRFDDAVLIHVLTKKGKGFAPAEAKPSLFHGVGPFDPVSGEIVKGKGGATSYTGVFGQALTRIADEDERVVAITAAMPDGTGLGSFSARHPGRFFDVGIAEQHGVTFAAGLAAEGYRPVFAIYSSFLQRAYDQLFHDVCLMNLPVTFAIDRSGVVGSDGPTHHGLFDLSYLRTLPNMVVMAPKDENELQHMLKTAIDHNGPAAVRYPRGNGLGVPLDQSLAPIPLGTSEVLRAGSGTCVVLAVGAMVGPALEAANTLEGEGIDLTVVNVRFVKPLDRELILSYVGRAGTLVTIEENVLQGGFGSAVLELLADEGVGGVAVHRFGYPDRYVEQGEQHELRSRYGLDAEGIAGRIRTLSAR

SEQ ID NO: 34727 - protein, 503 aa, Burkholderia vietnamiensis G4
MKHVSERAPAKAGGAQPRDAERDAMFASHEAGYEQKLKPRHVQMIAMGGAIGTGLFLGAGGRLQSAGPALALVYLVCGAFAFLIMRALGELVMHRPTSGSFVSYAREFMGERASFVAGWMYYLNWATTGIVDITAVAIYMKYWAVFTDVPQWVFALGALGIVSVMNMIGVKVFGEMEFWFSIVKVGTLALFLAVGAVFLASGHPVAGQMPGLHLVADHGGIFPHGILPAVLIVQGVVFAYASIELVGVAAGETADARKVLPKAINSVMWRIALFYVGSVVLLTMLLPWTAYSAHESPFVTFFSKLGVPYVGTVMNVVVLTAALSSLNSGLYSTGRVLRSLAMGGSAPRFVSRMNARGVPYGGILVTVAVNALGVPLNYIVPAQAFEIVLNMASLGIITTWGFIVMCQILFRRAVDRGELSPVSFRMPGAPFTSWLTLGFLVSVLVLMAFDYPGGTWTVAMIPVVVLALVVGWKLAKRGAARDAAAAAAAQAASPIAADPAGSV

SEQ ID NO: 34728 - protein, 340 aa, Paulownia kawakamii
MNDGPEVCRKVRTRRPIQTGQSSLGPDARHTDPPGPPPPGPLGDLLPFPYARRHPPRRRPSWPQPRPPPNPSFPPSQWAAAVGPAQQDQRDQACVPFKDPAGRRGLFRWAWIGRPAAGFDGGGSSPGPRHGHSNSVDEYSSAMSSELDSIAKRAMAADRLAELSLIDPKRAKRILANRQSAARSKERKTRYTSELERKVQTLQTEATTLSAQITLLQRDTTGLTTENKELKMKLQAMEQQAHLRDALNEALKDELQWLKIAAGQVPGVNGNNRGSFSQFSSQPPTIRYFGNHLAQQQQQQQQQQQQQQQQQPLHMPHSSANNPRLGGQSQLSFQDFNHRV

SEQ ID NO: 34729 - protein, 147 aa, Crocosphaera watsonii WH 8501
MALLRYNPWTEMNALQRQINQLFDDGVLTTSERGLKEAIFAPSAELSETDEAVMLKLELPGVKAEDVDIQATKEAIYITGERKKETKSEENGVTRSEFRYGKFSRFIGLPALIDNTKISAEYKDGILNLTLPKAEEEKHKVVKITLG

SEQ ID NO: 34730 - protein, 450 aa, Idiomarina loihiensis L2TR
MSRHYDYLAIGAGSGGIASANRAAIRGAKAAVIEAKHVGGTCVNVGCVPKKVMWYGAHIAEAIKYSPSYGFELEQKGFDWATMVKNREAYIERIHGGYHRGFQGNGVEFIEGFAKFVDHKTVEVNGEKITADHITIATGGRPMIPEIPGAEHGIDSDGFFALTEQPKKAAVIGAGYIAVEIAGVFHALGTDTHLMVRRDRPLRTFDKDITDGLLERMKQDGPELHTETTVREVVKQDDGTLTLHFEGGQTMDGFDCLVWAIGRVPSTDKINLECTGVELDSEGFINVDKFQNTNVQGIYAVGDNTGAAALTPVAIKAGRLLAERLFNNMPNAHMDFENIPTVVFSHPTIGTVGLSEEDAKLKFGEDNITVYKSSFAAMYNAITPHRALSYFKLVCHGKEEKVVGIHGIGEGMDEILQGFAVALKMGATKADLDSTVALHPTSAEEFVTLK

SEQ ID NO: 34731 - protein, 920 aa, Zea mays
MTTNTKRAYKLQEFVAHSSNVNCLKIGRKTSRVLVTGGEDHKVNLWAIGKPNSILSLSGHTSAVESVGFDSTEVFVAAGAASGTIKLWDLEEAKIVRTLTGHRSNCMSVDFHPFGEFFASGSLDTNLKIWDIRRKNCIHTYKGHTRGVNTIRFTPDGRWVVSGGEDNIVKLWDLTAGKLLHEFKCHEGQIQCIDFHPHEFLLATGSADKTVKFWDLETFELIGSTGPETTGVRSMTFNPDGRSLLCGLHESLKVFSWEPIRCHDTVDVGWSRLADLNVHEGKLLGCSFNQSCVGIWVVDLTRLEPYTMGTSTKVNGHSELKTVSSGTLPLQNDSGSRANIGRSSVLQNTENNLKTTSGRLSASQNSDSAPKETNSAPSSGLIPSTPHRAGVGSHNRSVGNSAFQSGGTTLKRSSLRNNSASNVHNFSKADVVPVIVPRTSSGGELATDSRSDAADVAPVLPKVTRRVEPATDSRKESNDVELVVPRASSRMEIADLAPISSSKSGRRLESAPDSKEESADTAPVVVSNPRANVRMEIVSDSAPALSKSNRKLDSGTNSKKESADAVIVPRTNSRMEMISDSRREPSAGRISPFRIQSRYAEPRKLAHARTDSNKVDSRSKITETEDFNCQIFLPRRNGVFQTISSEEPREDVKCGPVDRVGFSNSSEPNASVRNENYVPRMRKPGDNCYIEVSRAGRARSSVSNWEGRDQPPSHEEPTTSSSTLAPTGHPYSSRGSNQASEAPIIASDEDVLSLIMERHDLFLSSTKSRLMKLQIIHQMWERNDIRGVLSAMDRMGDHAVCADMASVLMEKSETITLDLCTSILPVVTDLLESKIDRHLVVALELLVKLVRTFGPMIHSTVSSGPCVGVDLEAEQRRERCNLCFIELEKAKNKLPSLTRRKGAVANAAQELALVFQEIMS

SEQ ID NO: 34732 - protein, 179 aa, Burkholderia fungorum LB400
MSAARGAVIWMTGLSGAGKSTLANALHLRLKEAGQAAIVLDGDVLRRGLNADLGFTPEDRTENLRRVAHVAALFMQQGFVVIAAVISPEHRHRRAAREIVGEGFVEVFVNAPLQVCEARDAKGLYARARRGEIAHFTGISDPFEAPLAADLVIETDRMPVNEGVDRLLAHLVTMGRVSG

SEQ ID NO: 34733 - protein, 331 aa, Saccharomycetales
VRVAIDGFGRIGRLVMRIALSRPBVZVVASBBPFIBLDYAAYMFKYDSTHGRYAGEVSHDDKHIIVDGKKIATYQERDPANLPWSSGDSVIAIDSTGVFKELDTAQKHIDAGAKKVVITAPSSTAPMFVMGVDSEKYTSDLKIVSNASCTTNCLAPLAKVINDAFGIEEGLMTTVHSLTATQKTVDGPSHKDWRGGRTASGNIIPSSTGAAKAVGKVLPELQGKLTGMAFRVPTVBVSVVBLTVKLDKETTYDEIKKVVKAAAEGKLKGVLGYTZBAVVSSBFLGSBHSSIFBASAGIZLSPKFVKLVSWYBBZYGYSTRVVDLVEHIAKA

SEQ ID NO: 34734 - protein, 408 aa, Methanococcus maripaludis S2
MATADLFADPTNIVTGLSTLATSGDVMFLVLMGVLVFSMQLGFALLEGGQVRKKNVNNVMMKNMADWLIGAVSWLFIGGVLSVSLVPADFFSWWGQIFTTNFANNGIDLANWFFGLVFAATAATIVSGGVAERIKFKSYLLMSIIITAILYPLFVYLGPWGSGMIPFNDYAGSFVVHGLGGFLALGAIAALGPRIGKFVNKKAISIPGHNIPMSVFGAFVLAIGWYGFNVGSSFAVADISGLVCATTTLAMAGGGIGALLASKDDVLFTANGIVAGLVAICSGTDVVSPIGALIIGLVAGIQVPIVYKIVEKMGLDDVCGVIPVHGTAGILGGILTGVFGMAALGGAGGVSLVNQLIAAGLTVVYGTGLGFGLGKLVGGFTGGLRVTEEEEKMGLDLAEHKLPAYPDE

SEQ ID NO: 34735 - protein, 528 aa, Arabidopsis thaliana
MSAPKSGGDPLPHPPKEQLPDISYCITSPPPWPEAVLLGFQHYLVMLGTTVLIPSALVPQMGGRNEEKAKLIQTILFVAGLNTLLQTVFGTRLPAVIGASYTFVPVTISIMLSGRFNDVADPVERFKRIIRATQGALIVASTLQIILGFSGLWRNVVRFLSPLSAAPLVGLVGYGLYELGFPGVAKCIEIGLPGLIILILISQYMPHVIKGGKHVFARFAVIFSVAIVWLYAFFLTLGGAYNGVGTDTQRSCRTDRAGLISAAPWIRVPWPFQWGAPLFDAGEAFAMMMASFVALVESTGAFIAVSRYASATMPPPSVISRGVGWQGVAILISGLFGTGIGSSVSVENAGLLALTKIGSRRVVQISAGFMIFFSILGKFGAVFASIPSPIIAALYCLFFAYVGAGGLSLLQFCNLNSFRTLFILGFSIFLGLSIPQYFNEHTAIKGYGPVHTGARWFNDMVNVPFSSKAFVGGCVAYLLDTTLHKKDGSIRKDRGKHWWDRFWTFKNDPRTEEFYALPFNLNKYFPSV

SEQ ID NO: 34736 - protein, 396 aa, Thiobacillus denitrificans ATCC 25259
MHIRKFWLLFAQSVTVALGALVVVALFKPDLLQWRAQTPNLTIQQARPQGGGTVTVAPNESFALAAQKVIPSVVNVFTQQKVRNPAHPAMQDPIFRYFFGDRLDARPREVSNLGSGVIVTTNGYILTNHHVVDAADQIEVALADGKTVPARVIGADPETDLAVLKIDAEKLPAITFANADSLKVGDWVLAVGNPFGVGQTVTAGIVSALGRTRLGINTFENFIQTDAAINPGNSGGALVDSAGNLVGVNSAIYSRTGGSQGIGFAIPVSIARQVMEQIIKSGSVTRGWVGVEVQDLTPELAESFNLPDVNGALIAGVLKGGPADTGGVRPGDILLAVNGRRVTDSASLLNLIAELTPGQSARLTVARKQRSLDLKVEVGRRPLQRALPMPPEPALE

SEQ ID NO: 34737 - protein, 270 aa, Mycobacterium bovis AF2122/97
MVAVEQSEASRLGPVFDSCRANNRAALIGYLPTGYPDVPASVAAMTALVESGCDIIEVGVPYSDPGMDGPTIARATEAALRGGVRVRDTLAAVEAISIAGGRAVVMTYWNPVLRYGVDAFARDLAAAGGLGLITPDLIPDEAQQWLAASEEHRLDRIFLVAPSSTPERLAATVEASRGFVYAASTMGVTGARDAVSQAAPELVGRVKAVSDIPVGVGLGVRSRAQAAQIAQYADGVIVGSALVTALTEGLPRLRALTGELAAGVRLGMSA

SEQ ID NO: 34738 - protein, 351 aa, Synechococcus sp. CC9605
MSSGKKTAPTVSVLAEHVSDHLSVFVVAEDTDAKRPANGGLRVLNYPSDEACIADGQRLAGLMTHKHDLYGTGFAGGKIVARAAEPDAVKDELISVTAELLESLDGAMITGCDLNTSLEDMERLTALTPHVLAAVGSPVDASAATAHGTLGAVEAVLDKALNDAQPGRALVHGCGAVGGTVARHLVEHGWTVFTVDLNREKASFTGATPLPDSCAWWELNHDLLLPCSISGLINAEMATALKTPAVVPAANAPFQQPQLADDLRRRGVKVLPDPLVNAGAVIADSIERFSPDAWKDAGAVDVYAFVRDEVRRRASDYLNRREQGLSVGAALDEVAATPSTEPIGLSFGESE

SEQ ID NO: 34739 - protein, 327 aa, Thermus thermophilus
MKAPVRVAVTGAAGQIGYSLLFRIAAGEMLGKDQPVILQLLEIPQAMKALEGVVMELEDCAFPLLAGLEATDDPDVAFKDADYALLVGAAPRKAGMERRDLLQVNGKIFTEQGRALAEVAKKDVKVLVVGNPANTNALIAYKNAPGLNPRNFTAMTRLDHNRAKAQLAKKTGTGVDRIRRMTVWGNHSSTMFPDLFHAEVDGRPALELVDMEWYEKVFIPTVAQRGAAIIQARGASSAASAANAAIEHIRDWALGTPEGDWVSMAVPSQGEYGIPEGIVYSFPVTAKDGAYRVVEGLEINEFARKRMEITAQELLDEMEQVKALGLI

SEQ ID NO: 34740 - protein, 391 aa, Clostridium tetani E88
MKNKIHSYIDNIALELNNMADNIFDNPEEGLKEYKACDLLCDYLKEKEFKVEKGIGGFETAFRAVYEFGTGGPSIGLLCEYDALANIGHACGHHMQGPAILGAAIALKEVVKDQPFKVVVYGTPAEETIGGKLQMVKEGCFKDIDVAMMMHGGPETTTDVKSLAMSKFKVIFNGKSAHAALKPENGKSALDALILSFQGIEFMREHVVDDVRMHYTILSAGGTAANVVPAQAIGSFYVRSYNRDYLNDVIRRFRNVMKGAALMTDTEYEIITEKEIDNKIPVLSLNDIVMENAKLVNAPTIRPPRQKTGSTDFGSVMYQVPGTCIRIAFVEEGTSSHSEEYLKAGKTDEAHNAIMLSAKILADSAYDLISNKELFDEVKEEFIRAKEAAKK

SEQ ID NO: 34741 - protein, 281 aa, Leccinum brunneogriseolum
  misc_feature (69)..(71): Xaa can be any naturally occurring amino acid
  misc_feature (133)..(141): Xaa can be any naturally occurring amino acid
  unsure (1)..(281): unsure at all Xaa locations
AVNDPFIDLEYMVYMFKYDSVHGRFKGDVHAKDGKLYINGKAITVYAERDPANIKWGAVGAEYVVESTXXXTTIEKAGAHLKGGAKKVIISAPSADAPMFVCGVNLDKYDPKYTVISNASCTTNCLAPLAKVXXXXXXXXXGLMSTIHGTTATQKTVDGPSAKDWRGGRAVNGNIIPSSTGAAKAVGKVIPTLNGKLTGLAFRVPTNDVSVVDLVVRLEKSASYDEIKAAVKAASESPDLKGIIEYTDEALVSTDFTGHPASSIFDASGSIMLNPNFVKLI

SEQ ID NO: 34742 - protein, 468 aa, Frankia sp. EAN1pec
MRPGLRPEHRPRPHGGRGAVGRQRVRRVPVGHRPDLGGPGMTVLDTAPSGTAGPARPAAGAVRPVITGLGVIAPSGVGLDAYWASTLRGELRVAPITRFDASRYDTRIAGEVPDFAAEEFVDHRYLVQTDRWTWMGMAASKLALADAAYDPAEHDPYETSVVFGSGSGGNDFGQRELSRLWTRGRTAVSVYQSIAWFYAATTGQTSIRHGLKGPSGVLVSDGAGGVDSLAQARRTIRRGTPTVLAGGAECGLTPYALTCHLSSGRVSSAASPADGYKPFDVRANGYLPGEGGATLLVEDPAAAARRGARVYGEIAGYAATHDGAHHEQAPADSRWLAAAMRRALADAELTPADVDVVFADGAGSPDLDALEAEAIRAVFGAGAVPVTAPQGLIGRLCAGGSALAAATALLSIRDGVIPAVGNLDEPDPAHGLDLVRSPREGRVRAALVNARGHGGFNSSLVLRAVDTD

SEQ ID NO: 34743 - protein, 337 aa, Bacillus halodurans C-125
MKTVEQTSPTMTSEKARWIYQKMVEIRMFEDRVHDIFSKGEIPGFVHLYAGEEAIAVGLCAHLDHNDYITSTHRGHGHCIAKGCELDGMMAEIYGKSTGLCKGKGGSMHIADLDRGMLGANGIVGGGFTLAAGAALTAKFKQTGGVAVCFFGDGANNQGTFHEGINLAAIWDLPVVFVAENNGYGEATPFHYASACEQITDRAKGYNIPGVKVDGKDVVAVYEVAREAVERARRGEGPTLIECITYRNYGHFEGDAQTYKTGREKEEHTEERDAITLFEKYALSNNLLTEEAIQTVRHEVEQSVDRAVDFANASDYPQPEELLTDVYVSYDHEGRNG

SEQ ID NO: 34744 - protein, 531 aa, Ustilago maydis 521
MADQELKQFAEEVEAVKQWWKSPRFAHTTRPYTAEQVVSKRGTLKQTYPSDVQAKKLWKLLEDHASKGTTSHTYGALDPVQVTQMAKHLETVYVSGWQSSSTASSTNEPGPDLADYPYNTVPLKVEHLFMAQLFHDRKQREERTNLSPEQRAKTPVIDYLRPIVADADTGHGGLTAVMKLTKLFVEKGAAGIHIEDQAPGTKKCGHMAGKVLVPIQEHINRLIAIRLQYDIMGVENLVVARTDSEAATLITTNVDERDHSFILGTTHTELEPLVDILNRAEAEGADGPKLIALEEEWLAKAQPVRYGDAVAAELEKKGKKAEAEAFRKEVVGLSLIKSKAKAKSLGVDINFDWDACRTREGYYRYQGGTDCAINRAIAFGPYADLLWMETKSPILAQAKEFSEGVKAARPHQWLAYNLSPSFNWDAAKLSTEQMQSYVWDLGKLGFVWQFITLGGLHSNAYISDLFAAGFAKEGMKAYVELVQRKEREIGCDVLTHQKWSGANFVDACLNTVLKAASTSAMGKGVTETQFK

SEQ ID NO: 34745 - protein, 682 aa, Cochliobolus heterostrophus
PQAKLSKLASTGILRVVKDAHGRASYSTEVRLRNKDGDYRWHLVRILLEKSLAETSDEETWYGTATDINDHKLLEQTLKETMDAKSKFLSNMSHEIRTPLNGISGMVNFLLDSVLNTEQLEHVNIIKASTDSLLNLINDILDLSKVEAGMIKLSMEWLHLPSLLEEVNDLNMGLAIQKGLELNYLVDEGVPAEVKGDKFRIRQVLLNVVGNAIKFTEHGEIFIRCKLQPSDRSRPLKENETMIRFEVVDTGQGFTDAEAKYLFKRFSQIDASSTRQHGGTGLGLAISMQFVELHGGRMDARSAPGKGSTFFFTIKFGLPTADDYPKPLVSTPGTPAFEPPIAPPPANLPQLQPSALQKFVQSQNPGYVPLKRVSSVSSEKSESAKSAKSPVLSVTASERSRDSPALSSGSSDHSLTSSALTGQSSLRSERSSASSYMHETNPASNANMNLALPPKRTNSDQETQPGESSTSVDSDETVRPGSPHRSLSPLGSSLQPPMYSILVVCPLEHSREATIRHIKNTLPQGIPHQVTGQPSIIGAQKMMGGENPVLFTHVVLVLHDTAEVHAIVDQIFSSTAYSNTSVVIVSDPSQKKELMKEAPVYDYEQLHNDRRLEFVYRPLKPSKFAIIFDPQKQRESSTDRNQDSAQQVVVSQKLVFEELKRRVGGKNHKVLLVEDNKINQTV

SEQ ID NO: 34746 - protein, 459 aa, Bacillus halodurans C-125
MDRVAIVGGGPAGYVAAITAAHRGKQVTLIEQKKLGGTCLNEGCMPTKSLLESAATYDKVKHASDYGIKGPVDEMRIEWGQVQARKNQIVHQLVKGIDYLLKKHKIELLEGTASFQSAHELLVQTERGQQTIEANRIIIATGSEPTPLPFAPFDREWVISSEQAMSLPIQPESMIIVGGGVIGCEFASIYGRMGTKVTIIEMADRLLFGEDHDICKVLMEELKRQGVEIYPSTVIKEMQRDRKQVVVERDGQVEVLTGDYVLVAIGRKPRLQEIGLERIGVDFTSRGITVNEHMQTTIPHIYACGDVIGGIQLAHVAFHEGSVAAKHLCGEPIQVRYEAVPRCIYTSPEIATVGLTETQARENYGHVRIGEYPFAANGKALIVNETIGKVKVVVEPEYEAIVGLTIVGPHATELIAQGTLMVHNELTLDSLESFIAAHPTVSEAVHEAVLQALGQAVHV

SEQ ID NO: 34747 - protein, 283 aa, Leccinum holopus
  misc_feature (133)..(150): Xaa can be any naturally occurring amino acid
  unsure (1)..(283): unsure at all Xaa locations
VAVNDPFIDLEYMVYMFKYDSVHGRFKGDVHSKDGKLYINGKAITVYAERDPANIKWGAVGAEYVVESTGVFTTIEKAGAHLKGGAKKVIISAPSADAPMFVCGVNLDKYDPKYTVISNASCTTNCLAPLAKXXXXXXXXXXXXXXXXXXTTATQKTVDGPSAKDWRGGRAVNGNIIPSSTGAAKAVGKVIPSLNGKLTGLAFRVPTNDVSVVDLVVRLEKSASYDEIKAAVKAASESPDLKGIIEYTDEALVSTDFTGHPASSIFDASGSIMLNPNFVKLIS

SEQ ID NO: 34748 - protein, 737 aa, Metarhizium anisopliae var. anisopliae
MAGTTNHRARGSEDYNVFDDAKTYYASEERHQNRFGSRTRTYSQNSLMKQFERNGLREPYRRGSHDESSLPQGRRFLIQVDPTLESLQAQEDTDGNMQITIEDEGPKVLSLRTAASAGHNRFEVRGTYMLSNLLQELTLAKEYGRKQIVLDEGRLNENPVDRLSRLIRDHFWDGLTRRIDASSIEIAARDPKDWTDDPRPRIYVPAGVPEQYEYYKQVAEERPEIRLDVQQLPEKITPELIRDMNEKPGLLAVETEQVVDPETGRKTLQGLPFVVPGGRFNELYGWDSYMESLGLLVNDRVDLAKSMVLNFCFCIEHYGKILNATRSYYLGRSQPPFLTDMALRVYEKIKHEPDAKEFLRRSILAAIKEYHSVWTCEPRLDPVTGLSRYRPEGLGVPPETEAGHFVHILEPYVKKHNMEFKEFVRAYNYGEIKEPELDDYFMHDRAVRESGHDTTYRFEGICADLATIDLNSLLFKYETDIARTIRNVFNDKLVIPGEFCDRTPYQPGEVLASAAWDRRAKRRKLTVDKLMWDEEQGVFFDYDTAKRERCNYESSTTFWALWAGIATPKQAADMVKKGLPRFEAYGGLLAGTEKSRGDIGLERPNRQWDYPYGWAPQQMLAWTGLLRYSFTEEAERLAYKWLFMITKAFVDFNGVVVEKYDVTRPADPHRVDAEYGNQGLDFKGVAKEGFGWVNASYVYGLQIVNAHMRRALGTLTPYPTFIKAIEQSLEKELADLP

SEQ ID NO: 34749 - protein, 502 aa, Mesorhizobium loti MAFF303099
MHRRGFLAAGLAAVLVSERAVAQMKMDDMPGMDMGGHAGHDMGAAPQGTVVVPEGEVLRELPLLANEASRPGLFKATLTAGSATARFAKGLDTPILAYNGTSPGPLIEAVEGDRVEITFANRIANEASTIHWHGMPVPADQDGNPMDPVATGTDRTYSFDLPEASAGSYWYHPHPHGKTAEQVYRGLAGAFVVKPKADPIPAAYGDTVLVFTDLRLAADGTLPDNTMTDLMNGRVGDHVLVNGQKNPTLTVPFGAKRRFRFYNATNARFLRLSFDGASMTIIGTDGGLLEAPVAAGDILLSPAERLELVVSFDKPGAAALTTLDYDRGWMGPGRPADAGLTLLTVNVSQTEADPVPPLPDRLRPIAQLGAPAVSRRFVFTETMAMNASGMEMGFLINGAAFDMQRIDVVAKAGQVELWEIVNEADMDHPFHVHGTQFQVVEHERGGNISKPAYRAWKDTVNVARGEAVRLLLRQDRPGPRMYHCHILEHEQLGMMGVVDVQA

SEQ ID NO: 34750 - protein, 223 aa, Bacillus halodurans C-125
MEERETWEALDQYFSEKLHAFDPVMDWVLEANEKAELPPIDVAPNQGKFLYLLAKLKGVKTILEIGTLGGYSSIWMARALPDDGRLVTLEFSEKHAAIAQSNMKKAGVDGKIDVIIGPALETLPTLKDKGFSSFDMIFIDADKPNNPHYLEWALKLSTPGTLIVGDNVVRNGNVLNKESADPSIKGIRQFIHLLSEEPRIESTAIQTVGIKGYDGFVVGVVKK

SEQ ID NO: 34751 - protein, 372 aa, Streptococcus suis 89/1591
MTNKKDKKTEVTTFDVQVAEFIRNHKKQGSATDDEINDQLVIPFTLDADGIDDLLQRIQDAGISIVDKEGNPSARAMQVEEEPELSDEELLGSTSAKVNDPVRMYLKEIGVVPLLTNEEEQELALAVEAGDPEAKQRLAEANLRLVVSIAKRYVGRGMQFLDLIQEGNMGLMKAVDKFDYSKGFKFSTYATWWIRQAITRAIADQARTIRIPVHMVETINKLVREQRNLLQELGQDPTPEQIAERMDMTPEKVREILKIAQEPVSLETPIGEEDDSHLGDFIEDEVIENPVDYTTRVVLREQLDEVLDTLTDREENVLRLRFGLDDGKMRTLEDVGKVFNVTRERIRQIEAKALRKLRHPSRSKPLRDFIED

SEQ ID NO: 34752 - protein, 220 aa, Metarhizium anisopliae var. anisopliae
VKSRTIMCLTTQRHTMLLKSDIKTDLGPVHAHTPRYCLMKQFERNGLREPYRRGSHGKSSLPQGRRFLIQVDPTLESLQAQEDTDGNMQITIEDEGPKVLSLRTAASAGHNRFEVRGTYMLSNLLQELTLAKEYGRKQIVLDEGRLNENPVDRLSRLIRDHFWDGLTRRIDASSIEIAARDPKDWTDDPRPRIYVPAGVPEQYEYYKQVAEERPADSLDV

SEQ ID NO: 34753 - protein, 613 aa, Haemophilus ducreyi 35000HP
MEQQSQLELLIAQGREQGYLTISEVHDHLPEELVDAEQIEDIIQMINDMGIKVLETAPDTDELMLAENIADEDVVEEATKVLSTVESELGRTTDPVRMYMREMGTVELLTREGEIDIAKRIEEGINEVQCAVAEYPEALTELIGFYAQVEEGTMRLSDLVTAFVDPNIQAEEDVVELDSDLDEEASDVVADVDDENEDEESDGSADNTDDNSIDPELAREKFYALREQHEKALQAIQKHGRSHKKSKQHIQALSDIFREFRLVPKQFDLLVESMQRMMKQVRAEERQIQRYAVEYAQMKKADFLKLFQGNETSEEWIDKAINARKGAAPKLANYVEQIRINISNLQRMEQDTDLTVAQIREIGGRIASGELKARRAKKEMVEANLRLVISIAKKYTNRGLQFLDLIQEGNIGLMKAVDKFEYRRGYKFSTYATWWIRQAITRSIADQARTIRIPVHMIETINKLNRISRQCLQEMGREATPEELAERMGMPEDKIRKVLKIAKEPISMETPIGDDDSHLGDFIQDENLELPLDSATAESLRLATNEVLEGLTPREAKVLRMRFGIDMNTDHTLEEVGKQFDVTRERIRQIEAKALRKLRHPSRSETLRSFLDD

SEQ ID NO: 34754 - protein, 1004 aa, Streptomyces avermitilis MA-4680
MHDDRTLVEARLRRVLDERIRPAVYPESVPLEVAVWHAPDEPVPVAEGLAAPVGPIAAGARWGAPWGTSWFRVTGTVPEAWAGKTVEALLDLGFDENMPGFQCEGLVYRPDGTPVKGLNPRNQWVRIGAPVEGGEEVRLHIEAASNPVILDYHPFRPTQLGDKETAGSEPQYRLERMDLAVFDETVWQLVIDLEVLGELMAELPVESARRWDLLRAVERALDAVDLQNVNGTAAAARARLEGVLAEPAVPSAHHISAVGHAHIDSAWLWPLRETVRKVARTTSNMTALIEDEPDFVFAMSQAQQWAWVKEHRPEVWARVKKAVAEGRFVPAGGMWVESDTNMPGSEAMARQFVHGKRFFLDEFGIENDEAWLPDTFGFAAGLPQIIKAAGSKWLLTQKISWSQTNKFPHHTFRWEGIDGTRIFTHFPPVDTYNCSMKGSEIAHAARNFKDKGVARHSLAPTGWGDGGGGTTREMIAKAARLRDLEGSATVAWETPAKFFEQAEAEYPDPPVWVGELYLELHRATLTSQAKTKQGNRRSEHLLREAELWAATAAVRTGFPYPYEELDRIWKTVLLHQFHDILPGSSIAWVHREARKTYEKVAEELNGVIDAAQRALAGEGTTPLVFNSAPHTRDGVPAGGARTPAVGGECALVPRADGGYVMENGRLRVEIDAHGLVVSAFDLAADRETVAPGRPANLLQLHPDFPNMWDAWDVDEFYRNTVTDLVDADEIAPGEDGVSVRIVRTFGASRVTQVLSLAPGEWRLDIDTEVDWHETEKFLKLAFPLDVHAERYASETQFGHFFRPTHTNTSWEAAKFEACNHRFVHMEEPGWGVAVVNDSTYGHDVTRTVRDDGGTTTTVRVSLLRAPRFPDPETDQGVHRFRHALVPGAGIGDAVREGWRINVPERKVTGGREVTPLLAVTQDAVVVTAVKLADDGSGDVVVRFHESRGGRTRATLKAGFEVAAVSVTDLLERPLADAREPAVDGDRITLSLRPFELVTLRLRRA

SEQ ID NO: 34755 - protein, 159 aa, Capsicum frutescens
MSMIPSFFGGRRSNIFDPVSLDLWDPFEGFPISSTIANTPSSARETSAFPNARIDWKETPQAHIFKVDVPGIKREEVKVQVEEGRILQITGERSREQEEKNDQWHRMERSSGKFLRRFRLPENTKMGEIKAAMENGVLTVTVPKEEEKRSEVKAIDISG

SEQ ID NO: 34756 - protein, 420 aa, Pyrococcus horikoshii
MVEQDPFEIAVKQLERAAQHMKISEEALEFLKRPQRIVEVTIPVEMDDGSVKVFTGFRVQYNWARGPTKGGIRWHPEETLSTVKALAAWMTWKTAVMDLPYGGGKGGIIVDPKKLSDREKERLARGYIRAVYDIISPYEDIPAPDVYTNPQIMAWMMDEYETIARRKTPAFGIITGKPLSIGGSLGRNEATARGASYTIREAAKVLGWDGLKGKTIAIQGYGNAGYYLAKIMSEDYGMKVVAVSDSKGGIYNPDGLNADEVLKWKREHGSVKDFPGATNISNEELLELDVDVLAPAAIEEVITKKNADNIKAKIVAEVANGPVTPEADEILFEKGILQIPDFLCNAGGVTVSYFEWVQNITGYYWTLEEVRERLDKKMTKAFYDVYNTAKEKNIHMRDAAYVVAVQRVYQAMLDRGWVKH

SEQ ID NO: 34757 - protein, 249 aa, Zea mays
MGFLEDFQASVEALPSMLHRNYSLMRELDKSLHGVQLENEQRCQQEIEDIKHGLESGSITYDPAKLKFSEEAMEEQKHCVRIADEKVALATQTYDLVDAHIQQLDQFMRKLEEIRQGKEAAAAVTAGTAVATTATPTVNAGATTADANPKSGRSGERGRGGRKKAKVPTEQSVPVPVPLPPIDLELPVDPNEPTYCLCNQVSYGEMVACDNPNCKIEWYHYGCVGVKEQPKGKWYCPNCIGFQKKRKGK

SEQ ID NO: 34758 - protein, 488 aa, Sulfolobus tokodaii str. 7
MIRELQVIIKLAPRVLKLREFRQREFKGEKIDEEEMRKEGRKLLEAFISLGPAFIKLGQVLSVHSDVLPEPYLKELSKLQDEVPPAPWEEVEPILREDLGEKFNEYEIEKKPISSASIGQVYLAKEKKSGKIVVIKVNRPRIKEIAERDVKVIQNLLPLTKYLFDESFYESLRAIVNDFSKRIFEEMDFTKEAFYMKKIKEELEEFPDVIVPESYYATKRVLIMEYLKGYKVTSPEAKKIVKPDYLAYRVFRTFMLLLLTKEYFHADPHPGNLAVDEKGNLILYDFGMVGRMDKETRNRLLRAYAALIRLDAIGLVKVLEELGAIQPEADREILAKGIELFLKTFEGISVETLEVETFLNAANEVFYRFPLKIPEKLAIYIRMTSVLGGTCTQIDPDFNFFVNLQKLIEEEGLQWSAMFDDIRNTMEAAIKKFRLSLLEKPVVPAKKSNRGSIIAPILVIIAIIYYLMSHDAIVSILIGIFALTINRV

SEQ ID NO: 34759 - protein, 459 aa, Citrus sinensis
MGILSKIATNNGHGEDSAYFDGWKAFDRNPFHPTQNPGGVIQLGLAENQLCFDLIKDWITKNPYASICTAEGVEVFKDIAIFQDYHGLPEFRQAVAKFMGKGRGGRVTFDPDRIVMGGGATGANELIMFCLANPGDAFLVPSPYYAAFDRDLSWRTGVQIVPVHCDISNNFKITREALEAAYERAQEASINIKGLIITNPSNPLGTTLDRDTLKSLVSFINDKNIHLVCDEIYAATVFSSPKFTSVAEVIQEMDCNRDLIHIIYSLSKDMGLPGFRVGIVYSFNDTVVNCGRKMSSFGLVSSQTQYLLASMLSDDEFVDNFLVETSKRLAKRHHNFTKGLEQVGINCLKSNAGLFFWMDLRHLLKEKTLEGEIALWRTIVNDVKLNVSPGSSFQCTEPGWFRVCFANMDDDTLQVALNRIAAFVQQDKESEKPTKKRCSRIFASASHRGSTNKVSCRRT

SEQ ID NO: 34760 - protein, 411 aa, Methanococcus maripaludis S2
MVTADLFNNPTNIMDALNTLANSSDVMFLIFTGAFIFIMHLGFAMLEGGQVREKNVNNAMMKNMGDWIIGCISWLLVGSVIARTLNPADFFIWWGKIASATPFLTNNGLELANWFLGLVFAATAATIVAGGIAERIKFKSYILISIVITALLYPFFSYLGPWGAGVIPFHDYAGSLMVHGVGGFLALGLIAAIGPRFGRFVNKKAITIPGHNIPMSILGAYILAFGWYGFNVGSSLALSDISGLVCATTTLAMAGGGLGGCLFSKNDVLYTANGLLAGTVAICAGTDIVSPLGALIIGFIAGSQVPLIFKIVEKMGLDDVCGVIPVHATSGALGAILAGIFGMTAFGGVGGVSLTEQIIATLICAVYGTGAGFILGKLVGAVTGGLRVKESEEKAGLDISIHKLPAYPKEN

SEQ ID NO: 34761 - protein, 91 aa, Gossypium barbadense
MDGAPYLRKIDLKIYSGYPELLQAIENMFKFTIGEYSEREGYKGSDYAPTYEDKDGDWMLVGDVPWEMFITSCKRLRIMKGSEARGLGCGV

SEQ ID NO: 34762 - protein, 470 aa, Mesembryanthemum crystallinum
MNMRPALPMQTSGGNCFNELKVSGPYSSQLPVLPNPLEDFPKSPDPFAVSSSREMIPNPLQIQANPMVSHFGSSHNSSTYASGFPTDLHFPSFSPRERQSQNSPLGGGVAFPPSQNTSPDVQSAGFINYQKEDDDNSWSTGHLQDLLDFPEGIPVSNGQVGTSTEVMSNDNHVKRIGWRELTEDLYADSIEPNWNDFLADSNVADQQPKVTQPSSDVRVHQPLIQQQLSLPPREVSAAANQTSAAANQTSAAHSNRPRMRWTPELHEAFVDAVNQLGGSERATPKGVLRHMNVEGLTIYHVKSHLQKYRTARVRPESSEGNSERRASSVDPVSSVDLKTSVTITEALRMQMEVQKQLHEQLEIQRKLQLQIEEQGKYLLQMLENQNKVEKEKLNPDGSSAHNDKSEGSQPEPSREGAVISISSQGPGESSHGSKGKQKAPEADTTGDHHLEDGGSNPPPMKRARTDDSFL

SEQ ID NO: 34763 - protein, 480 aa, Pseudomonas fluorescens PfO-1
MQLKDTQLFRQQAFIDGAWVDADNGQTIKVNNPATGEILGTVPKMGAAETRRAIEAADKALPAWRALTAKERAGKLRRWFELMIENQDDLARLMTLEQGKPLAEAKGEIVYAASFIEWFAEEAKRIYGDVIPGHQPDKRLIVIKQPIGVTAAITPWNFPAAMITRKAGPALAAGCTMVLKPASQTPFSAFALAELAQRAGIPKGVFSVVSGSAGDIGSELTSNPIVRKLSFTGSTEIGRQLMSECAKDIKKVSLELGGNAPFIVFDDADLDKAVEGAIISKYRNNGQTCVCANRLYIQDSVYDAFAEKLKVAVAKLKIGNGLEEGTTTGPLIDEKAVAKVQEHIADAVSKGATVLAGGKPMEGNFFEPTILTNVPKDAAVAKEETFGPLAPLFRFKDEADVIAMSNDTEFGLASYFYARDLGRVFRVAEALEYGMVGVNTGLISNEVAPFGGIKASGLGREGSKYGIEDYLEIKYLCLGI

SEQ ID NO: 34764 - protein, 587 aa, Magnetospirillum magnetotacticum MS-1
MEGAVALGMRRLSVIDLAGGNQPIHNENGSISVVFNGEIYNFRELRRELEEEGHIFSSHTDTEVLVHLYESHGRGMLDRLNGMFAFCLLDRRAGRLFLARDRVGKKPLYYAHGDGAFAFASEIKSLLCHPAVRREADPAAAALYFTHGYVPAPFTPFMGIRKLPAGHWLELDLASGEIQVGRYWDLDYSQVDEDLCEEEAVAGLESALLAAVERRLISDVPLGVFLSGGVDSSLVVAMMARFREGRDIHAFSIGFHEKAFDESGYAESVARAWGVDHHVTRFSDAEMFSVIDEILPRMDEPLSDPSLIPTYLLSKVTQDSGIVVALSGDGADEMFGGYPKYYIHRYAAWLDRLPGILGRDVPAWLFSQVPLKAENNIFNYKVERFVSGLRLAPRHRNQFWVAPFMPDELTRLLPEQEVPRAVWEVTDQYDSRFNGRGVVDRMMYFDAKMMLQDMYLAKVDRASMAVSLEVRSPFLDLEVMDAAVHLPWQLKVRGRETKYLLKKLASRYLPHDVVYRFKRGFGLPLAVWMRTLAPRISETLTQGDCGGIDAAYVQSLLREHLDGTRDHAVKLWAVYAYLTWLRNWGGS

SEQ ID NO: 34765 - protein, 544 aa, Mycoplasma pulmonis UAB CTIP
MKNKELWWRTGSIYQVYVRSFKDSNNDGNGDINGLISKLDYLHWLGIKAIWINPIAKSPMVDNGYDVSDYKDIDPLFGTMSDFENLIEKAHSKNIKIIWDFPLNHTSSEHPWFKQALKGNPKYLKYYYFTKTYKLNRDSVFGGSFWTKTSNGYYYAHVFAKEQPCLNWFNQDVVDEFVEIINFWLDKGVDGFRFDAFDEIGKPTDLFTRENFYEHDKKFVIEKFKELRQKTWKDDNEIMSVSESWAMNSKDVNENTNLENKAYSLTFNFDHMISEFEYVDGKKTWKGFDFIKFKKIIAQWQKDVSNGWNSLYFNNHDQPRAISRFLHDQVDFLDQKAKAFALTLHGLKGTPFIYQGEEIGMDNSDHTNDISKINDVNDLRTYEYHVLKQKIMTHNDFMKLSSIFSRDNARTPIPWNSKGGFNDSGKSWLPYNKSFKTINVEDQIDQENSVLSWYKKVIDLRNNPKIRSTIIQGDFELIADEDPNIFAYKRKDDFQELVFVINWSQKLIDNNLNLKNYEVFLNNYPTYQSSKLLPWQALILIRKS

SEQ ID NO: 34766 - protein, 450 aa, Idiomarina loihiensis L2TR
MSYIKETIEKLKQTSPAQVEFYQAVEDVLESIEPLLEERPKYREHSIIERLLEPERQIMFRVPWMDDDGKIQVNKGYRIEFNSALGPYKGGLRFHPSVNAGIVKFLGFEQIFKNALTGLPIGGGKGGANFDPKGKSDAEIMRFCQSFMSELYRHIGPHTDVPAGDIGVGSREIGYLFGQYKRLANRFDGVLTGKSELWGGSQVRKEATGYGVVYFAQCMMDDQDDSLDGKRCLISGSGNVAIHAMEKLYELGAKPISCSDSSGTIYHDSGIDLDLVKRIKEEQGGRLKEYLETHEDAEYTSKDDYPEEGHCVWRYEADIAFPCATQNELTEKDAQALLENGCKYIVEGANMPTTQAAVDLFIESGVGYGPGKASNAGGVATSQLEMAQNASMLRWDFEEVDEKLKDIMSNIYQDAKRTAEDFGHPSNLVLGANIAGFRKVADAMLEQGVV

SEQ ID NO: 34767 - protein, 61 aa, Cucumis melo
DTLLDADLESDILGWQYISGSLPDGHELERLDDPQIQGSKYDPDGEYIRHWLPELARMPTE

SEQ ID NO: 34768 - protein, 579 aa, Zea mays
MASTPAQPAATLSAGEASLGRHLARRLVQVGVNDVFAVPGDFNLTLLDHLIAEPGLRLVGCCNELNAGYAADGYARARGVGACAVTFTVGGLSVLNAIAGAYSENLPVICIAGGPNSNDYGTNRILHHTIGLPDFSQELRCFQTITCYQAIINNLDDAHEQIDTAIATALRESKPVYISVSCNLAGLSHPTFSRDPVPMFISPRLSNKANLEYAVEAAADFLNKAVKPVMVGGPKIRVAKAREAFAAVADASGYPFAVMPAAKGLVPEHHPRFIGTYWGAVSTTFCAEIVESADAYLFAGPIFNDYSSVGYSLLLKREKAVIVQPDRMVVGDGPAFGCILMPEFLRALAKRLRRNTTAYDNYRRIFVPDREPPNGKPNEPLRVNVLFKHIKGMLSGDSAVVAETGDSWFNCQKLRLPEGCGYEFQMQYGSIGWSVGATLGYAQAAKDKRVIACIGDGSFQVTAQDVSTMLRCGQKSIIFLINNGGYTIEVEIHDGPYNVIKNWDYTGLVNAIHNSEGNCWTMKVRTEEQLKEAIATATGAKKDCLCFIEVIVHKDDTSKELLEWGSRVSAANSRPPNPQ

SEQ ID NO: 34769 - protein, 61 aa, Hordeum vulgare
DTLLDADLESDALGWQYISGSLPDSRELDHIDNPQLEGYKFDPHGEYVRRWLPELARLPTE

SEQ ID NO: 34770 - protein, 61 aa, Hordeum vulgare
DTLLDADLESDALGWQYISGSLPDGRELDRIDNPQFEGYKFDPYGEYVRRWLPELARLPTE

SEQ ID NO: 34771 - protein, 61 aa, Hordeum vulgare
DVLLDADRESDILGWQYISGCLPDGHELGRLDNPEVQGQKYDPDGEYVRTWIPELARMPGE

SEQ ID NO: 34772 - protein, 174 aa, Vitis riparia
MCERLITEALDLLAENRTQKLIIEMLHATCSEVQSFKQQCITLVDYYAALIFSELALITPGNFCEKANLCGSTFTAGQLYQDSCVFCRMLVMKVLIKLRDPDTQLEILELLLKGCDAVKGLVRKCKRMVFEYGPIILNNTERFLEKNDVCTTVHACGVPPAASVEEAAAKVSDS

SEQ ID NO: 34773 - protein, 185 aa, Chlorobium tepidum TLS
MRRVTTLLVMMLTVLSACQASPKASPTKPGNAMSNNHPQNPYYSRTDTTRLDLPNEVWKKVLSPELYAVARLAETERAFTGKYWNYEGLGTYYCAACGNTLFRSDAKFASTCGWPSFFETVRPGSVAYREDTSFGMVRTEVLCGRCGAHLGHVFDDGPPPTGKRFCMNSICLDFEPDQPETAKPQ

SEQ ID NO: 34774 - protein, 146 aa, Clostridium tetani E88
MFDMIPFKRNNSMKRDSYFDEFFDNFFNNDFLVPIKFPKNNFRADLKETNNEYIIEADLPGISKDAVKVNYSNNNLVISAKREDIIENKDENYIRRERSYGEFKRAFYVDNVDENNIKASFKNGVLRINLTKLEDTTKARKQIEIE

SEQ ID NO: 34775 - protein, 416 aa, Oryza sativa
MVIIIKRYILLALILSIQCGGANGTSREYSPLPPFKDVAGAPPPSIAPGTGSPPPATTTPPAPGAREAGVWCVANPTVASAVAQTAMDYACASGADCDMVAAPGAPCFLPDTLMAHASYAFNSYWQRTKVAGGTCDFAGAAMLITKDPKEDHRQNMSLISKLRLITVDVTGTLLAYKGQLGDYYCMAAKAAGKPCPDYQRMHEGFKLAYTEMARQYPCFGFAAKMPNIDWWRMCVKDSFVKAGYEYDEETFEKIFKRIYSSFGSSAPYSVFPDAQPFMRWLRGKGLTVGIVSNAEYRYKDVILPALGLNQGSEWDFGVFSGIVGVEKPDPSIYRIALEMAGKVAPEEALHIGDSMRKDYTPARSIGMHALLLDRFKTADAESWRKSGATVLPDLVAAQEWLSKNLKDEPVAAEQNV

SEQ ID NO: 34776 - protein, 148 aa, Brassica napus
  misc_feature (39)..(39): Xaa can be any naturally occurring amino acid
  misc_feature (83)..(83): Xaa can be any naturally occurring amino acid
  misc_feature (95)..(95): Xaa can be any naturally occurring amino acid
  misc_feature (112)..(112): Xaa can be any naturally occurring amino acid
  misc_feature (117)..(118): Xaa can be any naturally occurring amino acid
  unsure (1)..(148): unsure at all Xaa locations
ESSVTTEDDKKGHDECHDEHHHDHDHHHHDHHHHNEHEXNHSHDHDHTHDPGVSSVSIVCEGSLDLDKANMWLGTLLMERSEXIYRMKGLLSVHXMEERFVFQGVHDIFQGXPDRLXXKDEARVNKMVFIGKNLNREELEKGFKACLI

SEQ ID NO: 34777 - protein, 270 aa, Leccinum holopus
  misc_feature (44)..(44): Xaa can be any naturally occurring amino acid
  misc_feature (130)..(156): Xaa can be any naturally occurring amino acid
  unsure (1)..(270): unsure at all Xaa locations
NDPFIDLEYMVYMFKYDSVHGRFKGDVHSKDGKLYINGKAITVXAERDPANIKWGAVGAEYVVESTGVFTTIEKAGAHLKGGAKKVIISAPSADAPMFVCGVNLDKYDPKYTVISNASCTTNCLAPLAKXXXXXXXXXXXXXXXXXXXXXXXXXXXGPSAKDWRGGRAVNGNIIPSSTGAAKAVGKVIPSLNGKLTGLAFRVPTNDVSVVDLVVRLEKSASYDEIKAAVKAASESPDLKGIIEYTDEALVSTDFTGHPASSIFDASGSIM

SEQ ID NO: 34778 - protein, 394 aa, Thiobacillus denitrificans ATCC 25259
MTTTHLMNTYARQPVAFVRGEGAYLWDEAGKRYLDAVAGVAVNALGHAHPRLVKAIAEQAATLIHSSNLYRVLRQEELADKLCALSGMDRAFFCNSGCEANEAAIKLARLYGHGKGIELPTIIVVEKAFHGRTMATLTATGSRKIQAGFEPLLSGFARVPFNDIEAIRHVAEHNKSVVAVLIETVQGEGGINILPAEYLAELRTLCDAQGWLLMLDEVQTGIGRTGTWFGFQHAGVVPDVIALAKGLGGGVPIGACLARGAAAEVFTPGTHGSTFGGNPLACAAALATLETIEAEHLLDNARLRGDAIRAGLRGALDGVHGVLDIRGEGLMIGIELDRPCAELVGVARDAGVLINVTADSVIRLVPPLIYGADEVDLLVATVADVVRNYLQQAA

SEQ ID NO: 34779 - protein, 268 aa, Leccinum holopus
  misc_feature (36)..(36): Xaa can be any naturally occurring amino acid
  misc_feature (43)..(43): Xaa can be any naturally occurring amino acid
  misc_feature (129)..(154): Xaa can be any naturally occurring amino acid
  unsure (1)..(268): unsure at all Xaa locations
PFIDLEYMVYMFKYDSVHGRFKGDVHSKDGKLYINXKAITVYXEGDPANIKWGAVGAEYVVESTGVFTTIEKAGAHLKGGAKKVIISAPSADAPMFVCGVNLDKYDPKYTVISNASCTTNCLAPLAKVXXXXXXXXXXXXXXXXXXXXXXXXXXGPSAKDWRGGRAVNGNIIPSSTGAAKAVGKVIPSLNGKLTGLAFRVPTNDVSVVDLVVRLEKSASYDEIKAAVKAASESPDLKGIIEYTDEALVSTDFTGHPASSIFDASGSIM

SEQ ID NO: 34780 - protein, 282 aa, Leccinum holopus
  misc_feature (130)..(153): Xaa can be any naturally occurring amino acid
  unsure (1)..(282): unsure at all Xaa locations
AVNDPFIDLEYMVYMFKYDSVHGRFKGDVHSKDGKLYINGKAITVYAERDPANIKWGAVGAEYVVESTGVFTTIEKAGAHLKGGAKKVIISAPSADAPMFVCGVNLDKYDPKYTVISNASCTTNCLAPLXXXXXXXXXXXXXXXXXXXXXXXXQKTVDGPSAKDWRGGRAVNGNIIPSSTGAAKAVGKVIPSLNGKLTGLAFRVPTNDVSVVDLVVRLEKSASYDEIKAAVKAASESPDLKGIIEYTDEALVSTDFTGHPASSIFDASGSIMLNPNFVKLIS

SEQ ID NO: 34781 - protein, 249 aa, Vitis berlandieri x Vitis rupestris
MPKIAFGRFDDSFSLASFKAYLAEFHSTILFVFAGVGSVMAYNKLTSDAALDPAGLVAVAVAHGFALFVAVAVSANISGGHVNPAVTFGLVVGGQITILTGILYWIAQLVGSILACFLLKLVTGGLTTPVHSLGAGVGVIDAIVFEIVITFALVYTVYATAVDPKKGSLGIIAPIAIGLVVGANILAAGPFSGGSMNPARSFGPAVVSGDFKDNWIYWVGPLIGGGMGGSVYAFMYLGSDHQPLASSEF

SEQ ID NO: 34782 - protein, 231 aa, Leccinum rotundifoliae
  misc_feature (131)..(138): Xaa can be any naturally occurring amino acid
  unsure (1)..(231): unsure at all Xaa locations
NDPFIDLEYMVYMFKYDSVHGRFKGDVHAKDGKLYINGKSITVYAERDPANIKWGSVGAEYVVESTGVFTTIEKAGAHLKGGAKKVIISAPSADAPMFVCGVNLDKYDPKYTVISNASCTTNCLAPLAKVXXXXXXXXEGLMSTIHATTATQKTVDGPSAKDWRGGRAVNGNIIPSSTGAAKAVGKVIPSLNGKLTGLAFRVPTNDVSVVDLVVCLEKSASYDEIKAAVKA

SEQ ID NO: 34783 - protein, 650 aa, Pseudomonas aeruginosa UCBPP-PA14
MDAVQKANSGHPGAPMGMADIAEVLWRDYMQHNPSNPQWANRDRFVLSNGHGSMLIYSLLHLTGYDLGIEDLKNFRQLNSRTPGHPEYGYTAGVETTTGPLGQGIANAVGMALAEKVLAAQFNRDGHAVVDHYTYAFLGDGCMMEGISHEVASLAGTLRLNKLIAFYDDNGISIDGEVHGWFTDDTPKRFEAYGWQVIRNVDGHDADEIKTAIDTARKSDQPTLICCKTVIGFGSPNKQGKEECHGAPLGADEIAATRAALGWEHAPFEIPAQIYAEWDAKETGAAQEAEWNKRFAAYQAAHPELAAELLRRLKGELPADFAEKAAAYVADVANKGETIASRKASQNALNAFGPLLPELLGGSADLAGSNLTLWKGCKGVSADDAAGNYVFYGVREFGMSAIMNGVALHGGFIPYGATFLIFMEYARNAVRMSALMKQRVLYVFTHDSIGLGEDGPTHQPIEQLASLRLTPNLDTWRPADAVESAVAWKHAIERADGPSALIFSRQNLPHQARDVAQVADIARGGYVLKDCEGEPELILIATGSEVGLAVQAYDKLSEQGRKVRVVSMPCTSVYEQQDESYKQSVLPVEVGARIAIEAAHADYWYKYVGLDGRIIGMTSFGESAPAPALFEHFGFTLDNVLAVAEELLED

SEQ ID NO: 34784 - protein, 408 aa, Schizosaccharomyces pombe
MSLNNLSNSYNQYLAQESHQILRHLFLNKQYSPLVKRDDDSSATVTCGGDANEFNEYGHLGYRIGAIFVILATSLIGMNLPLVLSKITKNRPNVYIEYLYLFARYFGSGVILATAFIHLLAPACNKLYDPCLDDLFGGYDWAPGICLISCWFILLLEVLLNRYVEWRFGMEIGDHHGPTLGAKQHSHSHEDGAHGVHEHPVYDIEECADGVEHECVKDDLEEVKLEPYTNTDSTDLTTKEEARSFLLKQQLTAFIILESSIILHSVIIGLTTAVSGEEFKTLFPVIIFHQAFEGCGLGSRLAGMAWGPKTAWVPWVLGVIYSLVTPIGMAAGLGVREHWDPLAHGSYAAQGVLDAISSGILVYAGLVELLAHDFLFSPERERNWYKLIYLLACSMAGTGVMALLGKWA

SEQ ID NO: 34785 - protein, 593 aa, Schizosaccharomyces pombe 972h-
MTSFTESKKLDEIESPVPEIIVPSTTNGNGTIESYKEKSVGTSFLDFFRSYKLRPDNEFAEVHNSEDFLKPRHLQMIAIGSCIGTGLFVSTGKSLKNAGPGSLMINFIILSAMILALILSLGEMCCFLPNQSSITMYTGRLLNNNIGFAQSWLYFWIWLTVLPSEISAACEVVDFWTTQHLNPAIWVTIFLAYVVLVNAFGARSYGECEFVSSFLKVVIVIIFFFVAIIINCGAAPKGGYIGAHYWHHPGSFRNGFKGFCSVFISSAYSLSGTENIGTAAGNTSNPQRAIPSAVKKVFYRMGFFYIITIFLITLVVPYDNPDLGNVSPFIIAIKNGGIHVLPHITNAVILVSVLSVGNAAVFAASRNAMALVKQGWAPRFLGRVDQKGRPVISYLCSLAMACIAYVNAAPDGSVVFDWLMSVSGGGAFVIWGLSFIDHIRLRYAMKAQKIPDTVLPYKFPGSVYLSYYGVLINFLALCALVYISIFPVTHEKPSAYGFFVSFLGPSVFIAYLLISPIFVKPTFQSLKDVDLTTGRYDLVNSQMYVAESSTSELSEKDLTKPNLQSNDNKNSEDLESNTPPQKKSALQKVADFL

SEQ ID NO: 34786 - protein, 237 aa, Leccinum rotundifoliae
  misc_feature (133)..(133): Xaa can be any naturally occurring amino acid
  misc_feature (140)..(140): Xaa can be any naturally occurring amino acid
  unsure (1)..(237): unsure at all Xaa locations
AVNDPFIDLEYMVYMFKYDSVHGRFKGDVHAKDGKLYINGKSITVYAERDPANIKWGSVGAEYVVESTGVFTTIEKAGAHLKGGAKKVIISAPSADAPMFVCGVNLDKYDPKYTVISNASCTTNCLAPLAKVXNDKFGIXEGLMSTIHATTATQKTVDGPSAKDWRGGRAVNGNIIPSSTGAAKAVGKVIPSLNGKLTGLAFRVPTNDVSVVDLVVRLEKSASFDEIKAAVKAASES

SEQ ID NO: 34787 - protein, 365 aa, Ralstonia eutropha JMP134
MEKKLNDCTHAAAAVRLFGTGEGLSHERVTLATDPESGLQAIIAIYNTRLGPAFGGCRYWTYAAETEALSDALRLSQGMAYKNALAGLPFGGGKAVILRSPAQTDREQLFRAFGRMVESLRGSYITAEDVGTTVDDMRAVQAETRYVSGMPRDGGFGGNPSPWTAYGVFVGIQAAAQYRLDRKSLTGLSVAVQGLGSVGWELCRRLHEAGAILTVADIDAGRTTRAQQQFGARVVSPEAITAVDADIFAPCALGAVITAAVAENCRFQIIAGGANNQLASLAEGDTLHQRGVFYAPDFLINAGGIVSCAREYLGGVDDSALRDEVAGIRDRVLGLAQRVESTRQAPARAAVTWAHEVLSRGIAPN

SEQ ID NO: 34788 - protein, 133 aa, Gloeobacter violaceus PCC 7421
MQKVLKSDQEWRQQLTPEQYKITRQKGTERPFCGVFYDHKQPGEYTCVCCELPLFTAEAKFDSGTGWPSFLAPINAENVATQKDFSHGMSRVEVLCARCDAHLGHVFTDGPPPTRLRYCLNSAALEFVPQVKS

SEQ ID NO: 34789 - protein, 764 aa, Bacillus halodurans C-125
MNSLKVAVTGIGILTSIGHNKEEVFQNMLDNQTGIGPIQSFDVQEFISQIGAEISSFQPSDHFTPEEQKGLDRCAQYAVVSIKEALEEARVDQTVEKTIGLAFGTCNGGLNSLEEQRALQELDLEKTRNYLFYQQGDAVAKYFGLTGPVITLNTACAASGNAIGYACDMIRHGFADVMIAGGSDSMSTSVYAGFNALKALNDQPCSPYNEQYGLSLGEGSAFLVLEPLEKALARDAKVYTVVEGYGLSSDAYHETAPQPEGQGIRKAVEMAIEQGNISKDEIDYINTHGTGTKANDPAELRGLRAYFGKQFDNIYVSSSKAYFGHNLGAAAAIEYATTLLALEQGLLPATLHFSQAREGCNHQKLVTNEMKSYKPKYFLCNNSAFGGHNSSILSKNVYHPAFSPATITTSSAEEKKRIGVYGYGTIHRLADHDGTLLSNLHQDSPTTFQLDFSLKEYNRSLYERRMNPLTQYSIAACDLALKNTSLSNIDNEQIGLVYGTSRGSLKSAEKYLGSILERGAGNASSVYFPDMVLNSTAGKLAKKFGIKGFSSSHSSGGIDGLQAILYGMTSILDGKQSTVLVGAGDERSGLSDEIDRAMNLQNSSYEIGEGSTFLLLADTKVAEEKGLDPIATIEGFGQAFSGQNDMDQTIQHAVEQCLQNANLSEDEIDFIFYHNNNVTDIDAFLQLKERLGHIPVYTLNHLCGYMESNGSLFHAQVALELLALPKEEQQSMIHAFGWPKNDLRTGLIITTSINGNSMAMAIRK

SEQ ID NO: 34790 - protein, 467 aa, Glycine max
MAATRPVQCLLRRVCRGSRTIGVATEVNASSSSQKIIDKEYEHSAHNYHPLPIVFAQAKGTSVWDPEGNKYLDFLSGYSAVNQGHCHPKILKALQEQAERLTVSSRAFYNDRFPDFAEYVTNMFGYDMVLPMNTGAEGVETALKLARKWGYEKKRIPKDEAIIVSCCGCFHGRTLGVISLSCDNEATRGFGPLLPGNLKVDFGDAEALEQIFKEKGEHIAAFILEPVQGEAGVIFPPDGYLKAVRDLCSKYNVLMIADEIQTGLARTGKMLACEWEEVRPDVLILGKALGGGVIPVSAVLADKDVMLCIQPGQHGSTFGGNPMASAVAIASLEVIKNERLVERSAQMGEELTGQLLKIQQQYPDYVKEVRGRGLFIGVEFNSKKLFPVSGYELCKKLKYRGVLAKPTHDAIIRFTPPLCISVDEIQQGSKALADVLEIDLPKLQKTKPIDAAPVATSACDRCGRVLY

SEQ ID NO: 34791 - protein, 524 aa, ASPERGILLUS NIDULANS FGSC A4
MPSHTYPQRLYTTGYTVPPLKDKSLFIQKAFVNGEWVDAESGKTFEVHAHIDANGWYLDVLTDPATGKLIGTCPEFSASDTEKAIQAASAAFPKFRATLARERARMLRRWYQLMVDNAEDLATLITWENGKPLADAKGEVNYAASFFEWFSEEAPRTYGDTIPASVPGNRVITVKQPVGVCGLITPWNFPAAMITRKIGPALAAGCTVVTKSPGETPFTANALAELANRAGIPKGVVNIVTAMKNTPEVGEMITTHPDIRKVSFTGSTNVGRLLMKQSSSTIKKVSWELGGNAPFIVFDDVEDLDAAVTGAIASKFRSSGQTCVCANRIYVQKGIYDEFVQKFVEKVRNFKVGAGFEDGVTHGPVIHDRAVDKVDQHVQDAISKGAKLIAGGQRRSDLGPNFYDLTVLANMTKDMKIASEETFGPVAGLFPFETEKEVVELANKAEVGLAGYFFSGNIKRIFRVAEALEVGMVGVNTGLISDVASPFGGVKQSGFGREGSKYGIEEFMTIKSVTFGGMGEPLQS

SEQ ID NO: 34792 - protein, 460 aa, Crocus sativus
MLNGNKCHILLLPCPAQGHINPILQFGKRLASHNLLTTLVNTRFLSNSTKSEPGPVNIQCISDGFDPGGMNAAPSRRAYFDRPQSRSGQKHVGLIESLRSRGRPGACFGLRPVPLWAMNVAERSGLRSVAFFTQPCAVDTIYRHVWEGRIKVPVAEPVRLPGLPPLEPSDLPCVRNGFGRVVNPDLLPLRVNQHKNLDKADMMGRNSIYELEADLLDGSRLPLPVKSIGPTVPSTYLDNRIPSDSHYGFNLYTPDTTPYLDWLDSKAPNSVIYVSFGSLSSLSPDQTNEIASGLIATNKSFIWVVRTSELAKLPANFTQENASRGLVVTWCDQLDLLAHVATGCFVTHCGWNSTMEGVALGVPMVGVPQWSDQPMNAKYVEDVWKVGVRAKTYGKDFVRGEEFKRCVEEVMDGERSGKIRENAARWCKLAKDSVSEGGSSDKCIKEFIHQCCNDSKISLV

SEQ ID NO: 34793 - protein, 583 aa, Lycopersicon esculentum
MSSGGCSIVWFRRDLRLEDNPALAAAVRAGSVIAVFIWAPEEEGYYCPGRVSRWWIKKSLAHLDSSLKKLGTSLITKRSNDSVSSLLQVVKSTGATRVFFNHLYDPISLVRDNCAKETLSAEGVSVCSFNADLLYEPWEVVDDESRPFSTFSDFWEKCLTMPYDPEAPLLPPKRIISGDASRCPSDNLVFESELEKGSNALLARAWSPGWSNADKALTTFINGPLIEYSKNRSKADSATTSFLSPCLHFGEVSVRKVFHRIRTKQTLWANEGNKAGEESVNLFLKSIGLREFSRYMSFYHPYSHERPLLGQLKYFPWLVDEGYFKAWRQGRTGYPLVDAGMRELWATGWLHDRIRVVVSSFSVKVLQLPWTWGMKYFWDTLLDADLESDALGWQFITGTLPDGCEFLGIDNPQFEGYKFDPNGEYVRRWLPELARLPTEWIHHPWDAPESVLQAAGIELGSNYPFPIVEIVAAKERLEEALSQMWQLEAAARSAIENGMEEGHGDSTDEFVPIAFPQAMQIEMEANNVPVRNNNPTITALRRYGDQIVPSMSSSFFRNEDEETSVDIRNSVVDSRAEVPIISM

SEQ ID NO: 34794 - protein, 81 aa, Triticum aestivum
  misc_feature (49)..(49): Xaa can be any naturally occurring amino acid
  misc_feature (60)..(61): Xaa can be any naturally occurring amino acid
  misc_feature (63)..(63): Xaa can be any naturally occurring amino acid
  misc_feature (67)..(67): Xaa can be any naturally occurring amino acid
  misc_feature (71)..(71): Xaa can be any naturally occurring amino acid
  misc_feature (74)..(74): Xaa can be any naturally occurring amino acid
  misc_feature (77)..(78): Xaa can be any naturally occurring amino acid
  unsure (1)..(81): unsure at all Xaa locations
KPEWRALLDDMATVATEEYRAIVFQEPRFVEYFRCATPETEYGRMNIGXSRPSKRKPGRXXQXLRAXPLIXPLXQTXXQSP

SEQ ID NO: 34795 - protein, 61 aa, Musa acuminata
DTLLDADLESDALGWQYISGSLPDGRELDRIDNPQFEGYKFDPHGEYVRRWLPELARLPTQ

SEQ ID NO: 34796 - protein, 617 aa, Pseudomonas sp. M18
MSGKAQQQSRLKELIARGREQGYLTYAEVNDHLPEDISDPEQVEDIIRMINDMGINVFETAPDADALLLAEADTDEAAAEEAAAALAAVESDIGRTTDPVRMYMREMGTVELLTREGEIEIAKRIEEGIREVMSAIAQFPGTVDSILADYNRIVAEGGRLSDVLSGYIDPDDGSLPAEEVEPVNLKDDSADSKEKDDEEEESDDSSDSDDEGDGGPDPEEARLRFTAVSEQLDKAKKALKKHGRGSKQATAELTGLAELFMPIKLVPKQFDALVARVRSALEGVRAQERAIMQLCVRDARMPRADFLRLFPNHETDEKWVDSVLKSKPKYAEAIERLRDDILRNQQKLAALESEVELTVAEIKEINRAMSIGEAKARRAKKEMVEANLRLVISIAKKYTNRGLQFLDLIQEGNIGLMKAVDKFEYRRGYKFSTYATWWIRQAITRSIADQARTIRIPVHMIETINKLNRISRQMLQEMGREPTPEELGERMDMPEDKIRKVLKIAKEPISMETPIGDDEDSHLGDFIEDSTMQSPIEMATSESLKESTREVLAGLTAREAKVLRMRFGIDMNTDHTLEEVGKQFDVTRERIRQIEAKALRKLRHPSRSEHLRSFLDE

SEQ ID NO: 34797 - protein, 397 aa, Chlorobium tepidum TLS
MPRFSKSVSALRSSAIRELMSLASRPDILSFAGGMPGNELFPIDEVEELFRNLDTKTKQAAFQYGPTPGLPSLLESLGGFLERKGLPVKKNRLMITTGSQQALSIFARAFVDPGDRVLTEYPCFIGAIAAFRACGAEIVSLPVDEAGIDIAMLRQEVENPDPAKFLYITPYFHNPAGMLYSTNRKRKLIKALQGRDIPLLEDDAYGDLWFSDEHREALQPIKAIDPEDIDVCYMGSFSKILGPGLRLGWMLAPEAIYEKCELIKQSADACSSSFTQVIADAFIRSGRIDTYVASVREEYKRRAASMVKALRSNLPAYVRWNEPKGGFYIWLTLPEGADATEILKRAIEGGAVFVTGSTFDPQGTRNNTMRLSYCNNTPEEIERGIPIITRAIREVCG

SEQ ID NO: 34798 - protein, 61 aa, Musa acuminata
DTLLDADLESDILGWQYVSGSLPDGHELKRLDNPEVLGQKYDPDGEYIRNWIPELARLPTE

SEQ ID NO: 34799 - protein, 297 aa, Glycine max
MAHFSLSPLSCAPSPLPPRRRIFLSPPRAAASSATDVVSTSTSTSFSASNFAPKVVVTRERGKNAKLIAALAKHEINCLELPLIEHMQGPDLDRLPSVLGDNAFDWVVITSPEAGSVFLEAWRASGMPHVKIGVVGAGTASIFKEALQSSNRSLDIAFVPSKATGKVLATELPKIGSKCTVLYPASAKASNEIEEGLSNRGFEVTRMNTYTTVPVQHVDHTVLKIALAAPVVTVASPSSIRAWKNLLSDSEWNNSVACIGETTATMARSLGFTNVYFPTQPGIEGWVESILEALGFL

SEQ ID NO: 34800 - protein, 141 aa, Arabidopsis thaliana
  misc_feature (69)..(69): Xaa can be any naturally occurring amino acid
  unsure (1)..(141): unsure at all Xaa locations
GGPRSQISPFADCSLISLAVFFHHHDGETLPITRLIPFHPQVDPYEVFALSQLMTCKTAVADIPYGGAXGGIGCSPRDLSLSELDKLTRVFTHKIHDLIGIHTDMPAPDMGTNAQTMAWILDEFSKFHGHSPADATGKPID

SEQ ID NO: 34801 - protein, 224 aa, Clostridium tetani E88
MSIINNYIKEVFVMENTFLNEIRLNSSKLHDMAEHTGFIKRLIEGNANVTTYAEYIYNLYHIYNAIESNLEKNKGNKYIKDFALPEVYRAEAIMKDVKYLLKDKLDSMEPLISTKVFVNRINHIGEKNKELLIAHAYTRYLADLFGGRTIYQIVKENYKIDDKGLNYYIFHEINDLKNFVMGYHEKLNNIKFDETLKKDFINEISISYIYNISISNELEFDRFK

SEQ ID NO: 34802 - protein, 332 aa, Arabidopsis thaliana
MAKKPVRVLVTGAAGQIGYALVPMIARGIMLGADQPVILHMLDIPFAAEALNGVKMELVDAAFPLLKGVVATTDAVEACTGVNVAVMVGGFPRKEGMERKDVMSKNVSIYKSQASALEKHAAPNCKVLVVANPANTNALILKEFAPSIPEKNITCLTRLDHNRALGQVSERLSVPVSDVKNVIIWGNHSSTQYPDVNHATVKTSSGEKPVRELVKNDEWLNGEFISTVQQRGAAIIKARKLSSALSAASSACDHIRDWVVGTPEGTFVSMGVYSDGSYNVPAGLIYSFPVTCRNGEWTIVQGLPIDDASRKKMDLTAEELKEEKDLAYSCLS

SEQ ID NO: 34803 - protein, 527 aa, Zea mays
MPPVKAEDLVVHAVKEQFAGLDYCITSPPPWITTVLVGFQHYLVMLGTTVLIATIIVPLMGGGHAEKAIVIQTILFLSGINTLLQVHFGTRLPAVMSGSYTYIYPAVAIILSPRYALLIDPLERFVFTMRSLQGALIIAGVFQAVVGFFGIWRVFIRFLSPLAAVPFVTLTGLGLFFFAFPGVTKCIEVGLPALVLLVIFAEYASHLFAKGSFVFSRCAVLVTVVIIWIYAEILTAAGAYNERGPVTQFSCRADRSGIIQGSPWVRFPYPFQWGYPIFCFQDCFAMLAASFASLIESTGTLIAVSRYSGATFCPPSVFSRGIGWEGISIILDGMCGTLTGTAASVENAGLLAVTRVGSRRVIKISALFMIFFSLFAKFGAVLASIPLPIFAALYCVLFAYSAGAGFSLLQYCNLNSLRTKFILSISLFLGLSIPQYFRVYEMFFGFGPVHTHSVAFNVMVNVIFSSPATVAAILAYLLDCTHLYWEASVKKDRGWFWWEKFKSYKYDGRSEEFYRLPYGLSRYFPSL

SEQ ID NO: 34804 - protein, 529 aa, Magnaporthe grisea
MGSVEDETALPSGGRLLLISNRLPITIKRSDDGQYSFSMSSGGLVTGLSGLAKTTSFQWYGWPGLEVPDAEAGPVVQRLKNEYGAHPVFVDDELADRHYNGFANSILWPLFHYHPGEITFDESAWSAYKEVNRLFAQTVVKDVQDGDMIWVHDYHLMLLPEMLREEIGDSKKNVKIGFFLHTPFPSSEIYRILPVRQALLQGVLHCDLLGFHTYDYARHFLSSCSRILSAPTTPNGVQFAGRFVTVGAFPIGIDPEKFVEGLQKPKVQQRIAALTRKFEGVKLIVGVDRLDYIKGVPQKLHALEVFLTEHPEWIGKIVLVQVAVPSRQDVEEYQNLRAVVNELVGRINGKFGTIEFMPIHFLHQSVSFDELAALYAVSDVCLVSSTRDGMNLVSYEYIATQRDRHGVMILSEFTGAAQSLSGSLIVNPWNTEELANAIHDAVTMGPEQREANFKKLERYVFKYTSAWWGSSFVAELNRLAAGIEGADAEGSKTKIAIRGVGDAVADGAGKVADAVSSVLPGGDNKTEGN

SEQ ID NO: 34805 - protein, 239 aa, Leccinum rotundifoliae
  misc_feature (124)..(126): Xaa can be any naturally occurring amino acid
  unsure (1)..(239): unsure at all Xaa locations
DPFIDLEYMVYMFKYDSVHGRFKGDVHAKDGKLYINGKSITVYAERDPANIKWGSVGAEYVVESTGVFTTIEKAGAHLKGGAKKVIISAPSADAPMFVCGVNLDKYDPKYTVISNASCTTNCLXXXAKVVNDKFGIVEGLMSTIHATTATQKTVDGPSAKDWRGGRAVNGNIIPSSTGAAKAVGKVIPSLNGKLTGLAFRVPTNDVSVVDLVVRLEKSASFDEIKAAVKAASESPDLKG

SEQ ID NO: 34806 - protein, 490 aa, Synechococcus sp. CC9605
MTTAFHAPPQKRRKTLQEASLLEGPMLLLKSIRGFSSNRAMTWLACAPLALMGLGIFTLSAKAEELPELSAAFLANNLWLLVATILVIFMNAGFAMVEAGMCRQKNAVNILAKNLFVFALAVTAYWFVGYSLMYGDSVIDGWLYFGGLFFDPTVTAETISDAGLVPTVDFLFQAAFAGTAATIVSGLVAERIKFGEFVIFALVLTAFIYPVAGSWEWNGGWLNSVGSVEFIDFAGSSIVHSVGAWAGLVGAMLLGPRIGKYVDGKVQAIPGHNMSIATLGALILWIGWYGFNPGSQLAMDQWVPYVAVTTTLGAAGGAIGATVISTMTSKKPDLTMIINGILAGLVSVTAGCGNLTLTGSWVAGVVGGIIVVFSVAALDASGIDDPVGAFSVHGVCGVWGTIVIGLWGYDVQGDGSGLGLLVGGGVEQLGIQALGAAAYAIWTVVTCFIAWSIIGSLFGGIRVTEQEESEGLDIGEHGMEAYAGFSTTNN

SEQ ID NO: 34807 - protein, 320 aa, Oryza sativa (japonica cultivar-group)
MGEQQQQVERQPDLPPGFRFHPTDEEIITFYLAPKVVDSRGFCVAAIGEVDLNKCEPWDLPGKAKMNGEKEWYFYCQKDRKYPTGMRTNRATEAGYWKATGKDKEIFRDHHMLIGMKKTLVFYKGRAPKGDKTNWVMHEYRLADASPPPPPSSAEPPRQDDWAVCRIFHKSSGIKKPVPVAPHQVPAAANYQQQQQMAMASAGIIQVPMQMQMPSMSDQLQMLDDFSTTASLSLMAPPSYSTLPAGFPLQINSGAHPQQFVGNPSMYYHQQQQMDMAGGGFVVSEPSSLVVSPQDAADQNNNAADISSMACNMDAAIWKY

SEQ ID NO: 34808 - protein, 445 aa, Hypocrea virens
MREIVHLQTGQCGNQVGSAFWQTISGEHGLDASGVYGGTSDQQLERLNVYFNEASGNKYVPRAVLVDLEPGTMDAVRSGPFGQLFRPDNFVFGQSGAGNNWAKGHYTEGAELVDNVLDVVRREAENCECLQGFQITHSLGGGTGSGMGTLLISKIREEFPDRMMATFSVVPSPKVSDTVVEPYNATLSMHQLVENSDETFCIDNEALYDICMRTLKLSNPSYGDLNHLVSAVMSGVSTSLRFPGQLNSDLRKLAVNMVPFPRLHFFMVGFAPLTSPGAHSFRAVSVPELTQQMLDPKNMMAASDFRNGRYLTCSTIFRGKVAMKEVEDQMRSIQNKNSTYFVEWIPNNIQTALCSIPPKGLKISSTFVGNSTAIQEIFRRVGEQFTAMFRRKAFLHWYTSEGMDEMEFTEAESNMNDLVSEYQQYQDATADDGDEYEEEAPVDEE

SEQ ID NO: 34809 - protein, 611 aa, Erwinia carotovora subsp. atroseptica SCRI1043
MEQNPQSQLKLLVTRGKEQGYLTYAEVNDHLPEDIIDSDQIEDIIQMINDMGIQVMEEAPDADDLLLAENTNDADEDAAEAAAQVLSSVESEIGRTTDPVRMYMREMGTVELLTREGEIDIAKRIEDGINQVQCSVAEYPEAITYLLEQYDRVEAGESRLSDLIIGFVDPNAEEDIAPTATHVGSELSSEEISDNDEEEDEDEEEDDNSIDPELAREKFTELREQYETTRKVIKAHGRSHALAAQEILNLSEVFKQFRLVPKQFDFLVNSMRTMMDRVRTQERLIIKLCVEQCKMPKKNFVTMFTSNETNNSWFAAAVAMGKPWSEKLNDVAEDVTRSLQKLKQIEEETGLTIEQVKDINRRMSIGEAKARRAKKEMVEANLRLVISIAKKYTNRGLQFLDLIQEGNIGLMKAVDKFEYRRGYKFSTYATWWIRQAITRSIADQARTIRIPVHMIETINKLNRISRQMLQEMGREPTPEELAERMLMPEDKIRKVLKIAKEPISMETPIGDDEDSHLGDFIEDTTLELPLDSATSESLRSATHDVLAGLTAREAKVLRMRFGIDMNTDHTLEEVGKQFDVTRERIRQIEAKALRKLRHPSRSEVLRSFLDD

SEQ ID NO: 34810 - protein, 363 aa, Anabaena variabilis ATCC 29413
MSGKNIVFLVLLLFIPVSLAAHYLEWGDLIVFVTAGLAILPLAAWMGAATEEIAVVVGPTLGGLLNATFGNATELIIALVALNAGLVNVVKASITGSIIGNLLLVMGLSMLLGGLRHKEQTFQPIVARVNASAMNLAVIAILLPTAMNYTAKGIGEATLQYLSVAVAVVLILVYVLTLIFSMKTHAYLYDVGVAEIETEENPHPKPNIFLWSGVLLVCTLLVAVESELLVDALEVATSQLGLTALFTGVILVPIVGNAAEHATAVTVAMKDKMDLSVSVAVGSSMQIALFVAPVLVIAGWILGQPMDLDFQPFELVAVVVSVLIANSISSDGKSNWLEGTLLLAAYAVLGFAFYFHPDVGGLG

SEQ ID NO: 34811 - protein, 302 aa, Neurospora crassa
MTTSTVGLIDNWYPPTRENYDLILSLWKWFPVAASLQWGISWYGMGKTSVTSRLNLPGRIGWLTMEAPGFMTLVYMMRTLPAQHGFTLSDLPWQNKVLAGLFVFHYSYRALAFPFLQPSMAPIHIAIWLSALSFQIINGTLIGAWLAAYGPTSHAAWDRQLFSSFPTLQFTCGIALFYVGLMANFYHDDELREIRRRENRRQERLAKQNGQKGQPGKKVGKHYEIPKAGLFKVMLYPHYFCEWVEWLGFYMAAGWGCLPARCFLLNEVAAMLPRAVKGKQWYMEKFGEEKISKKWAVIPGGW

SEQ ID NO: 34812 - protein, 553 aa, Rhodospirillum rubrum
MPTIATALLDALKAHGATRIFGIPGDFALPFFRVAEQSALLPLYTLSHEPGVGFAADACARMGRGLGVAAVTYGAGALNMVNPVAGAWSEKSPLVVISGAPGVAESAGGLLLHHQAKTLDSQWRIFEEITCARTRLDDPLTAPGEIARVLRACLEHSRPVYIEIPRDIVDAPCAAVDRLPPTPVDGEAVEAAAGEIMARLAAASAPALLLGVEVRRHGIEADVAELARRLGLPIATTFMGRGLLSEEGAAGGAPDSLMGTYLGLAGRPEVRAVIEDSDGLLMLGVILSDTNFGVSGKRIDLRRAMLAADRQVALGFHTYNDIPLADLVAALLRQAEGFARQDAKALPKPTALPRDMIADGAPIGPMDIAAAINDLFSAHGVMPIASDMGDCLFTALDTTHAPLVAPGYYATMGFGVPAGLGVQASCGRRPLILVGDGAFQMTGWELGNCARYGWDPIVIVFNNASWEMLRTFQPDTAYNDLADWRFADLAAGLGGVGHRCQTRADLARALDRAAREPGRFHLIEAVLARGAISDTLQRFVTTMKGRHAAAADA

SEQ ID NO: 34813 - protein, 446 aa, Hypocrea virens
MREIVHIQTGQCGNQIGAAFWQTISGEHGLDSNGIYGGSSELQLERMNVYFNEANNNKYVPRAVLVDLEPGTMDAVRAGPFGQLFRPDNFIFGQSSAGNNWAKGHYTEGAELVDNVLDVIRREAEGCDCLQGFQITHSLGGGTGSGMGTLLISKIREEFPDRMMATFSVVPSPKVSDTVVEPYNATLSVHQLVENSDETFCIDNEALYDICMRTLKLSNPAYGDLNYLVSAVMSGITTCLRFPGQLNSDLRKLAVNMVPFPRLHFFMVGFAPLTSPGAHSFRAVTVPELTQQMFDPKNMMAASDFRNGRYLTCCSIFRGKVAMKEVEDQMRNVQNKNSTYFVEWIPNNIQTALCAIPPRGLKMSSTFIGNSTSIQELFKRVGEQFSAMFRRKAFLHWYTGEGMDEMEFTEAESNMNDLVSEYQQYQEAGIDEEEEYEEEAPAEHEE

SEQ ID NO: 34814 - protein, 213 aa, Gloeobacter violaceus PCC 7421
MIELYTWNTPNGQKIPIFLEETGTPYNFHPVHIGKGEQKTPEFLAINPNGKIPAIVDTEGPDGKPLRVFESGAILQYLAQKTGQLLPAHPRHRVEALAWLAFQIGGVGPMFGQVGFFLRAKERNEQAIERYTTESQRLFGVLERRLGEEEYLAVEYSIADIATYPWVRASQFIGSDFMQQALEDSPNVRRWYDAIAKRPAVERALQITKEKSQ

SEQ ID NO: 34815 - protein, 1582 aa, Mycobacterium tuberculosis H37Rv
MTASSFDELSAALRDVAGDQIPYQPAVGHDDRGPVWVFSGQGSQWPGMGTELLVAEPVFAATVAAMEPVIARESGFSVTEAMSAPQTVSGIDRVQPTIFAVQVALAAALKSYGVRPGAIIGHSLGEAAAAVVAGALSLHDGLRVICRRSRLMSRIAGSGAMASVELPGQQVLSELAIRGISDVVLSVVASPTSTVVGGATQSIRDLVAAWEQQDVLAREVAVDVASHTPQVDPILDELLEVLAEVDPTAPEIPYYSATLWDPRERPSFTGEYWVENLRYTVRFAAAVQAALKDGYRVFGELAPHPLLTYAVEQNAASLDMPIATLAAMRRGEQLPFGLRGFVADVHNAGAKVDFSVQYPDGRLVDAPLPSWTHRTLMLSREDSHRSHTGAVQAVHPLLGAHVHLLEEPERHVWQAGVGTGAHPWLGDHRIHNVAAFPGAAYCEMALAAARTTLGELSEVRDIKFEQTLLLDEQTVVSSAATIAAPGILQFAVESHQEGEPARRASAMLHALEEMPQPPGYDTNALTAAHESSMSGEELRKMFNSLGIQYGPAFSGLVAVHTARGDVTTVLAEVALPGAIRSQQSAYASHPALLDACFQSVLVHPEVQKATVGGLMLPVGVRRLRNYHSTRSAHYCLARVTSSSRAGECEADLDVFDQAGTVLLTVEGLRLAAGISEHERANRVFDERLLTIEWERGELPEVPQIDAGSWLLLSASEADPLTAQLADALNAVGAQSTSVASASDVAQLRSLLGGRLTGVVVVTGPPTGGLTQCGRDYVSQLVGIARELAELPGEPPRLFVVTRSAASVLPSDLANLEQAGLRGLMRVIDSEHPHLGATAIDVDNDETVAALVASQLQSGSQEDETAWRNGIWYTARLRPGPLRPAERRTAVVEYRRDGMRLQIRTPGDLESLEFVTFDRVAPGPGEIEVAVTASSVNFADVLVAFGRYPTFEGYRQQLGIDFAGVVTAVGPDVTEHRIGDHVGGMSANGCWSTFVRCDARLAVTLPPELPVAAAAAVPTASATAWYALHDLARICSDDKVLIHSGTGGVGQAAIAIARAAGCEIFATAGSAQRRQLLHDMGVEHVYDSRSTEFAEQIRGDTDGYGVDVVLNSLPGAAQRAGIELLAFGGRFVEIGKRDIYGDTRLGLFPFRRNLSLYAVDLALLTHSHPHTVRRLLKTVYQHTVEGTLPVPQTTHYPIHDAAVAIRLVGGAGHTGKVVLDVPRTGEGVAVVPPEQVRTSRPDGAYLVTGGLGGLGLFLAGELAAAGCGRIVLNSRSTPSPHATRVIERLRAAGADIQVECGDIADAATAHRVVAVATASGLPVRGVLHAAAVVEDATLANVTDELIDRCWAPKVHGAWNIHRATAAQPLEWFCLFSSAAALVGSPGQGAYAAANSWLDAFAHWRRAQGLPATSIAWGAWAEIGRATALAEGTGAAIAPAEGARAFQTLLRYGRAYSGYAPIMGTPWLTAFAQRSRFAEAFHATGQNQPATGKFLAELGSLPREEWPRTVRRLVSDQISLLLRRTIDPDRPLSDYGLDSLGNLELRTRIETETGIRVSPTKITTVRGLAEHVCDELAAAQSAPV

SEQ ID NO: 34816 - protein, 468 aa, Neurospora crassa
MAPISRETDFLVIGGGSGGIATARAAAGKYGIKSMVVEGKRLGGTCVNVGCVPKKVTFYAALVAETIHQAKDYGFSVEQTAPFDWPTFKQKRDAYVARLNGIYERNLANDKVEYVHGWAKLLSPNSVEVTLDDGTKSVVNAKKILIAVGGNPTIPPHIPGSEYGTNSDGFFDIDTLPKKVALVGAGYIAVEFAGMLNALGVETHLFIRHDTFLRSFDPMIQQVSVKEYERIGVKVHKKSQLTSVQKDAAGKLAINFKEGEGEQSISDVDHLIWAVGRTPAVEGLGLDKAGVKTNEKGYIEVDEYQNTSTENIYAVGDVCGQVELTPVAIAAGRKLAARLFGPEEFRTLKLNYDNVPSVVFAHPEIGSIGLTEPEAVAKYGAENLKIYKSSFTAMYYAMMKPEDKAPTAYKLICAGPEEKVVGLHIIGLGSGEILQGFGVAVNMGATKADFDNCVAIHPTSAEELVTLK

SEQ ID NO: 34817 - protein, 328 aa, Escherichia coli K12
MERSMKPSVILYKALPDDLLQRLQEHFTVHQVANLSPQTVEQNAAIFAEAEGLLGSNENVNAALLEKMPKLRATSTISVGYDNFDVDALTARKILLMHTPTVLTETVADTLMALVLSTARRVVEVAERVKAGEWTASIGPDWYGTDVHHKTLGIVGMGRIGMALAQRAHFGFNMPILYNARRHHKEAEERFNARYCDLDTLLQESDFVCLILPLTDETHHLFGAEQFAKMKSSAIFINAGRGPVVDENALIAALQKGEIHAAGLDVFEQEPLSVDSPLLSMANVVAVPHIGSATHETRYGMAACAVDNLIDALQGKVEKNCVNPHVAD

SEQ ID NO: 34818 - protein, 557 aa, Arabidopsis thaliana
MTRTEPNRSRSSNSDSDKNSGNVGGGRTTGMRVIVPLQGVVQGRGGLFLGSVIPCAFFYFLQFYLKRNRKNDESDNSGEQNSSASSSSSPNSGLPDPTRSQSAGHLTELTGLPRSLSRILLSPRNSGGAVSVSGRVNCVLKGGDSSPYYVGQKRVEDDPYDELGNPDGVIQLGLAQNNKLSLDDWVLENPKEAISDGLSISGIASYEPSDGLLELKMAVAGFMTEATKNSVTFDPSQLVLTSGASSAIEILSFCLADSGNAFLVPTPCSPGYDRDVKWRTGVDIIHVPCRSADNFNMSMVVLDRAFYQAKKRGVRIRGIIISNPSNPMGSLLSRENLYALLDFARERNIHIISNEIFAGSVHGEEGEFVSMAEIVDTEENIDRERVHIVYDLSKDLSFRGLRSAAIYSFNESVLSASRKLTTLSPVSSPTQHLLISAISNPKNVQRFVKTNRQRLQSIYTELVEGLKELGIECTRSNGGFYCWADMRGLISSYSEKGEIELWNKLLNIGKINVIPGSCCHCIEPGWFRICFSNLSERDVPVVMNRIRKVCETCKSQN

SEQ ID NO: 34819 - protein, 542 aa, Haemophilus ducreyi 35000HP
MIFKNTRRSYQIIATFLRYGIDEIIPDIPFTYSARLTRKAFFWLQNEHKDQPFGVRLRLALQELGPVWIKLGQMLATRRDLFEPALADQLALLQDSVAPFDGKLARKIIEQALGNTLETWFDDFDEQALASASIAQVHTATFNKNQPLAGQNVVLKVIRPDIEHIIKADIALMYQLAKLIPYLSDDAKRLRATEVVREYEKTLLDELDLTREMANAIRLRNNFENSEMLYVPAMYPDFCHKNVIVMERIYGIPVSDIATLTENGTNMKLLAERGVQVFFTQVFRDSFFHADMHAGNIFVNPNHPEDPQYIGIDCGIVGTLNQNDKRYLAESFVAFFNRDYRRVALMHIESGWTPADTDVDAFEEAFRTVCEPIFAKPLAEISFGQVLLNLFNVARQFNMEVQPQLVLLQKTLLYIEGLGRQVYPALDLWQTAKPFLQKWLDQQVGFKAILRDLKQQAPQFREHFAQFPEAVFNALQQQKHINYRLAELNKTLQSQADNKTYNVKMIIMGSIILSLLWQFNSLPLWLSLPILTMLCLALCRRK

SEQ ID NO: 34820 - protein, 1184 aa, Gloeobacter violaceus PCC 7421
MSDTPKARRRRGYRLTSQGWQRLHEARCRTEERENAGERLTLEDLSERTGFDPNTVAKVLKAEEGVDKQTLLRFFIAFGLELESDDYARPEAGAASSQPPREVRRDWGEAVDVSLFHGRGGELAILENWLVEERCRLVAVLGMGGIGKTALAVKLARQSEAHFERLIWRSLRNAPPLADLLAELIVFAGDEQAPALPTGIEGRILRLLECLRRNRCLLVLDNAESLLRGGEQAGTYREGCEGYGELLRRVGEVPHASCLVLTSREKPAEVAALEGSSLPVRSLRLGGLQESEGEVILQAKGLRGGADERRKLVECYRGNPLALMIISTSIRELFDGQIREFLAQDTAVFNGIANLLQQQFDRLTEAEKQLMYWLAIHREPVVATQLRENVVPAVSAPKILEALESLLRRSLIERGTTGYSQQPVVMEYTTEHFVERICDEVHKGTIGLFRSHALLLAQAKDYIRAAQSRLILKPVIDELLVRLGSQAHLEQRLAAVLAQQRDEAPLQPGYVGGNTLNMLATLQTELRHWDFSHLAVWQAYLQEVNLYGVNFSHTDLARCVFAQNFGGVFSVAFSPDGEQIAVGDDNSEIRLWRAADGQQQLSCQGHTDWVCAVAFAPNGQTFASASQDGTVKLWDARIGQCLATLRGHIGWVRSAAFAPDGSLLASAGQDSTVKLWDAATGRCLATLQGHTGVVHSVAFAPDGSLLASAGQDSTVKLWDAATGRCLATLQGHTEPIRSVVFSPDGHRLASASHDRTVKLWNPATGRCLATLAGHGDWVSAVAFAPDGRSLATGSLDRTVRLWETITGQCLKTLQEHTDQVFSIAFHPQGHTLASGSPTQTVKLWDTESGQCLRTLQGKTVTVLAVAFSPHGQTLVSGSDDRLVRLWDVRTGECTRVLRGHLRGVTTVAVAPDGRTLASAGADLSVKIWDALSGQCLRTLREHTGSIRSVAFAPDGRLLASGSQDGTAKLWDPGTGRCVATLRGHTSWIRSVAFAPDGGLLASGSQDGTARIWDTRTGECLQILAGHTYLICSVAFSLDGQLLASGSQDQTIRLWEVQTGACLRTLTEKTGMVFSLAFSPDGQILASGSNDMTVKLWQVGTGRCVKTLGPHTSLVVSIAYAPDGSTLASASLDETIRLFDPATGACLRRFTVERTYEGTDLTGATGLSDAQKAVLIALGAVERIL

SEQ ID NO: 34821 - protein, 404 aa, Frankia sp. CcI3
MVYDKIVVTGLGAMTPLGGDLAATWDGLVAGASGVAVIEDEWARELPVRLAAQLPVDPAATLPRKDSRKLDRGEQMAIVTARQAWADAGSPEVAPERLAVVIGTGYGGVQSTLGQHRILEQAGARRMSPHTVIMLMPNGPAAWVSIDLGAKAGARTPVSACASGAEAIATGMEMIQHGLADVVVAGGVEAPVDTLPLAAFAQMKALSTRHSDPAAASRPFDADRDGFVLGEGAGLLVLERAGFAAARGARVYAVAAGAATNSDALDIVTADPAGQRRAIEAALAGAGLTPTDIDLVHAHATSTPVGDPLEAEAITQTIGTHPAVTATKSMTGHMLGAAGAVGAIATVLSIRDGVIPPVRNLDRLNPTIKLDVVSGPARHETVRAAVANAFGFGGHNVSLAFTAP

SEQ ID NO: 34822 - protein, 402 aa, Bacillus halodurans C-125
MNREVVIVGGGPAGMLMGLLLAKEKIQVTVLEKNTTFNRDFRGETIAPGSVFLLKKLGVFKALEEHGFIKVQKIKMYDREEKLFSVNFDDFNHPQKFGIDIPQPVVLEALKQKASSYPNFEYIHGATCTDLIKDGEKVVGIRYSKEKEEHQIKCRLVIGAEGRFSRLRTLGHFAVEKKEFSRDLIWFKVPKPEGWEEGNLIKVYKHDHVIILPTYPNDLRVGTYIYLGGNRETKAKGIAAFIDKVCMIEPRLRKPMEKHIKSWDDTTLLKIFTAHVDQWAKDGLILIGDAAHTLSPILGQGVNIAMQDAFELLPYVNSGLKTYEGPLPAHHFDDYISKRKKQVSFVAGFQERQEQNLAASTPFQCMLRKVKMKLLDKAPFKIKVMKKLQYGVVANETTEGLT

SEQ ID NO: 34823 - protein, 302 aa, Arabidopsis thaliana
MVQPGTEIKASDLTLLVITIILFAIFIVGLASVCFRWTSRQFYSQESINPFTDSDVESRTSITAVRGLDEAIINSFPTFLYSEVKERRIGIGGVECAVCICEFEDHETLRLMPECCHVFHADCVSVWLSDHSTCPLCRVDLCLQPGERSYLNPEPDLVESTNSHLFDGVTWTNRNRPSRSWSTRLSQCRVSQILISRSHSTGHSVVQPLDNLDRFTLRLPEEVRRQLTKKTVDNVAFSQARSSRRGYRSRSAGSERSVFSYQRRMHSFSDCAWSTSCGGEAVAPSKDSRRISVEQSQLDDRV

SEQ ID NO: 34824 - protein, 325 aa, Prochlorococcus marinus subsp. marinus str. CCMP1375
MSIPPAIVASARMGWKWQWNQLMNGLAPADAEGNYTRTQSQALDSKPPKAEDLLNRSSEDFPLLVVARSCPWAHRTWLLYELKDLNKSLNILIAKPNPKAGLWKIDPSWKGCKSVLEIYKLCNAPPTHRATVPVLVDPKPNNKKTPELLGNESAQLVETLNIWPTEESTPNFYPKELHEEIKDWQELLQDSVNNGVYKCGFARNQRSYEEACKTLFNSLKIVEKNLSIKGPWLCGEKLTIADIRLFPTMIRWESVYAPLFRCNQSPLTKFPNLLQWRKNFFNLPKVSKTCDSKNWRNDYFGALFPLNPSNIVPLGPNIQEIINSA

SEQ ID NO: 34825 - protein, 268 aa, Arabidopsis thaliana
MHYPNNRTEFVGAPAPTRYQKEQLSPEQELSVIVSALQHVISGENETAPCQGFSSDSTVISAGMPRLDSDTCQVCRIEGCLGCNYFFAPNQRIEKNHQQEEEITSSSNRRRESSPVAKKAEGGGKIRKRKNKKNGYRGVRQRPWGKFAAEIRDPKRATRVWLGTFETAEDAARAYDRAAIGFRGPRAKLNFPFVDYTSSVSSPVAADDIGAKASASASVSATDSVEAEQWNGGGGDCNMEEWMNMMMMMDFGNGDSSDSGNTIADMFQ

SEQ ID NO: 34826 - protein, 731 aa, Crocosphaera watsonii WH 8501
MFVMFRREVQLPLGKLVRQTQSLLPEEKRPKLVQWDEMYQLEKLIISLGDYFQELQYLQEEIAEQKASEKALEELNLAKSEFLSMMGHEIRTPLNAVTGMTGLLLDTELSDQQKEFVNIIRNSGENLLTMINNILDFSKIEANKLELEEAPFELGLCIEEVLRLFVSQASQKKLELAYLLEPNTPSGIVGDSTRLKQILANLIGNAVKFTPEGEVVIYVSSTVIEGGEGEVNPNYELRFAVKDTGIGIPKERCHRLFQPFSQVDASTTRQYGGTGLGLVISKRLSELMGGKMWVHSEEGKGSTFNFTLRAKAATSSSPVTSQEGESELMGKRVLIIDDNLTSQKILINQAQSWGMFTCAVDSGEKALEWLKRGITFDVAILDMNLPDMNGLELVREIRKQPNCTRLPLIMLSAITETEKTFQSSEEEFVAVLCKPVQRSQLYNVLMEIFSEIPRAPIRVTQSQSVQCSEKSLMGQTHPLKILVAEDVVVNQQVIHLLLEKLGYCADIVSDGQEVLEALKNFAYDVVLMDIRMPEMDGLTATDHICQNYAPDKRPRIIAMTAESMEGDRERFIAGGMDDYICKPVRIKELQEALSRCQPRSESLAIEPKMFNQLRNIAGKRTNEIIKGYLQDTALRIETMNKAIEKRDTEQLYQAAHALRSPSGNLGATNLYYLCKEMETIAREGSLEEASERILGITIEYDRVYYALKKELMREPIPEPIPEPMVKFGGIS

SEQ ID NO: 34827 - protein, 330 aa, Haemophilus somnus 129PT
MHRAGFRIIIVTSGAMAAGRHYLNHPQLPPTIASKQLLAAVGQSQLIQTWEQLFAIYDIHIGQILLTRADIEDRERFMNARDTLHALLDNRIIPVINENDAVATAEIKVGDNDNLSALVAILAQAEQLYLLTDQRGLFDSDPRKNPQAKLISIVDKITDHIRSIAGGSGTTLGTGGMTTKISAADIATRSGVETIIAPGNLENVIVNLAYGKEIGTKFVVQTDCLESRKQWLFAAPVAGIVTIDEGAESAVLIQHKSLLPAGIISVEGCFSRGEVVKICGTNGKKIALGVPRYNSDSLIQIKGKKSQDIEQILGYEYGSVAIHRDDMVVY

SEQ ID NO: 34828 - protein, 368 aa, Oryza sativa
MAPPCGDAAAAASAAPGLANLLIREGAGLPSRPERYPPFRPCTSDSFAPISREGDDIPPQKKSVSLRSGGGGNAAEREEGGANRNGKKEKTGAQRITGWGLREFSKIGFTKLPGPGLSRPGGKHSYCAEVTAVFTLPYPGGKPGNRGNRAVTGGMVNPGVDCFVSKKVEAKGRTTYNEIMVQTSNDEVYTSSGELIVADEIFAELKSITQNGLEFDEKNIRRRVYDAFNVLIAIRVIAKDKKEIKWMGLTNYRYEKIQKLEEVHKELITRIKNKKKLLQEIEKQFDDLQNITLRNQASQRPAESVNGILLPFLLIKTSRKARVEIEISEDSKFARFDFNGAPFTMHDDVSILEAIRRNKGRAGLSIHP

SEQ ID NO: 34829 - protein, 395 aa, Methanococcus maripaludis S2
MALSYSKRMENIKSSEIREILKVTQKPEIISFAGGLPAPELFPVKEIKEISGIVLDEMGPESLQYDITEGYPPLRQQISERMNKVLKTELTENNILIVCGSQQGLDFSGKVFLDENDVVLCESPTYLGAINAFKSYEPQFKEVPTDDFGMIPEELEKILKTTKNVKLIYAIPDFQNPTGKTWTLERREKFMKIIEKYEIPVVEDNPYGELRFDGEILPSLKSMDKKGLIIHLGTFSKTFCPGLRVGWIAASEDILEKYIFIKQSADLHTSSFSQRIISKMLENYDFDERVSRLKELYKGRRDLMIKTIAEEFPDGLKYTNPEGGLFTWVELPEKYNAREFLDECIKNNVAIVPGGSFFPNGGHENSFRLNYSNMPDEKIVEGIKRLSKVLKEYLN

SEQ ID NO: 34830 - protein, 806 aa, Oryza sativa (japonica cultivar-group)
MQFPFSGAGPGVFTSSPALSLALADAVAGRNSGGGGKMVTAAHGGVGGGGGGGRAKARDALEVENEMSRSGSDHLDVVSCGDAGGGGGDDDDDEDAEHGNPPKRKKRYHRHTPQQIQELEAMFKECPHPDEKQRAELSKRLGLEPRQVKFWFQNRRTQMKMQLERHENSLLKQENDKLRSENLSIREATSNAVCVGCGGPAMLGEVSLEEHHLRVENARLKDELSRVCALAAKFLGKSISVMAPPQMHQPHPVPGSSLELAVGGIGSMPSATMPISTITDFAGAMSSSMGTVITPMKSEAEPSAMAGIDKSLFLELAMSAMDELVKMAQMGDPLWIPGASVPSSPAKESLNFEEYLNTFPPCIGVKPEGYVSEASRESGIVIIDDGAALVETLMDERRWSDMFSCMIAKASTTEEISTGVAGSRNGALLLMQAELQVLSPLVPIREVKFLRFSKQLADGVWAVVDVSADELMRDQGITSASSTANMNCRRLPSGCVLQDTPNGFVKVTWVEHTEYDEASVHPLYRPLLRSGLALGAGRWIATLQRQCECLALLMSSIALPENDSSAIHPEGKRSMLKLARRMTDNFCAGVSTSSTREWSKLVGLTGNIGEDVHVMARKSVDEPGTPPGVVLSAATSVWMPVMPERLFNFLHNKGLRAEWDILSNGGPMQEVTSIAKGQQNGNTVCLLKASPTKDKQNSMLILQETCADASGSMVVYAPVDIPAMHLVMSGGDSSCVALLPSGFAILPAGPSIGADHKMGGSLLTVAFQILANSQPSAKLTVESVETVSNLISCTIKKIKTALHCDV

SEQ ID NO: 34831 - protein, 353 aa, Gypsophila elegans
MVSSNNTTETLDGKHDTKPVQGETVCVTGASGFIGSWLIMRLLERGYTVRGTVRDPDNTKKVQHLLDLPQAKTNLTLWKADLNEEGSFDKAVDGCSGVFHIATPMDFESKDPENEMIKPTINGMLDIMKSCAKAKVKRVVFTSSGGTVNVEETQKAEYDETCWSDLDFIRSVKMTGWMYFVSKILAEQAAWKYAAENNLDFISIIPPLVVGPFIMPSMPPSLITALSPITRTESHYTIIKQGQFVHLDDLCMAHIFLYENPKAQGRYIASACDATIYDIAKMLREEYPEYNVPTKFKDYKEDMDLVHFSSKKLTELGFEFKYGLKDMYTGAVETCRAKGLLPLSLENHENVYA

SEQ ID NO: 34832 - protein, 584 aa, Clostridium tetani E88
MQKTKMVFTIGPASDSEEVLSELIKAGMSASRHNFSHGTHEEHKIRIDLIRKLSDKFNKNIAVILDTKGPEIRTGDFKDKTVQLKEGNKFTIYCGEEILGDETKCSITYNDLHNDVKTGDSILIDDGLVGLEVEEVEGSKVHCVVKNSGAVSNHKGVNVPGVDVSLPSLTEKDKSDLEFGCKVGVDFIAASFIRKGSDVLEIRKVLEENGGTDIQIFSKIENQQGVENIDEIIKFSDGIMVARGDMGVELQMEQVPIIQKMIIEKCNKAGKPVITATQMLDSMIRNPRPTRAEVSDVANAIFDGTDAVMLSGETAGGKYPIEAAKAMAKIARTAEETMDYDEIFNRKREARVLSVANAISIATCTTASELNASAILTATQTGYTARAVSKYRPACPIIAITPSKNVARKLALSWGVFPILTTKFTSTDALIENSVDIALTAEYIRKGDLVVIAAGIPVSYSGTTNMLKVHVVGDILVQGRGAGNSAGYGIAKVVNSTEEAERVIESGDILVVKDADIDYVSILNRVSGVITERGGLTSHLAIECITNEIPFICGAGGATDVLKSGYFITMDVKRGIVYNGRITI

SEQ ID NO: 34833 - protein, 519 aa, Helicobacter pylori 26695
MLLIVFFKFYFQYSIKKKSFYFIFVIIQAIFIFNLRRCRMDNQKITHQNITQKQGELKRDMKMRHLLMIAFGGAIGTGLFVGTGGNIASAGPLGTLIAYCFGGLVVYCIMLSLGELASVYPTTGSFGDYAAKFIGPGTGYMVFWMYWLGWVITVALEYIAIGMLMQRWFADIPIHYWVILCIALVFLLNFFSVKIFAEGEFFFSLIKVLAVIAFIGIGAIGIIYQIYSHGFGSIFDNFHFGDKGFFPNGSAAVFSAMLAVIFAFTGTEVIGVAVGETKNASEVMPKAIKATLWRIVFFFLGSVFVISVFLPMNDSSITQSPFVSVLERINLPFIGMGIPYVADIMNAVIITAMFSTANSGLYGASRMIYGLSKQKMFFKVFSQLNRQGTPTYAMFFSLSFSLIGLLVQIYAKENVVEALINVISFTVIIVWVSVSVSQYSFRKQYLKAGHSLEDLPYKAPFLPFLQLIGITGCAIGVIGSAMDKDQRIGMILTIVFAVICYIGYYFTQKANENNKKDLI

SEQ ID NO: 34834 - protein, 519 aa, Geobacter sulfurreducens PCA
MKVVSGETMQRMDRRAIDEFGIPGLVLMENAGRGCADAIREMFGRDGCIPVLVVAGKGNNGGDGYVIARLLAGEGWPVHTVVLARKDEIGGDARENLDRLDPSTVSYLPAGGTLSSLTARLDAAALVVDALLGTGLKNEVQGAYAEAIRHIAASARPVVSVDIPSGIDAATGKVLGVAVTASLTVTFALAKYGHVLYPGALHCGRLRVVNIGIPESVAREADGILYVDAAEAAAVVKRRDPCSHKGSFGHSLVIAGSVGKTGAAAMAANSAVRSGAGLVSLAVPASLNAILELKTTEAMTIPLADGGVGFLGDESLVPLRDAIRGRDAIALGPGLSWQPATAALVRHLLADIMVPLVLDADGLNAISEQTELLKGARPDTVVLTPHPGEMARLAGTTTAAVEADRIGVARDFAAQFGVYLILKGARSVIAAPDGRIALNGSGNPGMASGGMGDVLTGVVTALLGQGYEPFDACILGAFVHGHAADLVAADKGETGMSALDVQERLPYAFNSLIRLKGEQ

SEQ ID NO: 34835 - protein, 508 aa, Chromobacterium violaceum ATCC 12472
MSKKQDAPELRRSLQARHLSMIAIGGSIGTGLFLASGATISGAGAGGALLAYALVGLMVYFLMTSLGEMAAFMPVSGSFQAYGSRFVDPAFGFAQGWNYWYNWAITVAVELAAAAIIMNYWYPGIPGVVWSGGFLAIIFALNYFSVKGFGEAEFWCSMLKVATIIAFIVIGFLMILGIMTEPNPSRIAPGLQVMMQGEGPFVGGLAAFVGVAMVVGFSFQGTELIGVAAGESANPGRTIPRAVRQIFWRILMFYMLSILIIGLILPHNDPSLLKNDMKDVGASPFTLVFNRAGLAFAASLMNAVILSAILSAGNSGMYASTRMLYAMAKNGMAPKVFGKLTDNGVPRNALYATTLVACLCFLTSLFQSNAVYMWLLNSSGMTGFIAWLGVAISHYRFRRAYVKQGYSLDDLPYKAKWFPLGPLFAFALCLLIMLGQNYTAFTAAKVDWNGVIATYLGIPLFLALWWGYRVKHNTRMVPLEKVELAEAHRNALMQREENRGGKPAAAQA

SEQ ID NO: 34836 - protein, 443 aa, Helicobacter pylori 26695
MSPLKTIRIYSYHDSIKDSIKAVVNISTEKKIKNNFIGGGVFNDPFFQQFFGDLGGMIPKERMERALGSGVIISKDGYIVTNNHVIDGADKIKVTIPGSNKEYSATLVGTDSESDLAVIRITKDNLPTIKFSDSNDISVGDLVFAIGNPFGVGESVTQGIVSALNKSGIGINSYENFIQTDASINPGNSGGALIDSRGGLVGINTAIISKTGGNHGIGFAIPSNMVKDTVTQLIKTGKIERGYLGVGLQDLSGDLQNSYDNKEGAVVISVEKDSPAKKAGILVWDLITEVNGKKVKNTNELRNLIGSMLPNQRVTLKVIRDKKERAFTLTLAERKNPNKKETISAQNGAQGQLNGLQVEDLTQETKRSMRLSDDVQGVLVSQVNENSPAEQAGFRQGNIITKIEEVEVKSVADFNHALEKYKGKPKRFLVLDLNQGYRIILVK

SEQ ID NO: 34837 - protein, 321 aa, Glycine max
MAQVVKPHEPKTQSFKLLSGHTIPAVGLGTWKSGSQAANSVITAIVEAGYRHIDTASQYGVQEEVGHALQSAMQAGVERKDLFVTSKLWCTDLTPERVRPAINNTLQELQLDYLDLYLIHWPFRLKDGASRPPKEGEVLELDMEGVWREMEKLVKENLVRDIGICNFTLTKLDKLMSIAQIMPSVCQMEMHPGWRNDKMLQACKKNAIHVTAYSPLGSSDGGRDLINDQKVDRIANKMNKNPGQVLVKWAIQRGTSVIPKSTKPDRIMENVSVFNWELPERDFKTLSNMPDQRRVLDGEDLFVNKSAGPFRSVEDIWDHED

SEQ ID NO: 34838 - protein, 499 aa, Azoarcus sp. EbN1
MKNHPFSRSLVVALAAIVPAAIGLLPSPPAFAAAESVAPLVAPNSFGLPDFGDLVERVGPAVVNISVVQERAAPEGGALEDPFYDFLRRFGVPVPGMPGMPGMPGQGGPQISRGIGSGFIVSADGYVLTNAHVVGAGAGAGEGEVQSEVTVRLIDKREFKAKVVGTDPRTDIALLKIDATGLPVVRTGNAEKARVGEWVVAVGSPFGFDNTVTAGIISAKARRLPDENYVPFIQTDVAINPGNSGGPLFNLAGEVIGINSQIYSRSGGFMGISFAIPIDVALNVKDQLIQYGRVQRGKLGVTIQGMTRELAQSFGLAEPKGALVSNVEAGSAADKAGIKAGDVVLGVNGTKIDDSGDLPRIIGDKRPGTEVKLELWRDGRTRTVTATLGEMRGEAIAGGRGEPGSPQGEDAGGKLGLVIRPLTAEEAAQLDVHGGIVIERATGPAQRAGLQRGDVILSLNNQPVSDVASFRTMIEKAGDRFALLIQRGGARIFVPMRVN

SEQ ID NO: 34839 - protein, 484 aa, Proteus mirabilis
MEKKKLTTAAGAPVVDNNNVITAGPRGPMLLQDVWFLEKLAHFDREVIPERRMHAKGSGAFGTFTVTHDITKYTRAKIFSEVGKKTEMFARFSTVAGERGAADAERDIRGFALKFYTEEGNWDMVGNNTPVFYLRDPLKFPDLNHIVKRDPRTNMRNMAYKWDFFSHLPESLHQLTIDMSDRGLPLSYRFVHGFGSHTYSFINKDNERFWVKFHFRCQQGIKNLMDDEAEALVGKDRESSQRDLFEAIERGDYPRWKLQIQIMPEKEASTVPYNPFDLTKVWPHADYPLMDVGYFELNRNPDNYFSDVEQAAFSPANIVPGISFSPDKMLQGRLFSYGDAHRYRLGVNHHQIPVNAPKCPFHNYHRDGAMRVDGNSGNGITYEPNSGGVFQEQPDFKEPPLSIEGAADHWNHREDEDYFSQPRALYELLSDDEHQRMFARIAGELSQASKETQQRQIDLFTKVHPEYGAGVEKAIKVLEGKDAK

SEQ ID NO: 34840 - protein, 604 aa, Pseudomonas aeruginosa UCBPP-PA14
MIARGREQGYLTYAEVNDHLPEDISDPEQVEDIIRMINDMGINVFETAPDADALLLAEADTDEAAAEEAAAALAAVESDIGRTTDPVRMYMREMGTVELLTREGEIEIAKRIEEGIREVMSAIAQFPGTVDSILADYNRIVAEGGRLSDVLSGYIDPDDGSLPAEEVEPVNLKDDSADSKEKDDEEEESDDSSDSDDEGDGGPDPEEARLRFTAVSEQLDKAKKALKKHGRGSKQATAELTGLAELFMPIKLVPKQFDALVARVRSALEGVRAQERAIMQLCVRDARMPRADFLRLFPNHETDEKWVDSVLKSKPKYAEAIERLRDDILRNQQKLAALESEVELTVAEIKEINRAMSIGEAKARRAKKEMVEANLRLVISIAKKYTNRGLQFLDLIQEGNIGLMKAVDKFEYRRGYKFSTYATWWIRQAITRSIADQARTIRIPVHMIETINKLNRISRQMLQEMGREPTPEELGERMDMPEDKIRKVLKIAKEPISMETPIGDDEDSHLGDFIEDSTMQSPIEMATSESLKESTREVLAGLTAREAKVLRMRFGIDMNTDHTLEEVGKQFDVTRERIRQIEAKALRKLRHPSRSEHLRSFLDE

SEQ ID NO: 34841 - protein, 309 aa, Arabidopsis thaliana
METDSIDSVIDDDEIHQKHQFSSTKSQGGATVVISPATSVYELLECPVCTNSMYPPIHQCHNGHTLCSTCKSRVHNRCPTCRQELGDIRCLALEKVAESLELPCKYYNLGCLGIFPYYSKLKHESQCNFRPYSCPYAGSECAAVGDITFLVAHLRDDHKVDMHTGCTFNHRYVKSNPREVENATWMLTVFQCFGQYFCLHFEAFQLGMAPVYMAFLRFMGDEDDARNYTYSLEVGGSGRKQTWEGTPRSVRDSHRKVRDSHDGLIIQRNMALFFSGGDKKELKLRVTGRIWKEQQNPDSGVCITSMCSS

SEQ ID NO: 34842 - protein, 130 aa, Mesostigma viride
MAKQIRKIGVRKTKRKIPKGVVHVQATFNNTIVTITDVRGEVLSWSSAGACGFKGTKKGTPFAAQTAAENAVRQVIDQGMKQAEIMISGPGSGRETAIRAIQAAGLGITLIRDVTPIPHNGCRPPKKRRV

SEQ ID NO: 34843 - protein, 171 aa, Arabidopsis thaliana
GITPDLTTLGKIIGGGLPVGAYGGRRDIMEMVAPAGPMYQAGTLSGNPLAMTAGIHTLKRLSQPGTYEYLDKITKELTNGILEAGKKTGHAMCGGYISGMFGFFFTEGPVYDFSDAKKSDTEKFGKFFRGMLEEGVYLAPSQFEAGFTSLAHTSEDIQFTIAAAEKVLSRL

SEQ ID NO: 34844 - protein, 1188 aa, Gloeobacter violaceus PCC 7421
MNHPPKAKRRRGFRLTPQGWQRLHEARCELENRTNGGERLTLEELSDRIGLDPSTVAKVLTAEEGVDKQTLFRFFQAFGLDLGSGDYARPEAGAVEPSEPVPPRGARQDWGEAVDVSLFYGRTEELATLEGWLVRERCRLVALLGMGGIGKSTLAVKLARQTQEHFEHLVWRSLRNAPPLGELLGELIECLCDSPQVNLPAGTEGRLSKLMECLRRSRTLLILDNGESLLSGAEQTGTYREGCEAYAELFRQVGEVPHASCLILTSREKPKEVASLEGASLPVRSLRLGGLREDEGEAILEAKGLSGSPDERRSLVECYRGNPLALKIVSTSIQELFGGAIGEFFVHGAVVFNGIRNLLEQQFDRLTHFEKQLMYWLAIHRELVSAAQLREDTVPAAPTPRLLEALESLLRRSLIERSSAGFTQQPVVMEFTAERLIEQVCAEIERGPIALLKSHALMKAQSKDYVRETQVRLIVRPILDELLTRLGSRRSLEQRLYAVLEAQREHSPLEPGYVGGNALNLLCELKSDLAGRDFSRLAIWQAYLQKVSLHRTNFAGADLARSVFAQTFGGILFVAYSPKGELLAIGDDSGEVRLWRVRDGQQQLSFRGHTDWISALAFSPDGSVLASGSEDQTIKLWDTATGQCLRTLTGHGGWVYSVAFSPDGTLIASSSPSNETVRLWDAAGGQCTRTFKSRTGRMWSVAFSPDGHTLAAASLDRTVKLWDVRTGERLGTLTGHTDQVLSVAFSPDGGVLASGSHDQTLKLWEVTTGTCLTTLTGHTGRIRAISFSPDGEWLASSSLDCTVKLWDAATGECLRTFTGHSGQVWSVSFAPDGQTLASGSLDQTVRIWDAATGQCLRTLQGNAGWIWSVAFAPDGQTLASGSLDRTVRIWDVPSGRCVRTLTGHGSWVWSVAFSPDGRTLASGSFDQTIKLWDAATGQCLRTLSGHNNWVRSVAFSPDGRTLASGSHDQTVKLWEVSSGQCLRTLTGHSSWVWSVAFSPDGRTVASGSFDQTVRVWNAATGECLHTLKVDSSQVWSVAFSPDGRILAGGSGNYAVWLWDTATGECLRTLTGHTSQVWSVAFSPDSRTVVSSSHDQTVRLWDAATGECLRTLTGHTSQVWSVAFSPDGRTVISGSQDETIRLWDSHTGKPLELLRADRLYEGMDITGVTGLTDAQKSMLQALGAVEAAG

SEQ ID NO: 34845 - protein, 415 aa, Bacillus cereus G9241
MNEVLAKGKRAKEVARELVLKSTNQKNEALAMVANQLISETAYILEENKRDIEEGKAKGFSDSLLDRLMLTENRIIDMTEGIKQLIELRDPVGECVSAWERPNGLSIQEMRVPLGVVGMIYEARPNVTVDAATICLKTGNAVILRGSSSAIHSNKAIIAVIHRALKQTSLPQESVQLIEDTTRDSAKQLFTMNDYLDVLIPRGGKQLIDTVVREASVPVLETGAGNCHIFIDETADKQMAFDIIINAKTQRPSVCNAIETIVLHEKWAEQYGSELFSSLKDRGVELRGDQKALAIDSSIVLASEEDWGTEFLSLTLAVKLVSSIEEAIHHINTYGSMHSEAIISENEENVSKFFVSVDAAALYHNASTRFTDGSEFGFGAEIGISTQKLHVRGPMGLPALTSTKYVIRGNGQIRK

SEQ ID NO: 34846 - protein, 233 aa, Leccinum melaneum
  misc_feature (140)..(141): Xaa can be any naturally occurring amino acid
  unsure (1)..(233): unsure at all Xaa locations
VNDPFIDLEYMVYMFKYDSVHGRFKGDVHAKDGKLYINGKAITVYAERDPANIKWGGVGAEYVVESTGVFTTVEKAGAHLKGGAKKVIISAPSADAPMFVCGVNLDKYDPKYTVISNASCTTNCLAPLAKVINDKFGIVXXLMSTIHATTATQKTVDGPSAKDWRGGRAVNGNIIPSSTGAAKAVGKVIPSLNGKLTGLAFRVPTNDVSVVDLVVRLEKSASYDEIKAAIKAA

SEQ ID NO: 34847 - protein, 346 aa, Novosphingobium aromaticivorans DSM 12444
MKALRYYGARDIRHESMDDPTPQSDRDAIVKVDACSICGSDLHIYHGHGFSEDIGFCVGHEAVGEVVEVGRGVHRLKVGQKVMIPAAVGCGACRSCLAGVVNTCENNGSGCYGLSAKLQGSQAEAVRVPAADANAVAIPEGVSTEQALMMTDALATAWFGARQADIRPGSSVGIIGLGPIGLMAAESAFVMGAHVVYAIDPVPERRAIAESLGAIALHPDEASARIKEDTHGRRLDCVVEVVGSDATVDMALRLVRVRGTVSVIGVQQSRRFPFPLERAFAGGLTFRVGTCSVPEELPALFPLVASGRLRPERYISHRLPLSQGAEAYRMFEAREAGALKMVLVPD

SEQ ID NO: 34848 - protein, 319 aa, Bacillus halodurans C-125
MNRGVICLGEALIDFIPMDSTNEIYQKSPGGAPANVAVGLAKLGAKSTFVGKVGDDLLGRFLKETLTKANVNTEHMLFSKEVRTGATFVTLAANGERSFDFYINPSADRFLEKGEIAPTLFEEHGVLHFGSISLISEPARTATRHAVSLAKKNGLMISYDPNLRLNLWEDEEQARLLITSMLGEADVLKISEEELAFITGEQTIEAGLDQLVAYNIPLVFVTLGEKGSIVSYNGIQRKIPAMAVQTVDTTGAGDAFVSAILFKLQEERKQVAELSIKEVEQMARFASVSGGLAAATKGAMTALPTLEKVNDILRNEQME

SEQ ID NO: 34849 - protein, 158 aa, Sorghum bicolor
LPPYDPCAVFNSINYLNLPEVQTALHANVSGIVEYPWTVCSNTIFDQWGQAADDLLPVYRELIQAGLRVWVYSGDTDSVVPVSSTRRSLAALELPVKTSWYPWYMAPTEREVGGWSVQYEGLTYVTVRGAGHLVPVHRPAQAFLLFKQFLKGEPMPAE

SEQ ID NO: 34850 - protein, 407 aa, Phaseolus vulgaris
MYLVESKGGAIGCMFLALFFLGTWPALLTMLERRGRLPQHTYLDYSITNFFAALLIAFTFGEIGKGKPDEPNFLAQLAQDNWPSVLFAMGGGVVLSLGNLSSQYAFAFVGLSVTEVITASITVVIGTTVNYFLDDKINKAEILFPGVGCFLIAVFLGSAVHSSNASDNKAKLNNYSNDYKEAAISSKERDLVKSKDLERGSSSADNVEAGTAVFLIELEERRAIKVFGKSTLIGLSLTFSAGLCFSMFSPAFNLATNDQWHTLEKGIPHLTVYTAFFYFSISCFVIAIILNITFLYHPVLNLPKSSLKAYLADSDGRMWALLAGLLCGFGNGLQFMGGQAAGYAAADAVQALPLVSTFWGVVLFGEYRRSSRRTYALLGSMLFMFIVAVGVLMASSGHRSSSHTAKE

SEQ ID NO: 34851 - protein, 377 aa, Polaromonas sp. JS666
MNPPAFRLPGMTLEKTTTILLTGGAGYIGSHTFAALIDAGYQPVILDNFSNSHPAVLDRLQQLTGQRVVRERGDVLHAGFVAEVLRHYACEAVIHFAGVKAVGESVQQPLKYYSNNVGGLVSLLQAMETSACRSVVFSSSATVYGDPASVPIHEQFPCAPESPYAQTKLMCEDILASLGAADPAWRVGVLRYFNPVGAHPSGLIGENPRGTPNNLMPYVTQVAVGKRARLQVFGDDYLTPDGTGVRDYLHVMDLAEGHVAAVQALLTRHQSFTVNLGTGKGVSVLEVLSAFERASGRRVPFEFAPRRAGDVAQYYADVSLAEAVLGWRATRTLDDMCRDSWRWQQTNPEGYEAGPDIPPRPGLRSRPNEPAQPAAVA

SEQ ID NO: 34852 - protein, 199 aa, Zea mays
MASRRVSLLLGVLLSYSAAVAVAVAAANFNQEFDITWGDGRGKIQDNGQLLTLTLDRTSGSGFQSRHEYLFGKIDMQLKLVPGNSAGTVTAYYLSSQGNTHDEIDFEFLGNVSGEPYTLHTNVFTQGQGQREQQFRLWFDPTKDFHTYSILWNPKHVIFMVDEMPIRDFRNLESKGVAFPKNQPMRLYSSLWNADDWAT

SEQ ID NO: 34853 - protein, 224 aa, Arabidopsis thaliana
MGAIEKEGYTLYCTVLFFSPQGQFLGKHRKLMPTSLERCIWGQGDGSTIPVYDTPIGKLGAAICWENRMPLYRTALYAKGIELYCAPTADGSKEWQSSMLHIAIEGGCFVLSACQFCQRKHFPDHPDYLFTDWYDDKEHDSIVSQGGSVIISPLGQVLAGPNFESEGLVTADIDLGDIARAKLYFDSVGHYSRPDVLHLTVNEHPRKSVTFVTKVEKAEDDSNK

SEQ ID NO: 34854 - protein, 344 aa, Gloeobacter violaceus PCC 7421
MVRARHRDSEEQPFGLDEGNLPSRSEAQGSDDLVDLYLNEIGRIPRVTPEEEIHLARRIQAKLAIDGAREELAMRLGRPSPEEDVAAFMGRDPKALIEATRQGLWAQRKLINANLRLVVSIAKKYIGRNVPFLDLIQEGNIGLMRATEKFDPEKGYRFSTYATWWIRQSITRAIANQARTIRLPIHMVEKVRKVRREMRMATLELGRRPSEDELASRLAIKVKKLRTIQEVSRQPVSLDMPVGSEGDISLGEMIEDGTAERPFDELVQKALASELYAAMNVLKPVEREVLALRFGLKGEEGLTLREVGERFDLTRERIRQIESEALRKLRRSKRKQILQQYVGG

SEQ ID NO: 34855 - protein, 363 aa, Gluconobacter oxydans 621H
MIPVYPFSAATQPYPRQQWYIAGWSSEITSSPLRRRLLGQDILLLRTSGGDVRALKALCPHRQMPLCAEHQDGERLICPYHGAVFETSGQCVSLPFQKHIPKALDLKSFPVVEQNPFVWIWADLETPADMSRLPDTTSLFSHDTEKLLFGTGTCHVEARSQVVLENLFDQSHISFTHPASLGIRSCEDGPAKACSVLEEPTRLCFHHPLKVFPTPDAMIAFFPKIGSTMGIRSRAELFGVSLVVAAESEIVSCDEKGHVQDSMGQLAFLHGITPETDTTTHYHFAILRDFATGSEDISEQYASRNREVIAEDVRVLNAIEPCLDQIRACDEPNFMTDAEAVHVRRRIERLILEEEHLRTSSAG

SEQ ID NO: 34856 - protein, 414 aa, Rickettsia typhi str. Wilmington
MSYYDTIFNKHIDKIKSEGRYREFKSLKRQADNFPFAEYEDKQIVMWCINDYLGMSKHIKVMQASIDALLEYGVGSGGTRNIGGNNISILELEKELADLHSKETALVFTSGFVANDTTLASLAKIIPDIVFFSDELNHASIIAGITSSRAEKYVYRHLDVQHLEKLLQSVDINKPKIIVFESAYSMDGFFSPIKDIINLAKKYNALTFIDEVHTVGLYGKQGGGISELLDCSNQIDIIQGTLAKAYGTIGGYITSNYNLIDAIRLTAPGFIFTTSLPPVISTAATHSIRHLKVSNEERIKHQEVVTKLKNSFEHFNIPYLKNESHIIPIIIGDPIKATKVSNMLLNEYGIYVQHINFPTVPRGTERLRIIPTPAHTDKMINDLSTALVHIFAELDIELSSTKELNKEVRLHLIA

SEQ ID NO: 34857 - protein, 311 aa, Oryza sativa
  misc_feature (272)..(272): Xaa can be any naturally occurring amino acid
  unsure (1)..(311): unsure at all Xaa locations
MAGINCSIVPCSALMEGKEFNFSNLYLHHTYGGPKPNQSTIINNNGSTGLGMTAVNNWAVYDGLGSDAKVVAHAHGLHIYAGDLVAIIPSAWYLRMKGEFIMASGVIYKKVHERRSEGNIIELTIHGFCPSLKGTKCLPTKVGPWGGNGGTPQDITETPKRLESITILSVEFVDSISFSYCDQAGQKRVAGPWGGPGGNLYTIELSSSEFLKEVSGTFGTYYGSNVITSIKFVTNVKTYGPFGKQNGTPFSIPVQNNSSVVGFFGRGGRYLXQLASTCIRSNFPCLTSWCLNLLRQLVYNKLGKNPRLHVL

SEQ ID NO: 34858 - protein, 734 aa, Bacteroides fragilis YCH46
MDSILFWLVPFASVLALCFALYFHKQMMKESEGTPQMIKIAAAVRRGAMSYLKQQYKIVGWVFLGLVILFSVMAYGFQVQNAWVPIAFLTGGFFSGLSGFLGMKTATYASARTANAARTSLNAGLRIAFRSGAVMGLVVVGLGLLDISFWYLLLNWAIPADVLTPTHKLCIITTTMLTFGMGASTQALFARVGGGIYTKAADVGADLVGKVEAGIPEDDPRNPATIADNVGDNVGDVAGMGADLYESYCGSILATAALGAAAFIHTGDTVMQFKAVIAPMLIAAIGIILSIIGIFSVRTKENATMKDLLGSLAWGTNLSSALIVAATFFILWLLQLDNWMWISCAVVVGLVVGIVIGRSTEYYTSQSYRPTQKLSESGKTGPATVIISGIGLGMLSTAIPVVAVVIGIIASYLLASGFDFNNVGMGLYGIGIAAVGMLSTLGITLATDAYGPIADNAGGNAEMSSLGKEVRKRTDALDSLGNTTAATGKGFAIGSAALTGLALLASYIEEIRIGLTRLGNLVLTFPNGDTISTANATFVDFMNYYEVNLMNPKVLSGMFLGSMMAFLFCGLTMNAVGRAAGHMVDEVRRQFREMKGILTGETEPDYERCVAISTKGAQREMVVPSLIAIIAPILTGLIFGVPGVLGLLIGGLSSGFVLAIFMANAGGAWDNAKKYVEEGNFGGKGSEVHKATVVGDTVGDPFKDTSGPSLNILIKLMSMVAIVMAGLTVAWSLF

SEQ ID NO: 34859 - protein, 256 aa, Rhodobacter sphaeroides 2.4.1
MRLDGKTALITGSARGIGRAFAEAYVREGARVAIADINLEAARTTAAEIGPAACAIGLDVTDQASIDRCVAELLDRWGRIDILVNNAALFDLAPIVEITRESYDRLFAINVSGTLFMMQAVARAMIAGGRGGKIINMASQAGRRGEALVGVYCATKAAVISLTQSAGLNLIRHGINVNAIAPGVVDGEHWDGVDAKFADYENLPRGEKKRQVGAAVPFGRMGRAEDLTGMAIFLATPEADYIVAQTYNVDGGNWMS

SEQ ID NO: 34860 - protein, 294 aa, Helianthus annuus
MEQYEKVEKIGEGTYGVVYKARDKVTNETIALKKIRLEQEDEGVPSTAIREISLLKEMQHGNIVRLQDVVHSDKRLYLVFEYLDLDLKKHMDSCPEFSKDPRLVKTFLYQILRGIAYCHSHRVLHRDLKPQNLLIDRRTNALKLADFGLARAFGIPVRTFTHEVVTLWYRAPEILLGSRHYSTPVDVWSVGCIFAEMVNQRPLFPGDSEIDELFKIFRIMGTPNEETWPGVTSLPDFKSAFPKWSSKDLATVVPNLEKTGLDLLRKMLCLDPSKRITARTALEHEYFKDIGFVP

SEQ ID NO: 34861 - protein, 502 aa, Lactococcus lactis
MNKRVKIVSTLGPAVEIRGGKKFGESGYWGESLDVEASAKNIAALIEEGANVFRFNFSHGDHPEQGARMATVHRAEEIAGHKVGFLLDTKGPEMRTELFTDGADSISVVTGDKFRVATKQGLKSTPELIALNVAGGLDIFDDVEIGQTILIDDGKLGLSLTGKDAATREFEVEAQNDGVIGKQKGVNIPNTKIPFPALAERDDADIRFGLSQPGGINFIAISFVRTANDVKEVRRICEETGNPHVQLLAKIENQQGIENLDEIIEAADGIMIARGDMGIEVPFEMVPVYQKLIISKVNKAGKIVVTATNMLESMTYNPRATRSEISDVFNAVIDGTDATMLSGESANGKYPRESVRTMATVNKNAQTMLKEYGRLHPERYDKSTVTEVVAASVKNAAEAMDVKLIVALTESGNTARLISKHRPDADILAITFDEKVERGLMINWGVIPMMTEKPASTDDMFEVAEKVALASGLVEAGDNIIIVAGVPVGTGRTNTMRIRTVK

SEQ ID NO: 34862 - protein, 667 aa, Saccharophagus degradans 2-40
MSSRRELANAIRALSMDAVQKANSGHPGAPMGMADIAEVLWNDFLKHNPSNPNWADRDRFVLSNGHGSMLIYSLLHLSGYDLPMSELAQFRQLHSKTPGHPELGYTPGVETTTGPLGQGISNAVGMALAEKMLAAQFNRDGHDIVDHYTYCFLGDGCLMEGVSHETCSLAGTLGLGKLIAFWDDNGISIDGHVEGWFTDNTPARFEAYGWHVIPAVDGHDPEAIKAAVEAAQAETGKPTLICTKTTIGFGSPNKSGSHDCHGAPLGDAEIAAAREFLGWPHAPFEIPDNVYAGWDAKEKGAAAQSAWEAKFEAYKAAQPALAAEFERRVLNGDLPADFEAKADAFIKAVNEKGESIATRKASQNTIAEFGAALPELLGGSADLAGSNLTMWSGSKPVTREDASGNYIYYGVREFGMSAIMNGIAAHGGFINYGATFLMFMEYARNAVRMSALMKLPNIFVYTHDSIGQGEDGPTHQPIEQLAALRLTPNLNTWRPADAVESAVAWKSAVMRKDGPSALVFTRQGVKAQSHDDEQIANMARGAYVLVDCDGEPEVMLIATGSEVGITVDAAAQLAGEGVKVRVVSMPCTNVFDQQDAAYKESVLPIAVTHRVAVETSHVDYWAKYVGIDGRVVGMTTFGESAPGGALLEYFGFTVENVVNTVKELLED

SEQ ID NO: 34863 - protein, 276 aa, Mesorhizobium loti MAFF303099
MPELITLNDGAAIPQLGLGVWQVDHGITADVVGWAIKAGYRLIDTAQGYQNEEGVGEAIRAADVARSELYITSKLRNGAHERDAALRAFDDTMEKLGIEQIDLFLIHWPVPSRDKYVEAWKTLIELKQAGRIKSIGVSNFNRDHLERIIGETGVVPVANQIELHPRFQQRELREFHAGHNIQTESWSPLGSGRLLGDPTIAGIAKKHGKSAAQTIIRWHLQQGLIVIPKSVRQDRIAANFDVFDFELDAQDLKTIAGMDSADGRDGPNPATAAFLF

SEQ ID NO: 34864 - protein, 265 aa, Yarrowia lipolytica CLIB122
MAMHRVAPDIPLWVGSIYSLSAHISFEKYNINHIISMVRGELPGNQIQGYTHLHVEMDDDEEENIMQYFPETNKFIEDACGEWMTKVAESGKYKNYPENVESVHLEYPHNPDPPGVLVHCMAGISRSSTIVIAYLMKKLGLTAEQGLALVKKGRKIANPNPSFVEQLKIYEQCGYEIDDSKPLYRQWILKKDSEGIPNIGSTPKFKYRSETEGLTSRGQGFSADFRRQIRPKMNQSGAVEDATEATPEQTAPSMKTSLLRCRMCR

SEQ ID NO: 34865 - protein, 352 aa, Thermus thermophilus
  misc_feature (185)..(185): Xaa can be any naturally occurring amino acid
  unsure (1)..(352): unsure at all Xaa locations
MDWLLTPGPVRLHPKALEALARPQLHHRTEAAREVFLKARGLLREAFRTEGEVLILTGSGTLAMEALVKNLFAPGERVLVPVYGKFSERFYEIALEAGLVVERLDYPYGDTPRPEDVAKEGYAGLLLVHSETSTGALADLPALARAFKEKNPEGLVGADMVTSLLVGEVALEAMGVDAAASGSQXGLMCPPGLGFVALSPRALERLKPRGYYLDLARELKAQKEGESAWTPAINLVLAVAAVLEEVLPRLEEHLALKAWQNALLYGVGEEGGLRPVPKRFSPAVAAFYLPEGVPYARVKEAFAQRGAVIAGGQGPLKGKVFRLSLMGAYDRYEALGVAGMFREVLEEILPAS

SEQ ID NO: 34866 - protein, 242 aa, Pseudomonas aeruginosa PAO1
MPDRMRGVKSDSPEQESADDALKRIVDGFQHFRREVFPEQQALFKKLANSQRPRAMFITCADSRIVPELITQSSPGDLFVTRNVGNVVPPYGQMNGGVSTAIEYAVLALGVHHIIVCGHSDCGAMRAVLDPQTLERMPTVKAWLRHAEVARTVVADNCDCGASHDTLGVLTEENVVAQLDHLRTHPSVASRLASGQLFIHGWVYDIESAQIRAYDAKQGRFLPLDGEHPVPMATPAPRYLSS

SEQ ID NO: 34867 - protein, 173 aa, Zea mays
SDAKGEVVGHWYGYVVPDDVPVLLHKHIGQGEVVDRLWRGQMGLSVEQQKRALELRNMVNGGEESLEETRTDGASFNPAATGGCCQGNGGFTCCHPDLPKEKRDKSIAIEQNPKSCEENGKEGGAGSKKGNSKTCPMPTWFETWERADTYAALAVVAAAAAVFISFRIYKNLN

SEQ ID NO: 34868 - protein, 242 aa, Leccinum scabrum
  misc_feature (46)..(46): Xaa can be any naturally occurring amino acid
  misc_feature (133)..(133): Xaa can be any naturally occurring amino acid
  unsure (1)..(242): unsure at all Xaa locations
AVNDPFIDLEYMVYMFKYDSVHGRFKGDVHAKDGKLYINGKAITVXAERDPANIKWGGVGAEYVVESTGVFTTVEKAGAHLKGGAKKVIISAPSADAPMFVCGVNHDKYDPKYTVISNASCTTNCLAPLAKVXNDKFGIVEGLMSTIHATTATQKTVDGPSAKDWRGGRAVNGNIIPSSTGAAKAVGKVIPSLNGKLTGLAFRVPTNDVSVVDLVVRLEKSASYDEIKAAIKAASESPDLKG

SEQ ID NO: 34869 - protein, 273 aa, Leccinum scabrum
  misc_feature (133)..(151): Xaa can be any naturally occurring amino acid
  unsure (1)..(273): unsure at all Xaa locations
AVNDPFIDLEYMVYMFKYDSVHGRFKGDVHAKDGKLYINGKAITVYAERDPANIKWGGVGAEYVVESTGVFTTVEKAGAHLKGGAKKVIISAPSADAPMFVCGVNLDKYDPKYTVISNASCTTNCLAPLAKVXXXXXXXXXXXXXXXXXXXATQKTVDGPSAKDWRGGRAVNGNIIPSSTGAAKAVGKVIPSLNGKLTGLAFRVPTNDVSVVDLVVRLEKSASYDEIKAAIKAASESPDLKGIIEYTDEALVSTDFTGHHASSIFDASGSIML

SEQ ID NO: 34870 - protein, 436 aa, Rickettsia typhi str. Wilmington
MTNGNNNNLEFAELKIRGKMFKLPILKASIGKDVIDISRVSAEADCFTYDPGFMSTASCQSTITYIDGDKGILWHRGYDIKDLAEKSDFLEVAYLMIYGELPSSEQYHNFTTKIAHHALVNERLHYLFQTFCSSSHPMAIMLAAVGSLSAFYPDLLNFNETDYELTAIRMIAKIPTIAAMSYKYSIGQPFIYPDNSLDFTENFLHMMFATPCTKYKVNPIIKNALNKIFILHADHEQNASTSTVRIAGSSGANPFACISTGIASLWGPAHGGANEAVINMLKEIGSSENIPKYVAKAKDKNDPFRLMGFGHRVYKSYDPRAAVLKETCKEVLNELGQLENNPLLQIAIELEALALKDEYFIERKLYPNVDFYSGIIYKAMGIPSQMFTVLFAIARTVGWMAQWKEMHEDPEQKISRPRQLYTGYVHREYKCIVERK

SEQ ID NO: 34871 - protein, 764 aa, Bordetella pertussis Tohama I
MTIIHNLGFPRIGAQRELKRAVEAYWAGRQTAEALHETGRALRAAHWQRQADAGVAFVPVGDFAWYDHILEWTTLLGAVPARFGHPEGKPVDLDTLFRMGRGRAPSGKPAAACEMTKWFDTNYHYIVPELTPGQTFRVAREDLFEQVKEAQALGHRVKPVIPGPLTWLWLGKGDAFAQGAGDIGKLQLLDALLPVYGEVLERLAGLGVEWVQIDEPALVLDLPQAWRDAYQAVYAKLAASPVKLLLATYFDGLKDNLATALALPVAGLHVDLVRAPDQLSDVASGLRPGQVLSAGVINGRNIWRTDLDAALAMLVPVREQLQERLWLAPSCSLLHVPVDLAGETELDAELLGWLSFAVQKLDELCLLGKALGGDADPAVQQGLAAQRAALQARRQSPRIHNPAVAQRMAGQAGVSRERAPFGQRIARQQSELRLPAFPTTTIGSFPQTAEIRALRRDWKSGALTDSAYENAIRKEIEEVIRFQEKVGLDVLVHGEPERNDMVEYFGELLAGFAFTKNGWVQSYGSRCVKPPIIFGDVARPAPMTVGWSAYAQSLTDKPVKGMLTGPVTILQWSFVRDDQPREATCRQLALALRDEVVDLEAAGIRVIQIDEPAIREGLPLRRADWRAYLDWAVDCFRLSTAGVGEATQIHTHMCYSEFNDIIESIAAMDADVITIETSRSNMELLKAFEDFHYPNDIGPGVYDIHSPNVPEVDWMVELMRKAAARLPKERLWVNPDCGLKTRAWPETEAALIGMVQAARTLRAA

SEQ ID NO: 34872 - protein, 878 aa, Pseudomonas syringae pv. syringae B728a
MADIDARLREDVHLLGELLGNTIREQRGAEFLDKIERIRKGAKAGRRGSAEGAEQLSSSVDGLGDDELLPVARAFNQFLNLANIAEQYQLMHRRDDKQPLPFESRVLPELLDRLKAEGHSPDALARQLSKLEIDLVLTAHPTEVARRTLIQKYDAIAAQLAALDHRDLNSIERTQITSRLQRLIAEAWHTEEIRRIRPTPVDEAKWGFAVIEHSLWHAIPNYLRKADHALHAATGLHLPLEAAPIRFASWMGGDRDGNPNVTAAVTREVLLLARWMAADLYLRDVDNLAAELSMQQASDALRASVGDSAEPYRAELKRLRERLRATRNWANASLSETLPAPEAVLRDNRELLDPLLLCFQSLHECGMGVIADGPLLDCLRRAVTFGLFLVRLDVRQDSSRHCAAMTEITDYLGLGRYEEWDEQTRIDFLLRELNNRRPLLPSYFKPAADTAEVLATCREVAAAPAASLGSYVISMAGSASDVLAVQLLLKESGLQRPMRVVPLFETLADLDNAGPVIETLLGLPGYRSRLHGPQEVMIGYSDSAKDAGTTAAAWAQYRAQERLVEICREQQVELLLFHGRGGTVGRGGGPAHAAILSQPPGSVAGRFRTTEQGEMIRFKFGLPDIAEQNLNLYLAAVLEATLLPPPPPQPAWRTMMDQMADDGVSAYRAVVRENPEFVEYFRQATPEQELGRLPLGSRPAKRREGGVESLRAIPWIFAWTQTRLMLPAWLGWEAALSKALERGEGEVLAQMREQWPFFRTRIDMLEMVLAKADADIARLYDERLVSAELQHLGAHLRDLLSQACNVVLGLTGQTQLLAHSPETLEFISLRNTYLDPLHLLQAELLSRSRNREASLDSPLELALLVSVAGIAAGLRNTG

SEQ ID NO: 34873 - protein, 175 aa, Oryza sativa
MAPSVMASSATSVAPFQGLKSTAGLPVNRRSSSSSFGSVSNGGRISCMQVWPIEGIKKFETLSYLPPLTVEDLLKQIEYLLRSKWVPCLEFSKVGFVYRENHRSPGYYDGRYWTMWKLPMFGCTDATQVLKELEEAKKAYPDAFVRIIGFDNVRQVQLISFIAYKPPGCEESGGN

SEQ ID NO: 34874 - protein, 948 aa, Ralstonia eutropha JMP134
MHDVPSLDFSTLSPIPADDSNKCFRADANKQCGERGSPWRQKGSTLGLHIGRALFAGGLFLFLLDEAAQVMTERGGMLRAVWPLLLPFMFASGVLAIGYLRMRRLITQRTKAEAKLGHELALRKALLACLPEPVAAKDPDLRYIELNPAFEHFFGIAKADAMGRHALEVESLRERMTGDLLGLQDEAIRTMEPRQARLQMRNASGQSRRVNFWALPFRNPDGMPGGIVTVHFDVTDIDESRERAQAFERRLKDVVDSLPVTVFQSRLPQDASDRGWEVTYAAGDGVGRGIDTVAALGAAPSDSTAFCPQDRPRLRAAILESARTCQPLDVEGRLNRGPAPGWIRVRAMPRRDGNCTVWNGVVIDVTDVHRQAEALHEAKDAAEADLRAKEGFLAMMSHEIRTPMNGILGLVELLRNTALTPAQHRMLTLAHESGHALAQILDDILDYARIEAGRLAIVPAPVDLRELLDSVSSLLLPQAQQKGLQLRVHVSADVPATVRADGIRMRQILFNLLGNAIKFTDRGSVTLHASAETSDGETAALLLEVQDTGIGIASADMPRLFTPFMQGERSVTRRMGGTGLGLAISRSLAAMMGGSLVLTSEEGTGTTASLRVPCPVMPEESGPPMPMGQSEAISVGETEMSEMPACWRILVAEDHYISQEVIRQQLVVLGHSPTVVDNGEAALDALCAGTFDLLLTDFHLPRMDGFALTQALRNSRDATLRALPVVGITATTVREQHQRGFEAGMNACVLKPITLASLRQGLASAMHAEFSANVPVGSRRPQWEATDAPRFDATRVRRDDLLAVLVPGSGEAGLQACINALQADRKALLDGLATGATPVLRAWCHRMRGALSVFGQPHLDDIIDSLQRAVERGNGDRIRNASRPVLDAIAHLTQALAQDTRDAEARAQAPVNCRNCMLSRAECAMGDSHGGLESGEGRSNGNQGNSRG

SEQ ID NO: 34875 - protein, 1141 aa, Ustilago maydis 521
MCDSICHKPVYPILAEQTLRPVRPLPIRSIQEKRIYEFVGGQFSSDNLSSLLYAGRLNTQPHVQIKCWSPANGTRPTFNEACSQTFMPCQVGEKFGPSWSNHWLKLILTVPDEWMDLDDVELDFDVSCEALIYDDQGNPLQGFTGGQEFDRRHDFPLPKGNHARVSAIYYIELTGNGMFGIHGKDTRYYDLGVGSDPDPNRFFELAKVDIVLKRREAWDLMYDFITLQQCVEELPKDGILQNKALFITNEIMNTFRKSDLSSISRCRQLAQEVYGEAWSSSPSSFLSGDADKKNKDKNAVIWSLGHCHIDCVWLWSFDAAQQKVARSWTTQLALMERYPEYCFTASSAQQFKWIETLYPSLFQRIKQKVKEERFQPIGGLWVECDANMPSGESFVRQLLYGQRYLQSRFGFKSNIFFLPDSFGYNSQIPQLARQAGCDYFFTQKLCWNRTNTFPHCTMMWTGLDGTQIVFSQSSIPNYNSRCGVNDLLKGIRRNPDLAVQPTCLHLFGFGDGGGGASPEHLERLRRARALSDNGYAEMPRVTVGRSANDFFEHLLETTQQGERLATWSGEVYLEFHRGVYTSQAAMKKYNRTVELMLHDLEWLCTLAAIHSRQVMYKYPHDKLAEIWEPFMLSQFHDCLPGSSIRKVYEDMEKVYAQLSVKIKEMRDEAVAVLLDTASDKTFSDFILAAPNTLCIPRREILEMKEANMTPIAAPTLALQDLQDSRTLILLEDVEATGVLKCVSSPLAPAAMSTVSAVQAGSTFVLESIDMCVRVSDGRIRSIFDKIEGREILAYGQSAGFSLSQDYPPEFDNWEVEVYSLDTVEQLEFEFVTVTDTGPYRASLTATLSIGEATSLSVNIFMDALPLIPALTAGERPRTAIQFRTSIQWQESHRFLRWQVPTSIRSDLASYEMQFGHVTRPTTRNTTWEAAKFEVCGHRFADLSEPNYGLAILTQCKYGYSVEGGLMRLSLLKAGAYPDSKMDRGKHTIDFALYPHRGTLLDGNVVDVARVYNAKPVLEAMLITGPKSMSSFECPLRVVQDLTSLHSKVVLDTIKMAEPALIASNKCGQERSKTMLCRLYEAFGTRTKVTLECDLPVNRASITNLLEEEHVEESIDLFSEGRLRAILHFRPFEFKTIRIELR

SEQ ID NO: 34876 - protein, 676 aa, Escherichia coli K12
MKLAACFLTLLPGFAVAASWTSPGFPAFSEQGTGTFVSHAQLPKGTRPLTLNFDQQCWQPADAIKLNQMLSLQPCSNTPPQWRLFRDGEYTLQIDTRSGTPTLMISIQNAAEPVASLVRECPKWDGLPLTVDVSATFPEGAAVRDYYSQQIAIVKNGQIMLQPAATSNGLLLLERAETDTSAPFDWHNATVYFVLTDRFENGDPSNDQSYGRHKDGMAEIGTFHGGDLRGLTNKLDYLQQLGVNALWISAPFEQIHGWVGGGTKGDFPHYAYHGYYTQDWTNLDANMGNEADLRTLVDSAHQRGIRILFDVVMNHTGYATLADMQEYQFGALYLSGDEVKKSLGERWSDWKPAAGQTWHSFNDYINFSDKTGWDKWWGKNWIRTDIGDYDNPGFDDLTMSLAFLPDIKTESTTASGLPVFYKNKMDTHAKAIDGYTPRDYLTHWLSQWVRDYGIDGFRVDTAKHVELPAWQQLKTEASAALREWKKANPDKALDDKPFWMTGEAWGHGVMQSDYYRHGFDAMINFDYQEQAAKAVDCLAQMDTTWQQMAEKLQGFNVLSYLSSHDTRLFREGGDKAAELLLLAPGAVQIFYGDESSRPFGPTGSDPLQGTRSDMNWQDVSGKSAASVAHWQKISQFRARHPAIGAGKQTTLLLKQGYGFVREHGDDKVLVVWAGQQ

SEQ ID NO: 34877 - protein, 493 aa, Shewanella sp. MR-7
MSDNQPQAAKHALMWFRQDLRLTDNQALTAACDWVRQAPGAKLRAIYIATPSQWLSHDMAPIQIDFIQRHVNLLAQGLASLGIEFELIQLDSFKEVPAFLASYCEKLGVERVFAGREPEINEQKRDQACLDAGIPLVLSDEHCLLPPGTVLNLSGDMYKVFTPFSRKWREVAAKRAILPLAVPAPLGPMLPEPKPISFKERFPFTSKLTSSEQWAAGEGQAKRILTAFIQQKAQDYKQDRDFPALEGTSVISPYLALGVLSPRQCIAALLGRFPEVIVDDTSPGRTWLNELIWREFYRHLLVAFPDLSKGHNFNRQADHVQWRNNQAEFLAWCEGKTGYPIVDAAMRQLNQTGWMHNRLRMVVASFLTKHLLIDWRWGERYFRQHLIDGDLAANNGGWQWSAGCGCDAQPYFRIFNPISQSEKFDPDGSFIRKYLPELASWGIKRLHQPNMQKTPSLFEVQMLESDSAYPCAIVEHNAARARALAVLGVLKKA

SEQ ID NO: 34878 - protein, 584 aa, Bacillus subtilis
MRKTKIVCTIGPASESIEMLTKLMESGMNVARLNFSHGDFQEHGARIKNIREAAEKLGKNVGILLDTKGPEIRTHTMENGSIELNAGSKLVISMTEVIGTPDKISVTYEGLVHDVNKGSTILLDDGLIGLEVLDVDAVKREIKTKVLNNGTLKNKKGVNVPGRKCQSSGITEKDARDIVFGIEQGVDFIAPSFIRRSTDVLEIRELLEEHNAQDIQIIPKIENQEGVDNIDAILEVSDGLMVARGDLGVEIPAEEVPLVQKELIKKCNALGKPVITATQMLDSMQRNPRPTRAEASDVANAIFDGTDAIMLSGETAAGSYPVEAVQTMHNIASRSEEALNYKEILSKRRDQVGMTITDAIGQSVAHTAINLNAAIVTPTESGHTARMIAKYRPQAPIVAVTVNDSISRKLALVSGVFAESGQNASSTDEMLEDAVQKSLNSGIVKHGDLIVITAGTVGESGTTNLMKVHTVGDIIAKGQGIGRKSAYGPVVVAQNAKEAEQKMTDGAVLVTKSTDRDMITSLEKASALITEEGGLTSHAAVVGLSLGIPVIVGLENATSILTDGQDITVDASRGAVYQGRASVL

SEQ ID NO: 34879 - protein, 363 aa, Methanothermobacter thermautotrophicus str. Delta H
MTYTSGRILGSMCTSSHPLARRVYCDFLESNLGDPGLFRGTRELESGVIGMLGELLSEPDAAGHIITGGTEANLMAMRAARNMAGAEKPEIIVPKSAHFSFRKAADILGLRLREAELDQDYRVDVESVRKLISENTVAVVGVAGTTELGRIDPVEELSEICLDEDIHLHIDAAFGGFIIPFLRETGAELPEFDFKLQGVSSITVDPHKMGLAPIPSGCILFRDASYLDAMSIETPYLTEKQQSTIVGTRTGASAAATWAIMKHMGREGYRKLALRVMGVTRRLRDGLVELDYQLVVEPELNIVAFNHPAMGPHELADRLEELGWAVSVSSCPPAIRVVLMPHIMEEHIELLLRDLEGIRLREE

SEQ ID NO: 34880 - protein, 528 aa, Arabidopsis thaliana
MNENHIQSDHMNNTIHVTNKKLPNFLLSVRLKYVKLGYHYLISNAVYILILPVGLLAATSSSFSLTDLTLLYNHLLKFHFLSSTLFAALLIFLTTLYFTTRPRRIFLLDFACYKPDSSLICTRETFMDRSQRVGIFTEDNLAFQQKILERSGLGQKTYFPEALLRVPPNPCMSEARKEAETVMFGAIDAVLEKTGVNPKDIGILVVNCSLFNPTPSLSAMIVNKYKLRGNVLSYNLGGMGCSAGLISIDLAKQLLQVQPNSYALVVSTENITLNWYLGNDRSMLLSNCIFRMGGAAVLLSNRSSDRCRSKYQLIHTVRTHKGSDDNAFNCVYQREDNDDNKQIGVSLSKNLMAIAGEALKTNITTLGPLVLPMSEQLLFFATLVARKVFNVKKIKPYIPDFKLAFEHFCIHAGGRAVLDEIEKNLDLSEWHMEPSRMTLNRFGNTSSSSLWYELAYSEAKGRIKRGDRTWQIAFGSGFKCNSAVWRALRTIDPSKEKKKKTNPWIDEIHEFPVPVPRTSPVTSSSESR

SEQ ID NO: 34881 - protein, 554 aa, Idiomarina loihiensis L2TR
MMRTRRFYKITKTLLSYGLDDLIPAGWLPWTIRLGRHAFFWLPNKHKDKPAGVRLRLALEELGPVWVKFGQMLSTRRDLLPPDIAIELARLQDKVPPFDGHAAQRIIEKSLGLQSIHDCFADFDTTPLASASIAQVHTGKLKTRDGELTDIVIKVIRPDIRETINADLELMETLASVAAHHLPDGRRLKPKEVVKEYRKTLLDELDLMREAGNAIQLKRNFENSDMLYIPVVYSDYSRHNVMVMERIDGIPVSDIATLKARGVDMKKLAERGVEVFFTQVFRDSFFHADMHPGNIFVAKDDPLNPRYIGIDFGIVGTLNRDDKRYLAENFLAFFNRDYRKVAELHVDSGWVPKHTNIEEFESAIRTVCEPIFEKPLAEISFGHVLINLFNTARRFEMEVQPQLVLLQKTLLYIEGLGRQLYPELDLWKTAKPFLERWMKEQLGWRAIVRSVKENAPYWAEKLPEMPMMLYENLRQQHNIDERERELRKQQLLTQRQASTSLFWTVLTGSGLICTTLLWNQTELSEVTIGAGIVTVLLGLMAWRTRPKTKNNEFV

SEQ ID NO: 34882 - protein, 250 aa, Rehmannia glutinosa
MVKNYPTVSEEYLNAVEKCKKKLRGLIAEKNCAPIMLRLAWHSAGTFDQCSKTGGPFGTMRFKAEQGHAANNGLDIALRLLQPIREQFPILSHADFYQLAGVVAVEVTGGPEVPFHPGRPDKEEPPVEGRLPDATKGSDHLRDVFTKQMGLSDQDIVALSGAHTLGRCHKERSGFEGPWTANPLIFDNSYFKELLSGEKEGLLQLPSDKALLADPSFRPLVEKYAADEDAFFADYAEAHLKLSELGFADA

SEQ ID NO: 34883 - protein, 356 aa, Lycopersicon esculentum
  misc_feature (200)..(200): Xaa can be any naturally occurring amino acid
  unsure (1)..(356): unsure at all Xaa locations
GLWAGLIIGFVTEYYTSNAYSPVQDVADSCRTGAATNVIFGLALGYKSVIIPIFAIAISIFVSFSFAAMYGIAVAALGMLSTIATGLAIDAYGPISDNAGGIAEMAGMSHRIRERTDALDAAGNTTAAIGKGFAIGSAALVSLALFGAFVSRAAISTVDVLTPKVFIGLLVGAMLPYWFSAMTMKSVGSAALKMVEEVRXQFNTIPGLMERTAKPDYATCVKIFTDASIKEMIPPGALVMLTPLIVGILFGVETLSGVLAGSLVSGVQIAISASNTGGAWDNAKKYIEAGASEHARTLGPKGSDAHKAAVIGDTVGDPLKDTSGPSLNILIKLMAVESLVFAPFFATHGGLLFKLF

SEQ ID NO: 34884 - protein, 370 aa, Staphylococcus aureus subsp. aureus MSSA476
MAPKLQAQFDAVKVLNDTQSKFEMVQILDENGNVVNEDLVPDLTDEQLVELMERMVWTRILDQRSISLNRQGRLGFYAPTAGQEASQLASQYALEKEDYILPGYRDVPQIIWHGLPLTEAFLFSRGHFKGNQFPEGVNALSPQIIIGAQYIQAAGVAFALKKRGKNAVAITYTGDGGSSQGDFYEGINFAAAYKAPAIFVIQNNNYAISTPRSKQTAAETLAQKAIAVGIPGIQVDGMDALAVYQATKEARDRAVAGEGPTLIETMTYRYGPHTMAGDDPTRYRTSDEDAEWEKKDPLVRFRKFLENKGLWNEDKENEVIERAKADIKAAIKEADNTEKQTVTSLMEIMYEDMPQNLAEQYEIYKEKESK

SEQ ID NO: 34885 - protein, 140 aa, Lycopersicon pimpinellifolium
ALFGAFVSRAAISTVDVLTPKVFIGLLVGAMLPYWFSAMTMKSVGSAALKMVEEVRRQFNTIPGLMEGTAKPDYATCVKISTDASIKEMIPPGALVMLTPLIVGILFGVETLSGVLAGSLVSGVQIAISASNTGGAWDNA

SEQ ID NO: 34886 - protein, 1122 aa, Magnaporthe grisea 70-15
MTDTPQTVAGPDSKGATVLERHLDPGYEYTFDPATPTADGAGSSSNSFRDTPESSLRLQGGDIHRDLYKIAAKSKRQQLHKRAATFSNTHEHAPLIVPDLEHDDLPIQEQMAPGGLRRQFLQRQARNVSYIAEPVTRNFISFLELYGNFAGEDLEESDDEDDIAVVEEDEEEQGERRPLLGRRQSSKRLRQQGDASNMKSFFTLLKAFVGTGIMFLPKAFKNGGMLFSAITLIVVSAVTMICFEMLLACRKKYGGGGYGDLGQIIVGKRLRQLILISITLSQLGFVCAGLIFTAENLASFFDAVTPDSKPLGTNALIGVQLVVLIPLAFIRNISKLGPAALLADIFILIGLTYIYWFDISWISKNGGFHSSIELFNPRDWTMTIGSAIFTFEGIGLILPIQSSMKQPEHFSKLLLTVMVIITVVFTSVGVLCYGTFGENVSVEVITNFPQSSKLVNAVQFLYAMAVLVGTPVQLFPAMRTIELKIFGRASGRRDSLTKWKKNAFRTVLVVFSGVVAAFGANDLDKFVALIGSFACVPLVYIYPAYLHYIGVAERPWVKAGDIAMMVVGLVAMVYTTIITIASILPAHPWGIKILLFHGRSCNTYLVVMKSSRSIRAGLRQAGRTSLSSRATPPKLFPTRTTVAQHARPFHASPARHSGSSNPAMAFPCLDALESRSAQLSSSRTSASSGPEPSYTAGATLSYHCKSPLLLDWGGVLPTFHIAYETWGKLNADKSNVILLHTGLSASSHARSTEANPQPGWWERFIGPGCAIDTDRYFVICTNVIGGCYGSTGPSSLDPADGKHYATRFPILTISDMVRAQFRLLDGLGIDRLYASVGSSMGGMQSLAAATLFPDRVARIVSISGCARSHPYSIAMRHTQRQVLMMDPHWNRGFYYEPDQIPPHAGMKLAREIATVTYRSGPEWELRFGRRRADPNKPPALCPDFLIETYLDHAGEKACLTYDANSLLYVSKAMDLFDLGAESQRAAVQRRTAREEEMKAGKEASVNEQAACTLTLPDVPYEEQQSPEETAEAVSASPYPQPPADLVRGLAPLSQHPTLVMGVASDILFPAWQQREVADALRAVGNRSVTHVELSEEQSMFGHDTFLLDLENIGGNIKKFLES

SEQ ID NO: 34887 - protein, 651 aa, ASPERGILLUS NIDULANS FGSC A4
MPFPYKHILVIGATSGIGRAMAERFVENGAKVIVVGRRKERLDAFVSKYGENKAQSMVFDITQTDKMPEFVKEITAKYPDIDSVYLNAGVQRTHDLTQEGGWDLEAFNNEFHTNFTSAVSLVHAFLPFLKRKAETQPASFIFTGTNLAIVPAAPMPAYSASKTALNVFVLSLREQLKQSSKLKVIEVSPPAVQTELHDYMGAHGATIGMPLDQFINEAFSGLQKGLDQVIVGNVVDNETFHDIVQKRRSLFEKLAAAMRIIKWNTKSRIPVYISGNGMPSIPITILTGFLGSGKTTLLLNLLPQLPKSYKLALLKNEFGDVAIDSQLASTSAISGVRELLNGCICCNLVGQLSDALSELESTVDPDRIIIETSGSAFPATLAMEVNRLSRESPHNEDGSSKYTLDGVVSVIDVENWAGYEDTSYTAKIQARYTDLIVFNKWEHVSERRFDEVLDRVGDLEVQTPWVKSDKGRVEKDVLLGIDGALFAKQVIENGHEHGHEHADGHGHEHGHQSEVEVLSVTLRQTEGTGASTIDVPALEKLLSSAPKEEVYRIKGILRCSTQTPLASSSDDLDVRPSPSNSSDSAYYILNWAFGRWTCTSSEVVADAADPATVARITFILARYESAKWKKKLDGGALVQSDGAELNVERLV

SEQ ID NO: 34888 - protein, 244 aa, Zea mays
MGTDCLTRHNIASHLQKYRSHRKHLMAREAEAATWAQKRHMYAPPAPRTTTTTDAARPPWVVPTTIGFPPPRFCRPLHVWGHPPPHAAAAEAAAATPMLPVWPRHLAPPRHLAPWAHPTPVDPAFWHQQYSAARKWGPQAAAVTQGTPCVPLPRFPVPHPIYSRPAMVPPPPSTTKLAQLHLELQAHPSKESIDAAIGDVLVKPWLPLPLGLKPPSLDSVMSELHKQGVPKIPPAAATTTGATG

SEQ ID NO: 34889 - protein, 170 aa, Arabidopsis thaliana
MGASASVPERSVHQFTVKDSSGKDLNMSIYQGKVLLIVNVASKCGFTETNYTQLTELYRKYKDQDFEILAFPCNQFLYQEPGTSQEAHEFACERFKAEYPVFQKVRVNGQNAAPIYKFLKASKPTFLGSRIKWNFTKFLVGKDGLVIDRYGTMVTPLSIEKDIKKALEDA

SEQ ID NO: 34890 - protein, 698 aa, Zea mays
MNPYFVGILVPVAVSLLLRKRRKAQRMRGVPVEVGGEPGYAVRNYRFEQPVETHWEGVSTLADLFEQSCKEYVYMPLLGTRKLISRETEAAPGGRSFEKLHLGEYEWKCYAECFKSVCNFSSGLIRVGHQKNERVAIFAETRAEWQIGLQACFRQNITVVTIYASLGEEALCHSLNETEVTTVVCGQKELKKLIDISGQLDTVKRVVYINEEGISTEVSLAQNCTSWIVESFEEVTRLGAEAPVEANMPLPSDVAVIMYTSGSTGLPKGVMMTHRNVLATLSAVMTIVPALGSKDIYLAYLPLAHILELAAEALMAAVGASIGYGSPLTLIDTSNKIKKGTLGDASALKPTLMTAVPAILDRIRDGVRKKVDTKGGIAKQLFDIAYNRRLAAINGSWLGAWGLEKLLWDTLVFGKVRAILGGKIRFVLSGGAPLSGDTQRFINICLGAPIGQGYGLTETCAGGTFSEYDDTSVGRVGAPLPCSYIKLIDWPEGGYLTADLPMPRGEIVIGGPNITKGYFKNEAKTNEVYKDDEKGMRWFYSGDIGRFHPDGCLEIIDRKKDIVKLQHGEYVSLGKVEAALIVSPYVENIMIHADPFHNYCVALVVAAHIELESWASQQGIKYNDFSDLCQKQEAVKEVLGSLAKAAKQARLEKFEIPVKIKLIPEPWTPESGLVTAALKLKREVIRKTYENDLAELYA

SEQ ID NO: 34891 - protein, 918 aa, Dechloromonas aromatica RCB
MHDASPSKDEPLRTDIRLLGRILGDTVREQEGESVFDIVERVRQTAVRFARDGDPAARDELAALLDPLPGDTTQAVVRAFSYFLQLANIAEDEHHIRRRRAHDLAGSPPREGSLIFALDALSTAAVSPEAIADFFAHAVVAPVLTAHPTEVQRQSLIRNHRDLAHLLDQRERLQMTPEEEAENDLALANAILTLWQSRMLRPVRLKVLDEVKNGITYFKETFFTELPRLYIQATEQLQKRYPEKTWALPPFFRVGSWIGGDRDGNPFVTADILREALRLQSSAALNHYLNEVHELGGELPLSDLLVKVTPELLALAEHSTDHSPQRADEPYRRALSGIYARLAATARALDQFEPVRHEIGHATPYDTPDALRADLKLLANSLKLNGSAKLAGGRLRRLLRGVQIFGFHLAPIDLRQNSDVHARSVAELLAGAGRCPDYEALSEAERIKLLVDEISTPRPLYSPYLNYSEETQGELAIFFAARELRQKYGSAALPNCIISKTDGVSDLLELALLLKESGLLLPGAKPQLKVNIIPLFETIEDLQKSAATMAGVFAIPAYRELIAGRGDEHEVMLGYSDSNKDGGFLTSGWELYKAEIELARIFGQHGVRLRLFHGRGGSVGRGGGPTYHAILAQPAGAVAGQIRLTEQGEVISTKYGNADTGRRNLEVLLAATLEASLTDHENRVEPAEQFHAVMDELSARAFNAYRGLVYETPGFTTYFRQSTVVSEIASLNIGSRPASRKASERIEDLRAIPWVFSWAQCRLMLPGWYGFGAAVEGYLQANPAGLATLRRMVHAWPFFKSLLSNMDMVLAKTDLAIASRYAELVADVELREHIFSRIKAEWALTRQHLLAILEQDEFLADNPLLARSLQLRSPYMDPLNHLQVELLKRHRAGDTDERLARGIHLTINGIASGLRNSG

SEQ ID NO: 34892 - protein, 486 aa, Azoarcus sp. EbN1
MTLALNDPDLFRSRCLVGGTWADADSGATIAIHNPATGEQLGTIPKMGAAETRRAIDAASRAWPAWRALTAGARARVLRKWFDLIVEHQEDLALLMTSEQGKPLGEARGEVLYAASFVEWFAEEAKRIYGDVIPGHQPDKRIVVTKEPVGVCAAITPWNFPLAMITRKAGPALAAGCTMVLKPATQTPYSALALAVLAERAGVPAGVFSVLTGSATEIGGELTANPIVRKLTFTGSTEVGIKLAAQCAPTIKKLSLELGGNAPFIVFDDADLDAAVDGALASKYRNTGQTCVCANRLLVQDSVYDAFAEKLTAAVAKLKVGNGVDEGVTQGPLIDMRAVEKVEEHIADALAKGARVVTGGGRHALGRTFFEPTILADVTPQMKVAREETFGPVAPLFRFKDEAEAIRMANDTEFGLAAYFYSVGMNRVWRVSGALEYGIVGINTGIISTEVAPFGGMKSSGLGREGSKYGIEDYLEIKYLCMGGVQ

SEQ ID NO: 34893 - protein, 164 aa, Rhodobacter sphaeroides 2.4.1
MKGILDSILRVGRMIFAPTKTVQYPEEKLPLAPRTRGRIVLTRDPDGQERCVACNLCAAACPVDCIDVVKAETPDGRWYPESFRINFARCIFCGYCEEACPTSAIQLTPDVELADYRRGFLQYEKEDLLISGEGKHPGYRYWDVAGKAIAGKAQDPVDPKDLCP

SEQ ID NO: 34894 - protein, 565 aa, Chlorobium tepidum TLS
MARPKNVKHIFVTGGVISSLGKGILSASLGLLLKSRGLRVAIQKYDPYINVDPGTMSPYQHGEVYVTDDGAETDLDLGHYERFLDEPTSQACNLTMGRVYKSVIDKERRGEYLGGTVQVVPHVIDEIKEKMGDLAKNGSIDVLITEIGGTIGDIESLPFLEAMRQLKLELGEHNLLNIHLTFVPYIKAASELKTKPTQHSVKMLLETGIQPDILVCRSEKPLSREIKNKVGHFCNVHDLDVIGLNDCDTIYEVPLMLLKEQLDLRVMKKLGLKKFREPNLEYWKNFCEKVKHPKDGEITIGICGKYTEYPDAYKSIIESFIHAGASNDVRVLVKMLRAEDAEDPKFDISSAFKGISGLLVAPGFGDRGIEGKVRFVQYARENNIPFFGICLGMQCATIEFARNICDLPDANSTEFNKRTRFPVIDLMEHQKKVKEKGGTMRLGSYPCILKEGSKAHELYGKFLINERHRHRYEFNNQFRKLFEEKGMIFSGTSPNGDLVEIVELKNHRWFVAVQFHPELKSRVQKVHPLFDGFVHAAKEFAQGKRQLSLEVEMPRLSSTEMENAG

SEQ ID NO: 34895 - protein, 278 aa, Triticum aestivum
MAGGGDNSQTNGGSQEPRAMEEGRKEDYDQGCGLAISLPFVQKIIAEIFGTYFLIFAGCGAVTVNKSKGQITFPGVAIVWGLTVMVMVYSVGHISGAHFNPAVTFAFATVRRFPWRQVPAYVLAQMLGATLASGTLRLMFGGRHEHFPGTLPTGSDVQSLVLEFIITFYLMFVISGVSTDNRAIGELAGLAVGATILLNVLIAGPVSGASMNPARTVGPALIGSEYRSIWVYVVGPVAGAVAGAWAYNLIRFTNKPLRELTKSTSFLRSMSRMNSVSV

SEQ ID NO: 34896 - protein, 502 aa, Clostridium tetani E88
MYMIIGDSFTTKEIDEYCINNLSVPGIVLMENAAIKILKHLDLHKNQCFLIIGGRGNNGGDAFALGRHLLAHGEKVEIFLIGGQKGMSEDCSINYNILKNLDVNINLIDNIKDIEDLRNSIKKSNIVVDGIFGTGLTRKVEGIYDDVISVINENSDYTVSIDVPSGLNCNTGEILGNCIIAQKTISLMTYKKGFLNYTTENYTGEIIVENISVPYNSIKNICKNEFILGEEFVRKNLKIRSKYGHKGNYGRTLIVAGNEGFTGAAYLATEGAVKSGAGLVTLSTHEKIKDILSCKLNEAMIASVENKDEFYRLLINSDSIAIGPGLRNNDDTFELVKEVINKSNCPIVIDADGINCLKNHLYLMKDKKNSIILTPHPGEMSRLTGLSIKEINERRIDIAKDFARKNEVIILLKGYNTVITDGDKTFINSTGNSAMASGGMGDTLTGIIASFLAQGYNPLEAASMGAFLHGYCGDKLSKNMYSVNAREVLNIFPCIMKKFQSN

SEQ ID NO: 34897 - protein, 203 aa, Escherichia coli
MIESNLRLVVKIARRYGNRGLALLDLIEEGNLGLNRAVEKFDPERGFRFSTYATWWIRQTIERAIMNQTRTIRLPIHIVKELNVYLRTARELSHKLDHEPSAEEIAEQLDKPVDDVSRMLRLNERITSVDTPLGGDSEKALLDILADEKENGPEDTTQDDDMKQSIVKWLFELNAKQREVLARRFGLLGYEAATLEDVGREIG

SEQ ID NO: 34898 - protein, 331 aa, Matthiola incana
QKRSEIYTYEAPWHIYAMNWSVRRDKKYRLAITSLLEQYPNRVEIVQLDESNGEIRSDPNLSFEHPYPPTKTIFIPDKECQRPDLLATSSDFLRLWRIADDHSRVELKSCLNSNKNSEFCGPLTSFDWNEAEPRRIGTSSTDTTCTIWDIEREAVDTQLIAHDKEVFDIAWGGVGVFASVSADGSVRVFDLRDKEHSTIIYESSEPETPLVRLGWNKQDPRYMATIIMDSAKVVVLDIRFPALPVVELQRHQASVNAIAWAPHSSCHICTAGDDSQALIWDISSMGQHVEGGLDPILAYTAGAEIEQLQWSSSQPDWVAIAFSTKLQILRV

SEQ ID NO: 34899 - protein, 112 aa, Robinia pseudoacacia
MASQQQNREELDERARHGETVVPGGTGGKSLEAQEHLAEGRSRGGHTRKQQLGSEGYHEMGTKGGQTRKEQMGKEGYQEMGRKGGLSTMDKSGGEHAAEEGIDIDESKFRNK

SEQ ID NO: 34900 - protein, 466 aa, Saccharophagus degradans 2-40
MAEFQYDFLVIGAGPAGEAAAMAAAKSDLRVGVIESQGMLGGNCTHRGTIPSKSLRHTVKQVIQFGSQPIFRNIGGARPLTYPAVLDAASQVIPKQVELHTEFFARNRVRVHSGNARFLSNTQVEVMDSHGVRDVISAERVLIATGSRPYRPDDVDFTHPRVYDSDTILDMQHTPRTIIIFGAGVIGCEYASIFAGLGLKVDLINTRERLLEFLDDEISDALSYHLRDNGVMVRHSEECASVDATSKGVTLNLKSGKRIRADALLWCNGRTGNTDMLDLENAGLEANHRGQVKVDNNYCTEVDNIYAAGDVIGWPSLASASYDQGRAVVAAMLQKEMRFVEDAPTGIYTLPEISSVGKTEAELTSARIPYEVGRAFFKDTARGQISGEDVGMLKILFHIDTLEILGIHCFGAEAAEIIHIGQAIMNQPNGANTVKYFVNTTFNYPTMAEAYRVAALNGLNRVNRHS

SEQ ID NO: 34901 - protein, 194 aa, Escherichia coli
NLRLVVKIARRYGNRGLALLDLIEEGNLGLIRAVEKFDPERGFRFSTYATWWIRQTIERAIMNQTRTIRLPIHIVKELNVYLRTARELSHKLDHEPSAEEIAEQLDKPVDDVSRMLRLNERITSVDTPLGGDSEKALLDILADEKENGPEDTTQDDDMKQSIVKWLFELNAKQREVLARRFGLLGYEAATLEDV

SEQ ID NO: 34902 - protein, 451 aa, Mesoplasma florum L1
MEKLIAHLKSQGFIFQGSEIYGGLANSWDYGPLGVEVKNKLKQAWWNHFVRKNPYNIGLDSSIILNSSVWKASGHIDGFNDPLIDCKKCNSRWRADKLIEEFNSEINAGVMTENQMEEFIREQNIKCPKCQACDFTQIRKFALMFKTNQGVLEDESSSVYLRPETAQGIFINFKNAQRSLRKKLPFGIGQIGKSFRNEITPGNFIFRTREFEQMELEFFFNPSDEKDWFSYWLNEVETFLQDKIQINKENYRVRSHEKDELAHYSTATSDIEFKFPFGWGELWGVAHRGNFDLNAHQEASKQDLTYLDPTTNQKVLPHVIEPSVGVERMMLAILWQAYHEEDLGEGNSRIVMKLPYNLAPYQIAVMPLQKQQNDQAQALYSNLLNNFDVTYDETGNVGKRYRRQDAIGTPFVITVDFDTPETNSVTVRERDSMEQVRINLDELEAYLKAKF

SEQ ID NO: 34903 - protein, 183 aa, Escherichia coli
LVVKIARRYGNRGLALLDLIEEGNLGLIRAVEKFDPERGFRFSTYATWWIRQTIERAIMNQTRTIRLPIHIVKELNVYLRTARELSHKLDHEPSAEESAEQLDKPVDDVSRMLRLNERITSVDTPLGGDSEKALLDILADEKENGPEDTTQDDDMKQSIVKWLFELNAKQREVLARRFGLLGY

SEQ ID NO: 34904 - protein, 214 aa, Paenibacillus macerans
FDCAEYRSTNIYGYGLYEVSMKPAKNTGIVSSFFTYTGPAHGTQWDEIDIEFLGKDTTKVQFNYYTNGVGGHEKVISLGFDASKGFHTYAFDWQPGYIKWYVDGVLKHTATANIPSTPGKIMMNLWNGTGVDDWLGSYNGANPLYAEYDWVKYTSNQTGGSFFEPFNSYNSGTWEKADGYSNGGVFNCTWRANNVNFTNDGKLKLGLTSSAYNA

SEQ ID NO: 34905 - protein, 471 aa, Mesoplasma florum L1
MKKYMDKKEIAKIKTIEDFYEATVEFAKQNNNEITSEEVQMSFSKIFANATDNEYEKLLEDLQAKGIQFTDLEDIDIDEEIDLDEEVDEDAEISDDDAYADELIGERKGPGRRPKDAGTTKYRVGSISNETKIQDLIKTYFSTIGQTKILTKDQEIVYAKLANSEDPEERKEGRDMLITSNLKLVISVARKHLNRGLDFADLIEEGNIGLIKAVDKFDYEKGFKFSTYATWWIRQAITRAIADQARTIRIPVHMVETINKLSRIERQLTQELGREPSSKEVAERMGGDMTAEKVVEIKKIAVEPVSLEKPFGDEDDTHFGDFVEDKDMISPTDFTEKEILREVIDKVFEDMPAREEKVIRMRYGIVPTKVRTLIRLAEECNDETAGELAKAINKLDIHLETPVEKIRTVDSKIIQDHLLKYEASKTLEEVGKELNVTRERIRQIEAKTIRKLKQPANANKSGKVLKEFYKG

SEQ ID NO: 34906 - protein, 333 aa, Streptococcus mutans
MAILVLGGAGYIGSHMVDRLIEKGEEEVVVVDSLVTGHRAAVHPAAKFYQGDLADREFMSMVFRENPDVDAVIHFAAYSLVAESMKKPLKYFDNNTAGMIKLLEVMSEFGVKYIVFSSTAATYGIPDEIPIKETTPQRPINPYGESKLMMETIMKWSDRAYGIKFVPLRYFNVAGAKPDGSIGEDHSPETHLLPIILQVAQGVREKIMIFGDDYNTPDGTNVRDYVHPFDLADAHLLALNYLRQGNPSTAFNLGSSTGFSNLQILEAARKVTGQKIPAEKAARRSGDPDTLIASSEKAREVLGWKPQFDDIEKIIASAWAWHSSYPKGYDDRD

SEQ ID NO: 34907 - protein, 208 aa, Paenibacillus macerans
FDCAEYRSTNIYGYGLYEVSMKPAKNTGIVSSFFTYTGPAHGTQWDEIDIEFLGKDTTKVQFNYYTNGVGGHEKVISLGFDASKGFHTYAFDWQPGYIKWYVDGVLKHTATANIPSTPGKIMMNLWNGTGVDDWLGSYNGANPLYAEYDWVKYTSNGSVFWEPKSYFNPSTWEKADGYSNGGVFNCTWRANNVNFTNDGKLKLGLTSS

SEQ ID NO: 34908 - protein, 160 aa, Methanothermobacter thermautotrophicus str. Delta H
MVRAYTRREYIKKIPGSKIVQYDMGNLSAEFPISLSVAVKAPTQITHNALEAARIASNRYMQRRAGRMGYHLKIRVYPHHIVRENPMATGAGADRVQDGMRKAFGKPVSTVALVKKNQKIITIETNKKNFKDAKEALRRAAMKFPVPCRIVIDRGEELVK

SEQ ID NO: 34909 - protein, 195 aa, Arabidopsis thaliana
  misc_feature (178)..(178): Xaa can be any naturally occurring amino acid
  unsure (1)..(195): unsure at all Xaa locations
TGRPKRPEEYLYLIMEYLPGGDMMTLLMRKDTLTEDEARFYIGETVLAIESIHKHNYIHRDIKPDNLLLDKDGHMKLSDFGLCKPLDCSNLQEKDFTVARNVSGALQSDGRPVATRRTQQEQLLNWQRNRRMLAYSTVGTPDYIAPEVLLKKGYGMECDWWSLGAIMYEMLVGFPPFXSDDPMTTCRKIVNWRNY

SEQ ID NO: 34910 - protein, 635 aa, Rickettsia typhi str. Wilmington
MSNSNIDNDPAKIDSLLRKAKSKKIPVTYDDINKALPLNKNPSIRQLEEAILKFSDAGVDILESNEDDEIKLDIGIDEEFKLSTNVDNESEDEVEEENIGSTDDPVRLYLKDMGGVDLLTRENEVEIAKRIEEGRKTMTASLCRSPVAMRCFIVWYEDLVNEKMLLRDLIDLEANMLHDEVHENDEEHNSETEVEEHEDNHLSMSRVETQILHNIIDRMKKISFICEELLIEAKKCYEESFDPKVLQNSRKYNNNLELLIHEVSEIHFNSKRTEEILGKMYGINRDLINKETAFLKLAEKYGVTRQNFLDEYIGSVINAAWKEKMLKNKKVAWKELITKESDYIDQMINELSVIESNTGLLVNDFKKLVNTIQKSERQTLQAKKDMIEANLRLVISIAKKYANRGLQFLDLIQEGNIGLMKAVDKFEYRRGYKFSTYATWWIRQAITRAIADQARTIRIPVHMIETINKILRTSRQMLNELGYEPTATEIANRLSMPLDKVRKVMKIAKEPISLENPVGDDSDGGQLGDFIEDKNAVAPIDAAIQSNLREVTTRVLATLTPREERVLRMRFGIGMNTDHTLEEVGQQFKVTRERIRQIESKALRKLQHPIRSKKLNSFRNGGKRGDGNPSDLLEA

SEQ ID NO: 34911 - protein, 94 aa, Carboxydothermus hydrogenoformans Z-2901
MFRPLHDRVLVKPLPTEEVTKSGIVIPDTAKEKPQQGEVKAVGSGRILENGERVPMEVKVGDRVFYSKYAGTEVKIDGEEYLILRESDILGILE

SEQ ID NO: 34912 - protein, 475 aa, Shewanella sp. MR-7
MSNEIKTQVVVLGAGPAGYSAAFRAADLGLETVIVERFSTLGGVCLNVGCIPSKALLHVAKVIEEAKAVAAHGVVFGEPTIDLDKLRSFKQKVISQLTGGLGGMSKMRKVNVVNGFGKFTGPNSLEVTAEDGTVTVVKFDQAIIAAGSRPIKLPFIPHEDPRIWDSTDALELKEVPGKLLVMGGGIIGLEMGTVYSSLGSEIDVVEMFDQVIPAADKDVVRVFTKQIKKKFNLILETKVTAVEAREDGIYVSMEGKSAPAEPVRYDAVLVAIGRTPNGKLIDAEKAGVKIDERGFINVDKQLRTNVPHIYAIGDIVGQPMLAHKGVHEGHVAAEVIAGMKHYFDPKVIPSIAYTDPEVAWVGLTEKEAKEQGIAYETATFPWAASGRAIASDCSEGMTKLIFDKDTHRVIGGAIVGVNGGELLGEIGLAIEMGCDAEDLALTIHAHPTLHESVGLAAEIYEGSITDLPNPKAKKK

SEQ ID NO: 34913 - protein, 491 aa, Arabidopsis thaliana
MSDLQANKDETTVDRQSSSSVDLDGPSPLRKMISVASIAAGIQFGWALQLSLLTPYVQLLGVPHKWPSFIWLCGPVSGLLVQPSVGYFSDRCTSRFGRRRPFIATGALLVAVSVVLIGYAADFGHSMGDKIDKPVKMRAVVIFALGFWILDVANNTLQGPCRAFLGDLAAGDAQKTRTANAFFSFFMAVGNVLGYAAGSYTNLYKIFPFTMTKACDIYCANLKSCFFLSITLLLVVTIIALWYVEDKQWSPKADSDNEKTPFFGEIFGAFKVMKRPMWMLLIVTALNWIAWFPFLLYDTDWMGREVYGGDSKGDDKMKKLYNQGIHVGALGLMLNSIVLGVMSLGIEGISRKMGGAKRLWGAVNIILAVCLAMTVLVTKKAEEHRRIAGPMALPTDGIRAGALTLFALLGIPLAITFSIPFALASIISSSSGAGQRLSLGVLNMAIVIPQMIVSFGVGPIDALFGDGNLPGFVVGAIAAAVSSIVAFTVLP

SEQ ID NO: 34914 - protein, 443 aa, Klebsiella oxytoca
MSGEQVDILVVDDDISHCTILQALLRGWGYRVALANNGLQALEKVREKVFDLVLCDIRMAEMDGIETLKEIKTFNPSIPVLIMTAYSSVDTAVEALKSGALDYLIKPLDFDKLQLTLSEALAHTRLSESPVTETPAAQFGMVGDSPAMRALLNNITLVAPSDATVLIHGESGTGKELVARALHASSARSRRPLVILNCAALNESLLESELFGHEKGAFTGADKRREGRFVEADGGTLFLDEIGDISPLMQVRLLRAIQEREVQRVGSNQTLSVDVRLIAATHRDLAEEVSAGRFRQDLYYRLNVVTIDMPPLRHRREDIPPLARYFLQRYAERNRKAVQGFTPQAMDLLIHYAWPGNIRELENAVERAVVLLTGEYISERELPLAITGTPVADAPHGDDSIQPLVEVEKEAILAALERTGGNKTEAARRLGITRKTLLAKLSR

SEQ ID NO: 34915 - protein, 1160 aa, Ralstonia solanacearum
MTRNPTVLLVDDALWYKDAVIYQLHVKSFCDSDNDGVGDFPGLISKLDYIAELGVDAIWLLPFYPSPRRDDGYDIAEYRGVHPDYGTMADARRFIAEAHARGLRVITELVINHTSDQHPWFQRARRAKAGSALRDFYVWSDHDKKYAGTRIIFIDTEPSNWTWDPVADAYYWHRFYSHQPDLNFDNPRVLKAVLGVMKFWLNLGVDGLRLDAVPYLVEREGTANENLPETHAVLRKIRAAMDAEFKNRLLLAEANQWPEDTQEYFGNGDECHMAFHFPLMPRMYMAIAREDRFPITDIMRQTPEVPPTCQWAIFLRNHDELTLEMVTDAERDYLWEVYASDRRARLNLGIRRRLAPLLERDRRRVELMNSLLFSMPGTPVMYYGDEIGMGDNIHLGDRDGVRTPMQWSPDRNGGFSRADPEQLVLPAIMGSLYGYESVNVEAQTRDAHSLLNWTRRLLATRKRHRVFGRGSIQFLQPANRKVLAYARALEGEAPILCVANLSRASQAVELDLAAYAQRVPVELIGGTAFPPIGQLPYLLTLPPYAFYWLELRENEPGPSWAQPAAEQLPEFTTLVLRAGLDALADTRQREAHRQLVEREILPTYLPKRRWFAAKDSVLRGAHFAWGTELPVDAASTNRPLAGATRPEVFINEIAVTLGDADGTERTERYLLPLSIAWESATLPALPIQLALARVRRGRHVGYLTDAFTTETFARVLLANLVRGVTLEASDGRVHFEPEPHLAELAEPPVAAETAAVRPAPLPLAPDAPVQWLAAEQSNSSLVIGESVIVKLIRRVAAGVHPEVEMTRHLTRIGYANTAALIGEIAHEGADGERSTLAVLQSFVPNQGDAWTWALDYLRRTIDELAVLTEAVSAGDGDAAPTAVSEARTDTDEALAGYLAFIGAIGTRLGELHVALAGPSDDPAFGTRAADADDAAFWTARVDEELARALDHLAAWQAANGPRAEVGWLLSQRDALLEAARERAQGGLGAMLARVHGDFHLGQVLVAQGDAYLIDFEGEPSRPVDERRRKTSPLRDVAGLVRSLDYVVGAMRQGPEHVAGPAQERRDQLLERFRNASTERFLEAYAAAILASGSDDGACMLDLDLLDLFLLEKAAYEVNYEAANRPTWLPIPLAGLARVARRLLPADVAPPVARDPLGGPP

SEQ ID NO: 34916 - protein, 398 aa, Arabidopsis thaliana
MRSSDHMAFAGVLPIVFLLILSSADLAASQSQPGPTNQPYNYGRLSPAMAVIVEILIAALFFRGFFSINFRHCSGVPDAGVSPAGGVRSRATVNAAARGLDVSVVETFPTFLYSDVKTQKLGKGELECAICLNEFEDDETLRLLPKCDHVFHPHCIDAWLEAHVTCPVCRANLAEQVAEGESVEPGGTEPDLELQQVVVNPEPVVTAPVPEQLVTSEVDSRRLPGVPVDLKRVKFSRSHTTGHSVVQPGECTERFTLRLPEDVRKRIMKDWKLNRTNSLLVLPRGGSSRRGKPIDRSRARSDRWLFRKTPSFLWRSRDDGSIRLGATGSVRASAVPNSTGSDSVRAGDRWAFLRNASFLWRNSSVHVPRGGVNKDGEGTSVKSTGASGSTSGSVRLPV

SEQ ID NO: 34917 - protein, 314 aa, Zea mays
MAASNIGMMDGAYFVGRNEILAWINTTLQLGLSKVEEAASGAVACQLMDAAHPGAVPMHKVNFDAKTEYDMIQNYKVLQDVFNKLKITKHIEVNKLIKGRPLDNLEFMQWMKRYCDSVNGGFMSSYNASERRESSKGGKETNRRASVPSHTPAKSASTGHKAQASHGAKRASGQTAGAPQRSAKPSPVANSSGPAYDEQITELKLLVDSLEKERDFYFSKLRDIEILCQNPEVEHVPVHAIQNILYTSEEDPQQQAPALSPIMEASEERPKQEAAHKRKSISDLDEFGMSSSSRQRLSDISDVQLCGSPLTSFS

SEQ ID NO: 34918 - protein, 433 aa, Ashbya gossypii ATCC 10895
MHPRVVVTGIGCYTPLGPSLAQSWKELLRGTSGLVRLQDLAEYEGDYKPLSRLISGDLRVGKVGFEARDQELLSSQEQRRTSRAAQLAMVTAEEALRHAGLLSGSHLVASVDRNRAGCIIGAGLPSMEDISQATASLSSARRPSVSPFFIPKMLNNMAAGNVAIKFQLRGASNCPSTACASGNNAIGDAYNFIRLGYSDVIVAGASELSVHPLALAGFVKAKSISASGISRPFDARRDGFVLGEGCGLLVLESLEHARHRGAEIIAEVVGYGVCSDAHHITSPSEGGDGARRAMHMALQDAGIWDTRDQVGYVNAHATSTPLGDRAEARAIQAVFGATGTGSTLVSSNKGHMGHLLGAAGAVEAVFTVQSLREGIVPHTLNLQTVGEGLADKKDGFGGITFVQDNPVPAPLTYAMNNSFGFGGINSSLLFKKW

SEQ ID NO: 34919 - protein, 373 aa, Clostridium thermocellum ATCC 27405
MNKPLVMTPGPTYVHEDVRRAMQQEVGNPDVEESFFEFYRETCERLKELLKTKNDVIILSGEGILGLEAACASVIEPGDRVLCIDNGIFGNGFGDFVKMYGGEATYLKFDYRRAVDVNVVENFLKNDHNFKAATLVHCETPSGITNPIADICKMLKRYGILSIVDAVSSIGGEPLEADEWEIDVVLGGSQKCISAPPGLTFMSISRDAWNAILKRKTPIIGYYCNLAVWKSWYEDRWFPYTQPVSDIYALRAAVDRLLQDDLRIERHKNIADRVRAALADRGLELYPENGFSNTVTAFYVPDGATFTDIYNIMLSEHNILIAGSFGFLKDKVIRIGHMGENCYEDKILKTFAALDKTFEKLNIDLRNKLPGSR

SEQ ID NO: 34920 - protein, 550 aa, Ehrlichia chaffeensis
MANVVVTGEQLDKSIREVVRILEDAVGCTAGPKGLTVAIGKSYGAPEVTKDGYKVIKSIKPEDPLALAIANIITQSASQCNDKVGDGTTTCSILTAKVIEEVSKAKAAGADIVCIKEGVLKAKEAVLEALMSMKREVLSEEEIAQVATISANGDKNIGSKIAQCVQEVGKDGVITVEESKGFKELDVEKTDGMQFDRGYLSPYFVTNSEKMLVEFENPYILLTEKKLNIIQPILPILENVARSGRPLLIIAEDVEGEALSTLVLNKLRGGLHVAAVKAPGFGDRRKDMLGDIAILTGAKHVISDDLAIKMEDLTLAELGTAKNIRITKDTTTIIGSVDNSSANVQSRINQIKMQIEASTSDYDKEKLRERLAKLSGGVAVLKVGGSSEVEVKERKDRVEDALHATRAAVEEGVVPGGGAALLYTLSVLENLKSKNDDEQLGINIVKRALQAPIKRIIKNSGSENAPCVIAHLLKQNDKELIFNVDTMNFANAFTSGVIDPLKVVRIAFDFAVSLAAVFMTLNAIVVDVPSKDDANAGAGGMGGMGGMGGF

SEQ ID NO: 34921 - protein, 447 aa, Ralstonia eutropha JMP134
MPASQTINISAFIDRQPLSPFQVMIVVLCFLIVAIDGFDTAAIGFIAPAIRAEWQLTPAHLAPLFGAGLGGLMAGAFLFGPLADRFGRKSVLVFSVLFFGVASLASAWSGGLWELIALRFLTGLGLGGAMPNTITLTSEFCPEKRRSFLVTTMFCGFTLGSALGGLASAGLIEAYGWRSVLVVGGVLPLVLSVLLALLLPESVRYLVMARRAPERIAATLRRIAPQANLDGATFTVSESRSTSSPVRHLFKPELVRGTLLFWLTFFMSLLVIYLLSSWLPTLLRGTGLSLRTAALVTTMFQVGGTLGAIVLGWLMDRFNPHYVLAISYALAGVFVAAIGSLADTPMLAGVAVFLAGFCVSGSQVGANALSAGFYPTDCRATGVSWANGVGRMGSVVGSVGGATMLSMDLGMPTLFLLIGIPALLAGGTMLSLGLARRAPVRQELAAS

SEQ ID NO: 34922 - protein, 359 aa, Oryza sativa
MTGAVSKLAAPRPAAAAPLPPASVRSAFLASAPSPRRFSVSIAAGRARSPIIAMASAKEGNGAPTKRTTLHDLYDLQGQSPWYDNLCRPVTDLLPLIGSGVRGVTSNPSIFQKAISTSNAYDDQFKQLILAGKDAESAYWELVIKDIQDACKLFEPIYDQTDGADGYVSVEVSPRLANDTQGTVEAAKWLHKVVDRPNVYIKIPATAECVPSIKEVIAKGISVNVTLIFSIARYEAVIDAYIDGLEASGLSDLSRVTSVASFFVSRVDTLIDKMLEVDGIDKLDIEFGTRRRRWRRLAAPRQALALWFAAPEAGAGSCGGRVVGGSAAVHLRHRGAGVDYAGTAPRQPRAALKFNTPSG

SEQ ID NO: 34923 - protein, 304 aa, Zea mays
  misc_feature (275)..(275): Xaa can be any naturally occurring amino acid
  unsure (1)..(304): unsure at all Xaa locations
MAKDGAGGGPDWNGLLKWSLAHGSDGTNPPRALSEEDRKWFMEAMQANTIDVVGRMKEIAQVMKTPNDVLQSHGVTPENIEDMLDELQEHVESIDMANDLHSIGGLDPLLGYLKNSHAGIRAKAAEVVSTVVQNNPKSQQLVMESNGLEPLLTNFRSDPSTTARTKALGAISSLIRHNQSGLAAFRLGNGHAALKDALGSYDAKLQWKALNLIQYLLHNKADRSFATELGLPKLMMHLAASDDHLVREAALSGLLELSQDQTSGNALPDQDKLKXILKSRIEGISAMDSDDLHAAHEKRSWWTH

SEQ ID NO: 34924 - protein, 209 aa, Glycine max
MMKTTMNISNANHEKVEKAFAFLTGNHFINHHYGAILSKCLKGLPVRDFDAQEIIPGLYLGDVYAAHNTKELKSRNFTHIVTCTVGVVPPFPDAFKYMHLKILDFAGETIDVHFTSTTDFIGDAIANGGKVLVHCIRGVSRSATIVSAYLMKSMSLSAEDAVEHVRRVRAIARPNYGFMMQLQLYHKELNKGMMNVEISDEQNLPAAEW

SEQ ID NO: 34925 - protein, 84 aa, Oryza rufipogon
MSCCGGNCGCGSGCQCGGGCGGCKMFPDVEATATTKPFVLAAPSNKASSGGMEMAVESGENGGCGCNTCKCGTSCSGCSCCSCN

SEQ ID NO: 34926 - protein, 528 aa, Oryza sativa
  misc_feature (267)..(267): Xaa can be any naturally occurring amino acid
  unsure (1)..(528): unsure at all Xaa locations
MASLARRRAAEAALLRRAPAAAWASAWRGYAAAAAGEESDVVVIGGGPGGYVAAIKAAQLGLKTTCIEKRGTLGGTCLNVGCIPSKEVMNHFDPFYLAVPSIYYELRSTMGALLHSSHMYHEAKASFAHHGIKFSNLEIDLPAMMSQKDKAVAGLTKGIEGLFKKNKVEYVKGFGKFVSPSEVSVDLLDGGSTTVKGKNIIIATGSDVKSLPGVTIDEKKIVSSTGALALSEIPKKLVVIGAGYIGLEMGSVWNRLGSEVTVVEFAXLDIVPSMDGEIRKQFQRMLEKQKMKFMLKTKVVGVDTSGSGVKLTVEPAAGGEQSVLECDIVLVSAGRVPYTSGLGLNALGVETDKGGRILVDKRFMTNVKGVYAIGDAIPGPMLAHKAEEDGVACVEFIAGKEGHVDYDTVPGVVYTHPEVASVGKTEEQVKASGVAYQVGKFPLLANSRAKAIDDAEGLVKVVAEKETDRILGVHIMAPNAGEIIHEAVLALQYGASSEDIARTCHAHPTVSEALKEACLQTYLKAIHI

SEQ ID NO: 34927 - protein, 397 aa, Pseudomonas syringae pv. syringae B728a
MNNAMQLLQPYPFEKLRALLAGVTPNPEKRPVALSIGEPKHRSPDFVAKALADNLDQMAVYPTTLGIPALREAIAGWCSRRFGVPQGWIDPARNVLPVNGTREALFAFTQTVVNRSDDGLVISPNPFYQIYEGAAFLAGAQPHYLPCLSDNGFNPDFDAVSPDIWKRCQILFLCSPGNPTGALIPVETLKKLIALADEHDFVIAADECYSELYFDEQTPPPGLLSACVELGREDFKRCVVFHSLSKRSNLPGLRSGFVAGDAQILKAFLLYRTYHGCAMPVQTQLASIAAWNDEEHVRANRDLYREKFAAVLDILTPVLDVQRPDGGFYLWPNVGTDDAAFCRDLFVDQHVTAVPGSYLSREVDGVNPGAGRVRLALVAPLAECIEAAERIRAFLSK

SEQ ID NO: 34928 - protein, 243 aa, Pleurotus sp. 'Florida'
SDTIDNVKAKIQDKEGIPPDQQRLIFAGKQLEDGRTLSDYNIQKESTLHLVLRLRGGMQIFVKTLTGKTITLEVESSDTIDNVKAKIQDKEGIPPDQQRLIFAGKQLEDGRTLSDYNIQKESTLHLVLRLRGGMQIFVKTLTGKTITLEVESSDTIDNVKAKIQDKEGIPPDQQRLIFAGKQLEDGRTLSDYNIQKESTLHLVLRLRGGMQIFVKTLTGKTITLEVESSDTIDNVKARSKTRK

SEQ ID NO: 34929 - protein, 229 aa, Arabidopsis thaliana
MMGSVELNLRETELCLGLPGGDTVAPVTGNKRGFSETVDLKLNLNNEPANKEGSTTHDVVTFDSKEKSACPKDPAKPPAKAQVVGWPPVRSYRKNVMVSCQKSSGGPEAAAFVKVSMDGAPYLRKIDLRMYKSYDELSNALSNMFSSFTMGKHGGEEGMIDFMNERKLMDLVNSWDYVPSYEDKDGDWMLVGDVPWPMFVDTCKRLRLMKGSDAIGLAPRAMEKCKSRA

SEQ ID NO: 34930 - protein, 417 aa, Brachyspira hyodysenteriae
MSERRVVITGLGIVSSLGNDVKTFWDNLLNGVSGIKTLSKYFDPEKEQLITKIGAEALPVEGDYYSDKKMLRRLDPFINFGIYAAHHAFKQAGIEPKTGFDPLRAGCVLGSGIGGMTTLLSNHQVLLNDGPGRVSPFFVPMQIINMTPGLISMEYGMNGPNYSTVTACASSNHSIGLGYKHIKDNEADIMVVGGSEATINPLTIAGFNNARALSTRNDDPAKASRPFDKGRDGFVIAEGAGILILEEYEHAKKRNANILAEVCGYGFTADANHITAPLEDGAMGARAMSLAIESAKISPDKISYVNTHGTSTPVGDIAEIKAIKKALGEDHAKKIKINSTKSMTGHALGAAGGIEAIATIMSMIEGKVHPTINVEEQDPQCDLDVVANTAQDYKIEYAISNSFGFGGHNASIVFKRI

SEQ ID NO: 34931 - protein, 537 aa, Oryza sativa
MSDGTANCIDILIAIILPPLGVFLKFGCKVEFWLCLLLTFFGYLPGIIYAVYAITKLRWLWFKWKEDNKPWVGMDLPCDDCDKRLFQAATTINVGNGEKINFWHDKWLQNTCPKDIAPLCFNLAKRKQRSVKTELTNNSWLLSFRQITTIEEISDLVQLGGMLQNVQLLPQTNDDITWNLNESGSYSANSAYLFQFQGSFSSIDFHSIWRCPAEPKMRFFGWLILHQKTLTAQNLLRRHWPCNWICSLCGEAFEDTNHLFNVCPFFRKVWLMVSTCLSILKVEDMTKSPSLSQLLIRSCISNGDAGSPRLVETTQPSSQLIAGDQRYDGVIALASPPPISSPPNLFCAATGALSTAQVSFDPSRAATGALSTVPPSVRRSLARCHRIPPHRVASQKCKIVISVDVINNATFMFLIQYPPKVKLKGFPLANSIGGDKVEGGKLMTMGRRSDYLIVLFDLYFSMRLASWQSIVDAIELFELLARFAFGYPYVLVWVLETEGVAERLMMNVVFFMGDGDLVVLVFDTEFLDKQSSKFLID

SEQ ID NO: 34932 - protein, 139 aa, Medicago sativa
TAICPMSLLERMSDLLRWQKKDPSFVLPWKQDSLPIFSESSPSYHTRKRPEPLTAEEESDLDLANKRFLELCQKCVQANIPLLVDAEHTSVQPAIDYFTYSSAIMHNKGENPIVFGTIQTYLKDAKERMLLASKAAEKM

SEQ ID NO: 34933 - protein, 268 aa, Vibrio sp. Ex25
MSRYEKMFARLNEKNQGAFVPFVTVCDPNAEQSYKIMETLVESGADALELGIPFSDPLADGPTIQGANIRALDSGATPDICFEQIGKIRAKYPDLPIGLLMYANLVYSRGIENFYERCAKAGIDSVLIADVPTNESAEFVAAAEKFGIHPIFIAPPTASDETLKQVSELGGGYTYLLSRAGVTGAETKANMPVGHMLDRLNQFDAPPALLGFGISEPAQVKQAIESGAAGAISGSAVVKIIEANIEQPQIMLDKLGDFVSAMKAATQK

SEQ ID NO: 34934 - protein, 326 aa, Cicer arietinum
GFEAGISKDGQTREHALLAFTLGVKQMICCCNKMDATTPKYSKARYDEIVKEVSSYLKKVGYNPDKIPFVPISGFEGDNMIERSTNLDWYKGPTLLEALDQINEPKRPSDKPLKLPLQDVYKIGGIGTVPIGRVETGVIKPGVIVTFGPTGLTTEVKSVEMHHEALTEALPGDNVGFNVKNVAVKDLKRGFVASNSKDDPAKEAANFTSQVIIMNHPGQIGNGYAPVLDCHTSHIAVKFAELLTKIDRRSGKELEKEPKFLKNGDAGLVKMIPTKPMVVETFSEYPPLGRFAVRDMRQTVAVGVIKSVEKKDPTGAKITKAAVKKK

SEQ ID NO: 34935 - protein, 163 aa, Brucella melitensis 16M
MASIAQAAKSLLLKEFASAFALSMRQFFAPKATLNYPHEKGPVSPRFRGEHALRRYPNGEERCIACKLCEAICPAQAITIEAGPRRNDGTRRTVRYDIDMVKCIYCGFCQEACPVDAIVEGPNFEFATETREELYYDKDKLLANGDHWEREIARNIAMDAPYR

SEQ ID NO: 34936 - protein, 601 aa, Wolbachia endosymbiont strain TRS of Brugia malayi
MNKSAYEIVEHEYDVVVVGAGGAGLRATLGMAATNFSVACISKIFPTRSHTVAAQGGISAALGNIAEDDWRWHAYDTIKGSDWLGDQDAIEYMCKNAAKAVIELENFGVPFSRTGNGKIYQRPFGGMTTHFGKGKSAQRTCAAADKTGHAILHTLYQQCLKFNTEFFVEYFVIDLIIDNETGACCGVLAWSLCEGTLHKFRAHSVVLATGGYGRVYFSATSAHTCTGDGNGMVVRAGLPLEDMEFVQFHPTGIYGSGCLMTEGCRGEGGYLVNSQGERFMERYAPKVKDLASRDVVSRAITIEIREGRGVGPKKDHIYLTIAHLDPEIIKLRLPGISETARTFAGVDVTKDPIPVIPTVHYNMGGIPTNYHGEVVTLKESKEEVVEGLFAIGEAACISVHGANRLGSNSLLDLVVFGRAAALRAKKKLKPNMPHKKLNSACIDWIVDRFNKMRFASGGLRVSKIRSEMQHTMQKYASVFRVAEVLEEGKRAIKGVAKMMPDIAIEDRSMVWNSDLVEALELANMIPQAVITMECAANREESRGAHAREDFPERDDKNWMKHTIAWLEEKEGQINTRIDYKKVAENTLSDEIDFIAPEKRVY

SEQ ID NO: 34937 - protein, 502 aa, Prochlorococcus marinus subsp. marinus str. CCMP1375
MTTALQSPPRRRIARLQEVSLLEGPMLLLRSIRGFRSNQSLIWLATVPLALLGLGVFGFAARAGVGLSDLSGAQAASFLADNLWLFIATILVIFMNAGFAMVEAGMCRQKNAVNILAKNLFVFALAVTAYWFIGYSIMYGGTPIIGGVIFSNGFFFNPDPSDALSCAAGLGADGCSQLVPAVDFLFQAAFAGTAATIVSGLVAERVKFGEFVVFSLVLTAFIYPIAGSWQWNGAGWLSQLGFIDFAGSSIVHSVGGWAGLVGAMLLGPRIGKFVDGKPQAMPGHNMAIATLGALILWIGWYGFNPGSELAMDEYVAYVAVTTTLAAAGGAIAATLLSTLTSGKPDLTMIINGILAGLVSITAGCGNMTLSGSWLAGFVGGLIVVFAVSALDSAGIDDPVGAFSVHGVCGVWGTVVIGLWGVDGMDPGAAGIGLFNGGGLNTLLIQALGAGAYAIWTVVTCWLAWTVIGGFFGGIRVSEEEEIQGLDIGEHGMEAYPDFASSN

SEQ ID NO: 34938 - protein, 304 aa, Prochlorococcus marinus str. MIT 9313
MILAGTTLTSAVVIWTQRDRRYKSSASVASAYDAWTNDQLLERLWGEHVHLGYYGKPPSTRDFRAAKQDFVHELVQWSGLAQLPRGSRVLDVGCGIGGSARILARDYNFDVLGITISPAQVKRASQLTPEGMTCQFQVMDALDLKLANGSFDAVWSVEAGPHMPDKQRYADELLRVLRPKGVLAVADWNRRDYEDGEMTSLERWVMRQLLDQWAHPEFASIKGFRRNLLHSPFACGTVESDDWTRSILPSWNDSILEGFRRPGAVLGLGPAALVKGFREIPTILLMRWAFAHGLMQFGVFRSRD

SEQ ID NO: 34939 - protein, 384 aa, Methanococcus maripaludis S2
MDEQDILNELREYRNQDLKYEEGYILGSMCTKPHPMARKISEMFFETNLGDPGLFKGTSKLEKEVVSMIGGILHNKNAFGYLISGGTEANLTAMRAFKNISKSKGKPQNIIIPETAHFSFDKAKDMMDLNVVRPPLTKYFTMDVKFIKDYIEDSKNEVSGIVGIAGCTELGSIDNICELSKIAVENDILLHVDAAFGGFVIPFLDDKYKLDGYNYDFDFSLNGVSSITIDPHKMGLAPISAGGILFRDNMFKKYLDVDAPYLTEKQQATIIGTRSGVGVASTWGIMKLLGIDGYETLVNESMEKTMYLVKKAREYGFETAIDPVMNIVALNDENKHDTCMKLRDENWYVSVCRCVDALRIVVMPHLEIEHIDGFLESLSNTKKY

SEQ ID NO: 34940 - protein, 444 aa, Haemophilus influenzae 86-028NP
MTNNNKTMEILMKSGDLNKYDLVKNTLVLVLAGGRGSRLHELTDKRAKPALYFGGNRRIIDFALSNCINSGLNRIGVVTQYAAHSLLRHLQTGWSFLPQERGEFVDMLPARQQIDDSTWYRGTADAVYQNMAIIKNHYRPKYILILAGDHIYKQDYSVMLMDHVNSGAKCTIGCIEVPRSEAHEFGVMAVNENLKVKAFVEKPKDPPAMVGKPDVSLTSMGIYVFDADYLYKMLDREVGTPNTSHDFGKDVLPKCLEEGALYAHPFSRSCMGRNTEGEIYWRDVGTLDSFWQSNIDLVSENPQLDIYDQSWPIRGNPVQAYPSKFFYKHSNVHPVDNSLIGGGCVITDASISNSVLFDRIKIDSFSKVDHCVVLPQVKIGKNCVLKNCIIDRECEIPDGMQIGVDMEEDKNRFRISSTGKVILVTPKMLKILEGHEIGEEGHLD

SEQ ID NO: 34941 - protein, 347 aa, Burkholderia fungorum LB400
MGSRPRFIDDLSRAASDAPGPEILNPLADDALLDAYSRTVIGALERVQQAVAFISVERRLPGAPSGHARGTRGGTGSGFLFTPDGYLLTNSHVVHGATHIEVTLADGAKFDADLVGDDPGSDLAVLRIGSPEPLPHVELGESSKLRVGQIAIAVGNPLGLAQTVTTGVVSALGRSLRSNSGRMIYDVIQTDAALNPGNSGGPLINSAGQVIGVNTAIIPGAQAICFATAIDTAKWVIMQLFAHGRVRRAYIGVAGTTTPLSRRVQRYFGLSSQSGVRVMEIVKGSPAALGGLRTDDTIIAIDTQAVQDVDGLQRTLDASRIDKPVNVTVLRGAQRLELTLTPVEQAS

SEQ ID NO: 34942 - protein, 540 aa, Helicobacter hepaticus ATCC 51449
MAVKYIFVTGGVLSSLGKGITSSSIATLLQQSGYSVSILKIDPYINVDPGTMSPLEHGEVFVTCDGAETDLDIGHYERFLNKDFHKKNNFTTGQIYMSVIENERKGKYLGKTIQIVPHIVDEIKSRIKFAGEGSDFLVVELGGTVGDIEGMPYLEAMRQMKHELGGKQVISIHITLIPLMRAAGELKTKPTQHSVQELRRIGISPQILVARCEKNLDKELKRKLALSCDVDNDSVIVAQDTQSIYKCPLNFLEEGILTPIARHLELGELKPKMDNWDMLVKKIIAPKSNITIGFVGKYLSLKESYKSLIESLIHAGANTDTRVNIKWIDSEILVDNLALLYDVDSLLIPGGFGERGIEGKLEAIKYARIQQIPLLGICLGMQLSLIEFARNVLGMSEANSIEFDPQTKEPVIYLIENFIDSQGGVQLRTHTSPMGGTMRLGEYECHIKKGTKLYEAYGKQTLIKERHRHRYEANPHYRALFEKNGMIVSGESNGLIESIELANHPWFVGVQFHPEFTSRLQNPNPVILAFVKETLAHKKT

SEQ ID NO: 34943 - protein, 541 aa, Ralstonia solanacearum
MSLNVLFVASEAVPLAKTGGLGDMVGACAGALQRAGLHVTVMLPGYPAAQAQLRDARVACALPDLPGGPARVLLGAMPDTGVPVLLLDAPALFDRPGNPYLDACGEPYADNALRFAAFSHAAAHVAGGVPDLPAFDIVQAHDWHAALVPLLVKRAGRPVKTVLTVHNLAFQGNFPPRIAQDLGLPPEAVREAGFFGQFSFLKAGLMWADRITTVSRTYAREILTDAFGYGMQDVLRARRHDLVAILNGIDNAVWNPSKDAYLSRPFFAGNLSGKHAAKLQLQTLLRLPKDAHAPLLALGSRLTHQKMADVALQALPQMLEAHPDLQVAVLGCGERRYESAMAALAERHPRRMAAVIGYTERNAHMLHAGADLLLHGSRFEPCGLTPLYAMRYGTVPVASRVGGLVDTIADRGSPEAALRGATGFLFDGETPEAMAGAVARALRVFVQPRAWRVLQYNGMTTDFGWSQPASEYLALYATLAPRATPMPHLQHWPMRTLARPASPPDTAPVGKPARRRRTTALSTTARAHPVARAAGREKIRA

SEQ ID NO: 34944 - protein, 340 aa, Thiobacillus denitrificans ATCC 25259
MDVFIQFGMAAGIQAIRDSGIEVTEANSDRIGINIGSGIGGLPLIEETHGLLMESGPRKISPFFIPGSIINMISGNLSILYGINGPNLAVVTACTTGLHAVGLSARMIQAGDTDVMIAGGAECATSPLGVGGFAAARALSTRNDDPATASRPWDKDRDGFVLGEGAGVLVLEEYEHAKARGAKIYSEVAGFGMSGDAYHMTAPSTDGPRRSMVNAMRDAGLNPDQIQYINAHGTSTPLGDKNETEAIKLALGDAAYKAVVNSTKSMTGHLLGGAGGVESVFSVLAVHHQVSPPTINIFSQDPECDLDYCANTARDMKIDAALKNNFGFGGTNGSLVFKRV

SEQ ID NO: 34945 - protein, 431 aa, Clostridium thermocellum ATCC 27405
MSISEMAFQVKEASIRLAAAGTELKNKALENIARLLMERKDEIIKANNEDLQRSREEKLAEPLLKRLKFDEAKIVDVIDGINSLIKLEDPVGKTLLSTELDEGLELYRVTCPIGVVGIIFESRPDALVQISTLCLKSGNGVLLKGGSEARETNKILAQIITEATEEVGIPPNWIKLLETRADVNEMLKMDKYIDLIIPRGSNEFVRYIMDNSRIPVMGHADGICHCYIDEDADIDMAIRIVVDSKTQYVAVCNATETLLVHKNIAPKVLPELKRALDSKNVELVGCSETQKIIPVAPATEEDWRTEYLDYKLSVKVVGDLEEAIEHINTYGSGHTDSIITNSKEKAAAFMSLVDSGNVFWNCSTRFSDGFRYGFGAEVGISTSKIHARGPVGLDGLLIYKYKLIGNGHIVEDYAKRTKSFKHNKMNKQFPL

SEQ ID NO: 34946 - protein, 138 aa, Oryza sativa (japonica cultivar-group)
MAEETPVEAPPAPVLGEPMDLMTALQLVMKKSSAHDGLVKGLREAAKAIEKHAAQLCVLAEDCDQPDYVKLVKALCAEHNVHLVTVPSAKTLGEWAGLCKIDSEGKARKVVGCSCVVVKDFGEESEGLNIVQDYVKSH

SEQ ID NO: 34947 - protein, 475 aa, Pseudomonas aeruginosa PAO1
MSKVVLASQLPNKRNASLAPGLKQRHVTMLSIAGVIGAGLFVGSGHAIAAAGPAALLAYLIAGTLVVLVMRMLGEMAVASPDTGSFSTYADRSIGRWAGFTIGWLYWWFWVLVIPLEAIAAAAILNAWFPAIDTWIFALAVTFLLTVTNLFSVARYGEFEFWFALLKVIAIIAFIVLGAVAIVGGLPEREVSGLSSLMASHGGFVPNGYGAVLGALLTTMFSFMGTEIVTIAAAESKDPAKQITRATNSVIWRIGLFYLVSIFIVISIVPWNDPLLIQVGSYQRALELLDIPHAKLIVDLVVLVAVASCLNSAIYTSSRMVFSLAKRGDAPSVLKLTNTAHVPRPAVLASTAVGFLTTIVNYFAPEKVFTFLLASSGAVALLVYLVIAVAQLRMRKQLQASGQPIEFRMWLYPWLTWAVILFIVAALSIMLIMPEHRHEVFATALLTIFTVCLGLLNARRKPRLGEDYAGKTARV

SEQ ID NO: 34948 - protein, 84 aa, Arabidopsis thaliana
  misc_feature (35)..(35): Xaa can be any naturally occurring amino acid
  unsure (1)..(84): unsure at all Xaa locations
MGGGFRVLHLVRPFLAFLPEVQSADRKIPFRGERXSYTVISLFIFLGCSQLPLYGIHSTTGADPFYWMRVILASNRGTVMELGI

SEQ ID NO: 34949 - protein, 375 aa, Ralstonia eutropha JMP134
MTATPYPILLTPGPLTTSDRTRAAMLRDWGSWDTDFNAITARIRQQVLAIVHGDDTHECVPLQGSGTFSVEAAIGTLVPRDGHVLVPVNGAYCQRIAKICKTLGRRLSTIDYAEDRPMRAADIDRQLAADSTITHVAVVHCETGTGVLNPLDEIAQVVARHGRGLIVDAMSSFGAIDIDARTTPFDAVIAASGKCLEGVPGMGFVIARRTALERCEGNSHSLSLDLYDQWKYMERTTQWRFTPPTHVVAALDQALQQYVEEGGLPARGARYASNCQLLVDGMETLGLKPYLERKVQAPIIVTFHAPADPRYDFKTFYQAVKQRGYILYPGKLTEIETFRVGCIGHFGDAGIPGAVKAIGEVLAGMGVEIGMTVAA

SEQ ID NO: 34950 - protein, 485 aa, Zygosaccharomyces rouxii
MTVSKKDSGKTSPGNIVVVSNRLPVTISKNAMGKYEYKFSSGGLVTALQGLKKTSTFQWYGWPSLEIPDDEKPVVKKDLLEKFNAIPIFLSDEIADLHYNGFSNSILWPLFHYHPGEINFDENAWLAYNEANATFASEICGNLQDNDLVWVHDYHLMLLPEMLSAHIQRKGLKNIKLGWFLHTPFPSSEIYRILPVRQEILNGVLSCDLIGFHTYDYARHFLSSIQRCLNVNTLPNGVEYQGRFVNVGAFPIGIDVDTFKEGLQKENVKQRIRTLQERFKGCKIMVGVDRLDYIKGVPQKLHAMEVFLNEHPEWIGKVVLVQLAIPSRGDVEEYQYLRSVVNELVGRINGQFGTIEFVPIHFMHKSIPFEELISLYAVSDACIVSSTRDGMNLVSYEYIACRKKGSLILSEFTGAAQSLNGALIVNPWNTDELSDSINEALTLPDEKKDSNWEKLYKYISKYTSAYWGENFVHELNATGTIKTGQ

SEQ ID NO: 34951 - protein, 484 aa, Ustilago maydis 521
MGQTLSEPVVKKTTSSGGNDSVLYAISEMQGWRISMEDSHTTILDIKNEDGDIVGNFFGVFDGHGGATVAQYCGRNLHNTLLSEDKFKQGDYTEALQQTFLDVDEELKKDPNYTSDPSGCTAVTAFIKTTAKDPKRVEKIFVANAGDSRCVLSQAGNCIEMSNDHKPTLDSERERIEYAGGYVSWGRVNGNLALSRAIGDFEFKRTFDLPVERQIVTAFPEVLDREVLEAEDEFLVLACDGIWDCLSSVKVVDIVRRSIANGKELADICEDLMDRCLAPDSDTGGIGCDNMTVCIVALLNGRSKDEWYSWIKDNIEVPKFGRTTPKEVPPVFSNTQTSTRGQETGMEGAVSIQSLLSGGLARGENGEQGAAGALQLPGGLAGALSGAGIVFRPGGRSDEGEVVYEAHVVDEEDSGDEQPDQSSSESAPKASTTEKATDGDAAEPRLVESPHTDAKPASSNQESDKMEVDDDTNTSAKSQDASNA

SEQ ID NO: 34952 - protein, 405 aa, Ustilago maydis 521
MQISSSVLQQRPILLSGHERSLTQVKFNREGDLLFSVAKDPIINAWFSHNGERLGTYEGHNGTTTLLTLPACLARPVRIHFNSPHIADTLILRFACLYSIISHLETLTSDDSTLHSRASATSTLLVSGSADNQMRLWEVATGKCLFTWEFTTAAKRVAFSEDCSQVLVVTEQRMGFRGSLRVFRINRDPATWTQQDVEPTRTITFSGPKAVVAAFAPCDQYIVTGHEDGKVAIYYHDDKEPESGIDAELEENSTKAHTDVISDLQMSADRTYFVTSSRDKTSKLIDSKTLQVIKTYATETPLNSASIHPTKPFVIVGGGQDAMNVTTTSARQGRFETRFWHKVFEEECARLPGHFGPINTIAIHPAGIAYASGGEDGYVRVNWFDPGFFNSKLYGADLELALEDQ

SEQ ID NO: 34953 - protein, 280 aa, Carboxydothermus hydrogenoformans Z-2901
MQDEILNLKLIANQLRQHVVKMVGEANSGHPGGSLSAADILAVLFFKEMRIDPANPKWQDRDRFVLSKGHASPVLYAALAERGFFPKEWLSQFRKINSPLQGHPDMKKVPGVEMSTGSLGQGFSTAVGMALGLKLDRSPARVYVLLGDGEIQEGIVWEAAMAAAHYKLNNLTAILDYNGLQIDGPVQEVMNPEPVADKWRSFGFKVITVDGHNIPEIINAIDAARLHLEGPTIIIAKTVKGKGVSFMENRVEWHGSAPKPEQVAEALSELQVGREKLWEE

SEQ ID NO: 34954 - protein, 501 aa, Zea mays
MWKQLLSKLPRKSPACGDSGQCSNGTGIQRTSSCGSIPPGRPASAIRRMSSAVFPSSVVAGIEPLVSFKDVPNSEKQNLFVSKLSLCCVVFDFSDPNKSSVEKDIKRQALLDLIEFVESTNARFSEAAIAACSRMCAINLFRAFPPSCRSGSSGGGEGDEEEPMFDPAWCHLQLVYELLLKFIGSSSLDAKVGKKHFDHSFIVKLLNLLDSEDPRERDCLKTILHRVYGKFMVHRPFIRKAVSNIFYQFVFETDRHNGIAELLEVFGSVISGFALPLKEEHKIFLWRVLIPLHKPKSVGVYLQQLTYCVTQFLEKDPKLASSVIIGLLRYWPITNCQKEVMFLSEIEEILESTSQAEFQKCMVPLFRRIAHCITSSHFQVAERALFVWNNDHIISLIAQNRQVIMPLVIPALEQNIQNHWNQAVLNLTVNVKKMLSEMDDDLFSSCLAKYKDEEEKRVSLEAKRRLTWEKLESAAAFQPVTGHTAVLVGHRPSANLIATMI

SEQ ID NO: 34955 - protein, 1096 aa, Aspergillus niger
MDGDDLIASVYRKIEREKALITAASNMRQSTDNPLVQQRVDANIRDGRKNIAYLEEKMRELQLRRMEHEGGGSPTDKRLPPNPEAGPVPPQKDYGPGYGGNEEYGDASGAYPHGGAGSMPSGAPYADPRPFAPVPKARPNYTKLDLIKYDTQYLGPKIQLMLSQLEFKLSVEKQYKAGIEKMVRLYQDEGDRKSRADAEGRRIESNQKIQLLKQALKRYEDLHVDIESTDTPDDESLSTPNLRKPLTGLLTLRIHAVKDVDHAASSRFSRGPETFIVLKVEDTIKARTKATRIDRWQDETFNIDIDKANEIELTVYDKSGDRPTPIGMLWVRISDIAEEMRRKKIESEFNASGWVSADKMEHGGAPGRPDTAGGAGSAHPSGPGGPGAAPSQGYGDGSAGAPAGNQVMIDSWFALEPVGRIYLSMSFAKQLKDRRPFDIGLNRQGAVRQKKEEVHEKQGHKFVTQQFYNIMRCALCGDFLKYAAGMQCADCKYTCHKKCYPKVVTKCISKANYETDPDEEKINHRIPHRFEGFSNISANWCCHCGYLLPFGRKNAKRCTECGLTCHSHCTHLVPDFCGMSMEAANQILETLIRTKNHNKTASVSSGLSGRTLRPSGTPQGPQDSAAMAYPQKPVESPYGAPQRQPSAEAVSAATNSYMPPQSPTAAARQQMPPRTSSSAAVAAATVATGMPSPQQMPAEQNRPMQPQLPTYDPKAYEPYANAPQGMPPQAIQHAAPAGYGMPAQQPAMQMVSQQPPEAPQQPKVRIGLDHFNFLAVLGKGNFGKVMLAETKSTKRLYAIKVLKKEFIIENDEVESTKSEKRVFMIANKERHPFLLNLHACFQTETRVYFVMEYISGGDLMLHIQRGQFGLKRAQFYAAEVLLALKYFHENGVIYRDLKLDNIMLTLDGHIKVADYGLCKENMWYGATTSTFCGTPEFMAPEILLDKRYGRAVDWWAFGVLIYQMLLQQSPFRGEDEDEIYDAILADEPLYPIHMPRDSVSILQKLLTREPELRLGSGPTDAQEVMSHAFFRNINWDDIYHKRVPPPFLPQISSPTDTSNFDQEFTSVTPVLTPVQSVLSQAMQEEFRGFSYTADFA

SEQ ID NO: 34956 - protein, 1139 aa, Hypocrea jecorina
MNEDEAIQNITKKIEREKALINAANAMRSQTNNEAVRSPLDSQMRDGRRNLQFFEEKLRDIQLRKVGQGVEGMSLGADDAGRPPPPPKDASSAAWGDQAAYGQQSQVGPPSDLAPPRHNFGAPGPGAASKARPNFTKLDLIKYDTPYLGPRIQHMLSQIQFKLNVEEQYLKGVEKMVQLYGMEGDRKSKADAAARRVESKQKILLLKQALKRYEELHVDMDSADAQDDDSINTPNLRKPLSGQLSIRVVAIKDVDHATTGRFARGPETFVAVKVEDTVMARTKVSRNDRWEAEYHNMEVDKANEIELTIYDKPGEHPMPIAMLWVRISDIVEEMRRKRIEAEMNSSGWVSADRMGSTGAPSQFPMSPTSGSFGGSPQAPGGGQGQAPGPFGDPAPQPQVVTGPIDGWFNLEPAGQIQLEFSFVKENRDKRQVDLGLGRKGAVRQRKEEVHEMFGHKFVQHQFYNIMPCALCGDFLKYSAGMQCEDCKYTCHNKCYPSVVTKCISKSNAETDPDEEKINHRIPHRFQPFSNVTANWCCHCGYILPFGKKNCRKCSECGLTSHAQCVHLVPDFCGMSMAVANQILEGIRVQKQRQQKTTSLSEKTLRSGATKSPTTAGHGSSASFSSAGAGSVPGTPSAEATEAARLMYNQTSPQRPGQPGRAPSDLSAAAAASAAMAAAQGRTGYDSGPQDPYGQGHYGAAGPAPQHHKYNPADYANVDQGFPAQPPAQQRPPQPQQQQQAPPAQMPPQQPPPQQPLPPQPGQQYQQQQPAAQKPQPQPPATAQGAAAGPPGSQRKALPSATDPGTGARIGLDHFNFLAVLGKGNFGKVMLAETKRSKRLFAIKVLKKEFIIENDEVESIKSEKRVFLIANRERHPFLTNLHACFQTETRVYFVMEYISGGDLMLHIQRGQFGTKRAQFYAAEVCLALKYFHENGVIYRDLKLDNIMLTLDGHIKIADYGLCKEDMWYGSTTSTFCGTPEFMAPEILLDKKYGRAVDWWAFGVLIYQMLLQQSPFRGEDEDEIYDAILADEPLYPIHMPRDSVSILQKLLTREPDQRLGSGPTDAQEVMSQPFFRNINWDDIYHKRVQPPFLPQIKSATDTSNFDSEFTSVTPVLTPVQSVLSQAMQEEFRGFSYTADLD

SEQ ID NO: 34957 - protein, 170 aa, Oryza sativa
  misc_feature (121)..(121): Xaa can be any naturally occurring amino acid
  unsure (1)..(170): unsure at all Xaa locations
MALVEGNNGVSGGAVSFSEEQEALVLKSWAIMKKDSANIGLRFFLKIFEVAPSASQMFSFLRNSDVPLEKNPKLKTHAMSVFVMTCEAAAQLRKAGKVTVRDTTLKRFGATHFKYGVGDAXHFEVTRFALLETIKEAVPVDMWSPAMKSAWSEAYNQLVAAIKQEMKPAE

SEQ ID NO: 34958 - protein, 506 aa, Deinococcus radiodurans
MPATSMEELVSLCKRRGFIFQGSEIYGGLQGFYDYGPLGVELKNNIKAAWWRSNVYERDDMEGLDASIIMHRMVLRHSGHEATFSDPMIDNKKNNKRYRLDHLLKDQKADVQAKVAEIMGESADNFAALVAALNAKPAQASAAFKEAGVRDPFSGEVGEWTDPKPFNMMFRTTIGPVADEESYGYLRPETAQGIFTNFKNVVDSTSRRLPFGIAQIGKAFRNEITPRNFIFRVRELEQMEIEFFVTPGTDEEWHEHWLEKRLKWWEDQGVPREKIEILDVPKEDLAHYSKRTYDLMYDYPTLGHEEIEGIANRSDYDLGSHTKSQSELGLVAKVEENNDSIAKLTIPHPETNKPVVPFVIEPSAGVDRAMLAVLSEAFTKETLENGNERIVLKLKPHLAPIKVAVIPLARNREEITDVAKAIKAELQGLGLGRVLYEDSGNIGKAYRRHDEVGTPYCVTVDFDTVGLGENTDESLKDTVTVRDRDTLAQERVKISELAGWIQAKLR

SEQ ID NO: 34959 - protein, 448 aa, Pseudomonas aeruginosa PAO1
MNQPLNVAPPVSSELNLRAHWMPFSANRNFQKDPRIIVAAEGSWLTDDKGRKVYDSLSGLWTCGAGHSRKEIQEAVARQLGTLDYSPGFQYGHPLSFQLAEKIAGLLPGELNHVFFTGSGSECADTSIKMARAYWRLKGQPQKTKLIGRARGYHGVNVAGTSLGGIGGNRKMFGQLMDVDHLPHTLQPGMAFTRGMAQTGGVELANELLKLIELHDASNIAAVIVEPMSGSAGVLVPPVGYLQRLREICDQHNILLIFDEVITAFGRLGTYSGAEYFGVTPDLMNVAKQVTNGAVPMGAVIASSEIYDTFMNQALPEHAVEFSHGYTYSAHPVACAAGLAALDILARDNLVQQSAELAPHFEKGLHGLQGAKNVIDIRNCGLAGAIQIAPRDGDPTVRPFEAGMKLWQQGFYVRFGGDTLQFGPTFNARPEELDRLFDAVGEALNGIA

SEQ ID NO: 34960 - protein, 458 aa, Burkholderia sp. 383
MQSNTVHPCDEVLPTGKLVTLGLQHVLVMYAGAVAVPLIVGAALKLPKDQIAFLISADLFSCGIATLIQTLGLWVFGIRLPVIMGCTFAAVGPMIAIGTNPGLGILDIFGSTIAAGIIGIVLAPMIGKLLRFFPPVVVGTVIAVIGLSLMEVGINWAAGGVGNPEYGSPVYLGLSLLVLTLILLINKYGRGFIANISVLLGIVAGFAIAFAIGRVNTDGVAHAPWVGFVMPFHFGLPHFDPLSIVTMVTVMFVTFIESTGMFLAVGDMVDRPVNQERLVRGLRVDGLGTLIGGIFNSFPHTSFSQNVGLIGVTGVKSRFVCATGGVILVLLGLFPKMAQVVASVPPFVLGGAGIVMFGMVAANGIKVLSKVDFVNNTHNLFIVAVSVGMGLVPVVSPHFFSKLPPALAPILHSGILLASATAVILNIVFNGVKGEKDARCDIRRAGHDFDGRPADVHH

SEQ ID NO: 34961 - protein, 65 aa, Glycine max
  misc_feature (42)..(42): Xaa can be any naturally occurring amino acid
  unsure (1)..(65): unsure at all Xaa locations
VHGGVQISELSKYTVRDLVFEDGKSLQDLSRVVSDACICLQXNDNAYDVISSDCGKRVNVLPTGN

SEQ ID NO: 34962 - protein, 126 aa, Brassica napus
MAGKSHTRKAFLLCNYVLMGAASSCIFLTLSLRLLPSPCGLLLLFLHALTAVFSAAGCSGSFTAPATPAQWHNAHTAGAALTAIFQGAVALLAFTRTSDFLAELQSYVRDEDGAVILPRRGRRHPQ

SEQ ID NO: 34963 - protein, 460 aa, Yarrowia lipolytica
MGKEKTHVNLVVIGHVDAGKSTTTGHLIYKCGGIDKRTIEKFEKEADELGKGSFKYAWVLDKLKAERERGITIDIALWKFQTPKYYVTVIDAPGHRDFIKNMITGTSQADCAILIIAGGVGEFEAGISKDGQTREHALLAFTLGVKQLIVAINKMDSVKWSQDRYNEICKETANFVKKVGYNPKSVPFVPISGWNGDNMIEASTNCDWYKGWTKETKAGEVKGKTLLEAIDAIEPPVRPSDKPLRLPLQDVYKIGGIGTVPVGRVETGVIKAGMVVTFAPANVTTEVKSVEMHHEILPDGGFPGDNVGFNVKNVSVKDIRRGNVAGDSKNDPPNGCDSFNAQVIVLNHPGQIGAGYAPVLDCHTAHIACKFDTLIEKIDRRTGKKMEDSPKFIKSGDAAIVKMVPSKPMCVEAFTEYPPLGRFAVRDMRQTVAVGVIKSVEKSDKAGGKVTKAAQKAAKK

SEQ ID NO: 34964 - protein, 598 aa, Neurospora crassa
MDNTNRPHLNLGTNDTRMAPNDRTYPTTPSTFPQPVFPGQQAGGSQQYNQAYAQSGNYYQQNHNDPNTGLAHQFAHQNIGSAGRASPYGSRGPSPAQRPRTSGNSGQQQTYGNYLSAPMPSNTQTEFAPAPERNPDKYGPNANNNQKKCSQLASDFFKDSVKRARERNQRQSEMEQKLGETNDARRRESIWSTAGRKEGQYLRFLRTKDKPENYQTIKIIGKGAFGEVKLVQKKADGKVYAMKSLIKTEMFKKDQLAHVRAERDILAESDSPWVVKLYTTFQDANFLYMLMEFLPGGDLMTMLIKYEIFSEDITRFYIAEIVLAIDAVHKLGFIHRDIKPDNILLDRGGHVKLTDFGLSTGFHKLHDNNYYTQLLQGKSNKPRDNRNSVAIDQINLTVSNRAQINDWRRSRRLMAYSTVGTPDYIAPEIFTGHGYSFDCDWWSLGTIMFECLVGWPPFCAEDSHDTYRKIVNWRHSLYFPDDITLGVDAENLIRSLICNTENRLGRGGAHEIKSHAFFRGVEFDSLRRIRAPFEPRLTSAIDTTYFPTDEIDQTDNATLLKAQQAARGAAAPAQQEESPELSLPFIGYTFKRFDNNFR

SEQ ID NO: 34965 - protein, 549 aa, Zea mays
  misc_feature (51)..(51): Xaa can be any naturally occurring amino acid
  misc_feature (67)..(67): Xaa can be any naturally occurring amino acid
  misc_feature (132)..(132): Xaa can be any naturally occurring amino acid
  unsure (1)..(549): unsure at all Xaa locations
MYTLPVRPTTSSIVASLATPAPSSSSGSGRPRLRLRLIRNAPVFAAPATVXCKRDGGQLRSQTREIXRERKGGHPPAAGDKRGGERGQRRGGEEEENEQLPLPSEKKGGASEGEAVHRYPHLVTPSEPEALXQPPPPPSKASSKGMDPTVERLKSGFQKFKTEVYDKKPELFEPLKSGQSPRYMVFACSDSRVCPSVTLGLQPGEAFTVRNIASMVPPYDKIKYAGTGSAIEYAVCALKVQVIVVIGHSCCGGIRALLSLKDGAPDNFHFVEDWVRIGSPAKNKVKKEHASVPFDDQCSILEKEAVNVSLQNLKSYPFVKEGLAGGTLKLVGAHYDFVKGQFVTWEPPQDAIERLTSGFQQFKVNVYDKKPELFGPLKSGQAPKYMVFACSDSRVCPSVTLGLQPGEAFTVRNIAAMVPGYDKTKYTGIGSAIEYAVCALKVEVLVVIGHSCCGGIRALLSLQDGAPDTFHFVEDWVKIGFIAKMKVKKEHASVPFDDQCSILEKEAVNVSLENLKTYPFVKEGLANGTLKLIGAHYDFVSGEFLTWKK

SEQ ID NO: 34966 - protein, 406 aa, Myxococcus xanthus
MSADAMSAPLPPPPVWRLAQRMSRIKTSAVREILKVAERPDILSFAGGLPAPELFPLEAIAEAHAEALATEGRAALQYSTTEGFGPLREWICGHLQKRGRQSNADQVLITNGSQQGIDLVAKVMLDPGDLVIVENPSYLAALQTFGAYEARFATVGSDDQGMRTDDLERLLATHKPKLVYVVANFQNPKGTTLSLERRRELVRLAQQYRFLILEDDPYGELRFRGEHVPSLSAFYDEGVVVSLGTFSKTLAPGMRLGWVVGPRDFVRSLAIAKQSTDLHTATLAQRAVVKLLARFDYAAHLESLRPVYGERAQAMLDALQAHMPAGTQWTHPEGGMFLWVELPGGLDAQALLPKAVEQKVAFVPGAPFYANNPRPEFMRLNYSNRPPDLIAEGMRRLGAVIAAELG

SEQ ID NO: 34967 - protein, 668 aa, Shewanella sp. MR-7
MKLIYTDSLVVGAGLAGLRVAIASKERGLDTLVLSLIPAKRSHSAAAQGGMQASLGNAVKGMGDDEDVHFQDTVKGSDWGCDQEVARMFAHCAPKAVRELANWGVPWTRVTAGPREVIVNAQKVTLQEAEEAHGLINARDFGGTKKWRTCYTADGTGHSLLYAMDNKAISLDIPVHERVEALAIIHDGQRCHGVIARCLITGELRAYVAKSTTIATGGYGRIYEVSTNAIICEGIGQALALETGVATLGNMEAVQFHPTAIVPVGILTTEGCRGDGGLLRDKDGYRFMPDYEPEKKELASRDVVSRRMTEHMRKGKGVDSPYGPHLWLDITLLGRKHIETNLREVQEICENFLGIDPAKDWIPVRPTQHYSMGGIRTKATGESPQLKGLFSVGEAACWDMHGFNRLGGNSLAETVVGGMIIGKYVADFCENNSLEIDTQLAEKFMRQVQTEIDTLVDGEGHESPFELKREMQRIMMDYVGIFRNGPELDKAVTELKVLLERSRKLGVKCKKRHANPELVEALRVKRMLKVALTVACGAAARTESRGAHAREDYPQRNDRDWLNRTLASWPDAEALAPVLSYEPLDVMKMELPPGYRGYGIDNAIVHPDTAKREQQIAEILAGLGDDADRYQRQTALMPFELPPSLQAKNERLSDTLQRPSANALGEKS

SEQ ID NO: 34968 - protein, 456 aa, Oryza sativa
MTPPASTGKCTGAAAGEVEEPLLPEFSGGGHGASVSGAVFNVSTSIIGAGIMSIPAAMRVLGVLPALLLIATVAALSDASVEFMLRYTGWDSGPPSYAGIMGDAFGRAGAKALNVCIAFTTTGTLVVYLIIIGDVLSGSAGAGDEHAGVLQELFGAQWWTARELVILVTAIVVLLPLVLRRRVDSLKFTSAVSILLAVVFMFISLGIAVYALFTGTAKMPRMLPDFSRLSSPFELFTAVPIVVVAFTFHFNVHPIRTELSKTSDMKAAVRISLVLCAAIYAAVGFFGFLLFGDATMADVLANFDRSSGAGVPQALNDAARLSYALHLVLVFPLLHFSLRVNVDELLFPGRRPLATDTRRFVALTAVLMAVLYALAIAIPSIWTLFEYSGSTFAVCISLIFPGAIVLRDAHGIAKTKDKALAATMIALAVITSSIAIASNVMSSISGKVEGGHAAGR

SEQ ID NO: 34969 - protein, 708 aa, Gloeobacter violaceus PCC 7421
MEQQPLGTATPGGKAMAGPQDQPCHDTTAESSSDEEGIGLSECLRLLIDDIEDYTILTLDGQGTIVGRSAGSERLCAGDPLGRHFSCLYAHEDSERGRPTQDLEEARLQGRIALTGWRVRPDGSRFWAEVVLSALRNPDGQVSGYAMVTHDVTAGRLAEERLAGLEQERERLEQLLSGGDADLPTLAAVAQLTNHSVVITDVERRVVWVNAGFTALTGFTLDEVRGHNPGALLQGPQTDPATVMYMRERLQRGEGYTVEILNYGKNGDQYWLAIEVQPVRDGTGKLTHFIAVQRNVTEQRRAGQEHQALLEREQRARELAEQNNRLKDEFLATLSHELRTPLNGILGFAGLLRRGRLDTETARRAVEIIERNAQAQAQLIEDLLDMSSIAAGTFNLQVQPVEMAEVVSAAVAGQRIAAEAKRIRLELRLDPHAGLVSGDRRRLLQVVANLLSNAVKFTPPDGRIEVSMRCVANAVAIAVADTGVGIGPEFLPYVFDRFRQADGSSTRLHGGLGLGLSLVRHIVETHGGSVQVQSLGKSQGATFTVCLPLMPVRIGKIESPPDAAEVFPAEELPPEAADWLAGLRVLVVDNDLQARRAIQQVLHGCKAEVMTAESASAALGLLERLRPDVLIVDLGVGGTEGYALLEALHAQNQFLPVLALTACATARDRARAFLSGIDAFLNKPAEPIELVALVANLGRRSERYRATT

SEQ ID NO: 34970 - protein, 379 aa, Bradyrhizobium sp. BTAi1
MRLQTACPRGQASRNDGGRSSRSACANIHNGRDRMGNSADRKCRPQCFDAGKIKEADMAVVVHAKAPGGAENLLLETVELPEPRPDEIRLRQTAIGVNFIDIYQRSGLYPLPDRVPGVEAAGIVTAKGSDVTGLSVGDRVAYAGGPAGAYASERNLPAWRAMPLPDSVSDARAASTLLKGITAAMLLGRTYVVGPGTTLLVHSAAGGLGQVLTRLARLRGATIIGTVSSEAKADLARAAGAHHLIVGRDADFVDAVRRWTAGRGVDVAYDGVGGRTLARTLACVRPFGMVASIGQSAGPIPDIAVEELGPRRSLSLARPSVMAHVNDVADYRRDAEIVLAALANGELGGDGTPYPLAQAVQAHLDLESGRSRGALYLVP

SEQ ID NO: 34971 - protein, 132 aa, Brassica napus
MGIQETDPLAQLSLPPGFRFYPTDEELMVQYLCRKAAGYDFSLQLIAEIDLYKFDPWVLPNKALFGEKEWYFFSPRDRKYPNGSRPNRVAGSGYWKATGTDKIISTEGKRVGIKKALVFYIGKAPKGTKGYG

SEQ ID NO: 34972 - protein, 341 aa, Escherichia coli K12
MKALSKLKAEEGIWMTDVPVPELGHNDLLIKIRKTAICGTDVHIYNWDEWSQKTIPVPMVVGHEYVGEVVGIGQEVKGFKIGDRVSGEGHITCGHCRNCRGGRTHLCRNTIGVGVNRPGCFAEYLVIPAFNAFKIPDNISDDLAAIFDPFGNAVHTALSFDLVGEDVLVSGAGPIGIMAAAVAKHVGARNVVITDVNEYRLELARKMGITRAVNVAKENLNDVMAELGMTEGFDVGLEMSGAPPAFRTMLDTMNHGGRIAMLGIPPSDMSIDWTKVIFKGLFIKGIYGREMFETWYKMAALIQSGLDLSPIITHRFSIDDFQKGFDAMRSGQSGKVILSWD

SEQ ID NO: 34973 - protein, 219 aa, Oryza sativa
  misc_feature (208)..(209): Xaa can be any naturally occurring amino acid
  unsure (1)..(219): unsure at all Xaa locations
MAEYKQKLYEIQRRPENRTCFDCNAPNPQWASVSHGIFICLDCSGVHRSFGVHISFVRSISMDKWFDDQLKKMDIGGNKNAKDFFESQPDYSPNMAPLQKYSSRFAALYREKLSAEAEGKSWTPSATSSPVAATPKRAATAATRSLGSQRSNNSSGRSSPAFGNNNYNGSSNGFGSNEPAGLVSEKEKNEQYFATLGQANSNRDASLXXNQGGKFTGFR

SEQ ID NO: 34974 - protein, 377 aa, Vibrio sp. Ex25
MEEEGHKILKLNIGNPAPFGFDAPDEILVDVIRNLPTSQGYCDSKGIYSARKAVVQHYQRKGIRSLDVEDVYVGNGVSELIVMAMQALLNNGDEMLIPAPDYPLWTASVALSGGKPVHYLCDEGADWYPDLEDIKKKITPKTRGIVLINPNNPTGAVYSRDFLLEVIEIARQHKLIIFADEIYDKVLYDGATHTSVATLTEDVLVMTFNGLSKAYRVCGFRGGWMFLTGPKHLAQGYVNGLELLSSMRLCANVPMQHAIQTALGGYQSINELILPGGRLLEQRNRAYELINQIPGVSCVKPKGAMYLFPKIDTKMYNIKNDQQMVLDFLKQEKVLLVQGSGFNWPKPDHFRIVTLPHVEDLEIAIGRFERFLSTYSQ

SEQ ID NO: 34975 - protein, 150 aa, Brassica napus
MAMELELDDDVFYADISKQINLLITDEDEQNPISLSSPISFQGLFRENYQASATPYMMYHEQNYNQVKESKGTGVFIPRCSQPRRRQHNHPHQKKQGRFGSLTPKQQYPHHVYDNNNNSRTFNNVESITLHHAASTNQRRTYRDAASLFT

SEQ ID NO: 34976 - protein, 160 aa, Wolbachia endosymbiont strain TRS of Brugia malayi
MLKKLAWYWSFVELIKGFIITLRYAFKPKVTLKYPMEKGPLSPRFRGEHALRRYSNGEERCIACKLCEVICPAQAIVIEAEEREDGSRRTTRYDIDMTKCIYCGLCQEACPVDAIVEGPNFEFATETREELMYNKEKLLRNGEIWEEAIALRLKKDVSYH

SEQ ID NO: 34977 - protein, 314 aa, Prochlorococcus marinus str. MIT 9312
MQNKYLIKASKKFWFWFWMQLMNGFAPSDIQGNYKRPLGITINSEYDINNENGEICLLVGNSCPWCQRTLLVHKIKQLSKEVKVVFLKADVEHGEWIFNKNFKGCTRLSDLYKKANKKIIFRATLPLLISFVKDKVNIISNESSQIIRLLNSIESKSKDNILTIKDCNQKILDLIHNNINDGVYKCGFARNQSAYEKASKNLFAALNEIEDTMSRNKGDWIFGEELTYADIYLFPTLIRWELIYSKLFKCTEQELSYFEEIIEWRLKFFKISNVDKTCFDNEWKKDYYKALFPLNPNQIIPVLPSLREIIRSES

SEQ ID NO: 34978 - protein, 133 aa, Glycine max
IDCIWCGLAGCITTKELGTVMRSLGQNPTEAELQDMINEVDADGNGTIDFPEFLNLMARKMKDTDSEEELKEAFRVFDKDQNGFISAAELRHVMTNLGEKLTDEEVDEMIREADVDGDGQINYEEFVKVMMAK

SEQ ID NO: 34979 - protein, 413 aa, Bacillus cereus ATCC 14579
MGYYDGPNLNEEHSETREVRKSGSKKGYFFTGLVGAVVGAVSISFAAPYMPWAQNNGAPVSSFSSDSKVEGTVVPVVNKAKNETDLPGMIEGAKDVVVGVINMQQSVDPFAMQPTGQEQQAGSGSGVIYKKAGNKAYIVTNNHVVDGANKLAVKLSDGKQVDAKLVGKDPWLDLAVVEIDGSNVNKVATLGDSSKLRAGEKAIAIGNPLGFDGSVTEGIISSKEREIPVDIDGDKRPDWQAQVIQTDAAINPGNSGGALFNQNGEIIGINSSKIAQQEVEGIGFAIPINIAKPVIESLEKDGVVKRPALGVGVVSLEDVQAYAVNQLKVPKEVTNGVVLGKIYPISPAEKAGLEQYDIVVALDNQKVENALQFRKYLYEKKKVGEKVEVTFYRNGQKMTKSATLADNSATKNQ

SEQ ID NO: 34980 - protein, 454 aa, Staphylococcus sciuri
MKKFDVVFIGSGHAAWHAALTLKHAGKSVAIIEKDTIAGTCTNYGCNAKILLEGPYEVLEEASHYPQIIESDQLHVNWENLMQYKKAVINPLSNTLKSMFEQQGIEVIMGAGKLVDAHTIDVEGTPIQADNIVIATGQHSNKLDIEGSALTHDSRDFLSLDKMPNNITFIGAGIISIEFASIAIKSGAEVHVIHHTDKPLEGFNEKHIAKLIHKLESEGVQFHFNENVQSVQQAGNSYNVTTESGLSIDTEYVLDATGRKPNVQNIGLDELGIEYSEKGIRVDDHLRTNIHNIYASGDVLDKTIPKLTPTATFESNYIASHILGINPNPIQYPAIPSVLYSLPRLSQIGVTVKEAEDNEAYTIKDIPFGKQMVFEYKNEIEAEMTIILNADKQLVGAEIYADDAANLINLLTFIVNQKLTAKDLNQLIFAFPGSSSGVLDLLKSCYDVIYKKQR

SEQ ID NO: 34981 - protein, 476 aa, Burkholderia vietnamiensis G4
MSKEFDVVVIGAGPGGYIAAIRAAQLGKTVACIEKWKNPAGALKLGGTCLNVGCIPSKALLASSEEFENTSHHLADHGITVDGVKIDVAKMLGRKDAIVEKMTSGIEFLFKKNKITWLKGHGKFTGKTDAGVQIEVSGEGEAEVVTAKNVIIATGSKARHLPNIPVDNKIVSDNEGALRFDSVPKKLAVIGAGVIGLELGSVWRRLGADVTVLEALPAFLGAADEALAKEAAKLFKKQGLDIHLGVKIGDVKTTENGVSIAYTDKDGNAQTLDADRLIVSVGRVPNTDNLGLEAIGLKANERGFIDVDDHCRTAVPNVYAIGDVVRGPMLAHKAEDEGVLVAEVIDGQKPHIDYNCIPWVIYTYPEIAWVGKTEQQLKAEGREIKSGKFPFSINGRALGMNAPDGFVKMIADAKTDELLGVHVIGANASDLIAEAVVAMEFKAASEDIARICHPHPSMSEVMREAALAVDKRSLNS

SEQ ID NO: 34982 - protein, 291 aa, Trichodesmium sp. IMS101
MWEYTEKVMDLFYNPQNQGTITDKKEGEKIVSGEVGSIACGDALSLHLKVNEASGEILDAKFQTFGCASAIASSSALTAMLKGKTIDEAMNIKNQDIAGYLGGLPEEKMHCSVMGQEALEAAIFKYKGIEVEVHEEDDEGSLVCSCFAITENKIKRVILENNLKTAEEVTNYVKAGGGCGSCLADIDDLVASVYEAPDTTTQQIPTTTKPATNLTNLQKITLIQQVLQQEVRPVLAEDGGDVELFDVDGDRVLVKLKGACGSCSNVLVTLKGAIEATLKERVSESLVVEAV

SEQ ID NO: 34983 - protein, 2500 aa, Sinorhizobium fredii
MTVEIIGRACLAPGAQSPQALFKILRQGMCTVSSVPGDRWDLARFWHPVMGTPGKTYSFAAGVLDTIYDFDPAVFGMSQREAMYMDPQQRVLLQLAWRALEDANISVASLHGENVGVYIGASSLDHANLTVEDPAAAGPYFMTGNTLSIVSNRISHVFGLSGPSMTVDTACSSSLVALDQAMRALNAGEIDTAIVGGVNILAHPLPFVGFAQARMLSPEGLCRAYDNDGAGYVRAEGGVVFVLRRSDRARRERDRSYARIVASGTNSAGRTNGISLPSREAQANLLKAIYEGNGIDANQVAFVEGHGTGTKVGDPAEVWSIGTVIGARRRAPVPIGSIKSNIGHTEPASGLFGMMKAVLALEHNYLPASLHFDTPNEHIDFEGLNVRVTANPIELLKGKRARLAGINSFGFGGANAHVVISDPDPVQQEKASAASSGHVFLASAHTQSSLENLLKDYKGSFANASKEETRAIIAASGANRTHMRHRFAARSDHPEDIVRAIASHLDNPGSDIGEVGEAPVKNAQVAFVFSGNGSQWAGMGADAFRENLHFRQSFTSVSALFKFHSDIDLKDLLTDPELDKKLADTKIAQPLLFAIQAALSDSLVAMGVKPAAVFGHSVGEIAAAYAAGALTLVDAVSIVAKRSLHQDLLAGQGTMAAVMLGEEAAAAFAEARGLDEVCVAAVNAHNSVTISGPAHEVTAFRDAARKAKIPVQILDINYPFHHPIIDQAKEAFLADIPDIAPRRTELTYLSTVTGSALDGTELDPDYWWKNVREPVRFQAATDAALALGCRLFIEISPRPILASYVKETIKQAAAPATVVATLLRDAAEKGQDPISASMARAVAHGAAVDRPRAYGKRDAFIELPSLPFEPVELRPQATTDATDLFGRSSKPYRLTGWRGDPNSGSWKNHVDAHLFPDLAEHVVDGKAILPGSGFIEIAVSAAQQYYGSDEVEITNLEIVRPLELSDSRIMELSTILSPETGDIEIRSRERLSEDDWTVHAVARSRKPIAGANARHPSISGLAKTGIVTPAKAYDTAKQFGLDYGPHFQLLAKAVAYGDRLIEVELKAPTGSGHPLVTYALHPISVDATFHGLVALFDRFTGEKGGAPYIPVRFGSVRVVNAGRPIARATIEIERVSANSIKARFHFYDAAGEPIAHFDDCRFRRTYLRKHKTLDGLSFHYETVLSDVILPGAKLAGTVPAKLSEPADAGTGVDNATLLFNAAIYRACHEIALKLARGKSTIQGNGLPGDFAFQCFLTNCLYALEDAGLCEHQNGNWKVAPEFTLPTVAEILGELYGERPDRAVEAVLINNAHAEALSRLATLLAGTADGEAAAFNAGFISEATLDHQAVHSVSSRSRMDQVLGMVERALAAQVRGARLRIVELGSVSAGFTRRLADLAARHGTTLSVVEPRDNAQRNLEIAFEEEAHVRILKKSEFAAIGPFDLAVSASDNLYQLVEEEAGIRTALRSTLRENGALVAAVSAPSIFSDFALGLSEGWFERSQTAEFPIGKRAAVSHWQKCLADLELSDVSVSDCECPHGNAILIEARGTAGAARPPASHAGGIPYLLIETDVRRSSAPAGAIPVAASGDLAADIAVLGTAIDGLGEKPVRAVFVSATADHIGDDDSALLQTHVLALSAFAEALKQRAGNAELVGEARPRLVLVAPGGGPVSESASSGVNSGLWTFVRVLQNEYEFLDVHSLDLADRTASYEEMLASALPLLAIEGSNREWLLDRATGLVSEIRAVSGPAAKSEGKISAFSAATIRQRVSSQVSSITWEETDVPRAGPGEIVVSVAATGLNFRDVMWAMGLLPEEALEDGFAGATIGMELSGHVVEVGEGVDDLAVGDAVMAIASAAFSTHAVVSRAGVAKLPQTISPVAAATLPVAFLTAYYAMVELGRIRSGETILIHGAAGGVGLAALQVAKLKGAKVIATAGTREKRRFLTMLGADHVFDSRSLGFVNDVRAVTGGEGVDLVLNSLFAEAMEQSLALVKPFGRFLELGKRDYYADSKIGLRPFRRNVSYFGIDADQLLVNQPELTKRIFMEIGELFDQGRLTPLPYRAFDFDEIGNAFRLMQNAGHIGKIVVLPPVAGQHEIAAKPRRGMKVDPDGMHLVVGGIGGFGLVAANWLVEKGARNIALCSRRGQPDAATSAMVDRWKKAGVAASLHACDVTDAAAVEALLASLRAQAPLRSIVHAAMVLDDALISNLTHERNRPVIDVKAKGAAILDRLTRQDALDNFILFSSATTLVGNPGQANYVAANGYLEGLARARRAAGLAGLAVGFGAIADAGYLTQNADVNDLLAKRIGKTALKAHVALDMVESHIAADPGGVDAAVVMISEIDWGAARNLPVARNALFEVILRSADQHASGTEGTKMDLVAMIEGKSPQEAEDILFDLVAGEIAAILRVAKDTVTRSKILKEIGLDSLMAVELGISFQQNTGFDMPLSGVADNTTVGDVARKLYEKVSKRDQSDDGEAGDDKLVTELTQRHVGAAKEKALSQ

SEQ ID NO: 34984 - protein, 494 aa, Burkholderia sp. 383
MNTRFLARGAVAVAVAAALSAGYVAGTRRADPQIITPAQAAALMPAEAAAKTGIPDFSGLVETYGPAVVNISAKHVVKQVSRRVPQPQLPIDPSDPFYQFFKHFYGQVPGMGGDAQPDDQPSASLGSGFVISSDGYILTNAHVIDGANVVTVKLTDKREYKAKVVGSDKQSDVAVLKIDASGLPTVKIGDPAQSKVGQWVVAIGSPYGFDNTVTSGIISAKSRALPDENYTPFIQTDVPVNPGNSGGPLFNLQGEVIGINSMIYSQTGGFQGLSFAIPINEAIKVKDELVKTGHVSRGRLGVAVQGLNQTLASSFGLQKPDGALVSSVDPNGPAAKAGLQPGDVILSVNGSPVADSTSLPAQIANLKPGSKADLQIWRDKSKKSISVTLGAMADAKLASNDGGPVEQGRLGVAVRPLSPQERSADNLSHGLIVQQAGGPAANAGIQPGDVILAVNGRPVTSPEQLRDAVKGAGNSLALLIQRDNAQIFVPVDLS

SEQ ID NO: 34985 - protein, 175 aa, Arabidopsis thaliana
MKRDRSDYEESMKHIDIVESLMMLSRSFVVKQIDVKQSTGSKTNHNNHFECKTCNRKFDSFQALGGHRASHKKPKLIVDQEQVKHRNKENDMHKCTICDQMFGTGQALGGHMRKHRTSMITEQSVVPSVVYSRPVFNRCSSSKEILDLNLTPLENDLVLIFGKNLVPQIDLKFVN

SEQ ID NO: 34986 - protein, 448 aa, Psychrobacter arcticus 273-4
MSISQAIEKIEARYAHQPEFIQAVKEVAITIAPLYDSHPEYDTFKVFERLVEPDRVIAFRINWENDKGEVQVNRGWRVQFSNALGPYKGGIRFHPTVNQSVLKFLGFEQIFKNALTGLPMGGAKGGSDFDPKGKSDNEIRRFCYAFMRELHPYINKDTDVPAGDIGVGGREISYMFAMYKNLTREYGGVLTGKGVGFGGSLMRTEATGYGAVYFLENMLTAQNEHIAGKRVLISGAGNVSLHAAEKVHMLGGVVVTVSDSQGTLYDEKGLNQEKINWLKEQKAKSQPLADYVAVYGGEWFAGQKPWHIKGDIAIPSATQNEVNEGDAKLMVENGIKYVVEGANMPLTAEAIDHIRLHRVHYAPGKAANAGGVAVSGLEMSQNSVRQYKSFEQIDARLKCIMKNIHDSAAEASGKYHQTDKGYIDYMTGANIVGFERVADALVAYGILN

SEQ ID NO: 34987 - protein, 355 aa, Mesorhizobium loti MAFF303099
MANEHQETDMNDELVLVTGGSGFIASHCMLKLLDAGYRLRTTVRSLEREAEVRAMLREGGAEPGDRLSFVAADLTADAGWAEAVAGCAYVMHGASPTPSGSQTREEDWVRPAVDGVLRVLKAARDAGIKRVVLTSAIGAVAMGHAPQTRPFNETDWSDLSGAVAPYQRSKTLSERAAWDFIAREGGGLELSVVNPVAVLGPVLAADFSHSIGLIKRLMDGMPGCPRVNSGYVDVRDLADLHLLAMTSPAAKGERFIGISGHSLWMADVAKVLRRRMGAAAAKVPTREIPNWMIRLLALRGDPTTKMLARHLGVMMDATSEKATRLLGWTPRPAEEAIVATAESLLRLGLVGGSKA

SEQ ID NO: 34988 - protein, 199 aa, Zea mays
MASRARLPGSPASIAVLILSFFQGSVCGITFTFTNRCGDTVWSGLLSGSGTPPLETTGFALALGQSRSLYAPQGWSGRFWAAPAAPSTPPARGPAPRATAAPARSTAASLRPVHVHCVPLVKNQEFDAAAKEITKALTTVGISHIIDTTAISIGRRYGRTDEIGVPFVVAMDSTNVTIRERDDKEQIRVDINEVASVVK

SEQ ID NO: 34989 - protein, 253 aa, Leuconostoc mesenteroides subsp. mesenteroides ATCC 8293
QRTNTTKTSNSAGTTTIAKTAYTSSDTATTAYNKVKNAVVTVQNLQKTSSSSSWSSYFQQNQQDSSSELETASEGSGVVYKISGGYAYIITNNHVVADSDELQLITASGKKIQATIVGTDSSKDLALLKAKTTDIKTSASFGNAKKLQSGQQVLAIGSPLGSDYATSLTSGIVSAPRRTLSAEETGSSATTAIQTDAAINPGNSGGPLINLKGQVVGINSSKIASSTDGTSVEGMGFAIPADIVQTFIKNTEK

SEQ ID NO: 34990 - protein, 689 aa, Aspergillus fumigatus
MGYTDLDQLAINTIRLLAVDATFKANSGHPGAPMGMAPVAHVLFNKFMNFNPKNPNWLNRDRISLLMLFISNGHGCMLQYALLHLFGYDVTMDDLKNFRQLDSITPGHPEAHDTPGVEVTTGPLGQGFANAVGLAIAQAHTAAVFNKPGYDLINNYTYCFFGDGCAMEGIASEAASMAGHLKLGNLIAIYDDNHISIDGDTKCAFTEDVMKRFEAYGWHTVWVKDGDNDLEGIEAAIHEAKKVTDKPTVIRLTTTIGFGSKLQGTGGVHGNPLKADDCESVKQKFGFDPKQSFVVPQQVYDLYHKHAAEGAAKEQAWNQLLEKYATEYKAEHADLVRRLSGKLPEGWEKSLPTYKPTDAAVASRKLSEAVLEKIHAVVPELMSGSADLTGSNNTRWKNAVDFQPPEYGIGEWSGRYIRYGVREHAMAAVMNGLAAYGTIIPAGGTFLNFVSYAAGALRLSALSRVRVIHIATHDSIGLGEDGPTHQPIETLAHFRALPNCMVWRPADGNETSAAYYSAITAKHTPSVLALTRQNLPQLENSTIEAALKGAYPVVEAPNAAITLISTGSEVSICIEAATYLKEKHNIVARVVSVPCFEVFDAQPKDYRLKVLPDGIPVLSVEALSTMGWERYSHEQFGLNRFGASGPYKEVYKKFEFTPEGISKRALATIDFYKGQPVRSPINRAFEQIL

SEQ ID NO: 34991 - protein, 510 aa, Bordetella pertussis Tohama I
MGQSGKPASRPSGPNGAGRRIYDLLRGQIADGTLAARAPLPSTRALAAGLGVSRTTVTAVYEQLAAEGFLDTAPGRAARLASPLAAPDPDATPASPPAGRPLTLSAWGRRVANIGTPAPLPHPPVRYNFLYGALASRDFPSLAWKRAYQHALQRPPHSLSYAPPEGEPALRRALQGYLRRARGIACEPGQILIVQGSQQAIDLCARLLLDAGDDFVFENPGYLMARHCFAATGARLLPVDVDEHGLDTEQLPDTARVRLAYVTPSHQFPLGGVLPIGRRRQLLQWARRHDAWIVEDDYDGEFRYGQRPIDALQSIDTDGRVIYVGTVSKALSPRLRLGYMVLPRHLVEVFRQAKRLADRHAPALDQQVLASLIDSGVYERHVRRMRRDNERRRTALLEAIARELPQGARVDGTAAGLHVVLGLPGLDARDEPALVATAREMGVGVYPLAPLHAPAGAGQARRPAGLILGYASLDVEQIRQGIAILASAIGRAAPARANSRTARRLARPPP

SEQ ID NO: 34992 - protein, 470 aa, Alkalilimnicola ehrlichei MLHE-1
MVGGAVKEQHYDAVVIGSGPGGEGAALALSKSGRDVVVVESHGEVGGGCTHWGTIPSKALRHNVRRMMEYNTNPLFHDVAAPKRLSFPRVLKFAERVINRQVNLRAGYYSRNEIPVLHGRARFLDAHTVEVHGAEGKVLRLRAGHFLIATGSRPYRPEGVPFDHPRVCDSDKILSLDHTPRTIAIYGAGVIGCEYASIFRGLGVKVDLIDTRERLLTFLDNEISDALSYHLRELGVLIRHDEAFTQVVPRDDHVVVHLDSGKQIKVDILLWANGRSGNSEDMGLEALGIEPNSRGQIQVNDNYQTAQEHIYAVGDVIGYPSLASAAFDQGRFAASHMLCGQRDYRLVQDIPTGIYTIPEISSLGKTEQELTAAKVPYEVGHAFFKDLARAQIANQGVGMLKLLFHPETLEILGIHCFGDQAAEIVHIGQAIMAQTGEANTLMYFLNTTFNYPTMAEAYRVAALNGYNRLG

SEQ ID NO: 34993 - protein, 650 aa, Arabidopsis thaliana
MEKLSPFVDVASLEIESLRRIKRPKRFSEEESEETENTTNSSNAVFGFPNLPEEPNRDMDQSVLCRICVRLPDGRRIQRSFLKSESVQLLWSFCYSQIGDESSERKRRFKLIQGSSRDRGSPSSSSSSSSLPGIEKYNEKVKNQIQALVRVIKVARTYRDDNVPSLIEQGLYLGSVAAASNKNVLKSYNVTHILTVASSLRPAHPDDFVYKVVRVVDKEDTNLEMYFDECVDFIDEAKRQGGSVLVHCFVGKSRSVTIVVAYLMKKHGMTLAQALQHVKSKRPVASPNAGFIRQLQDLEKSMQGTKTLDSISINRKTFLSSFGAVACETFRRFNRVMMEIRTPKTGKAKRVLESRAPKLVETGKKTLILHGTKTSATLSSVMTELYRLKKGGAIRYSRRNENIRPFESGGETSLEFFSQKTDCSIFVYGSHTKKRPDNLVLGRMYDHQVYDLIEVGIENFKSLRAFSYYKKFAPHEGTKPFICFIGEGFENVSELKHLKEVLTDLFRGEVVDNLNLTGLDRAYVCSAISPTKVFLTHCALKLKKSGSIVPRMELVEVGPSMDLVIRRNRLPNDSLMKEAMRTSKDKPKKKEKNVDQDAVLGKTGKIYMPDQKLKEMKLFDKSKGSKRERKDAKLKHKEETVAKKMKVSSE

SEQ ID NO: 34994 - protein, 492 aa, Brassica napus
MDPYKYRPSSAYNAPFYTTNGGAPVSNNISSLTIGERGPVLLEDYHLIEKVANFTRERIPERVVHARGISAKGFFEVTHDISNLTCADFLRAPGVQTPVIVRFSTVVHERASPETMRDIRGFAVKFYTREGNFDLVGNNTPVFFIRDGIQFPDVVHALKPNPKTNIQEYWRILDYMSHLPESLLTWCWMFDDVGIPQDYRHMEGFGVHTYTLVSKSGKVLFVKFHWKPTCGIKNLTDEEAKVVGGANHSHATKDLHDAIASGNYPEWKLFIQTMDPAAEDKFDFDPLDVTKIWPEDILPLQPVGRLVLNRTIDNSFNETEQLAFNPGLVVPGIYYSDDKLLQCRIFAYGDTQRHRLGPNYLQLPVNAPKCAHHNNHHEGFMNFMHRDEEINYYPSKFDPVRCAEKVPIPNKSYTGIRTKCIIKKENNFKQPGDRYRSWAPDRQDRFVKRWVEILSEPRLTHEIRSIWISYWSQADRSLGQKLASRLNVRPSI

SEQ ID NO: 34995 - protein, 342 aa, Alkalilimnicola ehrlichei MLHE-1
MADLTRLDAEEPAVDMDIVDSDDRDNRSEPVSLDGDTPQALTGETEPVNRPEPRLPRRRTQSAYQASLDATQIYLNEIGYSPLLSAEEEVYFSRRAQRGDAAARARMIESNLRLVVKIARRYMNRGLAFLDLIEEGNLGLIRAVEKFDPERGFRFSTYATWWIRQTIERAIMNQTRTIRLPIHVIKEINQYLRAARKLTQELDHEPSVEEIADHMGRDVEDVRRMRGLNEGTTSVDVPIGRDADRVLLDAIPDENNVDPVSALQDGDVFGNLEAWLGELTEKQRAVVERRFGLNGHDRATLEQVGNEIGVTRERVRQIQIDALRRLREVMEREGFSQDAVFG

SEQ ID NO: 34996 - protein, 248 aa, Zea mays; identical to SEQ ID NO: 868

SEQ ID NO: 34997 - protein, 331 aa, Streptococcus agalactiae A909
MAVLILGGAGYIGSHMVDQLITQGKEKVIVVDNLVTGHRQAVHSDAIFYEGDLSDKTFMRQVFRENPDVDAVIHFAAFSLVAESMENPLKYFDNNTAGMIKLLEVMNECDIKNIVFSSTAATYGIPEQVPILETAPQNPINPYGESKLMMETIMKWADQAYGIKFVALRYFNVAGDKPDGSIGEDHKPETHLLPIILQVAQGVRDKIMIFGDDYNTPDGTNVRDYVHPFDLADAHILAVDYLRQGNESNVFNLGSSTGFSNLQMLEAARRITGKEIPAQKAARRPGDPDTLIASSEKARQMLGWEPKFDNIDKIISSAWAWHSSHPNGYED

SEQ ID NO: 34998 - protein, 503 aa, Staphylococcus sciuri
MKKFDVVFIGSGHAAWHAALTLKHAGKSVAIIEKDTIAGTCTNYGCNAKILLEGPYEVLEEASHYPQIIESDQLHVNWENLMQYKKAVINPLSNTLKSMFEQQGIEVIMGAGKLVDAHTVDVEGTPIQAENIVIATGQHSNKLDIEGRALTHDSRDFLSLDKMPNSITFIGAGIISIEFSSIAIKSGAEVHVIHHTDKPLDGFNEKHIAKLIHKLESEGVNSISMKMFNQYNKLGNSYHVTTETGLSVDTDYVLDATGRKPNVQNIGLDELGIEYSEKGIQVDDYLRTNIHNIYASGDVLDKTIPKLTPTATFESNYIATHILGINPNPIQYPVIPSVLYSLPRLSQIGVTVKDAEQSEAYTIKDIPFGKQMVFEYKNETEAEMTIIINADKQLVGAEIYADDAANLINLLTFIVNQKLTAKDLNQLIFAFPRIIKRRARFIKSSNDFRYINTEVRLPSLTRKTYLCFCFGKSSARNYLVSLLRQMHHFICAICKYAINAPVC

SEQ ID NO: 34999 - protein, 321 aa, Thermoplasma acidophilum DSM 1728
MKVNIIGLNGFGKRHIEAWSKLDVDIEITERKAEVVRDLLSRYDIVKVNSSLEEAFNSDAEIFDLVLPHNLHHDVTVKSLAMGKHVMVEKPIATDISDAREMIRTAVQNRRKFMVADQYYFDPSVWKAKEIMDSGKIGSVHTIIIRDQRKYNWHGWRSQASIMGGGPLIDGGIHFIDTMLNLAGEYISVRSNFYRSVASIEEPDTVEAIFKFKDGSNGLFFYSWGYPYPPSLPSFEIIGTDGSILEDLRSKPSNFEAPKGKRAYGDPLLNGDLIDLGPHDIFVDEASGFLKSVVDDTPVPFDPELALRDLRAVKDIYANSI

SEQ ID NO: 35000 - protein, 571 aa, Clostridium tetani E88
MKKRLMRHMLATLTFSMIFVITFFAVITNYKYMENSKAMLKVNNEIVVKMLKSNDVKDKKTIVPYIFNDSDIRISCVDQNDKLIFDSHLKNHDGEFYGKREEIIEAREKGEGFKIRYSQSENMNTMYFAKLLENGFIIRTSTSLGDVSILRGKYFIYYLIIIILSTLGAFIFASKLSSSIVNPIKKLEFITSRIAAGELDRRVNINSKDEIGQLSNTFNNMADKLQYTINDSIEKQNKLEAILKSMDNGVIAVDKDFKIIMINPYAKEIFSIEQDIIGENLLDKIKSYELKEIFKEDNIEDYREVKILSPKEKNLRVKTTDIKIGKQLIGTVAVVQDVTEIKKLENIRSQFVANVTHELKTPLTSIRGFAETLKYVEDRETKDKFLNIINDESDRLTRLINDILALSHIENSNSMKLENISINEMLEDIVYLMENSAKDKNIELFIVGDKMQPIKGDRDRFKQMMINLVDNGIKYTEEGGKVYIGAKKEDNNCIVWVEDTGVGISKEHVERLFERFYRVDKARSRSQGGTGLGLAIVKHIVLGFGGTINIESEEGKGSKFIIRIPIKSNLV

SEQ ID NO: 35001 - protein, 652 aa, Brucella melitensis biovar Abortus
MDAVEKANSGHPGLADGRSRYSDDALYPFPLARARKNPHLGRTRDRFRAFPAGQRLDAALFRCSIFAGYEDITIDEIKKFRQLGSAPRATLNMAMPLASKRRPARSDRVLPMPSAWRISERILEWPSSVTSLQSIHYTYALVGDGCLMEGISQEAIALAGHLKLNKLIVLWDDNNISIDGPITLSDNTDQPARFAASGWNTMAVDGHDQDAIAKAIVTGPVSDRPTLIACKTTIGFGAPNKAGTNKVHGSTLGAEEIAATARALGLSSEPFVVPAEFLNAWRVAGGFNAAKKRLEWEKRLSSVEAETRAEFERRMRGELPSGFDAAIVEYKKKLSADKPKVATRKSSEMALEVINGVVPETVGGSADLTGSNNTKTSQTKAVTPENYDGRYIHYGIRELGMAAAMNGITLEWRPDPLFRHLLVFSDYGVRPMRLSSLMGIRVVYVMTHDSIGLGEDGPTHQPVEHLAALRAIPNHNVFRPADAVETAECWQLALHSRKTPSTLALTRQNLPTVRTEHREENLCAFGAYELAAASSDAKVTIFATGSEVEIALKARDLLEGKGIATRVVSVPCFELFEQQSDAYKEATIGDAPVKLAIEAAISLGWERFIGGNGIFIGMKGFGASGEINDLYKHFGITAEHAVEAAEKKLNAA

SEQ ID NO: 35002 - protein, 447 aa, Gibberella zeae
MREIVHLQTGQCGNQIGAAFWQTISGEHGLDSNGVYNGTSELQLERMNVYFNEASRNKYVPRAVLVDLEPGTMDAVRAGPFGQLFRPDNFVFGQSGAGNNWAKGHYTEGAELVDQVLDVVRREAEGCDCLQGFQITHSLGGGTGAGMGTLLISKIREEFPDRMMATFSVVPSPKVSDTVVEPYNATLSVHQLVENSDETFCIDNEALYDICMRTLKLSNPSYGDLNYLVSAVMSGVTTCLRFPGQLNSDLRKLAVNMVPFPRLHFFMVGFAPLTSRGAHSFRAVSVPELTQQMFDPKNMMAASDFRNGRYLTCSAIFRGRVAMKEVEDQMRNVQSKNSSYFVEWIPNNIQTALCAIPPRGLTMSSTFIGNSTSIQELFKRVGEQFTAMFRRKAFLHWYTGEGMDEMEFTEAESNMNDLVSEYQQYQDAGIDEEEEEYDEEELLEGEE

SEQ ID NO: 35003 - protein, 393 aa, Thermoplasma acidophilum DSM 1728
MQRLSWVEEELSALKAEGRYVPIRTIESAQGSWVTIGGKKVLNMCSNNYLGFANHPETKKAAIEAIEQYGVGAGAVRSIAGTDEIHARLEEKIAKFKHMESALVYQGGLLANVGTIPALVGKDDVIFSEELNHASIIDGTRLSSAKRIVYKHLSVEDLEKQIRENRSAFKKALVITDGVFSMDGDIAPLPEITEVAEKNDVMVYVDDAHGEGVLGDHGRGIVNYFHLEDRVDIEMGTFSKALGSMGGFVAGSADLIDLLKQKARPFLFSSALNPGDAAAVLKAIEILEKDDSLIKKLWHNSDILKKSLSDVGYNTGHSKTPITPVIIGDEKKTVELSKMLYDEKDVFASPIVYPTVPKGTARIRLMPSAVHTDADIKVAVDAFTDLGKKLHII

SEQ ID NO: 35004 - protein, 199 aa, Thermoplasma acidophilum DSM 1728
MDEEMLIPEEEYQKSGVHIGTQVKSSDMKPYIFKIRNDGLYILDVKKTNSKLIVAGKMLARFEPQDILVVAQRQYAFRPVAKFAEVTGATAITGRFNPGTLTNPSLKFYKEVKVIIVTDPLADVQAMKEAVKIGIPIIALCDANNKTDFVDLIIPTNNKGRRSLAVIYWLLAREILKNRGTITSYDQFKYTIDDFEAQI

SEQ ID NO: 35005 - protein, 478 aa, Burkholderia sp. 383
MQRATKIVATIGPASSSPEILLQMMQAGLDVVRLNFSHGTADDHRQRAEMVREAARKVGREIAIMADLQGPKIRVGKFENGKTTLEPGQAFILDAGCELGNDERVGLDYKELPRDLRTGDLLLLNDGLIVLTVERVLGDEIHTIVKVGGELSNNKGINRQGGGLSAPALTAKDMEDIRTAMSLGADLVAVSFPKNATDMEMARQLANIAGAPYGIKPKMIAKIERAEAIPALQSILDASDGIMVARGDLAVEVGNAAVPALQKRMIRMARESNKLVITATQMMESMIHAPVPTRAEVSDVANAVLDGTDAVMLSAETAAGKYPVVTIETMAAVCVEAEKSEHVELDKDFLDRTFTRIDQSIAMGALFTAYHLGAKAIIALTESGATALWMSRHYTHVPIFALTPRVGSERTMALYRNVTPLHVDFNSDRDSALQAALEIVVKQGYVQHGDMVVLTVGEPMGQAGGTNTLKIVRVGEHY

SEQ ID NO: 35006 - protein, 551 aa, Ralstonia solanacearum
MLDPRGLARPSRFCPRIIYAGTSHIRRATAAALLAASLCALPACADVGVGAALPLSPDKLYGELFVAVQTAQVYPDQKTFVDTVPKADPAVILQAYRAQKDVPGFSLKAFVDQYFTVPFETVITPPAGQSLRAHINWLWPALTRTTATAPDNSSLIPLPKPYVVPGGRFREVYYWDTYFTMLGLQASGRDDLVDSMLDNFAYQINRFGHIPNGNRTYYLSRSQPPFFALMVELAATKEGEAAYTRYLAPLRKEYAYWMRGAAGTAPGQASGNVVVLPDGTVLNRYWDDEATPRPESYLQDVATAQQAPDRPAAEVWRDLRAAAESGWDFSSRWFGDSATLATIRTTSILPVDLNALMFQLEKTIAKGCAVARDFACTVEFGNHARKRAVAVERYLWHPAGYYADYDWKLGKVRDNLSAAATYPLFVQMAPWGRARQTLRQTQTALLQVGGLSTTTLHTQQQWDAPNGWAPLQWIALQASQHYGQALLAQTIGERFLGSVERLYAAEQKLVEKYIVDGSGTGGGGGEYPLQDGFGWTNGVTLRLLDAYGRGQ

SEQ ID NO: 35007 - protein, 47 aa, uncultured basidiomycete
HWHGFFQRGTNWADGPAFVTQCPIASGDSFLYDFRVPGQAGTFWYHS

SEQ ID NO: 35008 - protein, 396 aa, Thlaspi caerulescens
MESSSHIIEVNGGRSDEERRAVASKVCGEAPCGFSDAKNVSGDTKERNASMRKLCIAVVLCLVFMSVEIVGGIKANSLAIMTGAAHLLSDVAAFAISLFALWAAGWEATPRQTYGFFRIEILGALVSIQLIWLLTGILVYEAISRLLTETSEVNGFLMFAVATFGLLVNIIMAVMLGHDHGHSHGHGHDHENHSHGVTVTTHDHDPTHDHDHDHDHDDGHGHSHGEDNQDEAHGDVTEQLLEKPKQEKEKKKRNINLQGAYLHVLGDSIQSVGVMIGGAAIWYNPKWKIIDLICTLAFSVIVLGTTINMIRNILEVLMESTPREIDATKLEKGLLEMEEVVAVHELHIWAITVGKVLLACHVNVTPQADADMVLNKVVDYIRREYNISHVTVQIER

SEQ ID NO: 35009 - protein, 94 aa, Saccharomyces cerevisiae
KPAKPAAKSIVTLDVKPWDDETNLEEMVANVKAIEMEGLTWGAHQFIPIGFGIKKLQINCVVEDDKVSLDDLQQSIEEDEDHVQSTDIAAMQKL

SEQ ID NO: 35010 - protein, 553 aa, Bacillus thuringiensis serovar konkukian str. 97-27
MKDWHKSVVYQIYPKSFNSYYNKETGDIKGVTEKLDYLKELGVDYIWLTPIYQSPQNDNGYDVSDYYSIDPSYGTMEEFEELLEEAKARNIEIMLDIVVNHSSTEHKWFKEAKKDKNSPYRNYYIWRDEKNNWQSKFGGSAWKYDEKTKQYFLHLFDETQADLNWENEKLREEVYDMMRFWLDKGVTGFRLDVINLISKDQQFLNDDGSTATSDGRKYYTDGPRVHEYLQEMNRNVFEGKDVLTVGEMSSTTIDNCIKYSNPDRNELSMTFSFHHLKVDYPNGDKWTKADFDFIKLKEIMSNWQIEMQKGGGWNALFWCNHDQPRIVSRFGNDEKYRNESAKMLATAMHMLQGTPYIYQGEEIGMTNPNFESIEQYRDVESLNIYDIKLEEGLSKEEIIGILKQKSRDNSRTPMQWNEDVNSGFTTSTPWISVAENFKEINVEKALEDKESVFYYYKKLIELRKTYDVITEGEYAILDENDPEIWAYTRTTESEVLLVINNFYGEEITYSVPAHVQLDGMKQEVLLSNYKDSSKDIAKLNLRPYESIVYRYKK

SEQ ID NO: 35011 - protein, 393 aa, Zea mays
MALRLNDVALCLSPPLAARRRRRSSGRFVAVASMTSAVSTKVENKKPFAPPREVHVQVTHSMPPHKIEIFKSLDDWARDNILTHLKPVEKCWQPQDFLPDPASEGFHDEVKELRERAKEIPDDYFVCLVGDMITEEALPTYQTMLNTLDGVRDETGASPTAWAVWTRAWTAEENRHGDLLNKYMYLTGRVDMRQIEKTIQYLIGSGMDPRTENNPYLGFIYTSFQERATFISHGNTARHAKDFGDLKLAQICGIIASDEKRHETAYTKIVEKLFEIDPDGTVVALADMMRKKISMPAHLMFDGQDDKLFEHFSMVAQRLGVYTARDYADILEFLVDRWKVASLTGLSGEGNKAQDYLCTLASRIRRLEERAQSRAKKAGTLPFSWVYGRDVQL

SEQ ID NO: 35012 - protein, 160 aa, Arabidopsis thaliana
VSEIMKVDTSAKCLMLLSRVGECGGRWGGDERVFRCKTCLKEFSSFQALGGHRASHKKLINSDNPSLLGSLSNKKTKTSHPCPICGVKFPMGQALGGHMRRHRNEKVSGTLVTRSFLPETTTVTALKKFSSGKIVACEDMDLDSMESLVNWKLELGRTIS

SEQ ID NO: 35013 - protein, 766 aa, Leuconostoc mesenteroides subsp. mesenteroides ATCC 8293
MTNTVKSSNLGYPRLGEHREWKKLLESYWQGKIDEAQFNETAKKLRLINLKKQIEFGLDIVPVADNSNYDHVLDTIAAFNLIPTRFGSYDRPLTLDEYFAVARGNKDNVAADMTKWFNINYHYTVPEFDNTTPRLLENRWLKYWQEAKDELDINGKPVIVGPVTLIKLGKLRGEYVSASSDINQLLEQILPLYGQVFKELQAAGVTWIQLDEPTLVKVADEADVEPYRRATEYLNEVAPQLNIELQTYFDSIDPYQAVTKLPVQAIGLDFVHGHGENFDNIRKFGFPEDKILAAGIIDGHNVWTANLQEKANFAEELRTLAPKLWLQPSNTLLHVPITKKYETKASPELFGGLAFADEKVQELVALTKKLNGDDVTAIFEQNAAALEALNSSQARNNKVVQEAIQHLSQERFERDSKYAERSKKQQVSLHLPLLPTTTIGSFPQSADVRAKRAAWRKGELSDEQYNDFIESETKRWIQLQEDIDLDVLVHGEFERTDMVEYFGQKLAGFFATQNGWVQSYGSRGVRPPVIFGDVDYVEPITVKESAFAQAQTNKPVKGMLTAPLTIINWSFVRDDIPRATVQNQIALSLRQEVINLEKAGIKIIQVDEPALREGLPLKQRNWQDYLDEAIYSFKITTTGVRDETQIHTHMCYSDFEDIISTISGLDADVISIETSRSHGEIISAFEDAHYDKQIGLGVYDIHSPRIPSVAEIADNIRRGLKVIDHNQFWVNPDCGLKTRNEKQTLEALQNLEDARNLVFSEISSNE

SEQ ID NO: 35014 - protein, 147 aa, Triticum aestivum
  misc_feature (72)..(72): Xaa can be any naturally occurring amino acid
  unsure (1)..(147): unsure at all Xaa locations
GRPLFPPYIEVNADVKEVLDTFRVAAELGSDSLGAYVISMASNASDVLAVELLQKDARLTVSGDLGRECPGXTLRVVPLFETVKDLREAGSAIRKLLAIDWYREHIIKNHNGHQEVMVGYSDSGKDAGRFTAAWELYKAQEDVVAAC

SEQ ID NO: 35015 - protein, 316 aa, Ustilago maydis 521
MAGRIREVWAENLEVEMALLRDTIEKYPYVAMDTEFPGIVARPIGTFKGSSDYHYQTLRCNVDLLKLIQLGITLCDENGNLPPDVCTWQFNFRFSINDDMCAPDSLDLLTKAGLDFDRHERMGIDVEHFGELLITSGLALFDDVKWVSFHSGYDFGYLLKVVTCSPLPAQESDFFALLRVWFPCIYDIKFLMRSCKTLKGGLQDVADDLQVSRIGQQHQAGSDSLLTATTFFKMRQKYFDGSIDDSKYLGCLYGFSSSSSHVNGMVHYSQGRPVSVQSFHDASAVPRSVSGGYAAGGYGSNFGSPFKSTLSASTER

SEQ ID NO: 35016 - protein, 544 aa, Sinorhizobium meliloti 1021
MKEAPWFSSSVIYGIDVRRFSDGNGDGIGDFIGLKERVSYLHYLGIDCVWLSPFFRSPFADNGYDVSDYYSIDPVLGTLDDFLDFLHAAGEQGIRVVVDLVANHTSSEHPWFQAARRDARCRFRDYYVWSESPPPVAPDNKTAFPGEESSVWTYDDLAQAYYFHKFRHFQPDLNIANPAVRDELLRVVDYWLTLGVDGFRVDAAPFVIGETGIEHADPRDPQGFLREMRKLVDGRRQDGLLLGEADLAPEKLRSYFGDGKLDLLFNFVLCAAFAASLAGQKADPIGQALSIMPEPPPHRGWANFLRNLDELNLDRLPEDIREETFAAFAPDEEMRIYGRGIRRRLAPMLDGNRARIELAFSLLLSSPGVPLILYGDEIGLGEDLSRPGREPVRVPMQWNAGSNAGFSTAQRAKLVQPPVTDGPFSFKRVNVEAQREDPGSLLNRVRAMILARRRHELFNRGRPVMLHTGDPALFALAYSDGTELFVVLHNLSDGKRRAELELPGAIDARLNDILGEGEVELSGQRLAIGLGPFGYVWLHSGKKD

SEQ ID NO: 35017 - protein, 473 aa, Bacillus thuringiensis serovar konkukian str. 97-27
MQQPTNEKLHRTMKSRHLFMIALGGVIGTGFFLGSGYTINQAGPGGAILSYLVGGFIMYLTMLCLGELTVAMPVSGSFQKYATKFIGPGTGFMIGWLYWLGWAVTVGLELTSIGLMMKRWFPNVDVWVWCLVFGVILYASNAISAKSYAELEFWFSSIKVITILAFVVLGGSALLGFISYDGKEAAPLFSNFVSEGGLFPNGLAAVLLTMITVNFSFQGTELIGIAAGESENPEKTIPRAIRNTVWRIMLFFILTMTILVGLISWKEAGVIESPFVVVFDKIGIPYAADIMNFVIITALLSVANSGLYAATRILWSLANEGMAPTSFQKVNKRGIPITALVVTIAVAGLSLFTSFLAEDTVYMYLLSIAGLSAVSSWIIIALSQLRFRSQYIKGGGKLEDLKYRTPLYPIVPILALITNSIVVISLAFIPEQRMALYCGIPFIIFCYIYYYINKKRQKPMKVETTNETNNQTR

SEQ ID NO: 35018 - protein, 150 aa, Zea mays
  misc_feature (21)..(21): Xaa can be any naturally occurring amino acid
  unsure (1)..(150): unsure at all Xaa locations
MSPASSSNPLSLDFWASSADXPFGVVRPLAEQCPVLTNVRVDWKETPEAHVFRADLPGVRKEAAKVEVEDGNVLVISGERAREEEEAGKDEAWRWRLVERSSGRFQRRFRLPRGARLDQVHASMENGVLTVTVPKEEAKKPQVRAVEISG

SEQ ID NO: 35019 - protein, 225 aa, Bacillus thuringiensis serovar konkukian str. 97-27
MIDILLVDDEPRMLELLTLYLTPIGYNCICARSGEEAISHIENQNFKFILLDIMMPTMDGWETCKKIRSFSNVPIIMVTARDQTIDVVQGLKLGADDYVTKPFHEEELFARIEAVLRRTNQHAQIQYHGILWDEARHFVSVHNEELLLTPIEFSLLGLFLRHVNYVLSRDQLIERIWGLNTNTEDRTVDSHIRNLRDKLRKVNFPIDNHLKTVYGVGYRWIDIEH

SEQ ID NO: 35020 - protein, 316 aa, Zea mays
MASLTLPPAPPNPRQDAIDLQKAFKGFGCDSTTVINILTHRDSVQRGLIQQEYRAMYHEELSHRISSELNGNHKKAMLLWILDPAGRDATVLREALSVDTMDLRAATDIICSRTPSQLQIMKQTYYARFGTYLEHDIGHHTSGDHQKLLLAYVGIPRYEGPEVDPTIVTHDAKDLYKAGEKRLGTDEKTFIRVFTERSWAHLASVSSAYHHMYDRKLEKVIKSETSGNFEFALLAILRCAENPAKYFAKLLRKAMKGLGTDDKTLIRVVVTRTEIDMQYIKAEYFKKYKKPLAEAIHSETSGNYRTFLLSLVGPGH

SEQ ID NO: 35021 - protein, 231 aa, Bradyrhizobium sp. BTAi1
MTKDPRSFDHVDTWVFDLDNTLYPHHVNLWQQVDARIGEFVSNWLKVDADEARRIQKDYYRRYGTTMRGMMTEHGVHADDFLAYVHKIDHSPLEPNPDMGAAIEKLPGRKLILTNGSVDHVDAVLSRLGIAGHFHGVFDIIAAELTPKPARETYDKFLELHAVDPTRAAMFEDLARNLVVPHDLGMTTVLVVPDGTKEVVREDWELSGRDDPHVDHVTDDLTGFLQRLVAT

SEQ ID NO: 35022 - protein, 439 aa, Prochlorococcus marinus str. MIT 9313
MPKTAAPQPLLLRWQGHIPSSEAMQMRLQWIAGLLLMMLLATLPMLTRTGLGLTILAAGALWIIWGCVTPAGRIGSISSCLLVFFAIACLATGFSPVPLAAAKGLIKLISYLGVYALMRQLLATSSDWWDRLVAALLTGELISSVIAIRQLYAPAEEMAHWADPNSVAAGTVRIYGPLGNPNLLAGYLMPILPLALVALLRWQGLGAKLYAMVALGLGITATLFSFSRGGWLGMLSALAVILVLLLLRSTSHWPLVWRRLLPLIVIVLGTAMLVIAATQIEPIRTRITSLIAGRSDSSNNFRINVWLSSLEMIQARPWLGIGPGNAAFNRIYPLFQQPKFNALSAYSVPLEILVETGLAGLMASLALVITGMRKGLAGLNSNHPLALPALASLAAIAGLAVHGITDTIFFRPEVQLVGWFCLATLAQTQPEQKQLQQTE

SEQ ID NO: 35023 - protein, 220 aa, Arabidopsis thaliana
MNFEDQEEDMEMSGVNPPCGYDSLSGEGATSSGGGGVGRSKGVGAKIRYRECLKNHAVNIGGHAVDGCCEFMPSGEDGTLDALKCAACGCHRNFHRKETESIGGRAHRVPTYYNRPPQPHQPPGYLHLTSPAAPYRPPAASGDEEDTSNPSSSGGTTKRFRTKFTAEQKEKMLAFAERLGWRIQKHDDVAVEQFCAETGVRRQVLKIWMHNNKNSLGKKP

SEQ ID NO: 35024 - protein, 250 aa, Arabidopsis thaliana
MLAIFHEAFAHPPEELNSPASEKCSKQPKLPEETLNDFLLRYPLNTFSMSFGQAAVLAYVRPSASFSIHQRLFCGFDDIYCLFFGSLNNLCQLNKQYGLTKTTNEAMFVIEAYRTLRDRGPYPADQVVKDLDGSFSFVVYDSKAGSVFTALGSDGGVKLYWGIAADGSVVISDDLDVIKEGCAKSFAPFPTGCMFHSEGGLMSFEHPMNKIKAMPRVDSEGVLCGANFKVDVYNRVNSIPRRGSEANWSL

SEQ ID NO: 35025 - protein, 474 aa, Legionella pneumophila str. Paris
MLRRTKIVATLGPASKEPEILRSMLAAGVNVVRINFSHADSSALQLIALVRKIADELNHPVAVMADLQGPKIRVGRFQNKSITLIDGQNFTLDCMAPDTLGDINGVSVAYPNLASELSIGDHLLINDGLIELEVIEISGSKIHCKVVEGGVLTDLKGLNRKGGGLAARTLTEKDRNDLRTAIEAEVDYISLSFVKDAEDIRQARALMKDYGAKITPIIAKIERMEALDHLTDIIREADAIMVARGDLGVEVGAAEVPAIQKHIIEQTRLLDKVVITATQMMESMISNPQPTRAEVSDVANAILDGTDAVMLSAETASGLFPVKVITMVNKICLSAEKHASFFYHSDPETCHYQRADQAIAMATMHTANHFPIQAIITLTESGDTALWVSRHHSTVPIFAISANKRTIGRLSLVNNVFPIYIDFHQFNPEGLNQQILHELIKSGHLEKRGYVLLTRGTQIGMPGGTNCMEIIPVV

SEQ ID NO: 35026 - protein, 129 aa, Arabidopsis thaliana
MLDADVTDSVIGEGCVIKNCKIHHSVVGLRSCISEGAIIEDSLLMGADYYETATEKSLLSAKGSVPIGIGKNSHIKRAIIDKNARIGDNVKIINSDNVQEAARETDGYFIKSGIVTVIKDALIPTGTVI

SEQ ID NO: 35027 - protein, 203 aa, Triticum aestivum
  misc_feature (7)..(7): Xaa can be any naturally occurring amino acid
  misc_feature (32)..(32): Xaa can be any naturally occurring amino acid
  misc_feature (48)..(49): Xaa can be any naturally occurring amino acid
  unsure (1)..(203): unsure at all Xaa locations
SAFEYHXTKPRFNRVFNEGMKNHSIIITKKLXECTKGFNGLDTLVDVXXGIGATVGAITAHYPTVKGINFDLPHVISEAPPFSGVTHVGGDMFQKIPSGDTILMKWILHDWSDEHCATLLKNCYDALPAHGKVVLVECILPVNPEATPEAQGGFHLDMIMLAHNPGGRERYEREFEALAKGAGFGAIKTTYIYANIWVIEFTK

SEQ ID NO: 35028 - protein, 244 aa, Arabidopsis thaliana
MEQPMSPGTKSVDLRECMESLLRFSLRSHLNESVPSFDLDLTRDFCLHLLGEATDSTEKSAVYKLLATALSECLASEGDKNSNLEKYSKLIHGLGYDLINMLKEVNFELHVQEPYFTQLKDGLKTVEGRCAVGDYMRISSGAFLLFNKCLLLEVQDVHRYTSFSEMLKVEGLAKVLPGVESIEEGVQVYRNFYSEEKERMNGVVAIRVAKPANQPSAALAGVLSELKSSGIKSLLDEYTAGVTS

SEQ ID NO: 35029 - protein, 668 aa, Legionella pneumophila str. Paris
MNSFTELANAVRMLSIDAVNQAQSGHPGMPLGMADIATVLWKKFLKFNPKNPHWFNRDRFVLSNGHGSMLLYSLLHLTGYNLDINELKNFRQLHSKTPGHPEHGHTPGVETTTGPLGQGLANSVGMALAERVLASHFNHDHYNLVDHYTYTFAGDGCLMEGISHEACSLAGTLGLGKLIVFYDDNGISIDGKVESWFTDDTTSRFKAYNWQVIGPIDGHDADQIEQAISAARENTTQPSLIICKTVIGLGSSVAGSEKAHGSPLSAQDINNVREFFNWKHAPFEIPDSIYKQWDHREQGDKEEQQWLQLLHEYRLQYPSEHDEFLRRANGDLPDDWQEISAGFLKQCLNNEKAIATRKASQQCIEFFAPILPEMFGGSADLTGSNNTDWSGSKAITAHNFSGNYLYYGVREFAMAAIMNGLAVHGGFIPYGGTFLVFADYARNAIRLSALMKQRVIYVLTHDSIGLGEDGPTHQPIEHIAMLRMTPGMTVWRPADLMETAVAWQQSLEHHNGPSALLLSRQNLPALAHGTDAADLIKKGGYIIADCEGKPDAILIATGSEVQLAITAAEKAKARGLQVRVVSMPCAERFLAQSDAYKNQVLPGQVRTRIAIEAASSAYWHQFVGFDGAVIGLDCFGVSAPATDAFNYLGITVEKIINTLDTLTKQTMV

SEQ ID NO: 35030 - protein, 324 aa, Zea mays
MPTRLAPHRRSHTMENGSGAVVPSNSSDRSDRSDKPLDQKTMRRLAQNREAARKSRLRKKAYVQQLESSKLKLAQLEQELQKARQQGIFISSSGDQTHAMSGNGALTFDIEYARWLEDQNKQINELRTAVNAHASDSDLRLIVDGIMAHYDEIFKVKGVAAKADVFHILSGMWKTPAERCFLWLGGFRPSELLKLLANHLEPLTEQQMLGLTNLQQSSQQAEDALSQGMEALQQSLAETLAGSLGPAGSSGNVANYMGQMAMAMGKLGTLENFLRQADNLRQQTLHQMQRILTIRQASRALLAIHDYFSRLRALSSLWLARPRE

SEQ ID NO: 35031 - protein, 468 aa, Pseudomonas aeruginosa PAO1
MHSEDQRPNDLIYGLDDRPRPLPAFLAALQHVLASFVGIVTPPLVIGSLLGLGEHLPYLISMALMVSGAGTLIQARRPFGIGAGMICLQGTSFAFLGAVLAAGMLVKQRGGGPEEILAMIFGVCFFGAFVQIVLSRFLGHLRRVITPLVTGIVITLIGVSLIKVGITDLGGGAGATDFGAPANLALGALVLLSIVLLNRSRLPWLRLAAIVIGLALGTLAAWATGLFVPRALPELPLVSLPQPFRFGFAFDWMAFLPVALIYLISSIETVGDLTANCMLSRQPLEGPAYLQRLRGGVLGDGVSCLLAATFSAFPNTTFAQNNGVIQLTGVASRHVGIYIGGVLLALGLFPWVGAILQQIPKPVLGGATLVMFGSVAAAGIRILGQTAMDRRSVLIIAASFGVGLGVAAQPTLLDQMPAVVKTLFDSAITSGGITAILLNLLLPEERVAEAAQASAKGGALARWRKPLG

SEQ ID NO: 35032 - protein, 469 aa, Glycine max
MQALHSPTLRASPLDPLRGPNNAAANRRSSSAKRVFFVSATVAPKVSAPQRQKDPKKRVVITGMGLASVFGNDVEGYYEKLLAGESGITAIDRFDASKFPTRFGGQIRGFSAEGYIDGKNDRRLDDCLRYCIVAGKKALENADLAPDNHSKIDKERAGVLVGSGMGGLTVFSDGVQALIEKGHRKITPFFIPYAITNMGSALLGIDLGFMGPNYSISTACATSNYCFYAAANHIRRGEADLMIAGGTEAAIIPIGLGGFVACRALSQRNDDPKTASRPWDKERDGFVMGEGAGVLVMESLEHAMKRGAPIIAEYLGGAVNCDAYHMTDPRSDGLGVSTCIQSSLEDAGVSPEEVNYINAHATSTLAGDLAEINAIKKVFKDTSGIKINATKSMIGHCLGAAGGLEAIATVKAITTGWLHPTINQFNPEPAVDFDTVANVKQQHEINVAISNSFGFGGHNSVVAFSAFKP

SEQ ID NO: 35033 - protein, 145 aa, Haemophilus somnus 129PT
MERPMTLEQTLAIIKPDAVERNLIGNIISRLEDKGFQIIAMKMLHLNQEQAEGFYTEHSDKAFFAELIRYMTSAPIVVLVLQKENAVKDYRTFMGTTNPEIAENGTLRYEFAINQTQNSVHGSDSLENAQREIAYFFAEAEIYAR

SEQ ID NO: 35034 - protein, 188 aa, Sesbania rostrata
TGVMALQVQSEFQKAYEGGITKSRYWEPTYEDSMNLIARLPAIAAYIYRRKYKDGKIIPLDDSLDYGANYAHMLGFDDPEMLEFMRLYVSIHSDHEGGNVSSHTAHLVASPLSDPYLAFAAALNGLAGPLHGLANQEVLRWIRSIVKEFGTPNISTEQLSDYIHKTLSSGQVVPGYGHGVLRKTVQDT

SEQ ID NO: 35035 - protein, 357 aa, Phytophthora infestans
MSQLDRAVYDQYMSLDVSESVTLAEYVWIGGSGQDLRCKTKTLTKPVKSVADLPIWNFDGSSTGQAPGEDSEVLLRPVAIFKDPFRRGQHILVLCDCLKPDMTPIANNTRADAARVMKAAEGEEPWFGIEQEYTLFEKDGVTPYGWPKGGFPGPQGPYYCGAGAHSVFGRIIVDAHYRASLYAGINISGINAEVMPGQWEYQVGPCTGIESGDHLWMSRYILLRVCEDFGVNVSWDPKPIPGDWNGAGCHTNYSTKAMREEGGMAKIIEAIEKMKLKHKEHIAAYGTGNERRLTGRHETASMDTFSYGVANRGASIRIPRVAEAEGKGYFEDRRPASNMDPYVVTGRIIKTTILNEA

SEQ ID NO: 35036 - protein, 451 aa, Psychrobacter arcticus 273-4
MTKHYDYIAIGGGSGGIASINRAASYGKKCAIIEANQLGGTCVNLGCVPKKVMWYGAQVAEAIHKYAPDYGFDVEFKGFDFQKLVNSRQQYIENIHRSYDNNLAKNGVEVIKGFAKFVDTNTVEVNGELITADHILIATGGHPIRPDIKGTEHGIDSDGFFALNELPKRVAIVGAGYIAVEIAGVLNSLGAEVHQYVRQHSPLRSFDHSIVETLLIEMEQDGIQLHTNTTLTEVVKNDDGSLTLCTESGSLDTVDCLIWAIGRAPSTDNINLQVTGVETTEFGKIKVDKFQNTNVKGIYAVGDIIENSVDLTPVAIAAGRRLSERLFNNKPDEHLNYELIPTVVFTHPAIGTIGLSEIDAVNQFGKDNIKCYSSTFTPMYSAVTQHRQKCMMKLVCLGDDEKVIGLHGIGFGIDEMIQGFAVAIKMGATKADFDNTIAIHPTGAEEFVTMR

SEQ ID NO: 35037 - protein, 455 aa, Xanthomonas campestris pv. campestris str. ATCC 33913
MSRLVVVSNRVAVPGESRAGGLAVGLLAALKERGGVWFGWSGKTVRGDSGGMHEQTDGDIKFVTMDLNKRDIDSYYNGFANRTLWPLLHFRLDLVDYDRATREGYLRVNRLFAEKLAPLLKDSDTLWIHDYHMIPLGAMLRELGVGCKMGFFLHVPMPSADLMQAMPDHARLFSTFYAYDLVGFQTQRDAERFKAYVRLFGGGRVLEGDLVEGPGGRRFSAAAFPIGIDTDLIANQAKASVSKQAVRDLRESLRGRQLAIGVDRLDYSKGLPERFQGFERYLERYPDQSGSLTYLQIAPVSRGDVNEYRQLRGQLEQIAGHINGGHAEPDWTPLRYVNQNFSHATLTGFYRAAAVGLVTPLRDGMNLVAKEFVAAQDPENPGVLVLSLLAGAADEMKEALLVNPHDLDGVADAIATAASMPLATRVERWHAMMDHLRKNNINHWRQRYLQALADI

SEQ ID NO: 35038 - protein, 489 aa, Trichophyton rubrum
MVVEAPPCPQSGNGFANGSAKPKVYRDEAERRRYEHHEADVVIIGAGIAGCTLAVALGNQGRSVILLERSLKEPDRIVGELLQPGGVRALEQLGLRDCLEGIDAVRTYGYDVIYFGNGVKIPFPSDANDKILEGRCFHHGRFIMRLREAAAANPNVTIVETKAVSTIKSTHTGEVLGVQCQTDGKQDFYFGPLTVVADGYASTFRKEYLPIQPVAKSKFWGLELIDAKLPIPGHGHVVLGDFPPILIYQIGEHETRILIDIPDNLPSASVANGGVKGHMRNVVLPSLPECIRPSFEAALEKGGFRSMPNSFLRPVTNRIPGLMFLGDSLNMRHPLTGGGMTVAFNDVVLLRDLLSPEAVPDLSDTKLVLKQLSKFHWQRKSLISVINILAQALYSIFAAGDPNLKVLQRGCFRYFQLGLIDGPIGLLSGIIRSPLVLLRHFYSVAFLAIWLHLTSKPIYLLPLTLFECIIVFLTACRVILPFIFAELQS

SEQ ID NO: 35039 - protein, 298 aa, Bacillus thuringiensis serovar konkukian str. 97-27
MPNIAVVGSISMDLVAVSKKRPKAGETVIGEAFHTIPGGKGANQAVAAARLGANVAMVGAVGDDNYGTVVKKNLENERVFIDYVVPVTDAATGIAHIVLAEEDNSIVVVQGANALVNESVVNRSKDLLIKADMVVLQLEIPLETVKYVLAICEEHKIPVMLNPAPAQVLSEDILEKATYITPNEHECRVVLDDFTSPIEDLLAKYPNKLLMTEGSNGVRFHNGTEIVHVPSIAVDVVDTTGAGDTFNGALAVALSEGETLQKAIRFANIAGGLSVTKLGAQGGMPTRDRVREVQVIVG

SEQ ID NO: 35040 - protein, 139 aa, Xanthomonas campestris pv. campestris str. ATCC 33913
MNRTEHAAPPATIVFDGVCLLCNGWVRFLLRHDHRRRYRYAAMQGTAGRALLVQHGLDPDDPLSFLLVDAAGAWTDTDAIVRVLSGLGGLWRVAAVLRLVPRSLRDIGYRVVARNRYRWFGRSTHCMLPTPEQRALFLD

SEQ ID NO: 35041 - protein, 176 aa, Mesostigma viride
MFNFIDNVQTYSKEALQAAKYIGQGFMVTFDHMNRRAITIQYPYEKLIPSERFRGRIHFEFDKCIACEVCVRVCPINLPVVNWEFQKEKKKKQLQTYSIDFGVCIFCGNCVEYCPTNCLSMTEEYELSVYDRHELNYDNFALGRLPTMVNNDSMVKGIKGLGYLPKGIIEGHIDNQ

SEQ ID NO: 35042 - protein, 608 aa, Trichodesmium erythraeum IMS101
MSYCYNPTCKKPENPDQNKFCQSCGSKLILREHYRLLKPIGMGTFSRTFLAVDEDIPSKSVSVIKQFLPIATPGKNAEQNINEIEKASISFHREALQLDKLGKHPQIPSLLAYFFVSSYKYLVQEYIQGKNLAQELKEQGTFDEQKIRKFLKEILPVLQFIHKNQVIHRDIKPENIIRRGADKTGYGWGDNLCLVGFGSAKAISIHPTVKTDTIIGSPEYTAPEQLMGKPVFASDIYSLGIVCIQLMTQLNPFDLRYGEEFLWQQHLPRPVSKSLSNIINKMLQVSLSERYHSIEEVLKDLMQTLVSSWAGLERFESYGHKVRTLAFGIDGQTVVSGGEDNNIKVWTLGTGNEPQTLGGWMFSHSGWVQAIVFSPDGQTLISGSNDGTLKIWNLGTGKLVRTLKGWFGQEWGAVHAIAISQDGQILASGHNDKTVKVWYLASGKMRGFLQGHTAWVESLAISLDGKVLASGSGDKMIKLWDVQTGKLLFNLTGHSDVVRSVAIAPDGQILASGSSDHTVRLWQLGTGNLLGVLQHPDAVNSVAISSDGLILASGCRDGNLYLWNPYTMEKVGLLSKDTTVNTVTFSMDGHLLAASCGDGSLSVWHKVS

SEQ ID NO: 35043 - protein, 106 aa, Synechocystis sp. PCC 6803
MTSMAAISINVSTVKPLGDRVFVKVSPAEEKTAGGILLPDNAKEKPQIGEVVQVGPGKRNDDGTYSPVEVKVGDKVLYSKYAGTDIKLGGDDYVLLTEKDILASVA

SEQ ID NO: 35044 - protein, 541 aa, Synechocystis sp. PCC 6803
MAKSIIYNDEARRALERGMDILAEAVAVTLGPKGRNVVLEKKFGSPQIINDGITIAKEIELEDHVENTGVSLIRQAASKTNDVAGDGTTTATVLAHAIVKEGLRNVAAGANPISLKRGIDKATDFLVARIKEHAQPVGDSKAIAQVGAISAGNDEEVGQMIANAMDKVGQEGVISLEEGKSMTTELEITEGMRFDKGYISPYFVTDAERMEAVLEDPRILITDKKINLVQDLVPILEQVARQGKPLLIIAEDIEKEALATLVVNRLRGVLNVAAVKAPGFGDRRKQMLEDIATLTGGQVISEDAGLKLESATVDSLGSARRINITKDNTTIVAEGNEAAVKSRCEQIRRQIEETDSSYDKEKLQERLAKLAGGVAVIKVGAATETEMKDRKLRLEDAINATKAAVEEGIVPGGGTTLAHLAPQLEDWATGNLKDEELTGALIVARALPAPLKRIAENAGQNGAVISERVKEKEFNVGYNAASLEYVDMLAAGIVDPAKVTRSALQNAASIAGMVLTTECIVVDKPEKEKAPAGAPGGDFDY

SEQ ID NO: 35045 - protein, 370 aa, Carboxydothermus hydrogenoformans Z-2901
MYYYYSNQDKKPSFLSYVLVSLISAIIGGLLVVMFVPGLVKGNVSTTGTIEKRVIYEDKSPVVTVAEEVGPAVVGISNKVTFQAGDVPHNNVEQATGSGVIIDARGYIVTNEHVIRNATDLTVTLANGKQFPAKIVGKDPRTDLAVIKIDPGNEKLTVARWGDSDKIKVGELAVAIGNPLSLDFARTVTAGIISAKNRILNMDGQQYELIQTDAAINPGNSGGALVNAAGEVIGINSIKISLSGVEGLGFAIPSNIAKPIVEELIKNGKVIRPWMGIEGQTIDEEFAQYKGLKQKSGVYVARVVKDGPSAKAGLKDNDIIIEFDGVKIEKFEDLRNAVLKHKVGDEVKVKVLRGDKEMTFKVKLGEMPAE

SEQ ID NO: 35046 - protein, 456 aa, Methanococcoides burtonii DSM 6242
MKKSWKINKFKTNRAFFEVVVIVVATVIVTILAIISGGIQMFCEWFQAHEVVHAPIFGFLFLMSGLAIYGLRSYNETDQEIGSYRDFKHSLQESEEKFRTIFDKANDGIYLIDLHGRFIDVNAMACKQTGYSRDEMLQMAYKDMGFPEIDYKKQVKELYKKGYTSFESASILKDDSTAYGQMRSQIIQYGGKTAILSIARDITERKKAEEAILEAKIEAESANRAKSEFLANMSHELRTPLNSIIGFSDVLYNESHGPLNEYQKKYTSNVLRNGKHLLDIINDILSISNIETGTMELHINEFIVSDAIDEVESLMILIASEKDIDLTCNIDIGMPTIKTDMIKFKQILYNLVHNAIKFTDQGGSVTIGGKISDDLVHISVKDSGIGVSPEDQDKLFNPFFQLDSSNARKYGGTGLGLALVKKFVEMHGGEIWVESEVGKGSTFTFIIPTKPLNSDF

SEQ ID NO: 35047 - protein, 364 aa, Bartonella vinsonii subsp. berkhoffii
MLAVFLLKHCYMLRKCLLKRNMAFETLGISIAKSKLNLDQMMAHKKAVVTANTSGVSFLMKKNKVDTFFGTAKILAAGQIEVVARDGNKQTIATKNIIIATGSESSSIPGVNVEIDEKVVVSSTGALALEKVPTRMIIVGAGIIGSELSSVWSRLGAKVTIIEYLNKVLGSMDGEVSRQFQKIMEKQGIEYKTGVKVTAITQSGSGAQVSFEAVKGGESETLEADVVLIATGRSPYTEGLGLVETGVKVDERGFIDIDAYWQTNIPGIYAIGDVVKGPMLAHKAEEEGVAVAEILAGQKGHVNFDVIPSVVYTQPEIASVGKTEEELKAAGIDYNVGKFPFMANGRARAMQKSDGFVKILADKK

SEQ ID NO: 35048 - protein, 229 aa, Glycine max
MSMQKESPLIRLHSFDQGHAWLALLHLLIHISPAVTGQPVTPPVQPDSNKSVIAIMAIVVIMFLISAFLSLYSRKCSDRPVQTRGILDLAGPTGAAGNPLQAESNGLNQATIETFPTFLYADVKGLKIGKDTLACAVCLNEFEDNDTLRMIPKCCHVYHPDCIGAWLASHSTCPVCRANLVPQPEDMNTNTNTNMPSILSIQIPNEEEREHEHEHEYEAVIVGEHIRGC

SEQ ID NO: 35049 - protein, 47 aa, uncultured basidiomycete
HWHGFFQSTTNWADGPAFVTQCPIMPNNSFSYEFEVPNQAGTFWYHS

SEQ ID NO: 35050 - protein, 130 aa, Helicobacter hepaticus ATCC 51449
MAKKSVTKKKNVKKNIARGIVCISASFNNTNVTITDEMGNVLCWATAGGLGFKGSKKSTPYAAQQAVESAMEKAKEHGIKEVGIKVQGPGSGRETAVKSVGAVEGIKVLWLKDITPLPHNGCRPPKRRRV

SEQ ID NO: 35051 - protein, 185 aa, Triticum aestivum
MEGEERRLAASLTARYSEWVLEELDELRGSFLLTDPAMPGHPIVYASRGLAALTGYPRRELLGRNARLFQGAATDRAAVSGVREAVRAQRAHQVAILNYRRDGSPHWVLLHLAPVFHAADGRVLHFLAVQVPIAPASPPRRHPGRPAPLAACREEARGEEELPCASHVGEVFVDIDKRGQLRLGR

SEQ ID NO: 35052 - protein, 505 aa, Rhodococcus equi
MTSIQPRPTTNDFGIPVNSDNESLTAGTQGPILLHDHYLIEKLAHFNRERVPERVVHAKGGGAFGELVITGDVSKYTKAKFLQPGKKTESLVRFSTVAGEQGSPDTWRDPRGFAMKFYTEDGNYDLVGNNTPVFFIKDPIKFPDFIHSQKRLPGSGLRDHNMQWDFWTLSPESAHQVTWLMGDRGIPNTWRHMNGYSSHTYMWVNAQGERFWVKYHFKTDQGIEFFTQDEGDQMAAMDTDYHQRDLWEHIDGGDYPTWTLKMQIMPYEEAKTYRFNPFDLTKVWPHADYPLIDVGTMKLDRNPADYHCEIEQAAFEPSSSVPGTGPSPDKMLLGRWFSYPDAHRYRIGSNYKELPVNSPHAGPRNSYTKDGQLRHHNPGDPVYVPNSKGGPHADISVSGESPGWYTDGEMVHQAYTLRKDDDDWGQAGTMVRDVLDDAARERLVSNIVGHLLNGVTEPVLVRAFDYWRNVDKDLGERVEKGVRTAQNGNASSDRNPASPAAEAKA

SEQ ID NO: 35053 - protein, 312 aa, Pseudomonas aeruginosa
MTDTAKRPLYVPHAGPSLLEMPLLNKGSAFSTQERIDFNLQGLLPHNIETIEEQTERAYSQYNLCNTDLDRHIFLRSIQYNNETMFFRLLEEHLEEMMPIIYTPTVGQACQEFSKIYRTHRGLFISYPDRERIDDILRSATKNNVKIVVVTDSERNLGLGDQGIGGMGIPIASCPCTCGGISPAYTLPVVLDVGTNKPDLLNDPMYMAWRHERVSGAQYEEFVDLFIQAIKRCWPNVLLQFEDFAQTNAMPLLERYKDELCCFNDDIQGTAAVAVGTLLAACKAKGEKLSEQTVTFVGWPPPVAASPNRSSR

SEQ ID NO: 35054 - protein, 330 aa, Arabidopsis thaliana
MADTSSRTDVSTDGDTDHRDLGSDRGHMHAAASDSSDRSKDKLDQKTLRRLAQNREAARKSRLRKKAYVQQLENSRLKLTQLEQELQRARQQGVFISSSGDQAHSTGGNGALAFDAEHSRWLEEKNRQMNELRSALNAHAGDTELRIIVDGVMAHYEELFRIKSNAAKNDVFHLLSGMWKTPAERCFLWLGGFRSSELLKLLANQLEPMTERQVMGINSLQQTSQQAEDALSQGMESLQQSLADTLSSGTLGSSSSDNVASYMGQMAMAMGQLGTLEGLIRQADNLRLQTLQQMLRVLTTRQSARALLAIHDYSSRLRALSSLWLARPRE

SEQ ID NO: 35055 - protein, 47 aa, uncultured basidiomycete
HWHGFFQKTTNWADGAAFVTQCPIAPGDSFSYNFEVPDQAGTFWYHS

SEQ ID NO: 35056 - protein, 454 aa, Pseudomonas fluorescens Pf-5
MTHKNPQTREWQTLSSDHHLAPFSDFKQLKEKGPRIITHAKGVYLWDSEGNQILDGMAGLWCVAIGYGRDELAEAASKQMRELPYYNLFFQTAHPPVLELSKAIADIAPEGMNHVFFTGSGSEGNDTMLRMVRHYWAIKGQPNKKTIISRVNGYHGSTVAGASLGGMTYMHEQGDLPIPGIVHIPQPYWFAEGGDMSPEEFGIWAANQLEEKILELGVDNVGAFIAEPIQGAGGVIVPPDSYWPRIKEILAKYDILFVADEVICGFGRTGEWFGSDFYDLKPDMMTIAKGLTSGYIPMGGLIVRDEVVAVLNEGGDFNHGFTYSGHPVAAAVALENIRIMREEKIIQRAHEKAAPYLQKRLRELSDHPLVGEVRGVGLLGAIELVKDKATRARYEGRGVGMICRQFCFDNGLIMRAVGDTMIIAPPLVISEAEIDELVAKARKCLDLTLSVLEG

SEQ ID NO: 35057 - protein, 99 aa, Arabidopsis thaliana
IVTEDSEVAEIFLRQVDSAAVFHNASTRFSDGFRFGLGAEVGISTSRIHARGPVGVEGLLTTRWIMRGKGQVVDGDNGIVYTHKDLPVLQRTEAVENGI

SEQ ID NO: 35058 - protein, 342 aa, Listeria monocytogenes str. 4b H7858
MKNNVLVTGGTGFLGMHIIFQLLQQGYQVKTTVRSLKSKEKVIEVLQNNGITDFTQLSFVELDLSKDEGWKEAMLDCKYVLSVASPVFFGKFKNEEELIRPAIEGITRILQAAKEAKVKRVVMTSNFGAIGFSNADKNSITTEAYWTDELAKGLSAYEKSKLIAEKEAWKFMENETELEFATINPVAIFGPSQSSHVSGSFDLLKNLLNGSMKRIINIPLNVVDARDVADLHIRAMITPEANGERFIASADGEISMADIAHLLQRERPELVSKMPKKTLPNAAIRAAAIFSKHAKEGELMINMNRQISNSKARDLLGWQPISTKEEAVLAAVDSLAKYGLLD

SEQ ID NO: 35059 - protein, 245 aa, Oryza sativa (japonica cultivar-group)
MEEVKTLLETPDHEIDRMKLSVTHLRLLQEAKERIKAKIPSGPSSSNHSTSQFGDMDDEYNEQDNWDNDRTENHVVENTTKLNYHSYMNRQTRAKWSKSETDKFYEGLQQFGSDFAMIQHLFPDKSRNQVRQKFKAEEKKHPMQVHDAIMHRSRDNLYFKEVIKKLNIEDVQPDINNTHEQEGTSNEEDPGNKNIPGGLINEEEENGLDWSDKELDMHRSEVEEKEHVSTNDDDDDDLGDVFDWY

SEQ ID NO: 35060 - protein, 600 aa, Arabidopsis thaliana
MASTFTATSSIGSMVAPNGHKSDKKLISKLSSSSFGRRQSVCPRPRRSSSAIVCAAKELHFNKDGTTIRRLQAGVNKLADLVGVTLGPKGRNVVLESKYGSPRIVNDGVTVAREVELEDPVENIGAKLVRQAAAKTNDLAGDGTTTSVVLAQGFIAEGVKVVAAGANPVLITRGIEKTAKALVTELKKMSKEVEDSELADVAAVSAGNNDEIGNMIAEAMSKVGRKGVVTLEEGKSAENNLYVVEGMQFDRGYISPYFVTDSEKMSVEFDNCKLLLVDKKITNARDLVGVLEDAIRGGYPILIIAEDIEQEALATLVVNKLRGTLKIAALRAPGFGERKSQYLDDIAILTGATVIREEVGLSLDKAGKEVLGNASKVVLTKETSTIVGDGSTQDAVKKRVTQIKNLIEQAEQDYEKEKLNERIAKLSGGVAVIQVGAQTETELKEKKLRVEDALNATKAAVEEGIVVGGGCTLLRLASKVDAIKATLDNDEEKVGADIVKRALSYPLKLIAKNAGVNGSVVSEKVLSNDNVKFGYNAATGKYEDLMAAGIIDPTKVVRCCLEHAASVAKTFLMSDCVVVEIKEPEPVPVGNPMDNSGYGY

SEQ ID NO: 35061 - protein, 329 aa, Triticum aestivum
  misc_feature (168)..(168): Xaa can be any naturally occurring amino acid
  misc_feature (182)..(182): Xaa can be any naturally occurring amino acid
  misc_feature (198)..(198): Xaa can be any naturally occurring amino acid
  unsure (1)..(329): unsure at all Xaa locations
MRPVLMKGHERPLTFLKYNRDGDLLFSCAKDHTPTVWYASNGDRLGTYRGHNGAVWSCDVSRHSTRLITGSADQTAKLWDVQTGRELFTFRFDAPARSVDFAIGDHLAVITTDSFMGKTPTAQVKRIAEDIQDRTETEESALVISGITGRINRAVWGPGNRTIITAGXEDATIRIWDSETGXCWKESDKEVGHQKAIXSLSKSLDWSHFLTGSLDKSAKLWDARTLTLIKTYVTERPVNAVDISPTLDHVVIGGGQDAMNVTMTDRRAGKFEAKFFHKILEEEIGGVKGHFGPINALAFNPDGRSFSSGGEDGYVRLHHFDPEYFNIKM

SEQ ID NO: 35062 - protein, 605 aa, Oryza sativa
MDLLSVLLIIASLLPFSASDRQGDALYDMKLKLNATGNQLSDWNQNQVNPCTWNSVICDNNYNVVQVTLASMGFTGVLSPRIGELQFLNVLSLPGNKITGGIPEQIGNLSSLTSLDLEDNLLVGPIPASLGQLSKLQILILSQNNLNGTIPDTVARISSLTDIRLAYNKLSGSIPGSLFQVARYNFSGNNLTCGANFLHPCSSSISYQGSSHGSKVGIVLGTVVGAIGILIIGAVFIVCNGRRKSHLREVFVDVSGEDDRRIAFGQLKRFAWRELQLATDSFSEKNVLGQGGFGKVYKGALPDGTKIAVKRLTDYESPGGEAAFLREVELISVAVHRNLLRLIGFCTTQTERLLVYPFMQNLSVAYRLREFKPGEPILDWSARKRVAIGTARGLEYLHEHCNPKIIHRDVKAANVLLDEDFEPVVGDFGLAKLVDVQKTSVTTQVRGTMGHIAPEYLSTGKSSERTDVFGYGIMLLELVTGQRAIDFSRLEEEDDVLLLDHVKKLQREGQLGAIVDRNLSSNYDGQEVEMMIQIALLCTQASPEDRPSMSEVVRMLEGEGLAERWEEWQQVEVTRRQDYERMQQRFDWGEDSIFNQEAIELSAGR

SEQ ID NO: 35063 - protein, 444 aa, Sulfolobus solfataricus P2
MGEIEDKKIIRDHTFKTWSKQKGWDPIIVSSAKGVYFYDVEGKKYLDFSSQFVNVNLGYGNERVINSIKEQLDRLQYINPSFGADIRVKATKALLKVMPRNISKFFYSTSGTEANEAAIKISRFYKKPRYKILARYRSYHGSTEGSISLTGDYRRWFVEPNTMNGVVRIPEPYCFRCPLKLKYPDCGIACATYVDYVIRQEKNVAAMIIEPITGTNGVIVPPKEYMPLIRKIAKENDVLFIADEVMTGWGRVGEWFAVNLWDIHPDILTTAKGASASYVPIGITGVSKEIGEFFEDEVFAHGHTFEAHPVSLSAIPAVIEEYERLNILSHVKVMGDYLGKRLQELKERHRSIGDVRGVGLFWAIELVKDKNNTPFGGYDDKYEGYTTFVDVLARRLLIEKNTYVYNGPSWFIISPPLIINKEEIDEGVDAIDDILKEADKEFNN

SEQ ID NO: 35064 - protein, 260 aa, Photobacterium leiognathi
MAYMLKYDSTHGRFNGTVEVEGGNLIVNGKTVRVTAERNPEDLKWDAINVDVVAEATGLFLTDETARKHITAGAKKVVLTGPSKDATPMFVMGVNQDTYAGQDIVSNASCTTNCLAPIAKVLNDKFGIESGLMTTVHATTATQKTVDGPSAKDWRGGRGASQNIIPSSTGAAKAVGVVLPELNGKLTGMAFRVPTANVSVVDLTVNLKNGASYEAICAAMKEASEGELKGVLGYTEDQVVSQDFIGETQTSVFDAKAGTL

SEQ ID NO: 35065 - protein, 1012 aa, Prochlorococcus marinus str. MIT 9313
MGHRGHLGMEEQLQARRLAWIETFRSRSRWDLKPGWYRVGDRDRWSLLQDDWAQIHRPDWVARGLLVWPRGGVWLQLQQEILCPEDWRQAQASSLRLVLGWWADQMRLWVDGVLVHEGDLFDTTCRWSLPESIPWERPLTLLLELRSPIHDDGALINSELVLEPRAGAVDLDQVLLPEALALYLEVGEVLPEAWLELDPHSQEATVAVEQQLRNAAQPPGLIHWIGHAHLDLAWLWSVADTWQAAERTFRSVLHLMQRFPDFHFSHSSPALYQWVEHHRPTLFAALQDASRAGRWEPINGPWVETDCVLVSTASLWRQFTLGQQYSRSAFPEWSHQLAWLPDSFGFAAGLPAVATQTGIRWFCTHKLAWNASNPFPHRLFRWCSRGQAEVLALMLPPIGTDGNPMAMLREQRSWQASTAVEEALWVPGVGDHGGGPTAEMLEQLQLWEDHPQALPQRPGTVRAYLVTLEAHAETLPVWRDELYLELHRGCATTRPDQKRQNRHLERLLREADLAIALLACQLGDRADVPGTSASSLPDWRPLLFQQFHDILPGTSIPEVFEQAVPVWRSSCRESRRSRDQHLQQLFRSGVSCSDRCDSESSGGCWVWMGLQPLQRWSPVLRLPRDQWGSAGRQLPCQEAKGGGTWVQLPVQQGVTAVPLQRCVSKALDVVDGLPVRGVVQIQSLDQGGWRISNGLLQADFGAEGLQQLWDRNGTPQLAGPLIWGLFRDSGEFWDAWDLAADYRQHPLALNWNSSMELVERGPLVARLVLRGWAGSSALRLDVQLRADCPWLELRLGVDWRQSHELLRLEVPLACSAVRWAADTSGGVIERPADAMTAREKARWEVPVISWLASESAAPGGGLAVLLDGPQGVHVCPDRLGVSLLRGATWPDPSADRGWHRQRLALMPVPDGWSREAVPQAALAFREPGWLGPSDLKVSWSGLPSLPSKLIPLAVTYAELRQLKLSVLNAGATRQSWAVGKTWRVGSAHESCLGEAVELKPGELAELLLERVD

SEQ ID NO: 35066 - protein, 213 aa, Wolbachia endosymbiont of Drosophila ananassae
MEIFLDSVDLNEIKGLKEFIDGITTNPSLIAKSGRKDKYEDLVREICSIIKGPVSVEVVADSHEEMITEGLNLAKIADNVVIKLPLTHEGLISCKKLWTEHKIPVNITLCFSPGQALLAAKVGACFISPFVGRLDDISYDGLSLIEDICTIYSNYGFDTKVLVASVRSPAHVIEAARLGADSITVPAKVLRQLINHPLTDQGLAIFEKDWGVK

SEQ ID NO: 35067 - protein, 398 aa, Arabidopsis thaliana
MYLVESKGGAIACMLLALLSLGTWPAVLTLLERRGRLPQHTYLDYSITNLLAAIIIAFTFGQIGSTKPDSPNFITQLAQDNWPSVMFAMAGGIVLSLGNLSTQYAWALVGLSVTEVITSSITVVIGSTLNYFLDDKINKAEILFPGVACFLIAVCLGSAVHRSNADDNKAKLRDFETAKQEASGPSTEIGTNSSKDLETNVTTKPKEGTARFLIELENTRAIKVFGKRKIIGLAITFFAGLCFSLFSPAFNLATNDQWNRLKQGVPKLVVYTAFFYFSVSCFIIALILNVVFLYYPVLGLPKSSFKAYLNDWNGRYWAFLAGFLCGFGNGLQFMGGQAAGYAAADSVQALPLVSTFWGVVLFGEYRRSSRKTYLLLFCMLFMFISAVAVLMASSGHRK

SEQ ID NO: 35068 - protein, 414 aa, Arabidopsis thaliana
MENGATTTSTITIKGILSLLMESITTEEDEGGKRVISLGMGDPTLYSCFRTTQVSLQAVSDSLLSNKFHGYSPTVGLPQARRAIAEYLSRDLPYKLSQDDVFITSGCTQAIDVALSMLARPRANILLPRPGFPIYELCAKFRHLEVRYVDLLPENGWEIDLDAVEALADENTVALVVINPGNPCGNVYSYQHLMKIAESAKKLGFLVIADEVYGHLAFGSKPFVPMGVFGSIVPVLTLGSLSKRWIVPGWRLGWFVTTDPSGSFKDPKIIERFKKYFDILGGPATFIQAAVPTILEQTDESFFKKTLNSLKNSSDICCDWIKEIPCIDSSHRPEGSMAMMVKLNLSLLEDVSDDIDFCFKLAREESVILLPGTAVGLKNWLRITFAADATSIEEAFKRIKCFYLRHAKTQYPTI

SEQ ID NO: 35069 - protein, 267 aa, Helicobacter hepaticus ATCC 51449
MSAQPKPQLMGHIIAGYPSFESSLYAALGICQAGASYLEVQFPFSDPNADGRVIEEACNKSIAQGFKVAQGFKLLHTLSQHINQDNKQPTRLIIMTYANLIFHYGIEAFIKEAKKCGVWGIIAPDLPIESDESLRILAKKHHIRIISLIAPKVSISRIKKIAKISDEIVYVVARAGITGEKTHIDKALFEWIRLIQKHCKKPIALGFGINSYEQVAALKDKVDIIVAGSYFVRFISELSTQSQLSPQDYMHKLQAHAQMLMGWDINE

SEQ ID NO: 35070 - protein, 302 aa, Triticum aestivum
  misc_feature (191)..(191): Xaa can be any naturally occurring amino acid
  misc_feature (220)..(221): Xaa can be any naturally occurring amino acid
  misc_feature (237)..(237): Xaa can be any naturally occurring amino acid
  misc_feature (293)..(293): Xaa can be any naturally occurring amino acid
  unsure (1)..(302): unsure at all Xaa locations
MPEAPSAQPAPASGYAPGAHREALDFIEHVTANAGKVQQRVLAEILAQNETAEYLRRYGVSSSSSPLDPVDAFRRCVPLVTYEDLQPDILRIANGDSSPILSGKPISEFLTSSGTSGGERKLMPTIADELDRRSLLYSLLMPVMSQSLPGLDKGKAMYLLFVKAESRTPGGLAARPVLTSYYRSRQFLDRXRDPYTGYTSPNEDILCVDSYHSMYAQLIXXLLHRTDVLSRHAVVAXGLLRAIRFIEKHWPRLCHDIRTGELVPEITDKTERDAFGRVNQRKPSVSGKIEAKXLKPPWEGFF

SEQ ID NO: 35071 - protein, 122 aa, Helicobacter hepaticus ATCC 51449
MKMPPLNEQERAVLLHKATEAPFSGAYTDCFENGIYLCRQCGTPLYESNAKFPSHCGWASFDDEIQGAIKRIPDSDGVRTEIICAHCGGHLGHIFENEGFTPKNIRHCVNSLSLSFRKNNAQ

SEQ ID NO: 35072 - protein, 260 aa, Zea mays
ARLQPALAAGARGLGTAAEVAATARWEPMGAREYYDYRRAMYGDITHKAILVDAAGTLLAPTEPMAQVYRTIGQKYGVDYSEDEILMRYRWAYAQPWGRSRLRYVNDGRPFWQYIVSSSTGCSNLEYFEELYQYYTTEKAWHLCDPDAGRVFEALRKAGVKTAVVSNFDTRLRPLLQALKCDRWFDAVAVSAEVAAEKPNPTIFLKACELLRVKPEEVVHIGDDRRNDLWGARDAGCDAWLWGSDVYSFKEVAERIGVEV

SEQ ID NO: 35073 - protein, 308 aa, Neisseria gonorrhoeae FA 1090
MSEVKKTKVHLISGFLGTGKTTALKSLMAQKDPNEKWVIIVNEFGEIGIDGAVLSDNGIPVAEIAGGCLCCTAGPQMGVTVQKMLRDAKPDRLMIEASGLAHAASVIDELKAKPLDSLLEIGAVFTVVDPRQFINPDYAQQALYKDQIGICDVLAASKTDLCTPEQLAEFHDKAAKLFPPKAKVVEVQNAQLDIQWLDIPVVEKSRYRLKALPDNTMGFQSQGFTFPAGRDFNGEKLTNFFNDLPKMTEGLVRAKGVFQVLGTWVWLNWVDGQWGANQVSWRRDSRFELIAKSFDADLIEQKLKDALE

SEQ ID NO: 35074 - protein, 740 aa, Mycobacterium smegmatis
  misc_feature (42)..(42): Xaa can be any naturally occurring amino acid
  unsure (1)..(740): unsure at all Xaa locations
MPEDRPIEDSPPIGEAQTDAPAGGCPAGFGRIKPPVAGGSNXDWWPNQLNMKILQKNPDVINPLDEDFDYRSAVQNLDVDALRADIVEVMHTSQDWWPADFGHYGPLFIRMAWHAAGTYRVSDGRGGAGAGMQRFAPLNSWPDNASLDKARRLLWPVKKKYGKNLSWADLIVYAGNVALEDMGFRTAGFAFGREDRWEPEEDVYWGPEQEWLDRTKRYTGERDLENPLAAVQMGLIYVNPEGPNGNPDPQASAIDIRETFGRMAMNDVETAALIVGGHTFGKTHGNGDASLVGPEPEAAPLEEVGLGWRNPQGTGVGKDAITSGLEVTWTHTPTKWDNSFLEILYGNEWELTKSPAGANQWKPKDNGWANSVPLAHEDGKTHPSMLTSDLALRVDPIYEQITRRWLDHPEELAEEFAKAWFKLLHRDMGPVTRYLGPEVPKDTWLWQDNIPAGNDLSDDEVAKLKELIADSGLTVSQLVSTAWKAASTFRSSDLRGGANGGRIRLQPQLGWEANEPDELAQVVRKYEEIQKASGINVSFADLVVLGGNVGVEKAAKAAGFDVTVPFTPGRGDATQEETDVDSFAYLEPKADGFRNYLGKGSDLPAEFKLIDRANLLGLSAPEMTTLVGGLRVLDVNHGGTKHGVLTDKPGALTTDFFVNLLDMSTAWKPSPADDGTYIGTDRATGSPKWTGTRVDLVFASNSQLRALAEVYAEDDSKEKFVKDFVAAWTKVMDADRFDVA

SEQ ID NO: 35075 - protein, 519 aa, Ceriporiopsis subvermispora
MARFQTLSAAVALGLSLGAFAAIGPVTDLEITDAFVSPDGPGLGREAVLAGGTFPGPLIQGNKGDNFQINVVNNLTNHTMLKTTSIHWHGLFQHGTTWADGPAFVSQCPIASGNSFLYNFNVPDQAGTFWYHSHLATQYCDGLRGPLVVYDPNDPHADLYDVDDESTVITLSDWYHAAASTLTFPTFDTTLINGLGRFAGTGGSDSNLTVITVEQGKRYRFRLVSISCDPNWVFSIDQHELTVIEVDGVNAVPLTVDAIQIFAAQRYSFVLNANQTVDNYWIRANPNNGNMGFANGINSAILRYVGADDVEPTSTGTTANLLNEADLSPLVPAAAPGAPNQDFDAVDVPMNLNFTFNGTNLFINGATFVPPSVPVLTQILSGAMTAQELLPAGSVYTLPRNATVQLSLPGNIIAGPHPFHLHGHTFSVIRSAGQSDYNYVDPIQRDVVSIGGATDNVTIRFTTDNPGPWFFHCHIDWHLQAGFAIVFAEETADVASANPVPADWSALCPTYDALSDADH

SEQ ID NO: 35076 - protein, 211 aa, Methanococcoides burtonii DSM 6242
MTFPYTKEVLEHFRNPQNVGKMEDPDGKGLEGSPACGDMVAVYLKVNPDTLVIEDISFESYGCASNIATASMITEMAKGKTLEEAKKITWKEAANALGGLPPVKAHCSVLAVEGLRSAIRDYEEKHGMVVENEATTVEVVSKRLKHVMNPMAGLDIIRTELVLKVVVEEGTVRIVLDIPSTHQFAVAIKEDIVDKLESLWDVESVTVDFIS

SEQ ID NO: 35077 - protein, 215 aa, Phytophthora infestans
MGAMLPYWFTAMTMKSVGVAAMEMVKEVKHQFATIPGLLEGLPGHGPPDHARCIKISTDASLREMIPPGLLVMLSPIIAGTFFGVHAVSGLLVGSLTSGVQLAISQSNTGGAWDNAKKFVEKGCVSIEDKEGKLIVQGKGSAIHKAAVIGDTVGDPLKDTSGPALNILMKLMAIISLVFGDFFKSINNGRGLLNVPADVSAAAAPVVEVTAAPQL

SEQ ID NO: 35078 - protein, 329 aa, Arabidopsis thaliana
  misc_feature (133)..(133): Xaa can be any naturally occurring amino acid
  unsure (1)..(329): unsure at all Xaa locations
MKKEKKMASNSALLMKTIFLVLIFVSFAISPATSTAPEECGSESANPCVNKAKALPLKVIAIFVILIASMIGVGAPLFSRNVSFLQPDGNIFTIIKCFASGIILGTGFMHVLPDSFEMLSSICLEENPWHKFXFSGFLAMLSGLITLAIDSMATSLYTSKNAVYYHDAQLLRYRVIAMVLELGIIVHSVVIGLSLGATSDTCTIKGLIAALCFHQMFEGMGLGGCILQAEYTNMKKFVMAFFFAVTTPFGIALGIALSTVYQDNSPKALITVGLLNACSAGLLIYMALVDLLAAEFMGPKLQGSIKMQFKCLIAALLGCGGMSIIAKWA

SEQ ID NO: 35079 - protein, 499 aa, Zea mays
  misc_feature (101)..(101): Xaa can be any naturally occurring amino acid
  misc_feature (116)..(116): Xaa can be any naturally occurring amino acid
  misc_feature (167)..(167): Xaa can be any naturally occurring amino acid
  unsure (1)..(499): unsure at all Xaa locations
ITMDPTKFRPSSSHDTTVTTTNAGAPVWNDNEALTVGPRGPILLEDYHLIEKVAHFARERIPERVVHARGASAKGFFECTHDVTSLTCADFLRAPGVRTPXVIVRFSTVIHERGSXPETIRDPRGFAVKFYTREGNWDLLGNNFPVFFIRDGIKFPDVIHAFKPNPXGRHVQEYWRVFDFLSHLPESLHTFFFLFDDVGVPSDYRHMEGFGVNTYTFVSAAGKAQYVKFHWKPTCGVRCILTDEEAALVGGRNHSHATQDLYDSIAAGSFPEWTLYVQVMEPDTEEQYDFDPLDDTKTWPEDLLPLRPVGRLVLDRNVDNFFNENEQLAFGPGLVVPGIYYSDDKMLQCRVFAYADTQRYRLGPNYLMLPVNAPRCAHHNNHYDGAMNFMHRDEEVDYYPSRHAPLRQAAPPTPLPPRPVAGRREKATIRKPNDFKQPGERYRSWDADRQDRFVRRFADSLGHPKVSQELRSIWIDLLAKCDASLGMKIATRLNMKPNM

SEQ ID NO: 35080 - protein, 183 aa, Brassica napus
  misc_feature (150)..(152): Xaa can be any naturally occurring amino acid
  misc_feature (154)..(156): Xaa can be any naturally occurring amino acid
  misc_feature (173)..(173): Xaa can be any naturally occurring amino acid
  unsure (1)..(183): unsure at all Xaa locations
MVADLCLEDDVKGEDNVKAEFICPFCADEFDILGLCCHIDEEHPVEAKNGVCPVCSKKVGLDIVGHITTQHCNVFKVQRRRRLRRGGYSSNYLTLRKSLGVGGASTFIPSSNLDSDPLLSSFMFRPPLANELVIPITEGDSVTKVSPKDXXXRXXXSNEDQEKARKSEFVRDXLWSTMLEDKF

SEQ ID NO: 35081 - protein, 661 aa, Bacillus thuringiensis serovar konkukian str. 97-27
MEQLEHHVTDNQRKHALTTNQGVKIAEDEFSLKMGLRGPTLMEDFHFREKMTHFDHERIPERIVHARGVGAHGYFQLYESLEAYTKADFLTNPSKKTPVFVRFSTVQGSKGSNDTVRDVRGFATKFYTDEGNYDLVGNNMPVFFIQDAIKFPDFVHAVKPEPHNDIPQGASAHDTFWDFVAHNPESTHMVMWQMSDRAIPRSLRMMEGFGVHTFRLINAEGKAHFVKFHWKPALGVHSLVWDEAQKIAGKNPDFHRQDLYEVIEKGDYPEWELGLQLIPEEDEHAFDFDILDPTKLWPEEEVPVKLVGKMTLNKNVDNFFAETEQVAFHPGHVVPGIDFSNDPLLQGRLFSYTDTQLSRLGGPNFHQIPINQPVCPFHNNQRDGMHQMQIHRGQTSYHPNGLNDNQPATVQAEQGGYEHYQEKIDGHKIRGRSKSFLNFYSQAKLFYNSMSPIEKQHIKEAFCFEVGKCKSDMVKANVIALLNHVDRQLAQEVANMIGAPLPKENREVNSDAKSPALSMSNTIFKADSKNVAIVLNGDPSVSLLSEWIQAFAQHRINYSIIDNKIYQFNDSIKVTDTYTTTDSSLFDAVLVFSSESVIHPPVLEFAETTFKHFKPIAYVLSNPHSLDNSKIKLDGAGIYNLANTSIKSFIEGIAQGRFWNR

SEQ ID NO: 35082 - protein, 463 aa, Bacillus thuringiensis serovar konkukian str. 97-27
MQHSNKSGTLNRGLKERHITLMSLGSAIGVGLFLGSASAIKLAGPSILLGYMIAGLVIFFIMRALGEMAIEQPVAGSFSKYAYDYLGPLAGYITGWNYWFLWVVTCMAEITAAGIYMQYWFPDIPRWTWALLALLLMSAFNFLSVKVFGELEFWFALIKIVTIICMIVVGAGIILFGFGNGGIATGISNLWSHGGWFPNGFSGLLLSMQMVLFAYLGVELIGVTAGEAQNPKKTLAKAIDNVFWRILLFYVGALFVMMAIYPWNELGEKGSPFVLTFQQIGIAKAAGIINFVVLTAALSSCNGGLFSTGRMLYTLAQQKKAPERFGRLNKNGIPSQGIVATAIVLLIGVILNYLVPAKVFTWLTSISTFGAIWTWGIILVAQIKFRKSLPTQKRQKLSYKMPLYPLSSYFSLAFLVLVLGIMAYSEDTRIALIVGPIWLIGLAIVYYMKGFHKIDETPNSKIS

SEQ ID NO: 35083 - protein, 469 aa, Streptococcus pyogenes SSI-1
MVSVMWFRRDLRIDDQKALAHAIASQSPTLCVFQFNNEQLNLLHSRNQSSFITSVLAFRKLLKCEGIDLYLMYGDLMTCFEQLLTQLKDWTDVYFNYDESGYGRLRDQKAAQFFKKNGIAVHTYQDHYLHGSQEIINQSGQPYKVFTPYYRIWQNYPKETPIKVELSQGRWLNLETPDDVLRTVESFKDEKYQDVATFDEASKQLNRFIQDQLAAYHANRDFPAQLGTSRLSPFLRIGAIGIRTVYHAVRQAPNSLGQATFLKELAWRDFYNMVYVAYPDQKTQPIQKAFSQIEWVNNPDWFQLWKEGKTGYPIVDAAMLQLQKTGWMHNRLRMIVASFLTKDLLCDWRLGEQYFQQQLIDYDAASNIGGWQWAASTGTDAVPYFRIFNPVTQGKRFDPKGEFIKAYLPQLEHVPEKYLHEPWKMPKYLQESVSCIIGTDYPQPIVDHAKQREQAIAKYEWAKEKAKIE

SEQ ID NO: 35084 - protein, 325 aa, Thiomicrospira crunogena XCL-2
MVTGLLGSGKTTAIHHLLEHKPSHETWGLLINEFGEIGIDAATLNLDSDIIEAVSGGCICCSAQMGYQQALHSLLKHPLDRILIEPTGLGHPAKIIDTLRAFQPQIHIAGLLCVITPAQLTPERWQKSAVMRDLIHLADTVLLNKIDTASPEEIQQAETMLQKVYPPKEKILLTQFGDFAEKQPGLVDFKQTQAPFTLLEGLSEHAEQTQHTPVEHHSTLPHCLKTQVQTGSTSTIGWQFGPQVQFNRTRFKEFITQQSSLIRAKGILRTGNEWQLFNQIDDQITFEDIAWRQDSRLELIYQTDITDQLQHIETELQKALLIRDQ

SEQ ID NO: 35085 - protein, 239 aa, Brassica napus
STHAVRSKCEKTYKSAGGRDHRFRVFKANVRRARRHQQLDPSAVHGVTQFSDVTPKEFSRKYLGLKRGVSLPNDTQKAGILPTSELPTDFDWREKGAVTPGKNQGLGGSCWSFSATGALEGAHFLATKERWSLSEQQLIDCDHTCDPQEANSCDTGCGGGLMNNAFEYALKTGGLMKEQDYPYTGRDRSVCEFNKTMIAGKVSNFSVGSGDEDQIAGNLGQNGALAIGINALGMQTYIA

SEQ ID NO: 35086 - protein, 137 aa, Solanum melongena
SSKYMTKSTGKDAFHLRVRVHPFHVLRINKMLSCAGADRLQTGMRGAFGKPQGVCARVAIGQVLLSVRCKDGNSNHAQEALRRAKFKFPGRQKIIVSRKWGFTKFSRTDYLKYKSENRIVPDGVNAKLLGNHGPLAA

SEQ ID NO: 35087 - protein, 157 aa, Glycine max
MRPILMKGHERPLTFLKYNRDGDLLFSCAKDHNPTVWFADNGERLGTYRGHNGAVWCCDVSRDSGRLITGSADQTAKLWNVQTGQQLFTFNFDSPARSVDFAVGDKLAVITTDPFMELPSAIHVKRIANDPAEQTGESVLLIKGPQGRNNRAIWGPL

SEQ ID NO: 35088 - protein, 149 aa, Canavalia lineata
MGAFSEKQESLVKSSWEAFKQNVPHHSAVFYTLILEKAPAAQNMFSFLSNGVDPNNPKLKAHAEKVFKMTVDSAVQLRAKGEVVLADPTLGSVHVQKGVLDPHFLVVKEALLKTFKEAVGDKWNDELGNAWEVAYDELAAAIKKAMGSA

SEQ ID NO: 35089 - protein, 487 aa, Prochlorococcus marinus str. MIT 9312
MTTALQTPQRRSRTRLQDASLVNGPMLLLRSIRGFSSNRSMLWLATVPLALFGLGLFNVAAHATELPDLNAAFLANNLWLFVATILVIFMNAGFAMVEAGMCRSKNAVNILAKNLFVFALAVTSYWFIGFGIMYYGKEIIPGILYFNSLFFDPTVTAEMIEGAELVPTVDFLFQAAFAGTAATIVSGLVAERVKFGEFVVFAIVLTAFIYPIAGSWKWNGGWLDQLGFIDFAGSSIVHSVGAWAGLVGAMLLGPRIGKYSDGKPQAMPGHNMAIATLGALVLWIGWYGFNPGSQLAMDQWVPYVAVTTTLAAAAGAIGATIVSTLTSGKPDLTMIINGILAGLVSITAGCGDMTLVGAWFAGLVGGIIVVFSVAALDAAEIDDPVGAFSVHGVCGVWGTIVIGLWGTEMQGSGLGIGLLNGGGIKLLLVQALGAAAYAIWTLVTCWIAWSVIGGLFGGIRVSEEEETQGLDIGEHGMEAYPDFASAK

SEQ ID NO: 35090 - protein, 547 aa, Bacillus subtilis subsp. subtilis str. 168
MKDDHQNKQHQSNAQGSEEAFSHKTSGKNESEDTLTNRQGHPVTDNQNVRTVGNRGPTTLENYDFLEKISHFDRERIPERVVHARGAGAHGYFEAYGSFGDEPISTYTRAKLFQEKGKKTPAFVRFSTVNHGKHSPETLRDPRGFAVKLYTEDGNWDLVGNNLKIFFIRDPLKFPDLVHAFQPDPVTNIQDGERIFDFISQSPEATHMITFLFSPWGIPANYRQMQGSGVHAYKWVNEEGKAVLVKYHFEPKQGIRNLTQKEAEEIQGKNFNHATQDLYDAIENGDYPEWEVYAQIMSDDEHPELDFDPLDPTKLWYKDDFPWKPIGKLVLNKNPENYHAEVEQASFGTGVLVDGLDFSDDKLLQGRTFAYSDTQRYRVGANYLQLPINSPKKHVATNQEGGQMQYRVDRAEGQNPHVNYEPSIMGGLKEAKQDGKDHTPHVEGDVKREAIDRTNNFGQAGETYRRFTEFERNELITNLVNTLSTCRKEIQDQMIENFTKADPDYGKRVAEGLKKVSENNSNGPIGTTETEQAAKQAEQESHPSDPY

SEQ ID NO: 35091 - protein, 410 aa, Arabidopsis thaliana
  misc_feature (116)..(116): Xaa can be any naturally occurring amino acid
  unsure (1)..(410): unsure at all Xaa locations
MESRVLLRATANVVGIPKLRRPIGAIHRQFSTASSSSFSVKPIGGIGEGANLISGRQLRPILLLDSSAINGGEKREILKPVKAAAAEGGDTAGDAKVGFLAKYPWLVTGFFFFMWXFLNVIFNILNKKIYNYFPYPYFVSVIHLFVGVVYCLISWSVGLPKRAPIDSNLLKVLIPVAVCHALGHVTSNVSFAAVAVSFTHTIKALEPFFNAAASQFIMGQSIPITLWLSLAPVVLGVAMASLTELSFNWLGFISAMISNISFTYRSIFSKKAMTDMDSTNVYAYISIIALFVCIPPAIIVEGPKLLNHGFADAIAKVGMTKFISDLFWVGMFYHLYNQLATNTLERVAPLTHAVGNVLKRVFVIGFSIVIFGNKISTQTGIGTGIAIAGVAMYSIIKAKIEEEKRQGKKA

SEQ ID NO: 35092 - protein, 271 aa, Wolbachia endosymbiont of Drosophila ananassae
MIQNILRLLHITTVLTRYNILPYLLPPSKKSINKIQGHKLKCALEKLGPVFIKFGQSISSRTDVLNEDITNNLLLICDRLPSFSHKIAVKTIESEFNCKLSDIFSSFSEKPIAAASISQVHRAVTTEGKEVAVKVLRPNIEKTFSRDIKMLSWLAEIAEKFSEQSKRLRPIELVKTFAEICRLELDLRFEAAHSSELKENTKNDRGFYVPEIDWNRTAKKVLTLEWIEATPIYEVEKLNNHKQIAINLIESFCNQYTGIVFFMPDNAFLQI

SEQ ID NO: 35093 - protein, 478 aa, Mycobacterium tuberculosis CDC1551
MVVANRLPVDLERLPDGSTTWKRSPGGLVTALEPVLRRRRGAWVGWPGVNDDGAEPDLHVLDGPIIQDELELHPVRLSTTDIAQYYEGFSNATLWPLYHDVIVKPLYHREWWDRYVDVNQRFAEAASRAAAHGATVWVQDYQLQLVPKMLRMLRPDLTIGFFLHIPFPPVELFMQMPWRTEIIQGLLGADLVGFHLPGGAQNFLILSRRLVGTDTSRGTVGVRSRFGAAVLGSRTIRVGAFPISVDSGALDHAARDRNIRRRAREIRTELGNPRKILLGVDRLDYTKGIDVRLKAFSELLAEGRVKRDDTVVVQLATPSRERVESYQTLRNDIERQVGHINGEYGEVGHPVVHYLHRPAPRDELIAFFVASDVMLVTPLRDGMNLVAKEYVACRSDLGGALVLSEFTGAAAELRHAYLVNPHDLEGVKDGIEEALNQTEEAGRRRMRSLRRQVLAHDVDRWAQSFLDALAGAHPRGQG

SEQ ID NO: 35094 - protein, 462 aa, Streptococcus agalactiae A909
MSKNNNDHTQKSENGMVRGLENRHVQLIAIAGTIGTGLFLGAGRSISLTGPSIVLVYAITGAFMFFMMRAIGEMLYQDPNQHTFINFITKYLGPGWGFFSTLSYWISLIFIGMAEITAVGEYVQFWFPEWPSWIIQIVFLAILSSINLIAVKAFGETEFWFAMIKVIAILGLIATGIFMVLTNFDTGHGYHASISNITNHFEWFPKGKLNFFMAFQMVFFAYLAIEFVGVTTSETANPRKVLPKAIQEIPMRIILFYAGSLLAIMAIFPWQQLPVNESPFVTVFKLAGIKWAAALINFVVLTSAASALNSTLYSTGRHLFQLANESPNALTKALKLDQLSRQSVPSRAIIASAVIVGASALISVLPGISDAFSLITASSSGVYISIYVLIMIAHWKYRKSPDFMEDGYKMPAYKILSPITLLFFLFVFVSLFLQDSTYIGAIGATIWIIGFGLYSHFKHKSH

SEQ ID NO: 35095 - protein, 108 aa, Zea mays
  misc_feature (54)..(54): Xaa can be any naturally occurring amino acid
  unsure (1)..(108): unsure at all Xaa locations
RIPERVVHARGVSDKGFFECTHDVTSLTCAYLLLAPGVRTPVIVRFSTVIHERXVPWRHIRDPRGFVVKMYTREGNCDLLGNNFPGFLIRDGIKLRYVIHSNKPNPWS

SEQ ID NO: 35096 - protein, 453 aa, Xylella fastidiosa Ann-1
MAVSFVISRFGSEVRPTLLLALPLVLGHVSTGLIGFVLNVIAGHHSTVTLAASTIGTALLWLPMLVPMGTLISLTVLVSQLHGAERERDIGPLFRQALWLAMLLGLVMFTFLSVVPALLPLFGIVPDIVPGAAKFLHVVRWGSLAFPLYFCMRYFCEGMHCTFPTMLLGFGGLLVLVPLSYALTYGRFGFAEYGVEGLGIATVTVMWLQAVVFALYLWRSRRFAHLQLFAHLELPCWARIRDLLNIGLPIGISILMEGGLFIVTTLLIGRFGTDEIAAHQIALSVAQLCFMIPMGVAEATTVRIGHAVGRCDLLVMRRVAWAGYAIVIGTQTLSASVLLLGYDVIVAAYTDDLVVASLASKLLLFAAIFQFPDGLQMLSSGVLRGMKDTRVPMLLAMISYWGLGMPLGLGLGFALEWNSRGMWIGLIIGLTAASVLLGWRFRVVSERMFAGIP

SEQ ID NO: 35097 - protein, 147 aa, Clostridium perfringens str. 13
MKYTKKEKEELKKVLTEEEYYVTQENGTERPFTNEYWDFNGEGIYVDITTGEPLFTSKDKFHSSCGWPAFSKPIDRSIIKEKVDKSHGMIRTEVRSKLGDSHLGHVFCDGPEELGGLRYCINSASLKFIPKEELKEKGYEEYLELFK

SEQ ID NO: 35098 - protein, 263 aa, Calystegia sepium
MSFGQGKWSLQGMTALVTGGTRGIGYGIVEELAGFGAEVYICSRKQNEVDECVGKWREKGFKVAGSACDISSRTQREELIKNVAHHFNGKLNILVNNAGTILPKDATEFKAEDYTLIMGTNFEASFHLCQLAHPFLKASSMGTIVFNSSVAGIIPVFKTTLYAASKGAINQVTKNLACEWAKDNIRVNSVAPWVIRTKLVNDFDSESEGSEEIERMIRRTPISRPGEVGEVSSLVAFLCLPAASYITGQTICVDGGYTITGFP

SEQ ID NO: 35099 - protein, 964 aa, Oryza sativa (japonica cultivar-group)
MAGKVEKMASIDAQLRMLAPAKLSEDDKLVEYDALLLDRFLDILQDLHGDDLRELVQECYEIAAEYEGKHDSQKLDELGNMLTSLDPGDSIVMAKAFSHMLNLANLAEEVQIAYRRRIKLKKGDFADENSALTESDIEETFKRLVVDLKKSPAEVFDALKSQTVDLVLTAHPTQSVRRSLLQKHSRIRNCLVQLYSKDITPDDKQELDEALQREIQAAFRTDEIRRTQPTPQDEMRAGMSYFHETIWKGVPKFLRRLDTALKNIGIDERVPYNAPLIQFSSWMGGDRDGNPRVTPEVTRDVCLLARMMASNLYCSQIEDLMFELSMWRCNDELRARADELHLSSKKDAKHYIEFWKKVPPSEPYRVVLGDVRDKLYNTRERARQLLSSGYSDIPEETTLTSVEQFLEPLELCYRSLCDCGDRVIADGTLLDFLRQVSTFGLCLVRLDIRQESDRHTDVLDAITTYLGIGSYREWSEERRQDWLLSELNGKRPLFGPDLPKTDEIADVLDTFRVIAELPADNFGAYIISMATAPSDVLAVELLQRECHVKTPLRVVPLFEKLADLESAPAAVARLFSIDWYRERINGKQEVMIGYSDSGKDAGRLSAAWQLYKSQEELINVAKEFGVKLTMFHGRGGTVGRGGGPTHLAILSQPPDTIHGSLRVTVQGEVIEQSFGEEHLCFRTLQRFTAATLEHGMHPPIAPKPEWRALLDEMAVVATKEYRSIVFQEPRFVEYFRLATPEMEYGRMNIGSRPSKRKPSGGIESLRAIPWIFAWTQTRFHLPVWLGFGSAFKHILEKDIRNLHMLQEMYNEWPFFRVTIDLVEMVFAKGDPGIAALYDKLLVSEELWPLGEKLRANCEETKQLLLQVAGHKDLLEGDLYLKQRLRLRNAYITTLNVCQAYTMKRIRDPDYHVTLRPHMSKEIMDWSKPAAELVKLNPTSEYAPGLEDTLILTMKGIAAGMQNTG

SEQ ID NO: 35100 - protein, 230 aa, Arabidopsis thaliana
  misc_feature (154)..(154): Xaa can be any naturally occurring amino acid
  unsure (1)..(230): unsure at all Xaa locations
MESISPVSNQLLQPTTTSSNSDRSRRKRKKKSSPSSVEKSPSPSISLEKWRSEKQQQIYSTKLVHALRELRISQQPSSSSSSSIPRGGRAVREVADRALAVAARGKTLWSRAILSKAVKLKFRKHKRQRISNPTTTTLTTGSIRSKKQRAPVFXLRAIGLPAVQRKVKVLSRLVPGCRKQSLPVVLEETTDYIAAMEMQIRTMTAILSAVSSSPPPPTPGHEGGQTHMLG

SEQ ID NO: 35101 - protein, 285 aa, Triticum turgidum subsp. durum
MEDERSTQSYQGGEAAEQVEVTDRGLLGNLLGKKKAEEDKEKQEELVTGMEKVSVEEPEVKKEEHEDGEKKETLFSKLHRSSSSSSSSSDEEEEEVIDDNGEVIKRKKKKGLKEKLKEQAARPQGYTEGEHVTGLPAPVAPASVQTHHDTDVVVEKIDGDVKTEAAPAVPEEEKKGFLEKIKEKLPGGHKKPEDAAPVPVTHAAPAPVHAPAPSAEEVTIPDPKEKKGLLGKIMDKLPGYHKTGEEDKSAAAAGRAQSQRLNAAVPETRDRTPIELLACVVFALR

SEQ ID NO: 35102 - protein, 382 aa, Citrobacter freundii
NVVLDKSFGAPTITKDGVSVAREIELEDKFENMGAQMVKEVASKANDAAGDGTTTATVLAQSIITEGLKAVAAGMNPMDLKRGIDKAVAAAVEELKALSVPCSDSKAIAQVGTISANSDETVGKLIAEAMDKVGKEGVITVEDGTGLQDELDVVEGMQFDRGYLSPYFINKPETGAVELESPFILLADKKISNIREMLPVLEAVAKAGKPLLIIAEDVEGEALATLVVNTMRGIVKVAAVKAPGFGDRRKAMLQDIATLTGGTVISEEIGMELEKATLEDLGQAKRVVINKDTTTIIDGVGDEAAIQGRVTQIRQQIEEATSDYDREKLQERVAKLAGGVAVIKVGAATEVEMKEKKARVEDALHATRAAVEEGVVAGGGVA

SEQ ID NO: 35103 - protein, 148 aa, Triticum aestivum
MKTRSQTTPKPLNTVRLPPVESPRTRSRPKPKPETRKKGTLGDLRRPKKPPTAFFYFMEDFRKTFQEENPSVKAMQDVGKACGEKWNKMAFEEKVKYYDLATERRAEFEKAMAQYNKKKGVCCTCMCIFYPISHSSDHFFVLLHVDKW

SEQ ID NO: 35104 - protein, 572 aa, Desulfotalea psychrophila LSv54
MTNKEIIKRLYHEIIPYKIPLFIAMFAMIVVAALTGAQAYLVKDLLDKIFMEKDVFFLQILPLIIIAIFFTKGVLYYTYAIILERVGQSIIRDFRLKIFAHIHRQSLSFFHNTPTGTLISRVLSDVALMQQAVSTVIIQLLRDFFQVIFLLGVIFYMNWKLALICFLIIPLAAIPIVKFGKIFRKLSTKTQEETAEVSNMLHETISGSRIVKAFCREDYEVERFHRQVETLFTITMKNAKYRVFQSPLMEIIGGFAVAGIIWVGGSEVINGSATPGTFFAFLTAMITAYDPVKRVSQVNSTIQQGLASAQRVFAILDIKPEIEDKPEATSLAPFKESIEFHDVSFSYGTEKILSHINLKVPAGEALAIVGPSGGGKTTLTNLIPRFIDLQEGSITIDGTDIRDVTTNSLRNQIAMVTQQTILFNDTIRNNIAYGKDSCTEEEIRRAAKAAHALTFIEELPNGFDTALGEGGAKLSGGQRQRISIARALLADAPILILDEATSALDTESEREVQKALENLMQNRTTFVIAHRLSTIKNASRIVVVKKGKIVEEGSHEELLKLEGEYQLLYNMQ

SEQ ID NO: 35105 - protein, 525 aa, Oryza sativa (japonica cultivar-group)
MERVLKDDAVEEKGERARMAAFIGAMAIADLVKTTLGPKGMDKILQSTGRGRSVTVTNDGATILKSLHIDNPAAKVLVDISKVQDDEVGDGTTSVVVLAGELLREAEKLVNMKIHPMTIIAGYRMAVECARNALLERTMDNKENIDKFRSDLMNIAMTTLSSKILSQDKEYFAELAVDAVLRLKGSTNLEAIQILKIPGGSLKDSFLDEGFILDKKIGLGQPKRIENAKILVANTAMDTDKVKIYGARVRVDSMAKVAEIEAAEKQKMREKVQKIIGHGINCFVNRQLIYNFPEELFADAGILAIEHADFEGIERLALVTGGDIASTFDNPESVKLGHCNVIEEIMIGEDKLIHFSGVAMGQACTIVLRGASEHVLDEAERSLHDALCVLSQTVNDTRVLFGGGWPEMVMAKAVDDLARKTPGKKSHAIDAFSRALQAIPTIIADNAGLDSAELISQLRAEHHKENCTAGIDVITGSVGDMQKRGISEAFKVKQAILLSATEAAEMILRVDEIITCAPRRREDRM

SEQ ID NO: 35106 - protein, 321 aa, Zea mays
  misc_feature (131)..(131): Xaa can be any naturally occurring amino acid
  misc_feature (153)..(153): Xaa can be any naturally occurring amino acid
  misc_feature (316)..(316): Xaa can be any naturally occurring amino acid
  unsure (1)..(321): unsure at all Xaa locations
MLARAPPPRPCSSAVGGACIARAHPRAAAGGGGVVKLVAARPGTRTTVAAAAAEAASNGSAAAAVAGISSSSSALVTSTVGKSTNILWHECAIGQKERQGLLNQKGCVVWITGLAVQVRSARADLFTFNTXLGIRLYIYIPVYSAVCLSVLTXSGKSTLACALSRELHGRGHLTYVLDGDNLRHGLNRDLSFGAEDRAENIRRVGEVAKLFADAGLVCIASLISPYRSDRSACRDLLPKHSFIEVFLDVPLQVCEARDPKGLYKLARAGKIKGFTGIDDPYEPPSDCEIVIQCKVGDCPSPESMAGHVVSYLETEXSDVYI

SEQ ID NO: 35107 - protein, 229 aa, Glycine max
MATTEPEHRRDENDDDSVTAEDEDTGAQVAPIVKLEEVAVTTGEEDEDPILDLKAKLYRFDKEGNQWKERGGGNVKLLKHKVTGKVRLVMRQSKTLKICANHLVHHSLTVQEHSGNEKSCVWHASDFADGELKDELFCIRFPSVENCKAFMTTMQEVAESQGEGEENKDASATADLLEKLTVGEDKSDEKEPEKVQITKKLTVGEDKSEDEEPEMATNTNEKGEHDVEA

SEQ ID NO: 35108 - protein, 691 aa, Oryza sativa
  misc_feature (261)..(261): Xaa can be any naturally occurring amino acid
  misc_feature (345)..(345): Xaa can be any naturally occurring amino acid
  unsure (1)..(691): unsure at all Xaa locations
MRRDDAAGGGGGGFQELFDSVRRSISFRPGGSAAAAAAALDEPASASGGGGFRGRISTCLRKSRGMGLLGMVASKSPSPPRRRLLPPPRSPPPAPTKSLSPQPAVVSQGGGGAGGVGGGEEEEANPPIRWRKGDLLGSGAFGSVFLGMDLDSGELLAVKQVLIGSSNATREKAQGHIRELEDEVKLLKNLSHPNIVRYIGTVREENSLNILLEFVPGGSIQSLLGRLGSFPEAVIRKYTKQILHGLEYLHRNGIIHRDIKXGANILVDNKGCIKLADFGASKQVEKLATTAKTMKGTPYWMAPEVIVGSGHDFSADIWSVGCTVIEMATGKTPWNQEIQEVSLLXHEGTTKSHPPIPEHLSPEAKDFLLKCLQKEPELRSTASDLLLHPFVTGGLEDLHQVNHATHKETSELPAYDMPTGDLGLNHSGNPSNLNSYKSSDMRPIWDGHSSDDMCQFADNDVVMVGSSFNPMSEPFDDWESPEQRSSQSREFGGLAKHVENNMSENDFTFPCEGGCEEDDELTESKIKEFLDEKAIDLKKLQTPLYEFYNTVNAGLSQGVGETCQVDNITDLQLPLQGRSPPIQMEGVAAVGPTSDILKSASPKSCTRRFSRSGVENGRILREIASPQLNKFEDKVHDIQDNPSISFSERQKKWKEELDQELEIGRVMRLGSFGKAPSPKSRGMTRKRDRVY

SEQ ID NO: 35109 - protein, 500 aa, Medicago sativa
FLHLRPTPSAKSKALRHLPNPPSPKPRLPFIGHLHLLKDKLLHYALIDLSKKHGPLFSLSFGSMPTVVASTPELFKLFLQTHEATSFNTRFQTSATRRLTYDNSVAMVPFGPYWRFVRKLIMNDLLNATTVNKLRPLRTQQIRKFLRVMAQSAEAQKPLDVTEELLKWTNSTISMMMLGEAEEIRDIAREVLKIFGEYSLTDFIWPLKYLKVGKYEKRIDDILNKFDPVVERVIKKRRGIVRRRENGEVVEGEASGVFLDTLLEFAEDETMEIKITKEQIKGLVVDLFSAGTDSTAVATEWALAELINNPRVLQKAREEVYSVVGKDRLVDEVDTQNLPYIRAIVKETFRMHPPLPVVKRKCTEECEINGYVIPEGALVLFNVWQVGRDPKYWDRPSEFRPERFLETGAEGEAGPLDLRGQHFQLLPFGSGRRMCPGVNLATSGMATLLASLIQCFDLQVLGPQGQILKGDDAKVSMEERAGLTVPRAHSLVCVPLARIG

SEQ ID NO: 35110 - protein, 349 aa, Sinorhizobium meliloti 1021
MQTNHLQDSKIPVTILTGFLGAGKTTLLNHILTERHGHRIAVIENEFGEVDVDSDLVLASEEEIYQMKNGCICCFVDVRNDLIEVLQKLLARKDKFDHILVETSGLADPTPVATAFFIDDEIGKHVTLDGIVTLVDAKHIGQHIDDPVLDGRDNQAVDQIVAADRIIINKIDLVSEGEIAPLERGMRKLNQTAEIVRSSYGRVDLSSILGISGFAPSYVAERAKLLDLDHHHHHDHHHHHHHLHDATVSSESFVFDRPFDQGRLTDYLAGLLREEGDDIFRTKGIIAIAGDPRFFVLQAVHKLMDFRPDHVWGKDMPYTKLVFIGRNLDRAALERGLECCLASAGDTDN

SEQ ID NO: 35111 - protein, 463 aa, Sinorhizobium meliloti 1021
MNTDSKCDAIEAMFPAPKLAALGLQHVLVMYAGAIAVPLIIGSALNLSKDQIAMLISADLFCCGIVTLIQCLGVWNVGARLPIMMGIGFTAVPPIIATGTDPDLGMPGVLGAVIASGVFTLLAAPYFSRWVRFFPAVVTGTVMLVIGLSLMRVGVNWAAGGQPMIKGPDGLIPNPAYGEPFALAVAAIVLVSILLMTRFLKGFLANLAVLFGIGIGFAIAVAFGKVDFQGVADASWVTVVTPFAFGMPIFDLWATVALCTVMIVMMIEATGQILAVGDMAGRTISEADLARGLRTDGLGNIIGGIFNTFTYTTYAQNVGLLQITGVMSRWAVAAGGVVLILLGCLPKIAFITASIPSYVVGGAAIVMFGMVSATGVKILARVNFVDNRRNLYIVAVSVGLAMIPVVADKIFAQLPEFIDRFFHSGVLVGTFSAVLLNLLFNGVPPREEVQPDLLGEGAMRHPG

SEQ ID NO: 35112 - protein, 202 aa, Glycine max
MVSATVDSDFAFLESVQQYLLGHDSINLMSETHQAASHDPFSDPNKCDGDSGNIAFRSEDATAVVARDHAPPTWKHYRGVRRRPWGKFAAEIRDPKKNGARVWLGTYDTEEKAALAYDKAAFKMRGQKAKLNFPHLIDSDNSDELSEPVMMTTSKRSLLEISSPSSSCSDDSSESQGTKRRKSLAELLNKLAKNRSQVKVEC

SEQ ID NO: 35113 - protein, 211 aa, Phytophthora infestans
MNVMVLRRSAAAVAAKQSLSRTAPAAVAGSTRGFANIPAPGKQDPKPTWGEVIEKMSDTFFLSDVFRATWLAWEVHVERKVTINYPYEKGMLSPRFRGEHALRRYPSGEERCIACKLCEAICPAQAITIEAEPRADGARRTTRYDIDMTKCIYCGFCQEACPVDAIVEGPNFEFATESHEELLYDKAKLLANGDKWEFEIAKNLSVEQLYR

SEQ ID NO: 35114 - protein, 352 aa, Zymomonas mobilis
RRFGYAIVGLGKYALNQILPGFAGCQHSRIEALVDGNAEKAKIVAAEYGVDPRKIYDYSNFDKIAKDPKIDAVYIILPNSLHAEFAIRAFKAGKHVMCEKPMATSVADCQRMIDAAKAANKKLMIGYRCHYDPMNRAAVKLIRENQLGKLGMVTTDNSDVMDQNDPAQQWRLRRELAGGGSLMDIGIYGLNGTRYLLGEEPIEVRAYTYSDPNDERFVEVEDRIIWQMRFRSGALSHGASSYSTTTTSRFSVQGDKAVLLMDPATGYYQNLISVQTPGHANQSMMPQFIMPANNQFSAQLDHLAEAVINNKPVRSPGEEGMQDVRLIQAIYEAARTGRPVNTDWGYVRQGGY

SEQ ID NO: 35115 - protein, 201 aa, Arabidopsis thaliana
  misc_feature (147)..(147): Xaa can be any naturally occurring amino acid
  misc_feature (163)..(163): Xaa can be any naturally occurring amino acid
  misc_feature (173)..(173): Xaa can be any naturally occurring amino acid
  unsure (1)..(201): unsure at all Xaa locations
SSSSEQVKKKAVFRNRFFNYFSCLLIDSISYLFQRFASNPKKLKMRPILMKGHERPLTFLRYNREGDLLFSCAKDHTPTLWFADNGERLGTYRGHNGAVWCCDVSRDSSRLITGSADQTAKLWDVKSGKELFTFKFNAPTRSVDFAXFGDRLASGLPTDHFAXRTVAFHVKGXRELTFWVWPNPFEKRGQFFGLKFRGGKV

SEQ ID NO: 35116 - protein, 617 aa, Triticum turgidum
MASWFETYHHPSKGKGKRRILRVQTRDTREQLCAHLCLLPLLLTAGENSYPVIVMIGTRVLAHSRVDPAIRWGAAAHGFVVIAPKKREAGQETSTSERKKTKRKWRRNFCGWTSHEAKEPSTSETKKTKRKWGRNFCGWTSHEAEEPLTSETKKTKRKWGRNFCGWTSHEAEEPSTSETKKKRKNGASSSEPDKKRWFKTKIWRKKKAKNKQLATLVKEISLPNSPKARAAAGEILRIGNHNIPSRVFTYSQLSDATNSFSQENLLGEGGFGRVYKGYIPETMEVISIPSPSFLFYVSLSWHLKMLCYIQQQHLPDVNYVIAVKQLDKDGLQGNREFLVEVLMLSLLHHPNLVTLLGYCTECDQKILVYEYMPLGSLQDHLLDLTPKSQPLSWHMRMKIAVDAARGLEYLHEVANPPVVYRDLKASNILLDGNLSAKLADFGLAKLGPVGDKTHVTTRVMGTYGYCAPEYAMSGKLTKMSDIYCFGVVFLELITGRRAIDTTKPTREQILVHWAAPLFKDKKKFTKMADPKLDSKYPLKGLYHALAISSMCLQEEASSRPLISDVVTALTFLADPNYDPPDDIEPLPITVPDFDRGISLGEPEEVKEKFEGKQVEDS

SEQ ID NO: 35117 - protein, 526 aa, Ralstonia metallidurans CH34
MGGDHRSDRWTDGGTGRSRRAGARRTRRNQHSRCILPARGQNRVPLYSVDPTPSAVDSGTPDTMTPATPPIAVVGGQPVPDGHAGATSRNGAKVPFEAGIRLAGVGKFQYRLFVIFGLVWLADAMQVLSIGFSAPSIAKTFGITMPQALQTGTLFFVGMLVGAIVFGRLADRIGRRPVLMIAIVIDALSGIASAFAPELSWLLVLRFLTGVGVGGTLPVDYTMMAEFLPSDRRGRWLVLLESFWAIGTICLAVLALVALSHGDQAWRVIFLVTGIPALIGVVLRFYIPESPMYLNRSGRSDEARKVLQRVAKTNGRNVEIPALQSDIVAPKSVLTLFSGTFRRRSFALFAAWALISIAYYGVFVYLPIKLGAEGFAFMRGQVFLVVLAIVQLPGFALSAYGVERWGRKPTLIGFLLLSAVGCMLYSLGTSPTVVVGSTLLMSFALLGTWGALYAFTPEVYPTDLRATGMGAAGAVARFGGLFAPAIIAPVMATHFTLALALISSMLLAGAFAIGMVNVESKDRALD

SEQ ID NO: 35118 - protein, 500 aa, Medicago sativa
FLHLRPTPTAKSKALRHLPNPPSPKPRLPFIGHLHLLKDKLLHYALIDLSKKHGPLFSLYFGSMPTVVASTPELFKLFLQTHEATSFNTRFQTSAIRRLTYDSSVAMVPFGPYWKFVRKLIMNDLLNATTVNKLRPLRTQQIRKLLRVMAQGAEAQKPLDLTEELLKWTNSTISMMMLGEAEEIRDIAREVLKIFGEYSLTDFIWPLKHLKVGKYEKRIDDILNKFDPVVERVIKKRREIVRRRKNGEVIEGEVSGVFLDTLLEFAEDETTEIKITKDHIKGLVVDFFSAGTDSTAVATEWALAELINNPKVLEKAREEVYSVVGKDRLVDEVDTQNLPYIRAIVKETFRMHPPLPVVKRKCTEECEINGYVIPEGALILFNVWQVGRDPKYWDRPSEFRPERFLETGAEGEARPLDLRGQHFQLLPFGSGRRMCPGVNLATSGMATLLASLIQCFDLQVLGPQGQILKGGDAKVSMEERAGLTVPRAHSLVCVPLARIG

SEQ ID NO: 35119 - protein, 563 aa, Oryza sativa (indica cultivar-group)
MGNCCVSRPSGADKRRRCGSSTAPHTRGGRRVIGAANMRCLSTVSSVSDAARAVMSNEPATVLGNSGSSGNGGVMAAEEMLRRYEIGEELGRGEFGVTRRCRDAVTGERLACKSISKRKLRSSVDVEDVRREVAIMRSLPAHANVVRLREAFEDADAVHLVMEVCEGGELFDRIVARGHYTERAAAAVMRTIMDVVQHCHKNGVMHRDLKPENFLYANASENSPLKVIDFGLSVCFKPGARFNEIVGSPYYMAPEVLKRNYGQEIDIWSAGVILYILLCGVPPFWAETDEGIAQAIIRSHIDFQREPWPKVSDNAKDLVRRMLDPNPYTRLTAQQVLEHPWIQNASAAPNIPLGEAVRSRLKQFTVMNKFKKKALLVVAEYLPTEELDAIRELFNMLDTKKKGHLTLEELRKGLQVIGHNIHDTDVDMLMEAADIDGNGILDCKEFVTVSIHLKKIRSEEHLPKVFSFFDKNGSGYIEIEELKEALSPRGDQKSIDDIFLDVDIDKDGKISYEEFELMMSAGMDWRNASRQYSRAVYNTLSRKIFKEVSLKLDHSGPLVAAGK

SEQ ID NO: 35120 - protein, 195 aa, Glycine max
MQAREITGLNYLLPSDPCPYPGHYSMVQNTIPTFQLHKLSNQFYGLQNPPKVLADFSPPQSSCISSNSTSDEADEQQQSLINERKHRRMISNRESARRSRMRKQKHLDELWSQVVWLRNENHQLMDKLNHVSASQDKVVQENVQLREEASELRQMICDMQLHSPYHPPPLSPIDDDVSPYVKSDSSITDSLDLLG

SEQ ID NO: 35121 - protein, 610 aa, Synechocystis sp. PCC 6803
MNRASPMTQAVPGLWAVITTFWPQIRAQWRLLLVAMVTLLADVGLRLLEPWPLKLLIDGVLIPTQTQPSLSLWGFTNLNAAWLLMLIAVGVIIIAVSRAIATYWNTVSLAIVGSRVMAQVRDQLYGHLQRLSLRYHYQARSGDLIIRVSSDANRLQEILLTAALPLVVSLLTLGGMVGVMAWLDLKLTLLSLATFPLFWLAANRLSAKIRHASLTQRHQEGAVASTAAESLSAIKLVQALSLEQAFADLFSRQNQRSLQENIETKRLAANLERLVDVLIAFGTALVMGYGGHLVIEDALTAGTVLVFLTYLRNAYKPVQNFAKYTGRLAKAAASGERILNILAETPDIQDKPGAIPAPFFQGRIEFKYVSFGYHPDQAILDGLNLTVRPGEKIALVGASGSGKSTLLSLLLRLYDPTAGKIFIDGHDLRDYQLTSLRNQMAVVLQESLLFAATIRENIAYGIEGATMAEIEAAARLANAHKFILELPQGYDTVVGERGTTLSGGQRQRLAIARAAMRQTPILILDEPTSGLDKVNEQLVFEALERLAENRTTFLVTHNLQLAIAADQILYLYQGQIREQGTHAELLARQGVYADLFQRQTLATVTKSLGR

SEQ ID NO: 35122 - protein, 164 aa, Azoarcus sp. EbN1
MMKRRLFLAALFGSAAAPLVRSVEQSTEALPLKIEKIHRSDEEWRKLLTPEQFRVLRDDGTESAGSSPLNDEKRKGEYVCAGCELPLFTSDMKYDSGTGWPSFFTTIPGHVETKLDFRMILPRTEYHCARCGGHQGHVFDDGPPPSGKRWCNNGVALKFVPAAG

SEQ ID NO: 35123 - protein, 656 aa, GIBBERELLA ZEAE PH-1
MPTINAHRTFEPPSMPSPPDFERRRSTASSLSHNTDSLGGLQSPPLRSRSSRPKSAKFSSYRLRSNSGLSLHTNEDILRQYTDYHPDGTPRAGLYSNGGGQWSAERLRSIDSVASSARSQRSSIAYTESDSSGELPIPDLVGREMFDMVMADHAASGQLWKFAADRGVGQNVDYLMKIRDYIQSLEQVVIQLSTISTSYTSITATSPLGLPPPMSKALNTNIKHLTTSLIPSLENMFLESKAFIEQRIVREIFPDFVKQQLSQCTSLALSLDAEGDSPLNPYPGLKGSFCLSDPSRSGNPIMLASDEFEELTGYSRTEVLAHNCRFLQGPQTDRDRIANMRSAIWRNDECTELLLNFRKDGTPFWNLLFLCPLLDKTGKTKFFMGAQIDVSSSIHDTDDVLKVLSYGAMEEERATERCSSRWASEASHDEPEHDEAFGIKNNTLKSKKATSFFKSFKKANPPPPSPPLSPRRSSDRPRSSGPTMDKTYSTRSVIRRFSSQPEMLMSTYARYMILEHVPSYPKSLGAMPLDQEGKYPPKLCVSFYSKEMSEALDLGPATEAVIGKDIFDIMTEQATLPSVTKAFKLTVRDLVVRDGKSVSLDLALANHIPRRANTSRSPTSDSDGPHKKPAKLMSHWTPLKDSEGHVKYVVMIVSPI

SEQ ID NO: 35124 - protein, 255 aa, Glycine max
MAETNNNVAVEVLEKEDLAVSLAKYVADLSNKFTSERGAFTVCLSGGSLINYLRKLLEPPYVDTLEWSKWHVFWVDERVVPKTHEDSNYKLALDGLLSKVPIPPGNVYAINDALSAEGAANDYETCLRHLVKNSIIASSPANGFPKFDLMLLGMGPDGHIASLFPGHPLVEEKQRWVTFIKDSPKPPPERITFTLPVINTSAYAALVVTGKGKADAVHSVLGKSQNFAKLPVGLVSPEGELKWFLDKGAASKLAA

SEQ ID NO: 35125 - protein, 169 aa, Brassica napus
  misc_feature (7)..(7): Xaa can be any naturally occurring amino acid
  unsure (1)..(169): unsure at all Xaa locations
SCDSGCXNGGLMNSAFEYTLKTGGLMREEDYPYTGKDGPVCKLDKSKIVASVSNFSVISIDEEQIAANLVKNGPLAVAINAAYMQTYIGGVSCPYICTRRLNHGVLLVGYGSAGYAPARFKEKPYWIIKNSWGETWGENGFYKICKGRNICGVDSLVSTVTAAVSTTAH

SEQ ID NO: 35126 - protein, 432 aa, Conidiobolus coronatus
MALTKDNEDLVRVGRGTPMGGLMREYWIPALKSTELEAGGSPVRLLLLGEKLVAFREPSGAVGVMDSRCPHRGVSLFMGRVEEGGLRCVYHGWKFSAEGKCVDMPSVRPEDEFKNSVRVARYPVKEMAGVVWVYMGTRKVLPELPRLEVLNLPENEVDVICLQRKSNWLQNLEGEIDTSHFNFLHVGGLHADEVPDDHPLKYTAQVAPQYLVKETALGTCYAAQVPAEEDHTYTRFAHFLFPFWALIPQADIAQNILARAWVPMDDEHTMMFFFRWTGSKAKRLDTPLKSGSPMPGVTLTDMKYKENTTDWYGRWQPLGDESNDWLIDRDLQKVGRVFSGIYGIHAQDQAMTDSMGPIIDHGLEQLAPTDLMIVRTRRRILKALRAHEANGTLPPGVDEADQYFTPRSGYYLTPKSVDWETAYEQRIEGLVR

SEQ ID NO: 35127 - protein, 381 aa, Bacillus cereus ATCC 14579
MVSISNQLKEKLISIRRHLHEYPELSYEEFETTKAIKNWLEEKNITIIDSNLETGIIAEVSGNKNGPIVAVRADIDALPIQEETHLSYASKVRGKMHACGHDFHTAAILGTAFLLKERESSLNGTVRFIFQPAEESSNGACKVIDAGHLRNVQAIFGMHNKPDLPVGTIGIKDGPLMAGVDRFEIEIHGVGTHAAVPDAGVDPIVASSQIVMALQTIVSRNISSSHNAVVSVTNIHAGNTWNVIPEKATLEGTIRTFQAETREKIPALMERIIKGVSDALGVKTKFRFYSGPPAVHNDKALSDLSTQVATKMNLNIISPSLSMAGEDFSFYQQEIPGSFVFMGTSGTHEWHHPAFTINEEALPISAEYFALLAERALKQFS

SEQ ID NO: 35128 - protein, 575 aa, Lycopersicon esculentum
MAASYSVPSMIMEEERRFEAEVAEVQAWWNTERFRLTKRAYSARDVVALRGTMRQSYASNELAQKLWRTLKTHQANGTASRTFGALDPVQVTMMAKHLDTIYVSGWQCSSTHTSTNEPGPDLADYPYDTVPNKVEHLFFAQQYHDRKQREARMSMCREERARTPFIDYLKPIIADGDTGFGGATATVKLCKLFVERGAAGVHIEDQSSVTKKCGHMAGKVLVAVSEHINRLVAARLQFDVMGTETVLVARTDAVAATLIQTNVDTRDHQFILGASNPNLKGKGLATHLSEAMAAGKTGPELQAIEDNWLGMAELKTFSQCVTDAIKKMNLAEYEKQRKLNEWMNHSSYEKCLSHEQAREVAERLGLPNLFWDWDLPRTREGFYRFQGSVEAAIVRGWAFAEYCDLVWMETSSPDMVECTKFSQGVKTLRPELMLAYNLSPSFNWDASGMNDNQMMDFIPRIAKLGYCWQFITLAGFHADALIVDTFAKDFARRGMLAYVEKIQREERSNGVDTLAHQKWSGANYYDRVLRTVQGGITSTAAMGKGVTEEQFEEKWTRTGATNLGDGSVVIAKARM

SEQ ID NO: 35129 - protein, 594 aa, Neisseria gonorrhoeae FA 1090
MALVELKVPDIGGHENVDIIAVEVNVGDTIAVDDTLITLETDKATMDVPAEVAGVIKEVKVKVGDKISEGGLIVVVEAEGAAAAPKAEAAAAPAQEAPKAAAPAPQAAQFGGAADAEYDVVVLGGGPGGYSAAFAAADEGLKVAIVERYKTLGGVCLNVGCIPSKALLHNAAVIDEVRHLAANGIKYPKPELDIDMLRAYKDGVVSRLTGGLAGMAKSRKVDVIQGDGQFLDPHHLEVSLTAGDAYEQAAPTGEKKIVAFKNCIIAAGSRVTKLPFIPEDPRIIDSSGALALKEVPGKLLIIGGGIIGLEMGTVYSTLGSRLDVVEMMDGLMQGADRDLVKVWQKQNEYRFDNIMVNTKTVAVEPKEDGVYVTFEGANAPKEPQRYDAVLVAAGRAPNGKLISAEKAGVAVTDRGFIEVDKQMRTNVPHIYAIGDIVGQPMLAHKAVHEGHVAAENCAGHKAYFDARVIPGVAYTSPEVAWVGETELSAKASGRKITKANFPWAASGRAIANGCDNGFTKLIFDAETGRIIGGGIVGPNGGDMIGEVCLAIEMGCDAADIGKTIHPHPTLGESIGMAAEVALGVCTDLPPQKKK

SEQ ID NO: 35130 - protein, 238 aa, Burkholderia sp. 383
MSPYIAEFIGTAILVLLGNGAVANVLLAKTKGKGADLIVIVMGWAMAVFVAVYVTASFSGAHLNPIVTISLALAGKFAWSKVGGYILAQMLGGMAGALLVWLAYRQHFAKEADADLKLAVFCTAPAIRSVTHNVLTEAICTFVLILGVLYLASPQVGLGALDALPVGLLVLGIGISLGGPTGYAMSPARDLSPRIMHALLPIPGKRDSDWRYAWVPVVGPLLGGAAAAGLYLRLHAMA

SEQ ID NO: 35131 - protein, 201 aa, Helicobacter hepaticus ATCC 51449
MQNQSIQSKQTSQQDNQQTSTMCSKQQGAVIWICGLAGAGKTTIAKEIFTLLEQKYSNVIFLDGDEFREIFGRSGFSKEERLEVARLIAKLCVFLSKSGLIVVCATISLFDEIYAFNRSHIARYFEVFVECSMEELLRRDKKALYSQALKGDIKDVIGIDLTYDTPKAHYVLQNNTADKLDSKVKELYNAVEKFLIQKGAK

SEQ ID NO: 35132 - protein, 335 aa, Zea mays
MAPLGDGGAAAAAASNNLVVSFGEMLIDFVPDVAGLSLAESGGFVKAPGGAPANVACAIAKLGGSSAFVGKFGDDEFGHMLVNILKQNNVNAEGCLFDKHARTALAFVTLKHDGEREFMFYRNPSADMLLTEAELDLGLVRRARVFHYGSISLISEPCRSAHMAAMRAAKAAGVLCSYDPNVRLPLWPSPDAAREGILSIWKEADFIKVSDDEVAFLTRGDANDEKNVLSLWFDGLKLLVVTDGDKGCRYFTKDFKGSVPGFKVDTVDTTGAGDAFVGSLLVNVAKDDSIFHNEEKLREALKFSNACGAICTTKKGAIPALPTVATAQDLIAKAN

SEQ ID NO: 35133 - protein, 597 aa, Photobacterium profundum SS9
MERKMTSPFNFSKRTFVKGLVAGGVIMGLSPCVTSAWAREYNGTNAQTPILTGTDFELIVSESIVNFTGVQRKATTINGSIPAPTLKFKEGDVVTIKVINQLKEPTSIHWHGLLLPYQMDGVPGISFPGIPAGETFTYQFKVQQSGTYWYHSHTAMQEITGMYGSIIIEPKEKDPFEYERDHVVILSDWTDENPMSVFNKLKMQGDYYNYNQPTVFGTLDQISRSGIAATYASKKMWNEMRMSPSDLADLSSETLTYLMNGNTPNGNWTGLFRKGERIRLRFINGASNTFYDVRIPGVKLTVVQCDGLNLEPVIVDEFRFGPGETYDVIIEPTEDANTIFAQAMDRTGFACGTLATSYGLKAAVPHLDAPQKLSMVDMMGDMTGMDHSKMDMSAMEGMDHSKMDMTVMEGMDHSMTDIIQNKASQHVRHARTEYGPSVDMRVNTPRTNLDDPGVGLRSNGRRVLTLADLKTFGGMIEHRPPERELELHLTGNMERYTWSFDGVEFGQSTPIHLRYGERVRIILQNDTMMTHPMHLHGMWSELETPNGELLVRRHTIPVQPAQRISFLVTADALGAWAWHCHLLFHMDAGMFRKVVIS

SEQ ID NO: 35134 - protein, 929 aa, Pectobacterium carotovorum subsp. carotovorum
MTKYSLRARMLILILAPTLMIGLLLSSFFVIHRYNQLQSQLADSGASIIDAAGNHQRYAITHRQMDTIPALINTLHRRHSAIIRTISVFDARNQLLATTKLRNKRTLQCLSNDVLAHNKLHLHHTNDALILHMPIVTDSEFMAGTTPVLPGTATPLGYLVIELDTSTIRLQQYQEIFIAALLLLLSLGAAVIFAYRLMRDVTTPIRNMVDTVDRIRRGQLDSRVEGYMLGELDMLKNGINSMAMSLTAYHEEMQQNIDQATYDLRETLEQMEIQNVELDLAKKRAQEAARIKSEFLANMSHELRTPLNGLIGFTRQTLKTPLNTTQTDYLLTIERSANNLLNIINDVLDFSKLEAGKLVLEDIPFSLHNTLDDVVMLLAHTAHEKGLELTLSIQNDVPEQFVGDPLRIQQIITNLLGNAIKFTEQGNIDIRVEKRRQELHQVLLEVQIRDTGIGIAELQQSQLFQAFRQADTSISRRHGGTGLGLVITQRLVKEMGGDISFQSELSKGSTFWFHITLPLNPHAIPTEPAYTMLQGKHLAYVEYHPIAAQATLDILSQTPLIVSYSPTFEQLPEGEFDILLLGIPVQYRNTLLDYTPRLRDICRRSPCVILALPSLAQMDAEQLKTFGVHACLSKPLAASRLLPLLQDSTLFQFSFLPDDTASHQSAVRHLARLPLRVMAVDDNPANLKLIGTLLEEQVETIILCESGQDAIAQAELNQCDIILMDIQMPGMDGICASELIRQIPHHATTPIIAVTAQTMTGEREHLLRSGMDDYLAKPIDEQMLKSVLTRHARQDPLKRNRGEMTGLLNEHDDSQLSLDWALAQQQAANKPELGRDLLQMLLDFLPEVQRKIENVLKGQTDDDIIELVHKLHGSCSYSGVPLQPICRYLEQQLRKGVHASDLEPEWLELLDEIDNVNRAAQPHINPRLP

SEQ ID NO: 35135 - protein, 534 aa, Streptomyces lividans
MAAPNSHRAEDWWRDAVIYQVYPRSFADGDGDGTGDLAGVRARLPYLAELGVDAVWFTPWYVSPLVDGGYDVADYRTIDPPFGTLGEAEKLIAEARELGIRTIVDIVPNHVSDRHAWFRAALEAGPGSAERERFHFRPGRGADGELPPNDWPSQFSGRTWTRVPDGEWYLHLFTPEQPDLNWAHPEVRREHEEVLRFWFERGVAGVRIDSAALLAKDPALADFVEGVDPHPYIDQDELHDIYRSWRKVADEYGGVFVGEVWLPDAERFARYLRPDELHTAFNFNFLSCPWEADRLRRTIDDTLAEHAPVGAPATWVLCNHDVTRTVTRYGRADTGFDFAKKAFGTPTDLVLGTRRARAAALLTLALPGSVYLYQGEELGLPEADIPRDRIQDPMHFRSGGVDPGRDGCRVPLPWAADAPYCGFGSETEPWLPQPEGWAAYAADRQGADPESMLSLYRRALGLRRSTAGFGDGGLDWLPAPDGVLAFRRAGGPVCVVNLSAAPVELPAHSAVLLVSGPLDEAGRLPADTAVWLRA

SEQ ID NO: 35136 - protein, 500 aa, Vicia villosa
FLHLRPTPTAKSKALRHLPNPPSPKPRLPFIGHLHLLKDKLLHYALIDLSKKHGPLFSLYFGSMPTVVASTPELFKLFLQTHEATSFNTRFQTSAIRRLTYDSLVAMVPFGPYWKFVRKLIMNDLLNATTVNKLRPLRTQQIRKFLRVMAQGAEAQKPLDLTEELLKWTNSTISMMMLGEAEEIRDIAREVLKIYGEYSLTDFIWPLKHLKVGKYEKRIDDILNKFDPVVERVIKKRREIVRRRKNGEVVEGEVSGVFLDTLLEFAEDETTEIKITKDHIKGLVVDFFSAGIDSTAVATEWALAELINNPKVLEKAREEVYSVVGKDRLVDEVDTQNLPYIRAIVKETFRMHPPLPVVKRKCTEECEINGYVIPEGALILFNVWQVGRDPKYWDRPSEFRPERFLETGAEGEARPLDLRGQHFQLLPFGSGRGMCPGVNLATSGMATLLASLIQCFDLQVLGPQGQILKGGDAKVSMEERAGLTVPRAHSLVCVPLARIG

SEQ ID NO: 35137 - protein, 116 aa, Phytophthora infestans
MSSFKKEHPFEKRQAEAQRIRSKYPDRIPVICEKADRSDIPDIDKKKYLVPADLTVGQFVYVIRKRIKLSPEKAIFIFINNVLPPTAALMSNIYEEQKDVDGFLYITYSGENTFGQ

SEQ ID NO: 35138 - protein, 231 aa, Photobacterium profundum SS9
MKILIIEDEIKAGQYLKKGLTESGYTVDLASDGVEGLYHATSHSYDLIILDIMLPKLDGWQILKTLRSSEMSTPVIMLTAKEQVEDRVKGFELGANDYVVKPYAFPELLARIQNVFRNHSPKSKNISQSNTIVIADLQLDIIKRTATRNNQSITLTAKEYLLLELLMRKQGEVLSRTTIASLVWDMNFDSDTNVIDVAVKRLRSKIDRPFEKELIHTIRGMGYKLEDIEEQ

SEQ ID NO: 35139 - protein, 258 aa, Mycobacterium bovis AF2122/97
MMDLSQRLAGRVAVITGGGSGIGLAAGRRMRAEGATIVVGDVDVEAGGAAADELSGLFVPTDVCDEDAVNGLFDGAAETYGRIDIAFNNAGISPPEDNLIENTELAAWQRVQDVNLKSVYLCCRAALRHMVLAGKGSIVNTASFVAVMGSATSQISYTASKGGVLAMSRELGVQFARQGIRVNALCPGPVNTPLLQELFAKNPERAARRMVHVPLGRFAEPDEIAAAVAFLASDDASFITASTFLVDGGISSAYVTPL

SEQ ID NO: 35140 - protein, 500 aa, Lens culinaris
FLHLRPTPTAKSKALRHLPNPPSPKPRLPFIGHPHLLKDKLLHYALIDLSKKHGPLFSLYFGSMPTVVASTPELFKLFLQTHEATSFNTRFQTSAIRRLTYDSSVAMVPFGPYWKFVRKLIMNDLLNATTVNKLRPLRTQQIRKFLRVMAQSAEAQKPLDVTEELLKWTNSTISMMMLGEAEEIRDIAREVLKIFGEYSLTDFIWPLKYLKVGKYEKRIDDILNKFDPVVERVIKKRREIVRRRKNGEVVEGEASGVFLDTLLEFAEDETMEIKITKEQIKGLVVDFFSAGTDSTAVATEWALAELINNPRVLQKAREEVYSVVGKDILVDEVDTQNLPYIRAIVKETFRMHPPLPVVKRKCTEECEINGHVIPEGALVLFNVWQVGRDPKYWDRPSEFRPERFLETGAEGEAGPLDLRGQHFQLLPFGSGRRMCPGVNLATSGMATLLASLIQCFDLQVLGPQGQILKGDDAKVSMEERAGLTVPRAHSLVCVPLARIG

SEQ ID NO: 35141 - protein, 500 aa, Lens culinaris
FLHLRPTPTAKSKALRHLPNPPSPKPRLPFIGHLHLLKDKLLHYALIDLSKKHGPLFSLYFGSMPTVVASTPELFKLFLQTHEATSFNTRFQTSAIRRLTYDSSVAMVPFGPYWKFVRKLIMNDLLNATTVNKLRPLRTQQIRKFLRVMAQGAEAQKPLDLTEELLKWTNSTISMMVLGEAEEIRDIAREVLKIFGEYSLTDFIWPLKHLKVGKYEKRIDDILNKFDPVVERVIKKRREIVRRRKNGEVVEGEVSGVFLDTLLEFAEDETMEIKITKDHIKGLVVDFFSAGTDSTAVATEWALAELINNPKVLEKAREEVYSVVGKDRLVDEVDTQNLPYIRAIVKETFRMHPPLPVVKRKCTEECEINGCVTPEGALILFNVWQVGRDPKYWDRPSEFRPERFLETGAEGEARPLDLRGRHFQLLPFGSGRRMCPGVNLATSGMATLLASLIQCFDLQVLGPQGQILKGGDAKVSMEERAGLTVPRAHSLVCVPLARIG

SEQ ID NO: 35142 - protein, 262 aa, Triticum aestivum
  misc_feature (41)..(41): Xaa can be any naturally occurring amino acid
  misc_feature (49)..(49): Xaa can be any naturally occurring amino acid
  unsure (1)..(262): unsure at all Xaa locations
MPRDSVFRPSPRSHREILDGMKPRASRPSFKMQILVKTLTXGKTITLEXVESSDTIDNVRAKIQDKEGIPPDQQRLIFAGKQLEDGRTLADYNIQKESTLHLVLRLRGGMQIFVKTLTGKTITWEVESSDTIDNVKAKIQDKEGIPPDQQRLIFAGKQLEDGRTLADYNIQKESTLHLVLRLRGGMQIFVKTLTGKTITLEVESSDTIDNVKAKIQDKEGIPPDQQRLIFAGKQLEDGRTLADYNIQKESTLHLVLRLRGGQ

SEQ ID NO: 35143 - protein, 522 aa, Vigna radiata
MLLELALGLLVLALFLHLRPTPTAKSKALRHLPNPPSPKPRLPFIGHLHLLKDKLLHYALIDLSKKHGPLFSLYFGSMPTVVASTPELFKLFLQTHEATSFNTRFQTSAIRRLTYDSSVAMVPFGPYWKFVRKLIMNDLLNATTVNKLRPLRTQQIRKFLRVMAQGAEAQKPLDLTEELLKWTNSTISMMMLGEAEEIRDIAREVLKIFGEYSLTDFIWPLKHLKVGKYEKRIDDILNKFDPVVERVIKKRREIVRRRKNGEVVEGEVSGVFLDTLLEFAEDETMEIKITKDHIKGLVVDFFSAGTDSTAVATEWALAELINNPKVLEKAREEAYSVVGKDRLVDEVDTQNLPYIRAIVKETFRMHPPLPVVKRKCTEECEINGYVIPEGALILFNVWQVGRDPKYWDRPSEFRPERFLETGAEGEARPLDLRGQHFQLLPFGSGRRMCPGVNLATSGMATLLASLIQCFDLQVLGPQGQILKGGDAKVSMEERAGLTVPRAHSLVCVPLARIGVASKLLSK

SEQ ID NO: 35144 - protein, 521 aa, Vigna radiata
MLLELALGLLVLALFLHLRPTPTAKSKALRHLPNPPSPKPRLPFIGHLHLLKDKLLHYALIDLSKKHGPLFSLYFGSMPTVVASTPELFKLFLQTHEATSFNTRFQTSAIRRLTYDSSVAMVPFGPYWKFVRKLIMNDLLNATTVNKLRPLRTQQIRKFLRAMAQGAEAQKPLDLTEELLKWTNSTISMMMLGEAEEIRDIAREVLKIFGEYSLTDFIWPLKHLKVGKYEKRIDDILNKFDPVVERVIKKRREIVRRRKNGEVVEGEVSGVFLDTLLEFAEDETMEIKITKDHIKGLVVDFFSAGTDSTAVATEWALAELINNPKVLEKAREEVYSVVGKDRLVDEVDTQNLPYIRAIVKETFRMHPPLPVVKRKCTEECEINGYVIPEGALILFNVWQVGRDPKYWDRPSEFRPERFLETGAEGEARPLDLRGQHFQLLPFGSGRRMCPGVNLATSGMATLLASLIQCFDLQVLGPQGQILKGGDAKVSMEERAGLTVPRAHSLVCVPLARIGVASKLLS

SEQ ID NO: 35145 - protein, 472 aa, Cytophaga hutchinsonii
MKHFVFLLISIIAGFSGAALFHKTVPVNSSTTTDQTIVPIVHQAAYSSPVQSNTATDFTLASAISTPSVVYITTVSANQNTNNWFDWYFNGNGNNFVAGSGSGVIYSADGYIITNNHVIQRATKIEVVHNRTTYTAKIVGIDPSSDLAVLKIEGENLPAVKIGSSADIKIGEWVLAVGNPFNLTSTVTAGIVSAKGRNINIVNSSFPIESFIQTDAAINPGNSGGALVNTKGELIGINTAILSKTGSYTGYGFSVPVDIVKKIVADLIKYGVVQKAFIGLEVSEVNSTIAKELKLSDLDGTYITYLQKGSAAEKAGLQKNDVLLKLNDKSITSRSDFDEYIAYKSPGEKIKITYKRDHVLKEAYVTLTNEDGNTEIVKHEVFSSQSLGADFSTLPKVEKEKMGLANGVRIVAVRSGLISRLGLQEGFIITSINRTPVSTPAEVASILENIRGQVIIEGIASSGSRAIYQYYF

SEQ ID NO: 35146 - protein, 96 aa, Arabidopsis thaliana
  misc_feature (40)..(40): Xaa can be any naturally occurring amino acid
  misc_feature (61)..(62): Xaa can be any naturally occurring amino acid
  misc_feature (85)..(87): Xaa can be any naturally occurring amino acid
  misc_feature (90)..(90): Xaa can be any naturally occurring amino acid
  unsure (1)..(96): unsure at all Xaa locations
MAMIDEPLYPIAVLIDELKNEDIQLRLNSIKKLSTIARGXWGEERTRKELIPFLSENNDDXXDEVLLAMAKKKLGVFIPYCLEGXXXAHXLLPPLE

SEQ ID NO: 35147 - protein, 526 aa, Glycine max
MEDPYVLGWILCSVLSLLALYSLAFGGAGRRRASPEKRNELSETVTTSAGECRSEKRNGDADVIIVGAGVAGAALAHTLGKDGRRVHVIERDLSEPDRIVGELLQPGGYLKLIELGLEDCVDKIDAQQVFGYALFKDGKHTRLSYPLEKFHSDVSGRSFHNGRFIQRMREKAASIPNVRLEQGTVTSLIEEKGTIKGVQYKTKDGQELATYAPLTIVCDGCFSNLRRSLCNPKVDIPSCFVGLVLENCELPCANHGHVILGDPSPILFYPISSTEIRCLVDVPGQKVPSISNGEMGKYLKTTVAPQIPPQLYDAFIAAVDKGNIRTMPNRSMPADPHPTPGALLMGDAFNMRHPLTGGGMTVALSDIVVLRNLLRPLSDLNDAPTLCKYLESFYTLRKPVASTINTLAGALYKVFCASPDQARKEMRQACFDYLSLGGLFSEGPVSLLSGLNPRPLSLVLHFFAVAIYGVGRLLLPFPSPKRVWIGARLISGASAIILPIIKAEGIRQMFFPATVPAYYRTPPVAQ

SEQ ID NO: 35148 - protein, 478 aa, Prochlorococcus marinus str. MIT 9312
MNNPRILFWHRKDLRIFDNQALIKAFSLSNAITSTYILDRNYTHDFSANSRAWFLGDSLQELGNNWEKMGSRLVIEEGDPVLIIPQLAKTIDAKFVIWNKTIEPYEINRDLQIKKNLKEKNIQVIESWDHLLVEPLKIFSGNNKPYSVYGPFYKNLKSKMNLLGLYDQDKVIFQFKDIDNKLKENKLINSSDSTLKKFLKNIKFSGSNICPCRPGENGAEILLEKFINEKNIYSYNSARDLPSHNGTSFLSASLRFGTISIRKVWNATLDLNSDFESHENSLSIETWQKELVWREFYQHCLFHFPELEKGPYRKKWGQFPWQNNNEWFQHWSNGETGVPIVDAAMRQLNSTGWMHNRCRMIVASFLVKDLICSWQMGEKKFMETLVDGDLAANNGGWQWSASSGMDPKPLRIFNPYTQAKKFDPICEYIKSWIPELSKVSNSDLLNGEISNLEKNNYSTPIVDHNIQQRLFKSLYAEI

SEQ ID NO: 35149 - protein, 339 aa, Bacillus subtilis subsp. subtilis str. 168
MAILVTGGAGYIGSHTCVELLNSGYEIVVLDNLSNSSAEALNRVKEITGKDLTFYEADLLDREAVDSVFAENEIEAVIHFAGLKAVGESVAIPLKYYHNNLTGTFILCEAMEKYGVKKIVFSSSATVYGVPETSPITEDFPLGATNPYGQTKLMLEQILRDLHTADNEWSVALLRYFNPFGAHPSGRIGEDPNGIPNNLMPYVAQVAVGKLEQLSVFGNDYPTKDGTGVRDYIHVVDLAEGHVKALEKVLNSTGADAYNLGTGTGYSVLEMVKAFEKVSGKEVPYRFADRRPGDIATCFADPAKAKRELGWEAKRGLEEMCADSWRWQSSNVNGYKSAE

SEQ ID NO: 35150 - protein, 550 aa, Debaryomyces hansenii CBS767
MPYTKIDVNEEEKFFQDQVKEIQQWWKEPRWAKTKRIYQAEDIAKKRSSLKVDYPSSNQAKKLYKLLQEHDKNKSASFTFGALDPVQVTQMAKYLDSIYVSGWQCSSTASTSNEPSPDLADYPMDTVPNKVEHLWFAQLFHDRKQREERLNLSKEERAKTPYTDFLRPIIADADTGHGGITAILKLTKLFVERGAAGIHIEDQAPGTKKCGHMAGKVLVPVQEHINRLVAIRASADILGSDLLCVARTDSEAATLLTSTIDHRDHYFVLGATNPESPDLAALMAEAESNGIYGDKLASIEVEWTKKAGLKLFHEAVIDEINNGNFSNKQALIKKFTDKVNPLSATSNKEARKLAREILGKDVFFDWDVARAREGYYRYQGGTQCAVMRGQAYAPYADMIWMESALPDFKQAKEFAEGVKAKWPDQWLAYNLSPSFNWNRAMPPNEQETYIKRLSELGYVWQFITLAGLHTTALAVDDFANQYSQIGMRAYGQTIQAPEIEKGVEVVKHQKWSGAEYIDGLLKMVTGGVSSTAAMGAGVTEDQFKEKAAGK

SEQ ID NO: 35151 - protein, 284 aa, Methanococcus voltae
MKNLENLEKDLKNDLKKDLKKEKPILVSFLVSGDPNIEATLKFMNALDEYCGVIELGIPFSDPIADGSTIQEANVRSLSNGYKIHQSFDVLREFRKFSDTPVVLMTYYNPIYKRGIENFVIQAKEAGANGLIIVDLPLDEAEQYRAICKKHDMGTVFLVAPNTPDERLMYSDEASTLFLYVISTFGITGARGSFEKMTFEFIARAKNLCDKNKLYVGFGISNGEHAEKIIENGADGVIVGSAFVDIIKEYGDSNETIYKLKELARELSEGIHKGYVKYNEKNKY

SEQ ID NO: 35152 - protein, 416 aa, Chromobacterium violaceum ATCC 12472
MANRRVVVTGYGSLTSLGENSAEAWEAIMNGKLGYRKFELENQQIKAKFFSFLDENKARYRGIPKAISRALPAFAKNAVVAAREAIDMAFGSPEAIAEHYPAHECGVIIGTGWGGLDEAYDIRDAYRDTGFGSPLGSLISMPSIATGACTLMWNLRGYQNTVIAACATGTIAIGDAYEAIRQGRASMMLAGGSETLRNETNIWNIDVLNALSKEQEEAERACCPFDRRRSGFVLAEGAAVLCLEELEHAQHRGATILGEIKGYGSFSDARDFTAPAEDMLARVKSIEFALKQAGKRPEDIDYINAHGTSTPLNDLNESNAIKAALGAHAKRVPVSSTKSYSGHLISAAGSFESIICLKAIATGILPGTANLLESDPECDLNYLPNGHLHGQAVDTTLNLSFGFGGANAALVIERAR

SEQ ID NO: 35153 - protein, 541 aa, Oryza sativa (japonica cultivar-group)
MDPYKHRPSSSFNGPLWSTNSGAPVWNNNNSLTVGSRGPILLEDYHLVEKLANFDRERIPERVVHARGASAKGFFEVTHDITHLTCADFLRAPGVQTPVIVRFSTVIHERGSPETLRDPRGFAIKFYTREGNWDLVGNNFPVFFIRDGMKFPDMVHSLKPNPKSHVQENWRILDFFSHHPESLHMFTFLFDDIGIPADYRHMDGSGVNTYTLVNRAGKSHYVKFHWKPTCGVKSLLDDEAVTVGGTNHSHATQDLYDSIAAGNFPEWKLFIQTIDPDHEDRFDFDPLDVTKTWPEDIVPLQPVGRMVLNRNIDNFFSENEQLAFCPGIIVPGIYYSDDKLLQTRIFSYSDTQRHRLGPNYLLLPPNAPKCAHHNNHYDGFMNFMHRDEEVDYFPSRYDPAKHAPRYPIPSATLTGRREKVVIAKENNFKQPGERYRSWDPARQDRFIKRWIDALSDPRLTHEIRSIWLSYWSQADRSLGQKLASRLSAKPSMAQVHEDITDGLTEGDDEVVRSRRGVRWWMLWRRRRLGRNGIAVGRKEIK

SEQ ID NO: 35154 - protein, 134 aa, Saccharophagus degradans 2-40
MSDLTKKDDEYWRDKLDAEQFRICREKGTERPFTGEYCDSKEPGTYLCRCCAEPLFESATKYDSGSGWPSFFQPIKGDAVGEIKDTSHGMVRVEVVCHNCGCHLGHVFPDGPKPTGLRYCINSASIQLQKEGAE

SEQ ID NO: 35155 - protein, 439 aa, Pseudomonas putida
MLTPEENLLLCRVEGDAPMGQMMRRHWTPVCLLEEVSEPDGTPVRARLFGEDLVVFRDTDGRVGVMDEYCPHRRVSLIYGRNENSGLRCLYHGWKMDVDGNVVEMVSEPAASNMCQKVKHTAYKTREWGGFVWAYMGPQDAIPEFVPPAWAPHEHVRVSIAKAIIPCNWAQILEGAIDSAHSSSLHSSDFVPARVGGAEATSKNWLRPSTDKAPRMQVERTSYGFRYAALRRPIQNAATSEYVRSTVFVAPATALIPPNNLYNVANINVPIDDTHTAFYFMAWGNPDNTPETETWRKFLGQQVGIDLDDSYRPLRNDGNRFFQDREAMKNGNFTGIKGFPNQDIAMWVTMGPIADRSDERLGASDLAVVEFRRVMLDALAAFQAGESAIGTGEKAIPSRICSFQAIVSKDIDWRDYQARYVWALDDANIVAEPDYEVHT

SEQ ID NO: 35156 - protein, 413 aa, Cucumis sativus
GDDVEDVRREVQIMHHLTGHPHIVELKEVYEDRHYVNLIMELCAGGELFDRIIAKGHYSECTAASLCRQIVTVVHNCHSMGVMHRDLKPENFLFLSADENSPLKATDFGLSVFFKPGDVFKDLVGSAYYVAPEVLRRRYGPEAAVWSAGVILYILLSGVPPFWAENDQGIFDAVLRGHIDFSSDPWPSISSGAKDLIRKLLHSDPKERLSAIEALNHPWMKEDGEASDKPLDIAVLTRMKQFRAMNKLKKVALKVIAENLSEEEIVGLKEMFKSMDTDNSGTITFEELKAGLPKLGTKLSESEVRQLMEAADVDGNGSIDYIEFITAAMHMNRVEREDHLFKAFEYFDKDKSGYITMEELETALKKYNMGDETTIKEIIAEVDTDNDGRINYDEVVAMMRKGNQELTTTSRQK

SEQ ID NO: 35157 - protein, 423 aa, Saccharophagus degradans 2-40
MTLPKDPESSTVKPVKKDKRKNIIKSEKLLGVCYDIRGPVLEHANRLEEEGHRILKLNIGNPAPFGFEAPDEIITDVVYNIREAQGYTASRGLFPARKAIMHECQRQEIPNVEIEDIFLGNGVSELIVMANQALLNNGDEVLVPSPDYPLWTAAVNLAGGKAVHYMCDEQSDWFPDIDDMRSKITSRTRAIVVINPNNPTGAVYSQELLEQIVALAREHQLVIFADEIYSKILYDDAEFVPMGRIAKDVLCVTFNGLSKSYRLAGFRSGWIILSGAKHLAKDYIRGIDMLASMRLCANVPAMLAVQTALGGYQSINELILPGGRLLEQRDAAIEELAKIPGVSCVVPKGAIYLFPKIDRTMYDFDDDQQLILDFLIQEKILLVQGTAFNWKQPDHFRIVFLPQADQLRQAIIKFGEFLQQYRI

SEQ ID NO: 35158 - protein, 330 aa, Debaryomyces hansenii CBS767
MTGSSSQFQQLEKLGEGTYATVYKGRNRTNGQLVALKEINLDSEEGTPSTAIREISLMKELDHENIVTLYDVIHTENKLTLVFEFMDKDLKKYMEAHGNQGALDLKIVKSFIFQLLKGIMFCHDNRVLHRDLKPQNLLINNKGELKLGDFGLARAFGIPFNTFSNEVVTLWYRAPDVLLGSRAYTASIDIWSAGCIFAEMCTGKPLFPGTSNDDQLIKIFRLMGTPNERTWPGVSSYANFKNNWQIFVPQDLRLLIPNLDSMGLNLLSSLLQMRPDARITARQALQHPWFHEISNPNPLMQHLADPYQQLQQQLQQQAQQLQQMDPQTYR

SEQ ID NO: 35159 - protein, 474 aa, Oryza sativa
MFARTTPRVRISAPVKKANFGSVRNSHSLKQRLQHLIPEKAAEIKNIKDKHGDKLLGTCTVSQAYGGMRGVKAMIYETSLLDADEGIRFRGFTIPEVQQKLPKAPGGAEPLPEGLLWLLLTGEVPTQAQVSELSADLAHRNKVPEWVFKLLKDLPPDMHPMTQFIIAINALQKESLFAQKYQEGMPKSKYWEYALEDSLNLIARLPTVAAAIYRYTYKNGQIIQPDSKLDWSANFSRMLGHNNKQFDDLMRLYLTIHSDHEGGNVSAHATQLVGSALSDPYLAFAAGMCGLAGPLHGLANQEVLRWIVNLKKKFGDRNITNEELKKALWDTLNSGQVVPGFGHAVLRKTDPRYTCQREFALKHLPNDPLFKLVAQLYEVVPGILKEHGKTKNPWPNVDAHSGVLLVHYGMTEENYYTVLFGVSRAIGVLSNLVWTRALGFPLERPKSVTTEWVRNWSHTAPMANDDQIATSKAD

SEQ ID NO: 35160 - protein, 216 aa, Zea mays
MAEVEAPAAAVEAPAAAVAPTTPEVAAPEAGAATEAKGPHKLHRQWTFWYDIQTKTKSGAAWGTSLKKAYTFDTVEEFWSMYDQIFRPSKLSGSADFHLFKAGVEPKWEDPECANGGKWTVPCNRKATFETMWLETLMALIGEQFDETEDICGIVASVRARGDKLALWTRTASNEAVQVNIGKKWKDVIDYNDKITYTFHDDSKRDKPSRGGRYTV

SEQ ID NO: 35161 - protein, 310 aa, Clostridium perfringens str. 13
MNKICVLGSMNMDLVLKVKDMPKVGETILSKSFQKIAGGKGANQAVAAKRSGAEVFMISKIGKDENGRELRDKLVEDNIDVKYVFEDRIEPTGMALIMVNDNGNNSIIVNAGSNMTLTKEEIHSAENLIKESDIIISQFETPENITIEAFKIAKENGKVTILNPAPAKKIKDELLNYTDIIVPNETEAELLTGIEIKDIEDAKKAGDIFLGKGVKFAIITLGEKGAALIGKDFCEIVPAYRVNAIDTTAAGDSFIGGLSSKLDTKNLGKETLISSIRFGNKVSSIAVQRKGAQPSIPYLKEVLEIYKGEE

SEQ ID NO: 35162 - protein, 382 aa, Escherichia coli
NVVLDKSFGAPTITKDGVSVAREIELEDKFENMGAQMVKEVASKANDAAGDGTTTATVLAQAIITEGLKAVAAGMNPMDLKRGIDKAVTAAVEELKALSVPCSDSKAIAQVGTISANSDETVGKLIAEAMDKVGKEGVITVEDGTGLQDELDVVEGMQFDRGYLSPYFINKPETGAVELESPFILLADKKISNIREMLPVLEAVAKAGKPLLIIAEDVEGEALATLVVNTMRGIVKVAAVKAPGFGDRRKAMLQDIATLTGGTVISEEIGMELEKATLEDLGQAKRVVINKDTTTIIDGVGEEAAIQGRVAQIRQQIEEATSDYDREKLQERVAKLAGGVAVIKVGAATEVEMKEKKARVEDALHATRAAVEEGVVAGGGVA

SEQ ID NO: 35163 - protein, 307 aa, Pseudomonas putida
MTGMPQVLALGEAMIEFNQSTKGAPNYLQGFGGDVSNFLIAASRQGASSGFVSAVGNDHFGQLLLDLWRAENVDTSTVRVDANAPTGVYFVSHGESGHRFDYLRAGSAASRYAVSDLPLDAIAAAQVVHLSGISLAIGVPACDASLAAIDHAKRHGVKVSFDTNLRLKLWPLARARAVMLEAIRATDICLPSWDDVTELTGLADKDAIVDFLLALGPKVVALKLGKEGAYVATPAERRVVAGRVVKAVDATGAGDCFGGAFIARIVAGDDPFAAARYANVAAALSTQGFGAVAPIPDRATVEKALAE

SEQ ID NO: 35164 - protein, 489 aa, Solanum tuberosum
MITIPYLTALTTYFSYGLLFAFGQFREFFRKIFDWWRGNNLQGYAPICLGLEDFYIRRLYLRIQDCFGRPICSPPDAWFDVVERLSNDNNKTLKRTTKVSRCLNLGSYNYLGFAASDEYCTPRVIESLKKYSASTCSARVDGGTTSIHMELEECVANFVGKPAAIVTGMGYVTNSAILPVLIGKGGLIISDSLNHNSIVNGARGSGATIRVFQHNTPSHLEKVLREHIAEGQPRTHRPWKKIIVIVEGIYSMEGELCQLPEIVAICKKYKVYVYLDEAHSIGAVGKSGRGVCELLGVDTADVDIMMGTFTKSFGSCGGYIAGSKELIEYLKYSCPAHLYATSISPPAAQQIISAIKVILGEDGTSRGAQKLARIRENSNFFRSELQKMGFEVLGDNDSPVMPIMIYNPGKIPAFSRECLKRSVAVVIVGFPATPLLLARARICISAAHSREDLNIALEVISKVGDLTGIKYFPAEPQKQQVEESRVKLE

SEQ ID NO: 35165 - protein, 104 aa, Arabidopsis thaliana
  misc_feature (30)..(30): Xaa can be any naturally occurring amino acid
  misc_feature (59)..(59): Xaa can be any naturally occurring amino acid
  unsure (1)..(104): unsure at all Xaa locations
MTKSFCSMCFATIRMVMVLMTAQIPSFQPXCDTYLGEVTVYYPRRERDCEARYYQHYPXHCKGECDRHSHVVRQGTEKEPCRSYGRSDLLRKIGIQHQISFVSI

SEQ ID NO: 35166 - protein, 680 aa, Bacillus cereus ATCC 14579
MYKTFTNISEGKNSMSHSIEQLSINTIRTLSIDAIEKANSGHPGMPMGAAPMAYTLWTQFMKHNPNNPTWFNRDRFVLSAGHGSMLLYSLLHLSGYDVTMDDLKNFRQWGSKTPGHPEYGHTAGVDATTGPLGQGIATAVGMAMAERHLAAKYNRDAYNVVDHYTYAICGDGDLMEGVSAEASSLAAHLQLGRLVVLYDSNDISLDGDLNRSFSESVEDRYKAYGWQVIRVEDGNDIEAIAKAIEEAKADEKRPTLIEVRTTIGFGSPNKSGKSASHGSPLGVEETKLTKEAYAWTAEQDFHVAEEVYDNFRKTVQDVGETAQAEWNTMLGEYAQAYPELANEFQAAMNGQLPEGWEQNLPTYELGSKAATRNSSGAVINAIAESVPSFFGGSADLAGSNKTYMNNEKDFTRDDYSGKNIWYGVREFAMGAAMNGIALHGGLKTYGGTFFVFSDYLRPAIRLAALMQLPVTYVFTHDSIAVGEDGPTHEPIEQLAALRAMPNVSVIRPADGNESVAAWRLALESTNKPTALVLTRQDLPTLEGAKDDTYEKVAKGAYVVSASKKETADVILLATGSEVSLAVEAQKALAVDGVDAAVVSMPSMDRFEAQTAEYKESVLPKAVTKRFAIEMGATFGWHRYVGLEGDVLGIDTFGASAPGEKIMEEYGFTVENVVRKVKEML

SEQ ID NO: 35167 - protein, 459 aa, Ralstonia metallidurans CH34
MAQRFDAIIIGTGQAGPALAARLAGAGMKLAVIERGRFGGTCVNTGCIPTKALIASAYAAQLARRAAEYGVTIGGPVAVDMRQVKARKDEISGRSSQGVEQWMRGLDNVTVHQGHARFEHARGVRVNGELLEADQIFINVGGRALIPPMPGLDQVSYLTNSSMMEVDFLPEHLIIVGGSYIGLEFGQMYRRFGARVTIVEKGPRLIQREDEDVSQAVREILEREGIEVRLDANCLSARKDGDHIAVGLDCAGGAPEVHGSHLLMAVGRVPNTDDLGLDKAGIETDARGYIKVDDQLRTSVPGIWALGDCNGRGAFTHTSYNDYEIVAANLLDNDPRAVTDRIPAYALFTDPPLGRIGMTEREARQSGRKVLVGTRPMSRVGRAVEKGESQGFMKILVDADTRLLLGAAILGLNGDEVVHSLLDVMYAGAPYTTISRAVHIHPTVSELVPTVLQGLRALT

SEQ ID NO: 35168 - protein, 521 aa, Vigna radiata
MLLELALGLLVLALFLHLRPTPTAKSKALRHLPNPPSPKPRLPFIGHLHLLKDKLLHYALIDLSKKHGPLFSLYFGSMPTVVASTPELFKLFLQTHEATSFNTRFQTSAIRRLTYDSSVAMVPFGPYWKFVRKLIMNDLLNATTVNKLRPLRTQQIRKFLRVMAQGAEAQKPLDLTEELLKWTNSTISMMMLGEAEEIRDIAREVLKIFGEYSLTDFIWPLKHLKVGKYEKRIDDILNKFDPVVERVIKKRREIVRRRKNGEVVEGEVSGVFLDTLLEFAEDETMEIKITKDHIKGLVVDFFSAGTDSTAEATEWALAELINNPKVLEKAREEVYSVVGKDRLVDEVDTQNLPYIRAIVKETFRMHPPLPVVKRKCTEECEINGYVIPEGALILFNVWQVGRDPKYWDRPSEFRPERFLETGAEGEARPLDLRGQHFQLLPFGSGRRMCPGVNLATSGMATLLASLIQCFDLQVLGPQGQILKGGDAKVSMEERAGLTVPRAHSLVCVPLARIGVASKLLS

SEQ ID NO: 35169 - protein, 164 aa, Zea mays
  misc_feature (23)..(23): Xaa can be any naturally occurring amino acid
  misc_feature (33)..(33): Xaa can be any naturally occurring amino acid
  unsure (1)..(164): unsure at all Xaa locations
VLLHKHIGQGEVVDHLWREARCXTLVLLSVHHXGQMGLSVEQQKRALELRNMVNGGEESLEETRTDGASFNPAAAGGCCQGNGGFTCCQTDLPKEKQDKSIIAEQNPKSSDKEGGAGSKKGDTKTCPVPIWFETWERADTYAALAVVAAAAAVLVSFRIYKNLN

SEQ ID NO: 35170 - protein, 521 aa, Trifolium pratense
MLLELALGLLVLALFLHLRPTPTAKSKALRHLPNPPSPKPRLPFIGHLHLLKDKLLHYALIDLSKKHGPLFSLYFGSMPTVVASTPELFKLFLQTHEATSFNTRFQTSAIRRLTYDSSVAMVPIGPYWKFVRKLIMNDLLNATTVNKLRPLRTQQIRKFLRVMAQGAEAQKPLDLTEELLKWTNSTISMMMLGEAEEIRDIAREVLKIFGEYSLTDFIWPLKHLKVGKYEKRIDDILNKFDPVVERVIKKRREIVRRRKNGEVDEGEVSGVFLDTLLEFAEDETTEIKITKDHIKGLVVDFFSAGTDSTAVATEWALAELINNPKVLEKAREEVYSVVGKDRLVDEVDTQNLPYIRAIVKETFRMHPPLPVVKRKCTEECEINGYVIPEGALILFNVWQVGRDPKYWDRPSEFRPERFLETGAEGEARPLDLRGQHFQLLPFGSGRRMCPGVNLATSGMATLLASLIQCFDLQVLGPQGQILKGGDAKVSMEERAGLTVPRAHSLVCVPLARIGVASKLLS

SEQ ID NO: 35171 - protein, 521 aa, Trifolium pratense
MLLELALGLLVLALFLHLRPTPTAKSKALRHLPNPPSPKPRLPFIGHLHLLKDKLLHYALIDLSKKHGPLFSLYFGSMPTVVASTPELFKLFLQTHEATSFNTRFQTSAIRRLTYDSSVAMVPFGPYWKFVRKLIMNDLLNATTVNKLRPLRTQQIRKFLRVMAQGAEAQKPLDLTEELLKWTNSTISMMMLGEAEEIRDIAREVLKIFGEYSLTDFIWPLKHLKVGKYEKRIDDILNKFDPVVERVIKKRREIVRRRKNGEVVEGEVSGVFLDTLLEFAEDETTEIKITKDHIKGLVVDFFSAGTDSTAVATEWALAELINNPKVLEKAREEVYSVVGKDRLVDEVDTQNLPYIRAIVKETFRMHPPLPVVKRKCTEECEINGYVIPEGALILFNVWQVGRDPKYWDRPSEFRPERFLETGAEGEARPLDLRGQHFQLLPFGSGRRMCPGVNLATSGMATLLASLIQCFDLQVLGPQGQILKGGDAKVSMEERAGLTVPRAHSLVCVPLARIGVASKLLS

SEQ ID NO: 35172 - protein, 574 aa, Yarrowia lipolytica CLIB122
MQRVIARSSRLRPQQIRGFAHKELKFGVEGRAALLKGVDTLAKAVSVTLGPKGRNVLIEQSFGSPKITKDGVTVARSITLEDKFENMGARLLQEVASKTNETAGDGTTSATVLGRSIFTESVKNVAAGCNPMDLRRGSQAAVDAVVEFLQKNKREITTSEEIAQVATISANGDTHIGQLIANAMEKVGKEGVITVKEGKTIEDELEITEGMRFDRGYISPYFVTDVKSGKVEFENPLILISEKKISSIQDILPSLELSNKQRRPLLILAEDVDGEALAACILNKLRGQVQVAAVKAPGFGDNRKSILGDISILTGGTVFTEDLDVKPENATADMLGSCGAITITKEDTIILNGEGSKDSIAQRCEQIRAFMADSTTSEYEKEKLQERLAKLSGGVAVIKVGGSSEVEVGEKKDRFVDALNATRAAVEEGILPGGGTALLKASRNLDSVPTANFDQKLGVNIIRTAITKPARTIVENAGGEGSVVVGKLTDEFGEDFNMGYNAAKGEYTDMIAAGIIDPFKVVRTGLVDASGVASLLATTECAIVDAPEPKGPAAAPAGGMPGMGGMGGMGGMGF

SEQ ID NO: 35173 - protein, 192 aa, ASPERGILLUS NIDULANS FGSC A4
MVVATIKCVVVGDGAVGKTCLLISYTTNKFPSEYVPTVFDNYAVTVMIGDEPYTLGLFDTAGQEDYDRLRPLSYPQTDVFLVCFSVTSPASFENVREKWFPEVHHHCPGVPCLIVGTQVDLRDDPAVRDKLARQKMQPIRKEDGDRMAKDLGAVKYVECSALTQYKLKDVFDEAIVAALEPAPKKRSRCVLL

SEQ ID NO: 35174 - protein, 430 aa, ASPERGILLUS NIDULANS FGSC A4
MILQLSPSISNVSTSRKGRSITGADASKQGVRRTWKRLLDGHCGIVNIRHRDARYADLPCEIAAVVPSGARAEGRWTASEWLSKDDERKMARFAQYAMAAAEEALEDAEWKPKAEDQLEATGVCLGSGIGNFDEIYDAVVAYDTKGYKKLSPLFVPKLLINLGAGHISMKYGFMGPNHSATTACTTGAHSIGDAARFIACGDADVMLAGGAESCIHPLAIGGFARARSLATAYNDRPEKSSRPFDADRDGFVVGEEHAKARGARIYAEVKGYGCSGDAHHMTAPKANGGGALLAMKKALKNACLEPSAVDYINAHATSTVIGDAAENAAIKALLLGPGGKQKAADVNVSSTKGAIGHLLGGAGAVEALFTVLAIHENVMPPTINLDRLNDGFDFNYAPNEAQERRIDLALTNSFGFGGTNSSLCFSKHGL

SEQ ID NO: 35175 - protein, 185 aa, Saccharomyces cerevisiae
AQLLLAANTHLGARNVQVHQEPYVFNARPDGVHVINVGKTWEKLVLAARIIAAIPNPEDVVAISSRTFGQRAVLKFAAHTGATPIAGRFTPGSFTNYITRSFKEPRLVIVTDPRSDAQAIKEASYVNIPVIALTDLDSPSEFVDVAIPCNNRGKHSIGLIWYLLAREVLRLRGALVDRTQPWSIM

SEQ ID NO: 35176 - protein, 187 aa, Triticum aestivum
LIATSGGLNQQRIGITDAVVVAWILNATLVVPELDHHSFWKDDSEFSDIFDTDWFISYLSKDVTVVKRIPYEVMISMDKLPWTMRTPRKSMPEFYIDEVLPILMRRRALQLTKFDYRLANDLDEELQKLRCRVNFHALRFKKPIQTLGKKLVRRLRVMSSRYVAIHLRFEPDMLAFSGCYYGGGEKE

SEQ ID NO: 35177 - protein, 549 aa, Arabidopsis thaliana
MMTLWRHKLELLVNDRWLVFVCAMWVQSVAGVGYLFGGSMSPAIKTSLGYNQKQIALLGVAKNLGDAIGFVSGALSEVSPSWVVLLVGATQNLFGYGVVWLVVTGQLPNLPLWMLFVAIFVGTNGETYYNTASLVSCIHNFPESRGPVVGILKGFSGLSGAILTQVYLMFNPSHDSSVILMVALGPPVVVLALLFIVRPVERSCRTNLRSDDLRFLAIYGFCVVLAVYLLGLLVLQSVFDMTQTIITTSGAILVIFMVVPVLVPFSSVFISGNNVTSVKPEEGTSNVDQHEARTLIERSDRPPEKKRAPCIGEDFTLLQALGQADFWLIFMSLVLGVGSGITIIDNLGQICYSLGYSNTKIFVSLISISNFLGRVAGGYFSELIIRFISFCLFKRKLSLPRTLAMSVVQAIMSLGLIYYAIDWPGKIYVVTIVIGMGYGAHWAIAPASVSDIFGLKSFGSLYNFQITALPIGSFVFSGVIASNIYDYYARKQAGPTTETESLVCTGSVCYSVTCSLMSMLCLMAMVLSLSVVYRTRKFYLRLHHRVSKT

SEQ ID NO: 35178 - protein, 369 aa, Oryza sativa (japonica cultivar-group)
MGKGGKGAEAAAAAVAGAGEEENMAAWLVAKNTLKIMPFKLPPVGPYDVRVRMKAVGICGSDVHYLREMRIAHFVVKEPMVIGHECAGVIEEVGSGVTHLAVGDRVALEPGISCWRCRHCKGGRYNLCEDMKFFATPPVHGSLANQIVHPGDLCFKLPENVSLEEGAMCEPLSVGVHACRRADVGPETGVLIMGAGPIGLVTLLAARAFGATRVVIVDVDEHRLSVARSLGADAAVRVSARAEDVGEEVERIRAAMGGDIDVSLDCAGFSKTVATALEATRGGGKVCLVGMGHNEMTVPLTSAAIREVDVVGIFRYKDTWPLCIEFLRSGKIDVKPLITHRFGFSQEDVEEAFEVSARGRDAIKVMFNL

SEQ ID NO: 35179 - protein, 292 aa, Legionella pneumophila str. Paris
MLTNIERAKLQLIDETSDMVIITKAEPLDAPNGPEVVWVNKAFENISKYKANEIIGQTPRILQGKETNQNTLKMIKEAIKAQTNINVDLLNYTKDGTPYWIKFSIVYLRDGQGNLCYLGAIEKDISAIKNLNIQLSEKAKTDPLTNVYNQENFFITGNEAVKNFHQNQETVGLLFFDVDDFKGINDTQGHIYGDKILKKVAQESLKLIRKTDNVFRYGGDEFAIIFSGINVKILEKKAQQLQKKLAKSHISVSIGGTISKQSDKSINTLLARADEALYYVKANKKGLFFIRE

SEQ ID NO: 35180 - protein, 520 aa, Brassica napus
MESSISQTLSQVLDPTTGILIVVSLFIFIGLITRRRRPPYPPGPRGWPIIGNMSMMDQLTHRGLANLAKKYGGLCHLRMGFLHMYAVSSPDVAKQVLQVQDSVFSNRPATIAISYLTYDRADMAFAHYGPFWRQMRKVCVMKVFSRKRAESWASVRDEVDKMIRSVSSNVGKSINVGEQIFALTRNITYRAAFGSACEKGQDEFIRILQEFSKLFGAFNVADFIPYFGWIDPQGINKRLVKARNDLDGFIDDIIDEHIKKKENQNSVDAGDVVDTDMVDDLLAFYSEEAKLVSETADLQNSIKLTRDNIKAIIMDVMFGGTETVASAIEWALTELLRSPEDLKRVQQELAEVVGLDRRVEESDIEKLTFLKCTLNETLRLHPPIPLLLHETAEDTEIDGYFVPKKSRVMINAFAIGRDKNSWVDPETFRPSRFLEPGVPDFKGSNFEFIPFGSGRRSCPGMQLGLYALELAVAHILHCFTWKLPDGMKPSELDMSDVFGLTAPKATRLYAVPCTRLICSV

SEQ ID NO: 35181 - protein, 214 aa, Geobacter sulfurreducens PCA
MKFFIDTADVKEIRQAHDLGLVDGVTTNPSLIAKSGRKFEDVIKEITEIVDGPISAEVVSLEAAGMIREAGELAKIHKNIVIKLPMTPEGLKACAALTREGIKTNVTLIFTPMQALLAAKAGATYVSPFVGRLDDISQDGMGIIDDIKTIFDNYGYQSEIIVASVRNPVHVLNAALIGADIATIPYSVMLQLAKHPLTDSGIERFLKDWESVPK

SEQ ID NO: 35182 - protein, 201 aa, Arabidopsis thaliana
MRSKSLLPFFDSAYQGFASGSLDTDAQSVRTFVADGGECLIAQSYAKNMGLYGERVGALSIVCKSADVASKVESQVKLVVRPMYSSPPIHGASIVATILKSSDMYNNWTIELKEMADRIKSMRQQLFEAIQARGTPGDWSHIIKQIGMFTFTGLNKEQVEFMTKEFHIYMTSDGRISMAGLSSKTVPHLADAMHAAVTRLG

SEQ ID NO: 35183 - protein, 470 aa, Cucumis sativus
MFILSAVSSSSSSSSSVPSSLPPFSLSPSISLSFSRVSLPPSSSSSSSSLKLFLPLSLHFTPPKLSSPHSFLRFSASRAMAELIQDKESAHTPSTTDVTRNDPPHSRAFLDLRSEEELLSCIRRETEAGKLPSNVAAGMEELYQNYKNAVFESGNPKADEIVLSNMTVALDRILLDVEDPFMFSPHHKAIREPFDYYTFGQNYVRPLIDFENSFVGNLSLFKDIEEKLHQGHNVVLISNHQTEADPAIISLLLEKTNPYIAENMIYVAGDRVIADPLCKPFSIGRNLICVYSKKHMLDIPELAETKRKANTRSLKEMALLLRGGSQLIWIAPSGGRDRPDPSTGEWYPAPFDASSVDNMRRLLQHSGAPGHLYPLALLCYDIMPPPSQVEIEIGEKRVISFNGTGLSVGPEISFDEIAASRDNPDEVREAYSKALYDSVAKQYNVLKAAIDGKQELEASVADVSLSQPWI

SEQ ID NO: 35184 - protein, 463 aa, Carthamus tinctorius
MSIFFSPSSPTLFFSTTNANPRVSPSSSPSSAFTPPLSSSRLRPILRGFPCLAFSAPANAAHGTAETVHGNKWPSPSSSSSAATQPSAGSDHGHSRTFIDARSEQDLLSGIQRELEAGTLPKHIAQAMEELYQNYKNAVLQSAAPHAEDIVLSNMRVAFDRMFLDVKEPFEFSPYHEAILEPFNYYMFGQNYIRPLVNFRESYVGNVSVFGVMEEQLKQGDKVVLISNHQTEADPAVIALMLETTNPHISENIIYVAGDRVITDPLCKPFSMGRNLLCVYSKKHMNDVPELAEMKKRSNTRSLKGRMALLLRGGSKIIWIAPSGGRDRPDPITNQWFPAPFDATSLDNMRRLVDHAGLVGHIYPLAILCHDIMPPPLQVEKEIGEKSWISFHGTGISVAPEINFQEVTASCGSPEEAKAAYSQALYDSVCEQYKVLHSAVHGGKGLEASTPSVSLSQPLQFLD

SEQ ID NO: 35185 - protein, 570 aa, Apium graveolens
MATGGDQDVYGEDCAAEDQLVTPWTISVASGYTLLRDPHHNKGLAFTEKERDAHYLRGLLPPAIISQQQQEKKLMQNLRSYEVPLHRYMAMMELQERNERLFYKLLIDNVEELLPVVYTPTVGEACQKYGSIFRRPQGLYISLKEKGKILEVLKNWPEKNIQVIVVTDGERILGLGDLGCQGMGIPVGKLALYTALGGVRPSACLPITIDVGTNNESLLNNEFYIGLKQRRATGKEYADLLQEFMTAVKQNYGEKVLVQFEDFANHNAFELLSKYSTTHLVFNDDIQGTASVVLSGIVSSLKLIGGMLADHTFLFLGAGEAGTGIAELIALEMSKQTKIHLEETRKKIWLVDSKGLIVSHRKESLQHFKKPWAHEHEPCTTLIDAVKAIKPTVLIGTSGQGKTFTKEVVEAMASFNKKPLIMALSNPTSQAECTAEEAYNWSEGRAVFASGSPFDPVKYNNQLYIPGQANNAYIFPGLGLGLVMSGAIRMHDEMLLAASEALACQVTQEHYDKGMTFPPFSNIRTISANIAAKVAAKAYDLGLATRLPRPEDLVKFAESCMYSPNYRIYR

SEQ ID NO: 35186 - protein, 500 aa, Lupinus albus
FLHLRPTPTAKSKALRHLPNPPSPKPRLPFIGHLHLLKDKLLHYALIDLSKKHGPLFSLYFGSMPTVVASTPELFKLFLQTHEATSFNTRFQTSAIRRLTYDSSVARVPFGPYWKFVRKLIMNDLLNATTVNKLRPLRTQQIRKFLRVMAQGAEAQKPLDLTEELLKWTNSTISMMMLGEAEEIRDIAREVLKIFGEYSLTDFIWPLKHLKVGKYEKRIDDILNKFDPVVERVIKKRREIVRRRKNGEVVEGEVSGVLLDTLLEFAEDETMEIKITKDHIKGLVVDFFSAGTDSTAVATEWALAELINNPKVLERAREEVYSVVGKDRLVDEVDTQNLPYIRAIVKETFRMHPPLPVVKRKCTEECEINGYVIPEGALILFNVWQVGRDPKYWDRPSEFRPERFLETEAEGEARPLDLRGQHFQLLPFGSGRRMCPGVILATSGMATLLASLIQCFDLQVLGPQGQILKGGDAKVSMEERAGLTVPRAHSLVCVPLARIG

SEQ ID NO: 35187 - protein, 477 aa, Rhodobacter sphaeroides
METARGRVLSVASECVPLLKTGGLADVVGALPGALAAEGWEMRVLMPCYRPLKWRLEEMEEVFAEEDLFGGPGRVMAGEVAGRKMLLLDAPHLYDRGRPYAGPDGDWGDNAQRFAALSWIGAGSRARGSGTGWRPDVVHAHDWQAGFTPAYMNYWGSGGASSVLTVHNIAFQGWAPASLLSALRLPPQKFHPAALEYYGGLSSLKAGLVSADHITTVSPTYACELMRPEFGMGLQGVIAQRAGQVTGILNGVDTDIWSPEVEERPYDAESLKAKAENRAVLSGAFKLSVPGPLAILVSRLTYQKGIDLIPEVLPDFIAAGGGLAVLGTGDAPLEAAMRELEVRFPGRVGVRIGYDEGLSHLMFAGGDAVLVPSRFEPCGLTQMYGLRYGAIPVVALTGGLADTIINANPAAMAAGCATGLTFHPTEPPAFAEALRRLIHLYADPAAWETVQRNAMRHPVGWETSAAAYAALYRELVA

SEQ ID NO: 35188 - protein, 330 aa, Pectobacterium carotovorum
MSQSTLKVNELHEETDFDENGLDVFDDKALAEEDTNDSDSAEDELLSQGVPQRVLDATQLYLGEIGYSPLLTAEEEVYFARRALRGDIPSRRRMIESNLRLVVKIARRYNNRGLALLDLIEEGNLGLIRAVEKFDPERGFRFSTYATWWIRQTIERAIMNQTRTIRLPIHIVKELNVYLRTARELSHKLDHEPSAEEIAEQLDKPVDDVNRMLRLNERITSVDTPLGGDSEKALLDILADEKDNGPEDTTQDNDMKQNIVKWLFELNAKQREVLARRFGLLGYEAATLEDVGREIGLTRERVRQIQVEGLRRLREILQVQGLSIEELFRE

SEQ ID NO: 35189 - protein, 499 aa, Trifolium repens
SHLRPTPSAISKALRHLPNPPSPRPRLPFIGHLHLLKDKLLHYAPIDLSKKHGPLFSLSFGSMPTVVASTPELFKLFLQTHEATSFNTRFQTSAIRHLTYDNSVAMVPFGPYWKFVRKLIMNDLLNATTVNKLRPLRTQQIRKFLRVMAQSAEAQKPLDVTEELLKWTNSTISMMMLGEAEEIRDIAREVLKIFGEYSLTDFIWPLKYLKVGKYEKRIDDILNKFDPVVERVIKKRREIVRRRKNGEVVEGEASGVFLDTLLEFAEDETMEIKITKEQIKGLVVDFFSAGTDSTAVVTEWALAELINNPRVLQKAREEVYSVVGKDRLVDEVDTQNLPYIRAIVKETFRMHPPLPVVKRKCTEECEINGYVIPEGALVLFNVWQVGRDPKYWDRPSESRPERFLETGAEGEAGPLDLRGQHFQLLPFGSGRRMCPGVSLATSGMATLLASLIQCFDLQVLGPQGQILKGDDAKVSMEERAGLTVPRAHSLVCVPLARIG

SEQ ID NO: 35190 - protein, 500 aa, Trifolium repens
FLHLRPTPTAKSKALRHLPNPPSPKPRLPFIGHLHLLKDKLLHYALIDLSKKHGPLFSLYFGSMPTVVASTPELFKLFLQTHEATSFNTRFQTSAIRRLTYDNSVAMVPFGPYWKFVRKLIMNDLLNATTVNKLRPLRTQQIRKFLRVMAQSAEAQKPLDVTEELLKWTNSTISMMMLGEAEEIRDIAREVLKIFGEYSLTDFIWPLKYLKVGKYEKRIDDILNKFDPVVERVIKKRREIVRRRKNGEVVEGEASGVFLDTLLEFAEDETMEIKITKEQIKGLVVDFFSAGTDSTAVATEWALAELINNPKVLQKAREEAYSVVGKDRLVDEVDTQNLPYIRAIVKETFRMHPPLPVVKRKCTEECGINGYVIPEGALVLFNVWQVGRDPKYWDRPSEFRPERFLETGAEGEAGPLDLRGQHFQLLPFGSGRRMCPGVNLATSGMATLLASLIQCFDLQVLGPQGQILKGDDAKVSMEERAGLTVPRAHSLVCVPLARIG

SEQ ID NO: 35191 - protein, 499 aa, Beta vulgaris
LHLRPTPTAKSKALRHLPNPPSPKPRLPFIGHLHLLKDKLLHYALIDLSKKHGPLFSHYFGSMPTVVASTPELFKLFLQTNEATSFNTRFQTSAIRRLTYDSSVAMVPFGPYWKFVRKLIMNDLLNATTVNKLRPLRTQQIRKFLRAMAQGAEARKPLDLTEELLKWANSTISMMMLGEAEEIRDIAREVLKIFGEYSLTDFIWPLKHLKVGKYEKRIDDILNKFDPVVERVIKKRREIVRRRKNGEVVEGEVSGVFLDTLLEFAEDETMEIKITKDHTKGLVVDFFSAGTDSTAVATEWALAELINNPKVLEKAREEVYSVVGKDRLVDEVDTQNLPYIRAIVKETFRMHPPLPVVKRKCTEECEINGYVIPEGALIPFNVWQVGRDPKYWDRPSEFRPERFLETGAEGEARPLDLRGQHFQLLPFGSGRRMCPGVNLATSGTATLLASLIQCFDLQVLGPQGQILKGGDAKVSMEERAGLTVPRAHSLVCVPLARIG

SEQ ID NO: 35192 - protein, 444 aa, Deinococcus radiodurans
MRVLHLASEVFPFSRSGGLGDVLGALPAVQARLGEDAEVTVLSPWYASLQGEPQELWRGEAWGEQAWLGELRQDGVRYLFLGLNEFQRPGLYHPDDVERFCAFGRAALPALDAVGVTPDVLHGHDWQAGLVVAHARLRGLRTAFSVHNLQYQGRWNLHEAAGWTGLPDWTFGPDGVEFFGDLNLMKAGLNFAGHVTTVSPTYAQEITTPQYGEGLEGLLVRLTHEGRLSGILNGLDQDRWNPRTDPDIAAYSDPAGKAGAVKALRQEFGLDDAPILATVSRLADQKGMDLLITALPELVRDWNVVVLGGGDPLLEAALTGWANHPRVAFASGMNEPLAHRIYAGAHAFAMPSRFEPCGLSQLIAMRYGTLPIVRETGGLADTVPPEVGFRFADATAPAFLQACREAQAAFQDPAQWQTRATRAMSLDFSWDGPARQYLELYRGL

SEQ ID NO: 35193 - protein, 80 aa, Oryza rufipogon
MSCCGGNCGCGSSCQCGNGCGGCKYSEVEPTTTTTFLADATNKGSGAASGGSEMGAENGSCGCNSCKCGTSCGCSCCNCN

SEQ ID NO: 35194 - protein, 500 aa, Beta vulgaris
FLHLRPTPTAKSKALRHLPNPPSPKPRLPFIGHLHLLKDKLLHYALIDLSKKHGPLFSLYFGSMPTVVASTPELFKLFLQTHEATSFNTRFQTSAIRRLTYDSSVAMVPFGPYWKFVRKLIMNDLLNATTVNKLRPLRTQQIRKFLRVMAQGAEAQKPLDLTEELLKWTNSTISMMMLGEAEEIRDIAREVLKIFGEYSLTDFIWPLKHLKVGKYEKRIDDILNKFDPVVERVIKKRREIVRRRKNGEDVEGEVSGVFLDTLLEFAEDETMEIKITKDHIKGLVVDFFSAGTDSTAVATEWALAELINNPKVLEKAREEVYSVVGKDRLVDEVDTQNLPYIRAIVKETFRMHPPLPVVKRKCIEECEINGYVIPEGALILFNVWQVGRDPKYWDRPSEFRPERFLETGAEGEARLLDLRGQHFQLLPFGSGRRMCPGVNLATSGMATLLASLIQCFDLQVLGPQGQILKGGDAKVSMEERAGLTVPRAHSLVCVPLARIG

SEQ ID NO: 35195 - protein, 150 aa, Oryza sativa
MSLVRSGNVLDPMSVDFWADADPFGAVRSLAERCPVLTNVRVDWKETPTAHVFTADLPGVRKDQAKVEVEDGGVLVISGERAREEDVDGKNDERWHHVERSSGKFQRRFRLPRGARVDQVSASMDNGVLTVTVPKEETKKPQLKAIPISG

SEQ ID NO: 35196 - protein, 547 aa, Haemophilus ducreyi
MAIKDVKFGNDARVKMLKGVNILADAVKVTLGPKGRKVVLDKAYGAPTITKDGVSVAREIELEDKFENMGAQMVKEVASKANDVAGDGTTTATVLAQSIVSEGLRAVAAGMNPMDLKRGIDKAVAAVVEELKAISKPCETSKEIEQVGTISANSDETVGKLIAQAMEKVGKEGVITVEDGTGLDDALDVVEGMQFDRGYLSPYFINKPEAGTVELDNPYIILVDKKISNIREILPVLEAVAKAGKPLLIIAEDVEGEALATLVVNTMRGIVKVAAVKAPGFGDRRKAMLQDIAILTAGTVISEEIGMELEKATLEELGQAKRVVITKDNTTIIDGIGDEAQIKARVVQIRQQIEDSTSDYDKEKLQERVAKLAGGVAVIKVGAATEVAMKEKKDRVDDALHATRAAVEEGIVPGGGVALVRAANKVSATLTGDNEEQNVGIKLALRAMEAPLRQIVENSGEDASVVARDVKDGSGNFGYNATTEEYGDMLEMGILDPTKVTRSALQFAASIAGLMITTECMITDLPKEDKLDAQAAMGGMGGMGGMM

SEQ ID NO: 35197 - protein, 370 aa, Saccharomyces cerevisiae
MNIQSNNSPNLSNNIVSKQVYYAHPPPTIDPNDPVQISFPTTEVVGHGSFGVVFATVIQETNEKVAIKKVLQDKRFKNRELEIMKMLSHINIIDLKYFFYERDSQDEIYLNLILEYMPQSLYQRLRHFVHQRTPMSRLEIKYYMFQLFKSLNYLHHFANVCHRDIKPQNLLVDPETWSLKLCDFGSAKQLKPTEPNVSYICSRYYRAPELIFGATNYTNQIDIWSSGCVMAELLLGQPMFPGESGIDQLVEIIKILGTPSKQEICSMNPNYMEHKFPQIKPIPLSRVFKKEDDQTVEFLADVLKYDPLERFNALQCLCSPYFDELKLDDGRINQITTDLKLLEFDENVELGHLSPDELSSVKKKLYPKSK

SEQ ID NO: 35198 - protein, 676 aa, Escherichia coli
MKLAACFLTLLPGFAVAASWTSPGFPAFSEQGTGTFASHAQLPKGTRPLTLNFDQQCWQPADAIKLNQMLSLQPCSNTPPQWRLFRDGEYTLQIDTRSGTPTLMISIQNAAEPVASLVRECPKWDGLPLTVDVSATFPEGAAVRDYYSQQIAIVKNGQIMLQPAATSNGLLLLERAETDTSAPFDWHNATVYFVLTDRFENGDPSNDQSYGRHKDGMAEIGTFHGGDLRGLTNKLDYLQQLGVNALWISAPFEQIHGWVGGGTKGDFPHYAYHGYYTQDWTNLDANMGNEADLRTLVDSAHQRGIRILFDVVMNHTGYATLADMQEYQFGALYLSGDEVKKSLGERWSDWKPAAGQTWHSFNDYINFSDKTGWDKWWGKNWIRTDIGDYDNPGFDDLTMSLAFLPDIKTESTTASGLPVFYKNKMDTHAKAIDGYTPRDYLTHWLSQWVRDYGIDGFRVDTAKHVELPAWQQLKTEASAALREWKKANPDKALDDKPFWMTGEAWGHGVMQSDYYRHGFDAMINFDYQEQAAKAVDCLAQMDTTWQQMAEKLQGFNVLSYLSSHDTRLFREGGDKAAELLLLAPGAVQIFYGDESSRPFGPTGSDPLQGTRSDMNWQDVSGKSAASVAHWQKISQFRARHPAIGAGKQTTLLLKQGYGFVREHGDDKVLVIWAGQQ

SEQ ID NO: 35199 - protein, 967 aa, Lupinus albus
MANRNLEKMASIDAQLRQLAPAKVSEDDKLVEYDALLLDRFLDILQDLHGEDMKETVQEIYELSAEYEGKHDPKKLEELGNLITSLDAGDSIVFAKAFSHMLNLANLAEEVQIAHRRRNNLKKGDFADENNATTESDIEETFKRLVRELKKSPQEVFDALKNQTVDLVLTAHPTQSIRRSLLQKHGRIRNNLTELYAKDITPDDKQELDEALQREIQAAFRTDEIRRTPPTPQDEMRAGMSYFHETIWKGVPQFLRRVDTALKNIGINERVPYNAPLIQFSSWMGGDRDGNPRVTPEVTRDVCLLARMMAANLYYSMIDDLMFELSMWRCNDELRVRADEISRSSKKDAVAKHYIEFWKIIPSSEPYRVILGDVRDKLYRKSRGSCHLLAQGYSEIPGEEILTSVDGFLELLELCYRSLCVCGDRAIADGTLLDFLRQVSTFGLSLVRLDIRQESDRHTDVLDAITQHLGIGSYQEWSEEKRQQWLLSELSGKRPLFGPDLPQTEEIKDVLDTLHVIAELPPDNFGAYIISMATAASDVLAVELLQRECRIKHPLRVVPLFEKLADLESAPAALARLFSIDWYRNRINGKQEVMIGYSDSGKDAGRFSAAWQLYKAQEELIEVAKKFGVKLTMFHGRGGTVGRGGGPTHLAILSQPPETIHGSLRVTVQGEVIEQSFGEQHLCFRTLQRYTAATLEHGMHPPISPKPEWRALMDQMAVIATEEYRSIVFQEPRFVEYFRLATPELEYGRMNIGSRPAKRRPTGGIETLRAIPWIFAWTQTRFHLPVWLGFGAAFRQVVPKDVRNLNMLQEMYNQWKFFRVTIDLVEMVFAKGDPGIAALYDRLLVSKNLWSFGEQLRTNFEETKKLLLQVAAHKDLLEGDPYLKQKLRLRDSYISTLNVCQAYTLKRIRDPNYDVKLRPHISKECIEISKVADELITLNPTSEYAPGLEDTFILTMKGIAAGLQNTG

SEQ ID NO: 35200 - protein, 82 aa, Oryza rufipogon
MSCCGGNCGCGSSCQCGNGCGGCKYSEVEPTTTTTTTFLADATNKGSGAASGGSEMGAENGSCGCNTCKCGTSCGCSCCNCN

SEQ ID NO: 35201 - protein, 136 aa, Saccharomyces cerevisiae
SNVVQARDNSQVFGVARIYASFNDTFVHVTDLSGKETIARVTGGMKVKADRDESSPYAAMLAAQDVAAKCREVGITAVHVKIRATGGTRTKTPGPGGQAALRALARSGLRIGRIEDVTPVPSDSTRKKGGRRGRRL

SEQ ID NO: 35202 - protein, 686 aa, Bacillus subtilis subsp. subtilis str. 168
MSDDQNKRVNEHSKDEQLEQYRTDNSGKKMTTNQGLRVSEDEHSLKAGVRGPTLMEDFHFREKMTHFDHERIPERVVHARGFGVHGFFQVYEPMTEYTRAKFLQDPSVKTPVFVRFSTVAGSKGSADTVRDARGFATKFYTEEGNYDLVGNNIPVFFIQDAIKFPDLVHAFKPEPHNEMPQAATAHDTFWDFVANNPESAHMVMWTMSDRGIPRSYRMMEGFGVHTFRFVNEQGKARFVKFHWKPVLGVHSLVWDEAQKIAGKDPDFHRRDLWETIENGGKVEYELGVQMIDEEDEFKFDFDILDPTKLWPEELVPVKIIGKMTLNRNQDNVFAETEQVAFHPGNVVPGIDFTNDPLLQGRLFPYTDTQLIRLGGPNFHEIPINRPVCPFHNNQYDGYHRMTINKGPVAYHKNSLQNNDPSPATAEEGGYVHYQEKVEGKKIRQRSDSFNDYYSQAKLFWNSMSPVEKQHIISAFCFEVGKVKSKDVQRQVVDVFSNVDADLAEEIAKGVGVAAPAKRKASKENLTSPALSQARTVKTASTRKVAVLAGNGFHEKELQTVLEALKQEGITVDIISQNLGYMTSGSGQQLEASGTFLTVDSVLYDAVYAAGGLELKDNKQAMAFIREAYNHYKAIGAANEGIDLLQSSVGTTEGLGIVTAKDEPDYTAFSKAFIDAVAAHRHWDRRI

SEQ ID NO: 35203 - protein, 396 aa, Porphyromonas gingivalis W83
MYKGMKDYLAAELKSIEEAGLYKKERIIITPQRADIRVNEGQEVLNFCANNYLGLSDHPRLIQAAKDAMDERGFGMSSVRFICGTQDIHKELEKAIAEYFHTEDTILYAACFDANGGVFEPLFGEEDAIISDALNHASIIDGVRLCKAKRYRYENANMEDLERVLKEAQAQRYRIIVTDGVFSMDGNVAPMDKICDLAEKYDAMVMVDECHSAGVVGATGRGVAEQFDCYGRIDIHTGTLGKAFGGAIGGFTTGPKEVIAMLRQRSRPYLFSNSIPPSVVGAGLEVFKMLKESNDLHTKLMENVNYFRDRMLAAGFDIKPTQSAICAVMLYDAKLSQDYAARLLEEGIYVTGFYYPVVPKGQARIRVQLSAGHEREHLDKAINAFIKVGRELGVIK

SEQ ID NO: 35204 - protein, 205 aa, Arabidopsis thaliana
  misc_feature (178)..(178): Xaa can be any naturally occurring amino acid
  unsure (1)..(205): unsure at all Xaa locations
ILVRRIFSSYSFDFSTRIVSTLHATIAVTLATLSIQDWSCPVCPIASTSSLRQMETLAFSLSYMIYDLICSHFDQVLSIDNAVHHSVCILGFVAGLFYQKCGSEMVAAIWITEISSPFLHLREILKEIGYRDTDLNLAADVCFATIFSLARMVGGPYLVYVTISADNPILIKVYPNIXNIRNSEYDIHFVLVYIYYRFINCSKFL

SEQ ID NO: 35205 - protein, 242 aa, Bacillus subtilis subsp. subtilis str. 168
MPYLKRVLLLLVTGLFMSLFAVTATASAQTGGSFFDPFNGYNSGFWQKADGYSNGNMFNCTWRANNVSMTSLGEMRLALTSPAYNKFDCGENRSVQTYGYGLYEVRMKPAKNTGIVSSFFTYTGPTDGTPWDEIDIEFLGKDTTKVQFNYYTNGAGNHEKIVDLGFDAANAYHTYAFDWQPNSIKWYVDGQLKHTATNQIPTTPGKIMMNLWNGTGVDEWLGSYNGVNPLYAHYDWVRYTKK

SEQ ID NO: 35206 - protein, 76 aa, Saccharomyces cerevisiae
KILTGTVVSTKMHRTIVIRRAYLHYIPKYNRYEKRHKNVPVHVSPAFRVQVGDIVTVGQCRPISKTVRFNVVKVSA

SEQ ID NO: 35207 - protein, 215 aa, Cytophaga hutchinsonii
MIDITNPLIEEYIRAHSTIESDLLKKVNRETYAEVLMPRMLSGHYQGRVLSMLAHMIRPKRILEIGTFTGYSALCLSEGLPAGAELITIDINEELEDRVRAYFMESEKAKAITYLIGDAMKVTESLEGLFDLVFIDADKHNYLNYYHLVFDKVPAGGFIMVDNTLWNGKVAIPEVVAKDKDTRNLHSFNAFIAQDARIEKIILPVRDGITIIRKK

SEQ ID NO: 35208 - protein, 169 aa, Lycopersicon esculentum
MATQTSNPQSVYDFTVKDAKGKDVDLSIYKGKVLIIVNVASQCGLTNSNYTDMTELYKKYKDQGLEILAFPCNQFGGQEPGNIEDIQQMVCTRFKAEYPIFDKVDVNGDNAAPLYRFLKSSKGGFFGDGIKWNFSKFLIDKEGHVVDRYSPTTSPASMEKDIKKLLGVA

SEQ ID NO: 35209 - protein, 118 aa, Lycopersicon esculentum
QIAEFKEAFSLFDKDGDGCITTKELGTVMRSLGQNPTEAELQDMINEVDADGNGTIDFPEFLNLMARKMKDTDSEEELKEAFRVFDEDQNGFISAAELRHVMTNLGEKLTDEEVDEMI

SEQ ID NO: 35210 - protein, 219 aa, Glycine max
FGSRSFIAAVEKGNMRSMPNRSMPASPYPTPGALLMGDAFNMRHPLTGGGMTVALSDIVLLRNLLRPLHDLHDANALCKYLESFSTLRKPVASTINTLAGALYKVFCASPDPASKEMRQACFDYLSLGGVFSDGPIALLSGLNPRPLSLVLHFFAVAIYGVGRLLIPFPSPKRMWIGARLISGASAIIFPIIKAEGIRQMFFPVIVPAYYRTPPTNLDD

SEQ ID NO: 35211 - protein, 283 aa, Glycine max
MENGDQFQEISKGKYDCLLFDLDDTLYPLSSGLAEQVKKNIQEYMLQKLWISEAKVPELCFSLYKTYGTTMAGLKAIGYDFDYDDFHGFVHGRLPYDMLKPDPVLRGILLSLPVRKVVFTNSDKAHASRVLHRLGLEDCFERVISFETLNSSNEDGSEYKQSSTEIFDFYEYIGRPDSDIVLPRTPVVCKPFQDAYEKVFNMADIDPQRTLFFDDSLRNLQTGKSLGLHTVLVGTSVRTTGVDHALESIHNMKEAFPELWEANEKPESVECSRKVSIETSVIA

SEQ ID NO: 35212 - protein, 487 aa, Chlorobaculum tepidum
MSIAADSGGDALHTTSYVMQQADTLAAQFDVAVIGSGPGGYEAAIHAARYGLKTCIVEKAVLGGVCVNWGCIPTKALLRSAEVFDLAKNPETFGVNVGNVSFDLAQAVKRSRNVALKSSKGVAYLLKKAAVEVLAGEAVLTGGAGVMVTMPDGSVRMLGAKNIIVATGSTPRVIPGLEPDGKKIITSREALILKEVPKSMIVVGGGAIGVEMAWFYAKAGSKVTIVELMPRMLPAEEAEVSEALKRSFEKAGITVHCGAKLDNVAVSESGVSAELVVEGSAPQTLNASCLLVAVGVTGAIDGLGLDAVGVETERGFIRTDGQCRTSAPGIYAIGDVRGGMLLAHKASAEAAIAVEAIAGKSPEPLSEPLIPRCVYAQPSVASVGLTEEAAVNAGYQVAVGRSQFAASGKANAYGQLEGFVKLVFDAATGKMLGGHLIGHDAVELIGELGLACRYGVTAGGLVNTVHAHPTLSETVREAAFDALQSMG

SEQ ID NO: 35213 - protein, 148 aa, Griffithsia japonica
MKALILVGGYGTRLRPLTLSVPKPLVDFCNKAMILHQIEALAAAGVTEVVLAVNYQPEKMRSFLNEKEKQLGIKITTSKEDEPLDTAGPIKLAEPHLNDGEPFFVLNSDVSCAYPFEEMIAFQKKTGASGVLLATPVEDPSKFGVSCR

SEQ ID NO: 35214 - protein, 121 aa, Arabidopsis thaliana
MAKSSFKQEHDLEKRRAEAARIREKYPDRIPVIVEKAEKSDIPTIDKKKYLVPADLTVGQFVYVIRKRIKLSAEKAIFIFVDNVLPPAGALMSSVYEEKKDDDGFLYVTYSGENTFGFGSP

SEQ ID NO: 35215 - protein, 363 aa, Nostoc sp. PCC 7120
MSGKNIVFLVLLLFIPVSLAAHYLEWGDLIVFITAGLAILPLAAWMGAATEEIAVVVGPTLGGLLNATFGNATELIIALVALNAGLVNVVKASITGSIIGNLLLVMGLSMLLGGLRHKEQTFQPIVARVNASAMNLAVIAILLPTAMNYTAQGIGEETLQYLSVAVAVVLILVYILTLIFSMKTHAYLYDVGVAEIETEENPHPKPNILLWSGVLLVCTLLVAVESELLVDALEVATSQLGLTALFTGVILVPIVGNAAEHATAVTVAMKDKMDLSVSVAVGSSMQIALFVAPVLVIAGWILGQPMDLDFQPFELVAVVVSVLIANSISSDGKSNWLEGTLLLAAYTVLGFAFYFHPDVGGLG

SEQ ID NO: 35216 - protein, 334 aa, Xylella fastidiosa 9a5c
MAIKVGINGFGRIGRNILRSAVQNFGSNIDIVAINDLLEPDYLAYMLQYDSVHGRFKGEIAIEGTALILNGKKIRLTAERDPGNLQWADAGAEIVIESTGLFLTQESAGKHLAAGAKKVIISAPSKDETPMFVYGVNHNSYNGEPIVSNASCTTNCLAPLAKVINDKWGITRGLMTTVHAATATQKTVDGPSNKDWRGGRGILENIIPSSTGAAKAVGKVIPSLNGKFTGMSFRVPTSDVSVVDLTVQLNTPATYKEICTEVKQQSEGPLRGILGYTEDKVVATDFRGETCTCVFDADAGIALDPTFIKLIAWYDNEWGYSNKCLEIAKVIAAK

SEQ ID NO: 35217 - protein, 336 aa, Eucalyptus saligna
MPVDALPGSGQTVCVTGAGGFIASWIVKLLLERGYTVRGTVRNPDDPKNGHLRDLEGASERLTLYKGDLMDYGSLEEAIKGCDGVVHTASPVTDDPEQMVEPAVIGTKNVIVAAAEAKVRRVVFTSSIGAVTMDPNRGPDVVVDESCWSDLEFCKSTKNWYCYGKAVAEKARCAEAKERGVDLVVINPVLVLGPLLQSTINASIIHILKYLTGSAKTYANSVQAYVHVKDVALAHVLVLETPSASGRYLCDESVLHRGDVVEILAKFFPEYNVPTKCSDEVNPRVKPYKFSNQKLKDLGLEFTPVKQCLYETVKSLQEKGHLPVPPPPEDSVRIQG

SEQ ID NO: 35218 - protein, 676 aa, Trichodesmium erythraeum IMS101
MSGKEFILKFILRKPFNFQVIGNIILGFASGLFNGVNTTLIVPILLQISGQEIEITGSPPIIKFLLYPFEGVPENYRLIVMLLVVILTIVLKNLTAYLRSLLMVVFDRSLTNNIKSEMFQTLMDSDLDFFTKVKVGDLTKRLGSDTAQCTQTINGYINLVTQLIILSLFVSILISISWQLTLISSLLVVFIAVINQLFIRRSKKFGVVLNQEQKKYYIKVIEVLTGIRLIKSVNSENREYKQLRKLMLSLEDIALKEKMNSALIAPVNEVISMITVISILLLGRYLFANQITNASPILLTYLLVLFRLLPIVSQINSSRNAIAKGVASFNTAVDLWRRDNKPIMKTGFIPFHEVKNKIHFEKISFAYPGNDNLIIQNVDISLPRGKTLALVGASGAGKSTFADLLPRLYDPTSGSITIDGIDLREFDINSLRKKTGIVSQDTYLFNDTIKNNVIYACPDATEDKIIDAVRQANAYDFIMDLPKQWDTEIGDRGVMLSGGQQQRLAIARALLQNPEILILDEATSALDTVSERLVQEAIDKLSRDRTVLVIAHRLSTIQNADQIAVLDRGKLVEMGTHSELLEKENGYYRNLYYVQFGNQSELDKYIDQQVLTKASYDARSFLNTIIGSLTLLADETFDKPEEKIELTEEAFRSSTSLLKTLEIFENLIAKHNKSGL

SEQ ID NO: 35219 - protein, 453 aa, Arabidopsis thaliana
MEELGVKRRIVLVPVPAQGHVTPIMQLGKALYSKGFSITVVLTQYNRVSSSKDFSDFHFLTIPGSLTESDLKNLGPFKFLFKLNQICEASFKQCIGQLLQEQGNDIACVVYDEYMYFSQAAVKEFQLPSVLFSTTSATAFVCRSVLSRVNAESFLLDMKDPKVSDKEFPGLHPLRYKDLPTSAFGPLESILKVYSETVNIRTASAVIINSTSCLESSSLAWLQKQLQVPVYPIGPLHIAASAPSSLLEEDRSCLEWLNKQKIGSVIYISLGSLALMETKDMLEMAWGLRNSNQPFLWVIRPGSIPGSEWTESLPEEFSRLVSERGYIVKWAPQIEVLRHPAVGGFWSHCGWNSTLESIGEGVPMICRPFTGDQKVNARYLERVWRIGVQLEGELDKGTVERAVERLIMDEEGAEMRKRVINLKEKLQASVKSRGSSFSSLDNFVNSLKMMNFM

SEQ ID NO: 35220 - protein, 80 aa, Oryza barthii
MSCCGGNCGCGSSCQCGNGCGGCKYSEVEPTTTTTFLADATNKGSGAASGGSEMGAENGSCGCNTCKCGTSCGCSCCNCN

SEQ ID NO: 35221 - protein, 420 aa, Zygosaccharomyces rouxii
MATHEEFIRTQVFGTVFEITNRYTDLNPVGMGAFGLVCSATDTLVGQPVAIKKIMKPFSTAVLAKRTYRELKLLKHLRHENLICLQDIFLSPLEDIYFVTELQGTDLHRLLQTRPLEKQFVQYFLYQILRGLKYVHSAGVIHRDLKPSNILINENCDLKICDFGLARIQDPQMTGYVSTRYYRAPEIMLTWQKYDVEVDIWSAGCIFSEMIEGKPLFPGKDHVHQFSIITDLLGSPPRDVINTICSENTLKFVTSLPHRDPVPFQERFKTVEPDAVDLLRRMLVFVPKKRITAADALVHPYLAPYHDPTDEPTAEAQFDWDFNDADLPVDTWRVMMYSEILDFHKIGGGDGQIDTNAAFDDQVAAAHAAAMAQHHHQTQQQSSGKHTNPTTSSSAATITVTVPIAITMPSLIMVIKRFTT

SEQ ID NO: 35222 - protein, 332 aa, Lupinus albus
MAKNPVRVLVTGAAGQIGYALVPMIARGVMLGSDQPVILHLLDIPPAAESLNGVKMELVDAAFPLLKGVVATTDVVEACTGVNIAVMVGGFPRKEGMERKDVMSKNVSIYKSQAFALEKHAAANCKVLVVANPANTNALILKEFAPSIPEKNISCLTRLDHNRALGQISERLNVQVSDVKNVIIWGNHSSSQYPDVNHATVTTPAGEKPVRELVADDAWLNSEFIATVQQRGAAIIKARKLSSALSAASAACDHIRDWVLGTPEGIWVSMGVYSDGSYNVPAGLIYSFPVTTQNGEWKIVQGLGIDEFSRKKLDLTAEELSEEKALAYSCLT

SEQ ID NO: 35223 - protein, 332 aa, Lupinus albus
MARDPVRVLVTGAAGQIGYALVPMIARGVMLGADQPVILHLLDIPPAAESLNGVKMELVDAAFPLLKGVVATTDAVEACTGVNIAVLVGGFPRKEGMERKDVMSKNVSIYKSQASALEKYAAANCKVLVVANPANTNALILKEFAPSIPEKNISCLTRLDHNRALGQISEKLNTQVSNVKNVIIWGNHSSTQYPDVNHATVTTPAGEKPVRELVCDDAWLNSEFISTVQQRGAAIIKARKLSSALSAASAACDHIRDWVLGTPEGTWVSMGVYSDGSYNVPAGLIYSFPVTTQNGEWKIVQGLAIDEFSRKKLDLTAEELSEEKALAYSCLS

SEQ ID NO: 35224 - protein, 111 aa, Lycopersicon esculentum
MAEQLTEEQISEFKEAFSLFDKDGDGCITTKELGTVMRSLGQNPTEAELQDMINEVDADGNGTIDFPEFLNLMAGKMKDTDSEEELKEAFRVFDKDQNGFISAAPPSAALP

SEQ ID NO: 35225 - protein, 254 aa, Cucumis sativus
MSCYEEEDEESGVVGLRRSSSSSRTGRGKIEIKRIENTTNRQVTFCKRRNGLLKKAYELSVLCDAEVALIVFSSRGRLYEYANNSVRATISRYKKAYSDPSTAMTVSEANTQFYQQESAKLRAQIGNLQNLNRHLLGESISSLSVKDLKSLEVKLEKGISRIRSRKNELLFSEIEYMQKREIELHTNNQLIRAKIAETERSQQNTNASNNNGIATRRGEEGSMGTNLEDNNHHQYDSTNYFDPHHNHPISLQLV

SEQ ID NO: 35226 - protein, 66 aa, Oryza sativa
  misc_feature (21)..(21): Xaa can be any naturally occurring amino acid
  unsure (1)..(66): unsure at all Xaa locations
RNEDYRSAGCPALTRTFLRDXKQIFKNNNGTPFLFPNNGTGALENPPTNTLAPGDQNRSVLVRPVN

SEQ ID NO: 35227 - protein, 226 aa, Suaeda maritima subsp. salsa
KLVSQIKESTKIPVLGHADGICHVYVDKSASLDMAKQIVLDAKLDYPAACNAMETLLVHKDLLQNGGLNELVSDLRSEGVELFGGPRVSALQELSIPATHTFHLEYNSPACTVEIVEDVFAAIEHINQHGSAHTDCVVAEDHKVAEVFLQQVDSAAVFHNASTRFCDGARFGLGAEVGISTSRIHARGPVGVEGLLTTRWILKGSGQIVDGDKGVVYTHKELPIVA

SEQ ID NO: 35228 - protein, 168 aa, Saccharomyces cerevisiae
MARRPARCYRYQKNKPYPKSRYNRAVPDSKIRIYDLGKKKATVDEFPLCVHLVSNELEQLSSEALEAARICANKYMTTVSGRDAFHLRVRVHPFHVLRINKMLSCAGADRLQQGMRGAWGKPHGLAARVDIGQIIFSVRTKDSNKDVVVEGLRRARYKFPGQQKIILS

SEQ ID NO: 35229 - protein, 767 aa, Ustilago maydis 521
MATSAVLGYPRIGPQREVKKALEAYWGGKSSQEELLKVAKEQRLQTYKFIKDAGVDVVPTGTFSLYDHVLDASNTFNLIPENYAKSGLDALDTYFAMARGHQKNGVDLPATEMQKWFDSNYHYLVPELSESTEFKINNTKPIDDFVEAKEAGYNARPVLVGPVTLLALGKPGKDAKDAELDPVSLLSKLAPVYGELLAKLGEAGAEWVQIDEPVLVLDRAQQYAAEFKAAYETIAQAAPSVKIMIATYFNKLESNLEIVKTLPVAGLHIDLDRAPEQLDEVLAAFVNTKHVVSLGLVSGRNIWKTDLSAALKIAQKAVEKLGDASRVQIASSSSLLHTPITIANEKKLSAEVLDWFSFANEKCAEIATLAAALRDPSSAADALAVNEKSIKARRDFEKNSDPAVRERVANIKEEDLARKSPFNVRKEVQKEHLALPIFPTTTIGSFPQTKEIRQYRARFNKSEITKEEYEKFLEDEIKMVVEKQEALNLDVLVHGEPERNDMVQYFGELLDGFVFTQNAWVQSFGSRYVRPPVVVSDVSRPAPMTVRWSSYAQSLTKKPMKGMLTGPVTILNWSFPRADISKEVQSKQIALALRDEVIDLEKAGVRAVQVDEPAIREGLPLRQKDWAGYLRWAVDSFRLSTSGCSDAMNIASHFCYSDFSLIMKSIIELDADMISIEHSKSGEHLLGAFKKVGYPSHIGPGVFDIHSPRVPSKDEMVGRIKAMAEVLPKDSIWVNPDCGLKTRTWEECTAQLTNMVAAAEECRQTLA

SEQ ID NO: 35230 - protein, 151 aa, Brassica napus
  misc_feature (144)..(144): Xaa can be any naturally occurring amino acid
  misc_feature (148)..(148): Xaa can be any naturally occurring amino acid
  unsure (1)..(151): unsure at all Xaa locations
KLRRGFDRKSPPTTFPMDYDIMNPPRNRNTTKGNGIYVFPFNVTVDVILQNANGLDANASEIHPWHLHGHDFWVLGYGEGKFRPEIDEKTYNLKNPPLRNTVALYPYGWTAFRFVTDNPGVWFFHCHIEPHLHMGMGVVFAEGXNRIXKVP

SEQ ID NO: 35231 - protein, 141 aa, Xylella fastidiosa 9a5c
MVLERTLSIIKPDAVAKNVIGDIYSRFEKAGLKVVAAKYKQLSRREAEGFYAVHRDRPFFNALVEFMISGPVMIQVLESENAVARHRELLGATNPKDAALGTIRADFAESIEANAAHGSDSVENAAIEVAYFFAATEIILR

SEQ ID NO: 35232 - protein, 73 aa, CODONANTHE SERRULATA
ISGTNGEVMPGQWEFQVGPSVGIEAGDHIWCARYLLERITEQAGVVLSLDPKPIEGDWNGAGCHTNYSTKSTR

SEQ ID NO: 35233 - protein, 510 aa, Oryza sativa
MDGNAKGGGHSEALKNYNLGRTLGIGSFGKVKIAEHKLTGHRVAIKILNRRQMRNMEMEEKAKREIKILRLFIHPHIIRLYEVIYTPTDIYVVMEYCKFGELFDYIVEKGRLQEDRVALRIFSQIISAVEYCHRNMVAHRDLKPENLLLDSKYNVKLADFGLSNVMHDGHFLKTSCGSPNYAAPEVISGKLYAGPEVDVWSCGVILYALLCGTLPFDDENIPNLFKKIKGGIYTLPSHLSALARDLIPRMLVVDPMKRITIREIRERQRFQIRLPRYLAVPPPDTAQQAKMIDEDTLQDVVNLGYGKDHVCESLRNRPQNEATVAYYLLLDNRFRATSGYLGADYQESLERNFNRFASSESASSNTRHYLPGSSDPHASGLGPHYPVERKWALGLQSRAQPREIMIEVLKALQDLNVSWKKNGQYNMKCRWSVGYPQATDILDVNHSFVDDSIIMDNGDVNGRLPAVIKFEIQLYKSRDEKYLLDMQRVTGPQLLFLDFCAAFLTKLRVL

SEQ ID NO: 35234 - protein, 272 aa, Griffithsia japonica
RFVQACTRRLMSDVPVGVFISGGLDSSLVASIAKKHLPDGYVFHSFSCGLEGSPDVRAAQKVADYLGTKHHVLTFTVEDGISALRDVIYHLETYDVTTIRASTPMYLLSRLCKQYVKVVLSGEGADEVYGGYLYFHNAETERDFHEETVRRVKLLYTSDVLRGDRSTAAQSLELRVPFLDRDFLDVSMSFSAQDKVTQKGKRIEKWPMRQAFAKEFCGEEFLPDDILWRSKEQFSDGVGYNWIDGLKEFCDKEVSDKLLANASDKFPHQPPK

SEQ ID NO: 35235 - protein, 474 aa, Ralstonia metallidurans CH34
MGLRSQSRHPSGDSLKNLQRNLSARHIRFLALGSAIGTGLFYGSASAIQLAGPAVILAYIVGGAAVYMVMRALGEMAVREPVTGSFGRYASEYLGPLAGFLTGWTYILEMIIVCLADVTAFGIYMGFWFPEVPQWIWVLGIVMLICGLNLCNVKVFGELEFWLALVKILAIAAMIIGGTLILFLGVKMNGEHSPGLTNLWAHGGFLPHGAGGLIASLAVVMFAYGGIEIIGITGGEAQNPEKVIPRAINAVPARILLFYVLTMTVLMAIFPWTGIGSQGSPFVQIFSGLGIKSAAAVLNLIVISAAISAINSNIFGAGRMMYGMAEQGQAPRLFATTSRHGVPWVTVLAMAAALLGGVVLNYLIPEQVFVIIASIATFATVWVWLMILLSQVAMRRRLSAEEVRALKFKVPLWPVGPALAIAFMLFVIGVLGYVEDTRVALYVGAGWVVLLSLAWFLRAKPKADALLARETSVS

SEQ ID NO: 35236 - protein, 684 aa, Zea mays
MAAAEARGADFPVGMKVLVVDDDPTCLVVLKRMLLECRYDVTTCPQATRALTMLRENRRGFDVIISDVHMPDMDGFRLLELVGLEMDLPVIMMSADSRTDIVMKGIKHGACDYLIKPVRMEELKNIWQHVVRKKFNGNKDHEHSGSLDDTDRNRPTNNDNEYASSANDGGDGSWKSQKKKREKEDDETDLESGDPSTSKKPRVVWSVELHQQFVNAVNHLGIDKAVPKKILELMNVPGLTRENVASHLQKFRLYLKRIAQHHAGIPHPFVASASSAKVAPLGGLEFQALAASGQIPPQALAALQDELLGRPTSSLALPGRDQSSLRLAAIKGNKPHGEREIAFGQPIYKCQNNTYGAFSQSSPAVGGLPSFAAWPNNKLGMTDSSNTLGNVGNSQNSNMLLHELQQQPDTLLSGTLHNIDVKPSGVVMPSQSLNVFPASEGISHNQNPLVIPSQSPSFLASVPPSMKHESLLGSPSPSTSLLGGLDMVNQASTSQPLISSHGANLPGLMNRSSNAMPSPGISNFQSGNIPYVVNQNAMGVSSRPPGVLKTECTESLTHSYGYIGGSTSVDSSLLSSQAKNPQYGLLQSQNDVSSSWLSSQDFDSFGNSLGQGHPGSTSSNFQSSALGKLPDQGRGRNHGFVGKGTCIPSRFAVDEVESPTNLSHNIVNSGDIVNPDIFGFSGQM

SEQ ID NO: 35237 - protein, 238 aa, Prunus tomentosa
AHYKSEADVGNAIAEAIQSGLVKREELFITSKASNHGHVVEACKSSLKKLQLDYLDLYLVHYPLATKHSGVGTTASLLDENKVLDIDVTVSLETTWHDMEKTVDLGLVRSIGLSNYELFLTRDCLSYAKIKPQVSQFETHPYFQRESLVRFCKKHGVVPMAHTPLGGATANVKAFGSISPLEDPVLIGLAKKYQKSVAQIALRWNIERGTPVIPKSSKVERLKENLEILNFKLEKEDI

SEQ ID NO: 35238 - protein, 820 aa, Nostoc sp. PCC 7120
MPMSTLSFWQFFPSAKKPVCDSPSSLQTNPVRHSRSLLAKVIVGGTTLFVVVGAYFSYQTVRSIMLTNLKGQVLSEVEQSRDEIDHWLAMLKVRVEMLANTDLVRSVDWAIASKYLKAEDQRIEDFSLFGLTTPEGWRESTVPNSKRANVTDRRWFQRSIAGYVHVGDPMIARANGISSVPISSPIRRDGNLSSSPIGVVHGSVSVDRIKYVTETLKYGENSYAFTLNSAGQAIIHPNPAFMTTIEKPGIKLVEAADSGLAAIAQKMVNQQQGIELVTLDKTKKYVAFLPLKEANWSVALVIPRENIESQLKLLDIIALAILALAGTLIGVLVYVQSAEQTQLKQSKALADAAKESADSANNAKSEFLANMSHELRTPLNGILGYAQILGRSKVLPDKERQGVNIIHQCGSHLLTLINDILDLSKIEARKLELASQAFHLPSFMQGVVEICHIRVQQKGIEFHYEPDADLPAGISADEKRLRQVLINLLGNAIKFTDRGSVALRVQRTGLEESDPRTKLRFSIVDTGVGIASADINKLFQTFEQVGEQKRKVEGTGLGLAISQQLVQLMGGQIQVKSQLGVGSEFFFEIILPLASDWSQQQTASVGNIIGYEGVKRHILVVDDRWENRAVLLNLLEPLGFIITEAENGQAGLDQLQQHLPDLVITDLVMPVMDGFEMLRKIREQEQLRSLKILVSSASVAQIDQQMSIDAGGDDFLAKPVQVNDLFTLLEKHLELTWKTEDITHKSADQQQLTELIPPPLADLQSWLELVQEGRLKKLIAAAEQLAQESDRYQPFTQQIIQLAKQFQSEQLEQFIQQYLS

SEQ ID NO: 35239 - protein, 252 aa, Prunus padus
AHYKSEADVGNAIAEAIQSGLVKREELFITSKASNHGHVVEACKNSLKKLQLDYLDLYLVHYPLATKHNGVGTTASLLDENKVLDIDVTVSLETTWHDMEKTVSLGLVRSIGLSNYELFLTRDCLSYAKIKPQVSQFETHPYFQRESLVRFCKKHGVIPMAHTPLGGATANVKAFGSISPLEDPVLLGLAKKYQKSVAQIALRWNIERGTPVIPKSSKVERLKENLEVLNFKLEKEDIELIDTIDKKSRTTL

SEQ ID NO: 35240 - protein, 1858 aa, Trichodesmium erythraeum IMS101
MEPLKYPEESIIYNKRSLTRLMRSVTISQGQFSLILACCNYQHFQQRMMMEVKKMLSVELQEIVLSKTVTTLYTTIDQQLEKFPEAPAVMILNLDKVEAIDELLISTNQVRDEFRKKFSFPLILWITDKLLAKLIRLAPDFKSWAAATIKFEFATSDLIHLLKMAIDSYWINESANEQQQLIKSSSNSTKYNFLVPSFLDQSNCYYGKKLSQNKHQEIQLAFKDLKEREQHLETTLKAKIEFIIGRDYFYNNNIDSALEHYQESLNLWEYKIGSLEYPKSSIISERFILEQKGIVLYNIALCYYLQSTQNPLDNYQELEKAKLKLEESKQLFEEVNNFVLVAEVITTLGQAIKQMKAWGELEAIALEGLQLHHKYGNDLQIAQDYGFLAEVALQKSNWVEAQKLSERALNILFYAKDITLPTEKNKYLLLLAKSLKNLYRQAEAIEYLEIAELTEQEAIKNSLKTQENRDPKLYIELLTELGSLYYNQGKYLQAFRLKKAQRKIAHQYGLLAFIGASQLQPQKQSYIKESLDYQNTLPSEITASGRQKDINNLLERISRNDCKLTIIHGRSGVGKSSLVNAGLIPALKNISISARDTVLVAVQRYNDWLEVLAYSLNKSLQKKCKLRNNNNLFKLKKDYIKNQESIFSIRGKNLNSEVEKTYDSELKDEFQCIESCVIAQLKNNSENNLLTVIVFDQFEEFFFFNNSSEDREVFYRFICNCLNLPFVKVILSMREDYLHYLLEWDFISDLDVINNNILDKDIRYHLRDFSREDAYTVIECLTKRAKFNLEPQLIDVIVDGLADEKQQIRPIELQVVGSQLQEEKPQIQTLDQFQKKFDINPKKAKAKLIKNFLEQVIIDCGQENEEATMQVLFALTNDNLTRATRTKKELLEIVKTCIETSFLVNVDSSKFVENQINYNEKIEGLLNLILEILVDSGLLFIRQECNEKNYQLVHDYLVKPIRKRFDLENRLQQAEVEIKNAEIAKNKAETDKITSQAKLNILLKRQLAVAILGIILMSMSTIATLGFWQKTRFQKQVATAQKERADINSMTAFSEALFFSGYKFDALIESIKAGKKWQKIKQLLGEQNLSNDTEYRIAASLQQAVYGVNKYNHLEGHNNIVWSVIFHPEGNLIASASADKTIKLWSRDGKLQKTLTNHKNRVSKISFSSDGKYLASASHDSTVKIWDLQQLEMKPLSLKSHSDSVVTINFSPNNKMLASGSLDKTIKIWNYTGVLLRTIRTKSVVKWVSFSPNGKMIAAANANGTVQLWNLNGKLLKTLKHGAGNHNYPVYSANFSPDGKRMVTASGDQTVKIWRFFRNIPILEKTITGHKKQVINASFSPDGKIIASSSTDKTIKVWQLDGTLLKTFSGHGDTVTQVTFSPDGETLASASYDKTIKFWSLKNDSLNVLQGHKHRVLGVSFSPDGQILASASQDNTIKLWSPTGKLLNNLEGHTDRVASVSFSSDAQILASGSYDNTVKLWYLNSPNQIWNWKFLEDPKSWQLLGKNHQLFTLKNEKNKLYLVEQVKFLENFLSTNLNCFLNARSFCLVPWGKITSFFPRNFSLLPRQFLEELKYQSWFEIAADNQVKVQCRLLQCLQNEIITVGVDWNWNTDDYLIDFTSKSINLIGHTDSLLSVSFSPNNQVIASSGKDKTIRLWNREGKLLKTLVGHNEWVSSVSFSPDGKILASASDDGTVKLWTQKGVLLKTINAHSGWVLGVSFSPNGQAIATASYDNTVKLWSLDGELLRTFLKGASDSVTSVSFSPDGQAIASSSYDGKVKLWSLYDGSLLKTLNGHQDSVMSVSFSPDGKLLASGSRDKTVILWDLALDSLLDQGCSWVRDYLRTNPHVSQSDRQLCEK

SEQ ID NO: 35241 - protein, 470 aa, Oryza sativa
MALQTLNPRHVLPLPLPRRRAPRPRVLHRPPPPRRRLEGAARPRAVAVAVNEARRRWPPAEGGGEEGKETDLATLGNLCVDVVLSVPQLPPAPREEREAYMERLAASPPDQKFWEAGGNCNLAFAAARLGLRCSTLGHVGEEIYGKFLLDVLEEEGISVVGMLDNSDSGACRNAYETLLCWVLVDPFQRHGFCSRADFSDEPAFSWIRKLPAETKTAIHHSKILFCNGYAFDELFPDVISSAIDCAIDAGTAVFFDPGPRGKSLLHGTLDEQRALEHSLRLSDVLLLTSDEAESLTNIRNPIQAGQELLKRGIRTKWVVIKMGSKGSIMVTKSAVSSAPSFKIDVVDTVGCGDSFTAAIAFGFLHNLPAVSTLTLANAVGAATATGCGAGRNVAHLDKVLQLLRESNINEDDTPWSELIEASSFCSEVSVLSKTAVNSFSDRLVHVPTCNVVSNLLSMLEAVSERSTVQA

SEQ ID NO: 35242 - protein, 252 aa, Prunus caroliniana
AHYKSEADVGNALAEAFETGLVKREELFIISKASNHGHVVEACKDSLKKLQLDYLDLYLVHYPLATKHSGVGTTASLLDKNKVLDIDVTVSLESTWHDMEKTVSLGLVRSIGLSNYELFLTRDCLSYAKIKPQVSQFETHPYFQRETLVRFCRKHGVCPMAHTPLGGATANVKAFGSMSPLEDPVLHGLAKKYKKSVAQIALRWNIERDTPVIPKSSKVERLKENLEVLNFKLEKEDIELINTIDKKSRTTL

SEQ ID NO: 35243 - protein, 197 aa, Arabidopsis thaliana
MSASRFIKCVTVGDGAVGKTCLLISYTSNTFPTDYVPTVFDNFSANVVVNGATVNLGLWDTAGQEDYNRLRPLSYRGADVFILAFSLISKAIYYNVSKKWIPELKHYAPGVPIVLFLTKLDLRDDKQFFIDHPGAVPITTVQGEELKKLIGAPAYIECSSKSQENVKGVFDAAIRVVLQPPKQKKKKNKAQKACSVL

SEQ ID NO: 35244 - protein, 223 aa, Prunus caroliniana
  misc_feature (61)..(61): Xaa can be any naturally occurring amino acid
  misc_feature (188)..(188): Xaa can be any naturally occurring amino acid
  unsure (1)..(223): unsure at all Xaa locations
GLVKREELFITSKASNHGHVVEACKNSLKKLQLDYLDLYLVHYPLATKHSGVGTTASLLDXNKVLDIDVTVSLETTWHDMEKTVSLGLVRSIGLSNYELFLTRDCLSYAKIKPQVSQFETHPYFQRESLVKFCKKHGVTPMAHTPLGGATANVKSFGSISPLEDPVLLGLAKKYKKSVAQIALRWNIXRDTPVIPKSSKVERLKENLEVLNFKLGKEDIELIN

SEQ ID NO: 35245 - protein, 182 aa, Zea mays
MDEKRTTAFGLMQIDEEWRIIEFAKKPKGEQLNEMIVDTTILGLDDVRAKAMLYIASMDIYVFSQDVMLQLLREQFPRANDLGSEVIPGATSIGKRVHAYLYDGYLEDIGTINTFYNANLIILHTKCWTAQLSNLWMCFLWKPPWPGFICVQERVLLQFDALDISTPQASEINSSYVIIHLY

SEQ ID NO: 35246 - protein, 251 aa, Prunus laurocerasus
AHYKSEADVGNAIAEAIQRGLVKREELFITSKASNHGHVVEACKNSLKKLRLDYLDLYLVHYPLATKHSGVGTTASLLDENKVLDIDVTVSLESTWHDMEKTVSLGLVRSIGLSNYELFLTRDCLSYAKIKPQVSQFETHPYFQRETLVRFCRKHGVCPMAHTPLGGATANVKAFGSISPLEDPVLRALAKKYKKSVAQIALRWNLDRNTPVIPKSSKIERLKENLEVLNFKLEKEDIELINSIDKNPGPL

SEQ ID NO: 35247 - protein, 287 aa, Frankia sp. EAN1pec
MAHPTSALAAEVGKFYDHLTTYQTAQDEDLNFHFGYWDVPPDGTPPAPGTDVAELEAAAERLTELMIEKIRVRTGDRVLDVGSGSGIPAVRLTRATGASVVGISISREQVRRSTDRARDENLSDRLEFEYADAAELPFGPDSFDAAWALESIIHVPDRAQVLREIARVIRPGGRFVATDIFERSPVPDEKRHAVDSFYSGLLLGPSVRFDDYPALLRGAGLRPLELIDVSDQVIARSFQLLAERIRRDKENLDDLLGDELYQRLASTGVDGLREIGYLVVVAERPTE

SEQ ID NO: 35248 - protein, 279 aa, Azoarcus sp. EbN1
MNVSVSPDPSPEACRIAAIQTVSGADVAENLRVAAALVAEAAADGAQLVALPEYFPLITPDETAKVAIRETEGHGPLQDFLREVATRHRVWLVGGTIPLVADADGKVRNSMLVYDPDGVQVARYDKIHLFGFRKGSEQYDEAATIEAGREVVTFDGPCGRVGLSVCYDLRFPELFRAMGKVDLIVLPAAFTWTTGRDHWEVLLRARAIENQCYVMAPAQGGRHPGGRVTWGHSLIVDPWGEVLACRDEGPGVVAADLDPDRIAAVRESLPALRHRCLAT

SEQ ID NO: 35249 - protein, 142 aa, Saccharomyces cerevisiae
ANLRTQKRLAASVVGVGKRKVWLDPNETSEIAQANSRNAIRKLVKNGTIVKKAVTVHSKSRTRAHAQSKREGRHSGYGKRKGTREARLPSQVVWIRRLRVLRRLLAKYRDAGKIDKHLYHVLYKESKGNAFKHKRALVEHII

SEQ ID NO: 35250 - protein, 118 aa, Brassica napus
MAKSTFKEEHDLEKRSAEAARIREKYPDRIPVIVEKGEKSDIPTIDKKKYLVPADLTVGQFVYVIRKRIKLSAEKAIFIFVDNVLPPTGALMSAVYEEKKDDDGFLYVTYSGENTFGY

SEQ ID NO: 35251 - protein, 254 aa, Oemleria cerasiformis
SEADVGQAFAEAFKTGLVKREELFITSKANHGHVVEACKNSLKKLQLDYLDLYLVHYPLATKHSGVGTTASLLDENKVLDIDVTVSLEETWRGMEKAVSLGLTRSIGLSNYELFLTRDCLSYAKIKPAVSQFETHPYFQRESLVRFCQKHGVVATAHTPLGGATANTKYFGSISPLGDPVLHDVAKKYQKSVAQICLRWNIERNTPVIPKSSKVERLKENLQVLEFKLEKEDIELINGIDKKSRSTLPSLSWGL

SEQ ID NO: 35252 - protein, 447 aa, Klebsiella aerogenes
MDQTCTLEGFLTRVQQRDPHQTEFAQAVREVMTTLWPFLEENPRYRQLALLERLVEPERVIQFRVVWVDDRNQVQVNRAWRVQFNSAIGPYKGGMRFHPSVNLSILKFLGFEQTFKNALTTLPMGGGKGGSDFDPKGKSDGEVMRFCQALMTELYRHLGPDTDVPAGDIGVGGREVGFMAGMMRKLSNNSACVFTGKGLSFGGSLIRPEATGYGLIYFTEAMLKRHGLGFEGARVAVSGSGNVAQYAIEKAMELGARVVTASDSNGTVVDEAGFTKKKLARLIDIKERAHGRVADYAREFGLTYLEGQQPWSVPVDIALPCATQNELDVDAARQLIANGVKAVAEGANMPTTIAATDLFLEAGVLFAPGKAANAGGVATSGLEMAQNAARMGWKAEKVDARLHHIMLDIHHACVQYGGEAKQTNYVRGANIAGFVKVADAMLAQGVI

SEQ ID NO: 35253 - protein, 526 aa, Oryza sativa
  misc_feature (152)..(152): Xaa can be any naturally occurring amino acid
  unsure (1)..(526): unsure at all Xaa locations
MQPDPQTHGRGREKAAGAGPRLPPPVTAPSVGRPATVLPHKTANVRDHYRIGKKLGQGQFGTTYLCVGKPDGGEYACKSIPKRKLLCREDYEDVWREIQIMHHLSEHPNVARIRGAYDDALFVHIVMELCDGGELFDRIVAKGHYNEPAAPXLIRTIVGVVEGCHSLGVMHRDLKPENFLFASTAEDAPLKATDFGLSVFYKPGDKFSDVVGSPYYVAPEVLQKIYGPEADVWSAGVILYILLCGVPPFWAETESGIFRQILRGKLDLESDPWPSISDSAKDLVRNMLIRDPTKRFTAHEVLCHPWIVDDAVAPDKPIDSAVLSRLKHFSAMNKLKKMALRVIAESLSEEEIGGLKELFKMIDTDNSGTITYDELKNGLKRVGSDLMEPEIQALMDAADIDNSGTIDYGEFLAATLHMNKLEREENLVSAFTFFDKDGSGFITIDELSQACEQFGLSDVHLEDMIKDVDQNNDGQIDYSEFAAMMRKGNAGGANAGGVTSTGGTGRRTMRNSLRVNLGDILKPNEN

SEQ ID NO: 35254 - protein, 160 aa, Griffithsia japonica
PIVRLPIHPTPNSRRPQPLSTAPPSPASRLSFPPRRRRLCPPAIGAAASASVYDLSAFKNGRPYPFSPLSGKLTLFVNVASYCALTPQYEGLVALHTAYQPKGFEVVASPCNQFGRQEPQPDDEICAFVKERFGARFVLLDKLVVNERPADGRSPRSTVS

SEQ ID NO: 35255 - protein, 264 aa, Sorbus aucuparia
AHYKSEADVGEALTEAFKTGLVKREELFITTKIWNSDHGHVVEACKNSLEKLQLDYLDLYLVHYPMPTRHNAIGKTASLLGEDKVLDIDVTVSLQQTWEGMEKAVSLGLVRSIGLSNYDLFLTRDCLAYSKIKPAVSQFETHPYFQRDSLIKFCIKHGVLPTAHTPLGGAAANKDMFGSVSPLDDPVLNDVAKKYGKSVAQICLRWGIQRKTAVIPKSSKIQRLKENLEVLEFQLSDEDMQLIYSIDRKYRTSLPSKTWGLDVS

SEQ ID NO: 35256 - protein, 228 aa, Brucella melitensis 16M
MLNKLSAEFFGTFWLVFGGCGSAILAAAFPELGIGFLGVALAFGLTVLTMAYAVGGISGGHFNPAVSLGLTVAGRLPAKDLIPYWVAQVLGAIAAAAILYVIASGKDGFSAGGLASNGYGELSPGGYSMMAGLLIEIILTAFFIIIILGSTSSLAPAGFAPIAIGFGLTLIHLVSIPVTNTWVNPARSTGVALFADTAALSQLWLFWVAPLVGAVIGAIIWKGLLGRD

SEQ ID NO: 35257 - protein, 244 aa, Schizosaccharomyces pombe
MPDRLKRRIEEIDHQDEIIDREASTASPVSGAGKIDQNGEIKDLLERNLTWSQQTSRKYPSFFTATKDIQTPQVLWIGCSDSRVPETTILNLLPGEVFVHRNIANVVPRSDINALAVMEYSVTVLKVKHIIVCGHYGCGGVAAALGPNLNNLLDHWLRHIRDVIEDNREELDAIEDPQLRRLKLAELNTRAQAISVTRVGFVREAMEKRGLQVHGWIYDLSNGQIKKLDITDAIKKAKYGTYDS

SEQ ID NO: 35258 - protein, 265 aa, Kageneckia oblonga
AHYKSEADVGEALAEAFKSGLVKREELFITTKIWNSDHRYVAEACKNSLEKLQLQYLDLYLVHYPLPTRHNAIGKTASLLGEDKVLDIDVTIPLQQTWEGMEKTVALGLVRSIGLSNYDLFLTRDCLAYSKIKPAVSQFETHPYFQRDSLVKFCMKHGVLPTAHTPLGGAAANKDMFGSVSPLDDPVLNDVAKKYGKSVAQICLRWGIQRKTAVIPKSSKIQRLKENLEVLEFQLSDEDMQLIYSIDKKYRTSLPSKTWGLDVYA

SEQ ID NO: 35259 - protein, 406 aa, Thiomicrospira crunogena XCL-2
MKRVVITGLGVVSSLGNNKEEVTDSLRNGRSGIVYAPEYEENGLRSHVHGAVKNLDFAEHINRKSLRFMGDAAAYTYIAMDQAVKDAGLTEDQVSNVRTGLVAGSGGGSNSNSTQAVEVAREKGVKRVGPYMVTRTMGSTVSACLATPFKIKGINYSISSACSTSAHCIGTAVEQIQLGKQDIVFAGGGEELHWTMSVLFDAMGALSTKYNDTPAKASRAYDANRDGFVIAGGGGMVVVEELEHALARGAKIYAEITGYGANSDGYDMVAPSGEGAVRCMNLALSTVKGDVDYINPHGTSTPVGDTKEAAAIREVFGAKVPKISSTKSMSGHSLGAAGVHEFIYSLMMLENDFIAPSINIETMDPECEGMPIVTELEENAGLTRMMSNSFGFGGTNASLVFEKYKG

SEQ ID NO: 35260 - protein, 265 aa, Vauquelinia californica
AHYKSEADVGEALAEAFKTGLVKREELFITTKIWNSDHGHVVEACKNSLEKLQLDYLDLYLVHYPMPTRHNAIGKTASLLGEDKVLDIDVTISLHTTWEGMKKAVSLGLVRSIGLSNYDLFLTRDCLAYSKIKPAVSQFETHPYFQRDSLVKFCMKHGVLPTAHTPLGGAAANKDMFGSVSPLDDPVLNDVAKKYGKSVAQICLRWGIQRKTAVIPKSSKIQRLKENLEVLKFQLSDEDMQLIHGIDRKYRTSLPSKTWGLDVYA

SEQ ID NO: 35261 - protein, 176 aa, Arabidopsis thaliana
MEFSHKIRLQDFKTINPEKFKLFVNGREGLSAEETLRLGSYNALLKNSLPEEFQYYKPEEESFESSHDAFRSALPRGFAWEILSVYSGPPVIAFKFRHWGYFEGTFKGHAPTGEMVQFLGLGVLKVDESLRAEEIEIYYDPGELFGGLLKGPPISETKTTDSGDNTAEKQSCPFTH

SEQ ID NO: 35262 - protein, 265 aa, Amelanchier alnifolia
AHYKSEADVGEALAEAFNTGLVKREELFITTKIWNSDHGHVVEACKNSLEKLQLDYLDLYLVHYPMPTRHNAIGKTASLLGEDKVLDIDVTISLQQTWEGMEKAVTLGLVRNMGLSNYDLFLTRDCLAYSKIKPAVSQFETHPYFQRDSLVKFCIKHGVLPTAHTPLGGAAANKDMFGSVSPLDDPVLNDVAKKYGKSVAQICLRWGIQRKTAVIPKSSKIQRLKENLEVLEFQLSNEDMQLINGIDRKYRTSLPSKTWGLDVYA

SEQ ID NO: 35263 - protein, 269 aa, Zea mays
MRKPAALVVSTAVFAAAAVVAVMARQRLREARRWARAGAVLRDLQERCAAPVERLRQVADAMVAEMRAGLASNDSEGDSGSSVLLKMLVTYVDSLPSGNLFDFIAAALAKFIASEGEGFYLPEGMQRQLGFTFSFPVKQNSVASGTLIKWTKGFAIDEMVGKDVVAELNKAIKRQGVDMEVTVLVNDTVGTLAAGRYVDNDTVAAVILGTGTNAAYIEHMDSIPKWCGPPPESGNMVINMEWGNFRSTHLPLTEFDVALDAESLNPDEQ

SEQ ID NO: 35264 - protein, 155 aa, Arabidopsis thaliana
  misc_feature (6)..(6): Xaa can be any naturally occurring amino acid
  unsure (1)..(155): unsure at all Xaa locations
AVGGGXDVEVGFANVQGEDFEYYMQSYSIILGRNSKKATVDVDLSSLGGGMNISRNHARIFYDFTRRRFSLEVLGKNGCLVEGVLHLPGNPNVKLDSQDLLQIGDKEFYFLLPVRSILGGQLGPRHHVSGQTSVVRYHNYQSGPGSRVGEDPMSL

SEQ ID NO: 35265 - protein, 544 aa, ASPERGILLUS NIDULANS FGSC A4
MPRHLAWYDQDGEPTIHNPFKKFRRSPRRTNSIQLESRLTQFSSAGAVRPEEEIRRNREIREGLGGPAHSDSFPPGTGTTVDSVARPESMEKAEPEPSMSSGDPINVSTRASPAGESEGIPRKRTRFLRLSEPSNEEGKEISEDELRDKQKFTPVGQFKATVLNSWINILILAAPVGIALNYVDVDPVAVFVVNFIAIIPLAAMLSFATEEIALRTGETIGGLLNASFGNAVELIVAIIALVHNEVLIVQTSLIGSMLSNLLLVLGMCFLFGGINRLEQHFNPVVAQTAASLLSLSVGALIIPTAFNAWSDADKSKTAPLSRGTSVILLVVYGCYLYFQLSTHVEMYNAPSQKSEKIRQKVSEGDASRGIAQIGHMSAALAGANNEPVQDPDDEPEEPQLHIYVAIATLCISTALVGVCAEFMVDSIDALTDRGGISKTFVGLILLPIVGNAAEHATAVTVAIKDKMDLSIGVAVGSSMQIAMLVLPFIVVLGWIMGKDDMVILLFVSVLLVNYLIADGKSHWLEGVLLMMMYIIISVAAWFYG

SEQ ID NO: 35266 - protein, 508 aa, Rickettsia conorii
MVNLKIVIVIIVLISSNVVLAKENSRSLKVAAQEENEFTEINSAPLKVSEAARYSFADIVEPLIPAVVNISTIEYVNSKSENAEKDPLQEKVNDFLEKLNIPLNLEEVDQTPKSVPLGSGFIIEPNGLIVTNYHVIANVDKINIKLADNTELSAKLIGNDTKTDLALLKIDSEEPLPFVEFGDSNDARVGDWVIAIGNPFGNLGGTVTSGIISSKGRDIDIDTDNIVDNFIQTDAAINNGNSGGPMFNLDQKVIGVNTAIFSPLGTNIGIGFAIPSNTAKPIIERLKKDGKVSRGRLGVTIQDLTEDISEGLGLKNTRGVLVAKVQEDGPGDKAGIKTGDIIIEFADIPVKNTKKLRVIIADAPIDQEVKVKILRDKKELELPIKITSDNEEVTKDSTEETNKKEITNKEENNLSITKNNITFGNLTEELRQKYTIPQDKMGIVITNIDEEESSFKIGDLITNINQKSIDDISKLEELYENAKKSDKKNILLLIERGSSNMFVPLQVM

SEQ ID NO: 35267 - protein, 315 aa, Actinobacillus pleuropneumoniae serovar 1 str. 4074
MSQLDALREMTVVVADTGDIEAIKQYQPQDATTNPSLILSASALPQYASLIDDAVAYAKARSDDKAQQLIDAEDKLAVNIGLEILKIVPGRISTEVDARLSYDTKATIEKARQIMKLYNDAGISNDRILIKIASTWQGIRAAEVLEKEGINCNLTLLFSQAQARACAEAGVYLISPFVGRILDWYKAAEKKEYAPAEDPGVISVTNIYNYYKQYGYQTVVMGASFRNVGEITEIAGCDRLTIAPPLLKELAESNAPLVRKLEYKGEVKTRPAPLTEAEFYWQHNQDPMAVEKLAEGIRKFAVDIEKLEAMLAAKL

SEQ ID NO: 35268 - protein, 441 aa, Nostoc sp. PCC 7120
MVARSRGAGSREQGREIRSRGQGEKCPVPNPQSPIPNYHGTKPVNENQAMLTLIKDLATKLAPRLIEIRRHIHSHPELSGQEYQTAAFVAGVLSSSGLRVQEGVGKTGVVGELQVTEENHSFLAIRTDMDALPIQERTGLEYASRTDGIMHACGHDIHTTVGLGAAMVLSQMTEELSGNVRFLFQPAEEIAQGASWMVADGAIKDVSAILGIHVFPSIPAGSIGVRYGALTAAADDLEILIIGESGHGARPHEAIDAIWIASQVITSLQQAISRTQNPLRPVVLTIGKITGGRAPNVIADKVQLLGTVRSLHPETRAQLPNWIERIVANVCHSYGARYQVNYRQGVPGVYNDYALTQLFQSAGEEAWTSDRVQVLPEPSLGAEDFSVYLEHIPGSMFRLGVGYPERIINHPLHHPEFEVDESAIVTGVVTMAYAACKYLRG

SEQ ID NO: 35269 - protein, 2598 aa, Xylaria sp. BCC 1067
MALSQQEIEAILTKDGPMPIAIVGISGRFPGDATTPDKLWDMVSQARSALTDVPKDRYNIDGFYHPSAEHQGTTSTRKGHFISSDVGLFDAPFFKISAQEAHAMDPQQRLALELSYEALESAGLTMADVAQAKMGCYLGTCVRDYAAIRAIDPDDYPRYEANGSMGTAMVSNRISWYFDLKGPSLTLDTACSSSLVCLHLAMQSIRTGESNMALVGATNLILAPHTSNHLSTLSFLSSTGKSQSFDHKANGYSRGEGVSFVVVKSLADALRDGDCIRAVVRGASVTHDGRTPGINLPSAESQEDLIRAAYRNANLSPENTTYFEAHGPGTPAGDPLETSAISKVFSQYHSPDFPLYVGSVKSNIGHLEAGAGIAGLTKAIYALEKGQIPPNIWFEKANPKILLKEWNLSVPTELLPWPTDGLRRASINSFGYGGTNAHCIIDDAYHYLTSRGLVGRHNTTPVVPRPVVLSHDAAVLSPESEIPTSMVSSAFATSVMNSEVVSTEGTTTPVSDVGSIEDLGVISSTPQLLVWSHHEQNGIARTAKDLQSYLKEGDVLATEAPTHLKRLAYTLAARRTRHPWASFVVASDLDEAIKELDTPAKHLRPSDNLASVWIFTGQGAQWFGMGRELLSYRTYRTRIEEAAAHLKSLGCEWDLVEELGKSQADSRVNEPQISQPACTAVQVGLVDLLKEWGAAPDFTVGHSSGEIAAAYAKGALSREAAWTVAYHRGRLSASLNITGAMLAVALGEEAVRPFIDQCTSDPKPVVACVNSPESVTLSGSVEGIDEVLNIIGTQAWARKLLVKTPYHSPYMQKLAEPYYESMKGITGGEATSARMFSSVTGKEIDDAGLLNPQYWVDNMVNCVRFGPALAGILSEPTVSGKPIVLMEVGPHGALQGPVKQIIKAQATQPSELNLFSLLTRKEDAIRTTLKGVGILFQKGLPIDVSKANHLDSKQELPNFLVDLPPFSWNHNTRFWYETALSYAYKNRSEPKHDILGSRDVFSGDAEPAWRNYLRTSEIPWARHHGVQDIFLFSAAGFLTMVVEAMRQIAEPGKVVEGIQFRDVFPGAPIILTDNEDQPVETKLQLRNWRLASRSLTTYWKEFSISSRTRDGTWTQHSTGLVSLKYAADNHASSFADEQAANNEVYKNEYARIQATQLAPHTGDEFYAKFEKLGMRWGETFKTLKESHTAGNAVVATLEVPNTQAWMPANVESSYVIHPATLDGIFHILLAAEGVEKITVPKYIERIYVSAKLPTEAGSKLQGYAEIKEKWADGTNGTVVLSDDKWAEPLLIFEGLKSTDYNSETKEDEKDEAKIKAVRKLGAYSTWHVDVENSPETLREILTDAVNKAPQVPYKEVYDLEWCAYIVCKRMAQRFTDEDATRMAPHHLIFYNYMKNQVKLANENKLPCQTPEWLASSKETEDEVLARAAATSLEGKMMVRISDNIESVLLGEIEPWELMNHDNALNEMYRYGLSDERTPAVQCEYIKRLAAKKPLRILEIGAGTGSATSRIFAALGENIAGKLTKYTYTDISGSFFAEAAEEFKEYRSLMDFKVLNVENEPAKQGFEEGTYDVVVAFQVLHATSKISTTLANARRLLKPGGKLIVTELTSKIGRRSAVFGLLAGWWLGEDDDRHWGPELSEEGWDERLKSVGFTGADLCFRDRDDVGWSSSLVASTNPIEPEISPLNNVTIVTGSDESPQAKGLVEELTKKLTAEGATVDKKTLTEAAEADLTKSRVIVSAEVENSVLTTMDEVQYSAIKNIFLRSDGTLWLTQGGATIDTRRPALNMITGLARTVRGEAPEIRLATLDLDPDVALDNASTTSTVFKVLSIQGDAANNEHEFAARKGALHVLRLGTDENLSRLLKPDEDNENAISLQPLRQANRALKLGLKATGELDSFFFSDDAEHEKPLGDSEIEIEVKAVGLDQFDMVVAVGQIWDVNLGIECSGVVTRLGKDVTDYAVGDRVLTVANGWYRTYVRNSQEYFQKLPETLSFEEGASLMISYGTAAYSVYNAARLEAGETILIHSAADVLGQGAIQMAQHIGAEVLVTVSSETEKNLLKEKYGIPEDHIFSNKDAGFVQGIKRVTKGEGVQVVINSLTGELLRQTWHCIAPFGRFIELGVKDIKSNTGLDMVPFLNNATFAGVNILQMYRTNKRVFSKLIADVLKLYAEGVFKLVPLNIKKFSEIADAFRILQSRRSLGKVVLQVVDNDIVPVTRGKKTELKLSPNATYLIPGGTGGLGRSMLTWMADRGAKYFALTSRSGAKSPDVQAILAELATRGVQTRVFATDIGDEAECAKVLEELANSDFPPIKGTVVLAMNDSMFETMPLDAWKGAIRPKYYVTTNLHNQLPKDLDFFITLSSAAGQIGSIAQSNYNAGNVYQDAIMYHRRTLGLTGTSIDLGWMGDIGFVSEQGKVPEIVACGAPQIGSAQLWAILEEAMAGEIRNQPILGLASGGLVKANGFDEPYWFADARFGPLRVYDSASQNVKANKNSGATVDLAAVIGAAKTMADATKVVCGGLMTKLAKGLMMELEDLDPSRPINIYGVDSLIAVDIRAWALKDLQSVVHVSEILKNQPMIDLAQHIASKSKFLPAALQPKA

SEQ ID NO: 35270 - protein, 611 aa, Candida glabrata
MENKEHHHHHHHHHHHHSNGSYVSNKVSSLADGSRVGNYQIVKTLGEGSFGKVKLAYHVTTGQKVALKSINKKVLAKSDMQGRIDREISYLRLLRHPHIIKLYDVIKSKDEIIMVIEYAGNELFDYIVQRNKMSEQEARRFFQQIISAVEYCHRHKIVHRDLKPENLLLDEHLNVKIADFGLSNIMTDGNFLKTSCGSPNYAAPEVISGKLYAGPEVDVWSCGVILYVMLCRRLPFDDESIPVLFKNISNGVYTLPKFLSPGASDLIKRMLIVNPLNRISIHEIMQDEWFKVDLAEYLVPQDLKQQEQFNKKSGNEENVEEIDDEMVVTLSKTMGYDKDEIYEALESSEDTPAYNEIRNAYILIKDNKSLIKDMKQDNNVTQELDTFLSQSPPTFQQNGDGMKASEDQKKKHSGRRLASSVTQQRTFHQPPFMDQSKEEDSTISIPTSLPQIHRANMLAQGLPAASKISPLVTKKSKTRWHFGIRSRSYPLDVMGHIYIALKNLGAEWANPSEEDLWTIRVRWKYDSDESRLIEDGVKKIPNLMKIVIQLFQIETNNYLVDFKFDGWESTYGDSTISTNMSEDEMSTFSAYPFLHLTTKLIMELAVNSQGN

SEQ ID NO: 35271 - protein, 410 aa, Arabidopsis thaliana
MGNCGTRDEAAVFTPQAQAQQLQKKHSRSVSDLSDPSTPRFRDDSRTPISYAQVIPFTLFELETITKSFRPDYILGEGGFGTVYKGYIDDNLRVGLKSLPVAVKVLNKEGLQGHREWLTEVNFLGQLRHPNLVKLIGYCCEDDHRLLVYEFMLRGSLENHLFRSNPRTLLHFLKMMIALGAAKGLAFLHNAERPVIYRDFKTSNILLDSDYTAKLSDFGLAKAGPQGDETHVSTRVMGTYGYAAPEYVMTGHLTARSDVYSFGVVLLEMLTGRKSVDKTRPSKEQNLVDWARPKLNDKRKLLQIIDPRLENQYSVRAAQKACSLAYYCLSQNPKARPLMSDVVETLEPLQCTGDALIPCATTTAGAAFAMGGVPDYRMHRRFAKNVGPGAICRSPNPNYSPGGPAACRVR

SEQ ID NO: 35272 - protein, 283 aa, Solanum chacoense
MSKDVIEEGQAHHHGKDYVDPPPAPLLDMAELTKWSFYRAVIAEFIATLLFLYVTVATVIGHKKLNALDQCDGVGILGIAWAFGGMIFVLVYCTAGISGGHINPAVTFGLFLARKVSLIRAVAYIIAQSLGAICGVGFVKLFMKHYYNAEGGGANFVQPGYSKGTALGAEIIGTFVLVYTVFSATDPKRSARDSHVPVLAPLPIGFAVFMVHLATIPITGTGINPARSFGAAVIYGHEKIWDDQWIFWVGPMVGAMAAAIYHQFVLRAGAVKALGSFRSNQTN

SEQ ID NO: 35273 - protein, 345 aa, Cytophaga hutchinsonii
MFKRLILSLLILSSIHVYAQEKPYLGAEIRTIETFLYGKFEVRMKPAEASGIIYSFFTFYDEADFATSWNEIDIEVLGRYSNEVQFNAITGNHLMSEKRYVLPFNPHENFHDYAFTWTPQYIAWSVDGAEVYRLTGNAAVKMNHPQKLMMNIWPSSAVGWAGKIDVTKFPLEAGYDYVKYYTYQPASKDTFKLKWTDNFDKLDYGRWQLATHTFDTNECVFTPDNAVVEEGILKLKLTKPVDEEIVPLPTQFIESATCIPNRSKKYAMYIPVKVKFYAPMSRVYYNPEFFTVSEGVVKHVYFDVDRTYVILYVDGLDIRKIKTQKVFYKPASSDAEKFIQDVIIK

SEQ ID NO: 35274 - protein, 255 aa, Oryza sativa (japonica cultivar-group)
MEFRGHDEPVDEMGVAYGRTPPSSSSSPAASASAGNGAGAAEVRYHECLRNHAAAMGGHVVDGCREFMPMPGDAADALKCAACGCHRSFHRKDDGQQQQQLRLLIPSPPTPRVPLLMPPPQPQPHPHPQHPYLHPPFPYHHTPSGSGGTTTESSSEERGPPSSSAAAAQGRRKRFRTKFTPEQKEQMLAFAERVGWRMQKQDEALVEQFCAQVGVRRQVFKVWMHNNKSSIGSSSGGGSRRQPQEQQSQQQQQQQ

SEQ ID NO: 35275 - protein, 431 aa, Pyrococcus abyssi GE5
MKAIDVIERYSKIIAPANRMHYFPLVPVRAENAKIWDIEGKEYIDFLSNAAVQNVGHNNPRVVKAIKEQVEKLTHASYIYSYPVEPLLLAEKLAEIAPVDDPKISFGLTGADANDGAIKYARAYTKRQAILSYMKSFYGSTYGAMSLTGLDFQVRAMVGELSEIHYIPYPNCYRCPFGKEPGSCKMECVEYLKEKFEGEVYAEGVAALFAEPIQGDSGIVVPPKDYFRKVVKILREHGILFVVDEVQSGMGRTGKWFAIEHFGVRPDIITVGKSLGGGLPISATIGRREIIDSLPPLSHAFTLSGNPTASRAALAVIEEIEEKNLLRRAEKLGNHAMKRLKKMMDEHELIGDVRGIGLMIGVELVKDRETKERAIEETQKVIERAFELGLIVTHFNGNVLRIEPPLTIEEETLDEGLDILERAISEVEEEK

SEQ ID NO: 35276 - protein, 138 aa, Nuphar advena
MTKPIPRIGSRRNSRISSRKSGGRTPIGVIHVQASFNNTIVTVTDPQGRVVSWSSAGTCGFKGTRRGTPFAAQTAAGNAIRTVVDQGMQRAEVMIKGPGLGRDAALRAIRRSGILLNFVRDVTPMPHNGCRPPKKRRV

SEQ ID NO: 35277 - protein, 840 aa, Oryza sativa (indica cultivar-group)
MASPMEAVARSSLVLAPRRRRALGLLPAAAAPFVLDCRRRHNGGMRRPHVSFACSAELDTGRRQLPSTGTRAVMSSCPGYVEGRMVGENTSQINMGREARIRRHLENPEFLPSSYDIAWVAMVPLPGTDHLQAPCFPECVEWILQNQHSNGSWGVNEFDSSASKDILLSTLACIIALEKWNVGSEQIRRGLHFIAKNFSIVIDDQIAAPIGFNLTFPAMVNLAIKMGLEFPASEISIDQILHLRDMELKRLSGEESLGKEAYFAYIAEGLEESMVDWSEVMKFQGKNGSLFNSPAATAAALVHRYDDKALGYLYSVVNKFGGEVPTVYPLNIFSQLSMVDTLVNIGISRHFSSDIKRILDKTYILWSQRDEEVMLDLPTCAMAFRLLRMNGYGVSSDDLSHVAEASTFHNSVEGYLDDTKSLLELYKASKVSLSENEPILEKMGCWSGSLLKEKLCSDDIRGTPILGEVEYALKFPFYATLEPLDHKWNIENFDARAYQKIKTKNMPCHVNEDLLALAAEDFSFCQSTYQNEIQHLESWEKENKLDQLEFTRKNLINSYLSAAATISPYELSDARIACAKSIALTLVADDFFDVGSSKEEQENLISLVEKWDQYHKVEFYSENVKAVFFALYSTVNQLGAMASAVQNRDVTKYNVESWLDYLRSLATDAEWQRSKYVPTMEEYMKNSIVTFALGPTILIALYFMGQNLWEDIVKNAEYDELFRLMNTCGRLQNDIQSFERECKDGKLNSVSLLVLDSKDVMSVEEAKEAINESISSCRRELLRLVVREDGVIPKSCKEMFWNLYKTSHVFYSQADGFSSPKEMMGAMNGVIFEPLKTRGN

SEQ ID NO: 35278 - protein, 519 aa, Oryza sativa (japonica cultivar-group)
MQFSSVFPLEGKACVSPIRRGGEGSASDRLKIGDSSSIKHDRAVRRMCLGYRGTKNGAQCVLTSDAGPDTLHVRTSFRRNFADPNEVAAVILGGGTGTQLFPLTSTRATPAVPIGGCYRLIDIPMSNCFNSGINKIFIMTQFNSASLNRHIHRTYLGGGINFTDGSVEVLAATQMPGEAAGWFQGTADAVRKFIWVLEDYYKHKAIEHILILSGDQLYRMDYMELVQKHVDDNADITLSCAPVGESRASDYGLVKFDSSGRVIQFSEKPKGTDLEAMKVDTSFLNFAIDDPTKFPYIASMGVYVFKRDVLLNLLKSRYAELHDFGSEILPRALHEHNVQAYVFADYWEDIGTIRSFFDANMALCEQPPKFEFYDPKTPFFTSPRYLPPTKSDKCRIKDAIISHGCFLRECTIEHSIVGVRSRLNSACELKNTMMMGADLYETEDEISRLLSEGKVPIGVGENTKINNCIIDMNARVGRNVVITNSEGVQESDRPEEGYYIRSGIVVILKNATIKDGKVI

SEQ ID NO: 35279 - protein, 476 aa, Glycine max; identical to SEQ ID NO: 1001

SEQ ID NO: 35280 - protein, 434 aa, Schizosaccharomyces pombe
MTAENATLLEPVLGKDEIGWMFVQEYYTYLNKEPNRLHCFYTKKSTLIHGDEGESISLCHGQQEIHNKILDLDFQNCKVLISNVDSLASSNGGIVIQVLGEMSNKGKLSRKFAQTFFLAEQPNGYFVLNDIFRFLREDVEEEEESPDAVEKEKKDVASEPYVNGVQSQEHLPSAKEEGHYQDPAATENNFATAALISNETDSLNQATLAVPEEPVIQVTEASVPSFVSQQENQLQDEALTSNSKNADAIGASDANVATAPKSWADLIARNHPDVKSQASVSSTASTTGQTVKGVNADQTQQPTAPYTQSNELLETSVFVKNIPPETSDVSLKSAMSIFGPVKAIEFARRKGTAYVDFVNHECVQLALNKKTLQINNATLNIEERRRLFSGKFNKSGDKKSNDNYNGMKRNFRKGNRGAFDGRSKEVTTSKKQNN

SEQ ID NO: 35281 - protein, 265 aa, Amelanchier alnifolia
AHYKSEADVGEALAEAFNTGLVKREELFITTKIWNSDHGHVVEACKNSLEKLQLDYLDLYLVHYPMPTRHNAIGKTASLLGEDKVLDIDVTNFLQQTWEGMEKAATLGLIRNIGLSNYDLFLIRDCLAYSKIKPAVSQFETHPYFQRDSLVKFCIKHGVLPTAHTPLGGAAANKDMFGSVSPLDDPVLNDVAKKYGKSVAQICLRWGIQRKTAVIPKSSKIQRLKENLEVLEFQLSNEDMQLINGIDRKYRTSLPSKTWGLDVYA

SEQ ID NO: 35282 - protein, 452 aa, Bradyrhizobium japonicum USDA 110
MMSQEQNDLITRTGPKDPCGKLMRSYWQPTALVDELEGARPIRPVRLLGENLVLFRDERGRYGLIDRHCAHRGADLAFGRLEHGGLRCAFHGWLFDATGQCIETPAEPKDSKLCQNIRQRSYPVVEKSGILWAYLGEGEPPAFPEIDCFVAPDTHTFAFKGHMACNWLQALEVGIDPAHASYLHRFFEDEDTSTAYGKQFRGASAGSDLPMTKILREYDRPIINVEHTEYGLRLIALREIDEERTHVRVTNQLFPHGFVIPMSTEMTITQWHVPVDDENCYWYAIFTSYTNPVDKKKMRDQRLELYELPDYKSRKNSGNDYGFDPHEQQTATYTGMGNDINVHDQWAVESMGAIQDRTKEHLGQSDKAIVQYRRLLRQEIEKVGGGEKPMLFLDEANARSIQGPATMDGIGPTRGWETYWMEVDVKRRRGAPWTAPVPKEIDGKVHRLTAAE

SEQ ID NO: 35283 - protein, 523 aa, Polytomella sp. Pringsheim 198.80
MIRKALMNARAKLPFARFARSASTSAPVVDIASETIQFARNLPNKLFINNKWVDAKSGKTMGVEDPRNGEEILRVAEGDSADVDLAVKAARKAFDEGAWPRMTGKERGRLIYKLADALEANAEAFARLETLDNGKPLNISRIADVPLSVDHFRYYAGWADKIHGKTIPVDGPHMAYTLHEPLGVVGAIIPWNFPLLMAAWKLGPALAAGNTIVLKPAEQTPLSALLIAKLAAEVGFPEGVINVVTGFGPTVGGPLASHKLVDKTAFTGSTEVGKIVARLAAEQIKPCTLELGGKSPIIVCPDVDVDRAVADAHMALFFNHGQCCAAGSRVYVHEKIYDEFVEKATKAAANHSVGDPFSGQYDQGPQVDNAQFSKILSYVEHGKAEGAKLNVGGCRVGNKGYYVAPTVFSNVTDNMKIAREEIFGPVQSILKYSTFDEVIRRANASDYGLASGVFSKDLDTVNTLVRGLHAGTVWVNCYNLFDSAVPFGGFKTSGIGREKGEYALSNYTKVKAVYMPLVNPAWR

SEQ ID NO: 35284 - protein, 375 aa, Magnetospirillum magnetotacticum MS-1
LGPDRRCSGLVITNNHVIENMNEVKVALADKREFEAQFVLRDPRTDLAVLKIKSPADIAPMPIGDSDHLEVGDFVMAIGNPFGVGQTVTQGIVSALARTQVGSSDYQFFIQTDAAINPGNSGGALVDLQGRLVGINTAIYSQSGGSHGIGFAIPASMVRAVVETAKSGGSLVRRPWLGARVQSVTPDIAESVGLDRPTGVLVASMQAKSPAEEAGLKRGDVILTVDGQTVDDPEAFGYRFALKGISGTAQLGILRGTKRQTVPVKLGPAPETRPRDTLKVRTRTPFAGATLVNTSPAVSEELQADLPEEGVAVSAVEDNSLASRAGFRKGDVILAINGMPITATKDLDRLTQRNLGLWEVSIKRGGEVLTSVFGG

SEQ ID NO: 35285 - protein, 265 aa, Gillenia stipulata
AHYKSEADVGEVLAEAFKTGLVKREELFITTKIWNSDHGHVVEACKNSLEKLQLDYLDLYLVHYPMPTKHNGVGKTASLLGEDKVLDIDVTISLQQTWEGMEKTVSLGLVRSIGLSNYELFLTRDCLAYSKIKPAVSQFETHPYFQRDSLVKFCLKHGVLPTAHTPLGGAAANKDMFGSVSPLDDPVLNDVANKYGKSVAQICLRWGIQRKTAVIPKSSKIQRLKENLEVLEFQLSEEDMQLIYSIDRKYRISLPSKTWGLDVYA

SEQ ID NO: 35286 - protein, 168 aa, Phanerochaete chrysosporium
DMVDMVRSYASGFIFTTSLPPANMAGARASISYQRNFLGDRQLKQINVRDLKSRFEALDIPVIPGPSHIVPVLVGDPVLTKQASDMLLAKHNVYVQAINYPTVARGEERLRFTVTPGHTVEQIARLATAVDSTFSELGIKRTTDWKALGGHANVGMPDAKPVEPIWTD

SEQ ID NO: 35287 - protein, 410 aa, Campylobacter coli RM2228
MRNLLENIKKNSQKLLNLTPKDKENIILKLACALRENFKIILEANEKDMTNFTKSGAMRDRLLLDKKRIFSLCDALEKIAYLEDPIGKISKGWVNYAGLKIEKISIPIGLISVIYEARPSLSAEIIALMIKSSNACVLKGGSEAKFTNSAIFDLVYKVLEKFNLQDCFAMFYERNEIMQILAFDDLVDVIIPRGSSNMIQEIASHTKIPLIKQDKGLCHAFVDESANLNMALEIILNAKCQRVSVCNALETLLIHEKIAKDFIKLLIPEFEKFKVKIHAHENILEHFKNSKLEISKADESTFDTEWLDYAISIKSVKDCDEAIEHINQHSSLHSETIISNNALNIGKFQRLLRSSCIYVNASTRFSDGGEFGFGGEVGISTSKLHARGPMGVEDICTYKYLISGEGQIRK

SEQ ID NO: 35288 - protein, 587 aa, Glycine max
  misc_feature (214)..(214): Xaa can be any naturally occurring amino acid
  unsure (1)..(587): unsure at all Xaa locations
MAAATTSYSSAIAASSDTLAKPASTRTFSATNLALQSSSSKLGFKSLKLHRCAAAAGSALGARMVSAPAVKAPALLDFDTKVFKKEKINLAGHDEYIVKGGRDLFHLLPDAFKGIKQIGVIGWGSQGPAQAQNLRDSLAEAKSDIVVKIGLRKGSRSFAEARAAGFSEENGTLGDIWETVSGSDLVMLLISDSAQADNYEKILSHMKPNSILGXLSHGFLLGHLQSLGLDFPKNISVIAVCPKGMGPSVRRLYVQGKEINGAGINASFAVHQDVDGRATDVALGWSVALGSPFTFATTLEQEYRSDIFGERGILLGAVHGVVESLFRRYTDNGMNEDLAYKNTVESITGIISKTISTKGMLAVYNALSEDEKREFEKAYSASYYPCMEILYECYEDVASGSEIRSVVLAGRRFYEKEGLPAFPMGNIDQTRMWKVGERVRSTRAAGDQGPLYPFTAGVFVALMMAQIEILRKKGHSYSEIINESVIEAVDSLNPFMHARGVSFMVDNCSTTARLGSRKWAPRFDYILTQQAMVAVDNGTPVNRDLISNFLSDPVHGAIKVCAELRPTVDISVPPDADFVRPELRSSN

SEQ ID NO: 35289 - protein, 227 aa, Spiraea cantoniensis
HGHEVEACKNSLQKLQLDYLDLYLVHYPLATRHRVGTTASLLDENKVLDIDVTVSLESTWRGMEKAVELGLVRSIGLSNYELFLTRDCLSYAKIKPAVSQFETHPYYQRESLVRFCQKHGICATAHTPLGGGTANTKYFGSTSPLGDPVLNEVAKKYKKSVAQICLRWNIDRCTAVIPKSSKVERLKENLQVLDFKLEKEDIELIBTIVRKRRTTLPSLSWGLDVYA

SEQ ID NO: 35290 - protein, 166 aa, Triticum aestivum
  misc_feature (92)..(92): Xaa can be any naturally occurring amino acid
  misc_feature (102)..(102): Xaa can be any naturally occurring amino acid
  misc_feature (116)..(116): Xaa can be any naturally occurring amino acid
  misc_feature (146)..(146): Xaa can be any naturally occurring amino acid
  misc_feature (148)..(148): Xaa can be any naturally occurring amino acid
  unsure (1)..(166): unsure at all Xaa locations
MAPTVMASSATSVAPFQGLKSTAGLPVSRRSNGASLGSVSNGGRIRCMQVWPIEGIKKFETLSYLPPLSTEALLKQVDYLIRSKWVPCLEFXSKVGFIFREXHNASPGYYDGRYWXTMWKLPMFGCTDATQVINEVEEVKKEYPDXYXRIIGFDNIRQVQCVSSSP

SEQ ID NO: 35291 - protein, 478 aa, Brucella suis 1330
MKRNRKVKILATLGPASGEEAVIRKLFEAGADVFRINMSHADHDLMRTLVKRIRNVEKELGRPIGILADLQGPKLRVGKFKDGKVDLVPGQTFTLDNNEALGDETRVFLPHPEILEAVEPGHRLLIDDGKLHLVAEACDGKSIRCKVVSGTRISDRKGVSLPDTTLGVGALTEKDRCDLDAVLKEEIDWVALSFIQRPEDLAEVRKVSRGKVGLMSKIEKPQAVTRLDEIIELSDALMVARGDLGVEVPLENVPGIQKQITRKARRAGKPVVVATQMLESMITAPVPTRAEVSDVATAVFEGADAIMLSAESASGQYPVEAVATMNRIAEQVEREPTYSTIIDAQRAMPEPTGADAISLAARQIAETLKLSAIVTYTASGTTGLRAARERPRTPIIALSPVVDTARKLSLVWGLHCVVTDDAHDLEDMVNHACEIVFHEEFGKAGDRVIITAGVPFGTPGATNMLRIAYIGADGKSGI

SEQ ID NO: 35292 - protein, 475 aa, Bacillus subtilis subsp. subtilis str. 168
MNLQENSSQQLKRTMKSRHLFMISLGGVIGTGLFLSTGYTLHQAGPGGTILAYVIGGLMMYLVMQCLGELSVANAVTGSFQKYATTFIGPSTGFMVGIMYWINWVVTVGSEFTASGILMQRWFPDSSVWMWSAIFAALLFICNAFSVKLFAETEFWFSSVKIVTIILFIILGGAAMFGLISLNGTADAPMLSNFTDHGGLFPNGFLAVFIAMISVSFAFSGTELIGVTAGESANPQKDIPRSIRNVAWRTVIFFIGAVFILSGLISWKDAGVIESPFVAVFAEIGIPYAADIMNFVILTALLSVANSGLYASTRMMWSLANENMISSRFKKVTSKGIPLNALMISMAVSCLSLVSSIVAPGTVYVVMVAIAGFAGVVVWMSIALSQLLFRKRFLKKGGDVKDLTFRTPLYPLMPIAALLLCSASCIGLAFDPNQRIALFCGVPCIILCYLIYHFKRNVTKAKKISQEEYPADHIL

SEQ ID NO: 35293 - protein, 528 aa, Neurospora crassa
MTIEADSAEVRNAQRREKFHEADVVVVGAGVFGCAAAYALANQGRSVILLERWMHEPDRIVGELLQPGGLQALQKLGLGHCVEGIDAITCYGYHVVFHGEEVAIPYPVVDDQGKVYSGEAAARVESTATTTTSNGTAGKANSGPKLRRPEGRSFHHGRFISQLRKACAGHPNITIFETTVTSVIRGSHSNQVLGVETLTTTDRDTGEKQPDFFFGQLTLIADGYDSKFRKQLLPSGPDTTPVVRSKFYALELIDCPFPPSGYGHVVIGKTSPILLYQIGTHETRALIDVPLDLPAASAANGGVRGYIENTVVPTLPSSVRPSVLAALKDGKIPRSMPNSYLPASGKANTARTPGVLLLGDAYNMRHPLTGGGMTVAFSDVVLLASLLHPDRVPNLADSAAIETAMKEFHWRRKAWTSIINTLAQALYSLFAANDWQLDALRKGCFRYFQMGGAKTDEPVALMGGLLQRPVVLARHFFTVAFVAIWLHMCERVGSVWGLWRAPLVLVEAVLILWKACVVFLPTIWKEAN

SEQ ID NO: 35294 - protein, 219 aa, Holodiscus microphyllus
WNSDHGHVVEACKNSLKKLQLDYLDLYLVHYPLATKHSVGNTASLLDENKVLDIDVTVSLESTWHAMEKAVKLGLVRSIGLSNYELFLTRDCLSYAKIKPAVSQFETHPYYQRDSLVKFCQKHGVCATAHTPLGGATANTKYFGSVSPLGDPVLNEVAKKYQKSVAQICLRWGIERKTAVIPKSSKPERLKENLQVLEFKLEREDIELINSIDRKYRTS

SEQ ID NO: 35295 - protein, 243 aa, Triticum aestivum
  misc_feature (130)..(130): Xaa can be any naturally occurring amino acid
  misc_feature (154)..(154): Xaa can be any naturally occurring amino acid
  misc_feature (172)..(172): Xaa can be any naturally occurring amino acid
  misc_feature (216)..(216): Xaa can be any naturally occurring amino acid
  misc_feature (228)..(228): Xaa can be any naturally occurring amino acid
  unsure (1)..(243): unsure at all Xaa locations
MALAILARRRAAEAVARRAHAPGAAALSAWRAYAAAAEESDVVVVGGGPGGYVAAIKAAQLGLKTTCIEKRGTLGGTCLNVGCIPSKALLHSSHMYHEAKTSFAHHGVKISNLEVDLPAMMAQKDKAVAXGLTKGIEGLFKKNKVTYVKGFGKXLTSPSEVSVDLVDGGNTXVVKGKNIIIATGSDVKSLPGITIDEKKIVSSTGALCLVGSPKKXLALGAGYLALEXGSSWNRFGNKVPGCL

SEQ ID NO: 35296 - protein, 380 aa, Bacillus subtilis subsp. subtilis str. 168
MADKAFHTRLINMRRDLHEHPELSFQEVETTKKIRRWLEEEQIEILDVPQLKTAVIAEIKGREDGPVIAIRADIDALPIQEQTNLPFASKVDGTMHACGHDFHTASIIGTAMLLNQRRAELKGTVRFIFQPAEEIAAGARKVLEAGVLNGVSAIFGMHNKPDLPVGTIGVKEGPLMASVDRFEIVIKGKGGHASIPNNSIDPIAAAGQIISGLQSVVSRNISSLQNAVVSITRVQAGTSWNVIPDQAEMEGTVRTFQKEARQAVPEHMRRVAEGIAAGYGAQAEFKWFPYLPSVQNDGTFLNAASEAAARLGYQTVHAEQSPGGEDFALYQEKIPGFFVWMGTNGTEEWHHPAFTLDEEALTVASQYFAELAVIVLETIK

SEQ ID NO: 35297 - protein, 198 aa, Escherichia coli
EKCIRARKVVITATQMLDSMIKNPRPTRAEAGDVANAILDGTDAVMLSGESAKGKYPLEAVSIMATICERTDRVMNSRLEFNNDNRKLRITEAVCRGAVETAEKLDAPLIVVATQGGKSARAVRKYFPDATILALTTNEKTAHQLVLSKGVVPQLVKEITSTDDFYRLGKELALQSGLAHKGDVVVYGFWCTGTERHY

SEQ ID NO: 35298 - protein, 435 aa, Burkholderia fungorum LB400
MADSYFPRWRAQPAAAEGRIVGTDERLAWPQMFAMGVQHVVAMFGSTVLAPLLMGFDPNLCIFMSGIGTLLFFVLVGGRVPSYLGSSFAFIGLVIAVTGYGGHGPNLNIPVALGGIIACGVVYAVIGLIVSAVGTRWIETLMPPVVTGAIVCVIGLNLAPIAVHGVSGSNFDSWMALVTVLCVGAVAVFARGMLQRLLILVGLLMAYVIYAIVTNGLGMGKPIDFTIVANAAWFGMPHFTAPVFNMQAMTLLAPIAVILVAENLGHIKAVSAMTGQNLDRYVGRAFLGDGLATIVSGFAGGTGVTTYAENIGVMAVTKIYSTLVFVIAAVIALVLGFSPKFGAVIQTIPGPVLGGVSIVVFGLIAVTGARIWVVNKVDFSDNRNLIVAAVTLVLGAGDFSLKLGGFGLGGIGTATFGAIILYALLRRKPVQGPVA

SEQ ID NO: 35299 - protein, 276 aa, Debaryomyces hansenii CBS767
MAIGESRTELLHWLNSTLDLLYGKVENCGTGAAYCQLMDSIVGGIPMTKVKFNAQTEYDYIHNFKILQASFTKHKVNKTIDVERLVKCRLQDNLLLLQWFKKFWHENKDVNGVYDAASKRKVSGLYSNGSGFSVTPQERSRTSSESSLGSRRTTLPSRVPSTGRTSITPNTPTNTTNKLAQLNKELADTTHELSTVNEELLEYKILAESLETERNFYFNKLREIEILTENLKHLDESEFSKLSVNEFIEKVQSILYSTEEGFQSSNDQVDIDGESF

SEQ ID NO: 35300 - protein, 369 aa, Zea mays
MDMGSGSSPVITDPISISPPLLGGLTSNLMPFSVMSGGCSSSPSMSASSRRKIEEVLVNGLLDAMKSSSPRKKHNLAFGQDNSPDEDPAYTAWLSKCPSALASFKQIVANAQGRRIAVFLDYDGTLSPIVDDPDKAFMSPVMRAAVRNVAKYFPTAIVSGRSRKKVFEFVKLTELYYAGSHGMDIVTSAAAHATEKCKEANLFQPACEFLPMIDEVSKCLVEVASSIEGARVENNKFCVSVHYRNVAEKDWKVVAGLVKQVLEAFPRLKVTNGRMVLEVRPVIDWDKGKAVEFLLRSLGLSDSEDVVPIYIGDDRTDEDAFKVLRERSCGYGILVSQVPKDTEAFYSLRDPSEVMGFLNSLVRWKKHPL

SEQ ID NO: 35301 - protein, 549 aa, ASPERGILLUS NIDULANS FGSC A4
MSSPLVKVLHRMQALFSNIVAALETMLLFPSLFRDSSRGGGKSRAAFRRRRALDALADEIEIIFSKPLTLKNMLAMSEKIREQFRAGLESSPINMLPSYNHALPTGLEQGTFLALDVGGSTMRVALIELCGQGKMEVLRVSSSLIDNDVKLLEGTSFFDWMAEKIEEMLREVGTNYGREEAPLSMGLSWSFPIEQTSISSGLVIHMGKGFRCSMGTVGQELGSLIVQSCQKRGLNVRVDAIVNDSSAALLSRAYVDPTTRMSLILGTGTNVAIHFPVHAIGLGKFGKRPQGWFDYAKHVIINSEMSMFGGGVLPMTRWDDILNRTHLRPDYQPLEYMATGRYLGEIVRLIIVDAVETAQLFGGELPHSMRDAYSLDTSIVAFIEADTSPFLTASAALLQKEHTMSRPPSPEDLRFLLRVCRTISKRAAGYLATAIHSMWCLRNEAEISQGPPSPSFKGPRDVTVTESGSNSDCLSIACDGSVINKYPGFRDRCQAYLDQLTQETNTSKVSQISEEGSCIRLEPAPEGAIFGAAVAVAVAVAGKLEQTIV

SEQ ID NO: 35302 - protein, 505 aa, Streptococcus thermophilus LMG 18311
MSKLFGKVTIRKKLTMTTAVVFFLVLSMFTLVVVFSANTLLLQRERQNVNNTISKVVTYIEKDWDSDEELSPEPLLAALYSPKNIYPSIINGVLSEKRSLDGQVAVSNRLYSNQSVYVYDKKGTFIFTSEEDTDSPPGMSEVNKLKLVSYKGKRGFLLQVPIYGKDKKTIVGYAQVFHDLEFYYALKERLIFLLIFLEVGMTVLVIAVTVVVLTSILRPMRQLHETMGIIIDSPSDLELRSKIESHDEIGALALNFNCMMDKIQENNQMQMRFLSDVSHELRTPIAVIKGHMDLLQRWGKNDPEILEESLEAASHEANRMTIMINDMLDSIRVKGSFDNHRNDTCDLNSSIRTVIGNFRVLHDDYQFYLNDSEGSDRPAQIYSQHFEQVITILIDNAVKYSPVNKKIQITIKALEDEMLVQVQDNGEGISKEDIEHIFERFYRSDKARNRTTTQSGVGIGLSILYQIVEAYRCHIDVSSELGVGTRFDLYIPFAESETTTPQIEG

SEQ ID NO: 35303 - protein, 353 aa, Triticum aestivum
MGSISDDEAACIYAMQLAAAAVLPMTLKNAIELGMIEILVGAGGKMLSPSEVAAQLPSTANAEAPAIVDRMLRLLASHNVVSCEVEEGKDGRLARRYGTAPVCKWLSPDEDGVSLAPMVLLNDKVMLESWYHLKDTVLNGGLPFEKAYGMTAFDYQGTDPRFNRVFNEAMKTHSMIITKKLLEFYKGFDGVGTLVDVGGGVGATIHTILCRYPSIEGVNFDLPHVISEAPSFAGVHHIGGDMFKKVPSGDAILMKWILHDWNDEHCTTLLSNCYDALPAHGKVVIVEYILPVKPDETATAQRSFEADMIMLTHTPGGKERYLREYEELARSAGFASVKATYVYSNIWVIELNK

SEQ ID NO: 35304 - protein, 325 aa, Schizosaccharomyces pombe
MSIKEFAKNAREAYFTLPNGDKIPSIGLGTWRSGKDETKNAVCAALKAGYRHIDTAHIYGNEKEIGEGIRESGVPRTDIWVTSKLWCNAHRAGLVPLALEKTLQDLNLEYIDAYLIHWPFALLSGPEELPRNEKGELIYEDVPIEETWQAMEELLETGKVRYIGISNFNNEYLDRVLKIAKVKPTIHQMELHPYLPQTEYLEKHKKLQIHVSAYSPLANQNDAYNSDISKLIEHKTLVDIANARGEGITPANIAISWAVKRGTSVLPKSVNESRIVSNFLYIPLTDKEMEAINNIGVVRRFSHGKFAPKPMFVGLQDGTPKQTHA

SEQ ID NO: 35305 - protein, 273 aa, Zea mays
  misc_feature (246)..(246): Xaa can be any naturally occurring amino acid
  unsure (1)..(273): unsure at all Xaa locations
MGRRACCAKEGVKRGAWTSKEDDALAAYVKAHGEGKWREVPQKAGLRRCGKSCRLRWLNYLRPNIRRGNISYDEEDLIIRLHRLLGNRWSLIAGRLPGRTENEIKNYWNSTLGRRAGAGAGGSRVVVAPDTGSHATPAATSGSSETGQKGAAPRADPDSAGTTTTSAAAVWAPKAVRCTSGLFFFHRDTTPAHAGETATPMAGGGGVGGGGGEAGSSDDCSSAASVSPRVGSHDEPCFSGDGDGDXLDDVRALASFLESDEDWLRCQTAGQLA

SEQ ID NO: 35306 - protein, 121 aa, Schizosaccharomyces pombe
MRSQFKDDFSFEKRKTESQRIREKYPDRIPVICEKVDKSDIAAIDKKKYLVPSDLTVGQFVYVIRKRIKLSPEKAIFIFIDEILPPTAALMSTIYEEHKSEDGFLYITYSGENTFGTVFPF

SEQ ID NO: 35307 - protein, 246 aa, Methanothermobacter thermautotrophicus
MVSLTKRCIAEFIGTFILVFFGAGSAAVTLMIASGGTSPNPFNIGIGLLGELGDWVAIGLAFGFAIAASIYALGNISGCHINPAVTIGLWSVKKFPGREVVPYIIAQLLGAAFGSFIFLQCAGIGAATVGGLGATAPFPGISYWQAMLAEVVGTFLLMITIMGIAVDERAPKGFAGIIIGLTVAGIITTLGNISGSSLNPARTFGPYLNDMIFAGTNLWNYYPIYVIGPIVGAVLAALTYQYLTSE

SEQ ID NO: 35308 - protein, 660 aa, Agrobacterium tumefaciens str. C58
MISRDKHNRMANAIRFLAMDAVEKANSGHPGLPMGAADVATVLFTRYLKFDPKAPLWADRDRFVLSAGHGSMLLYSLLYLTGYEDMTIDEIKRFRQFGSKTAGHPEYGHATGIETTTGPLGQGIANAVGMAIAERKLEEEFGSDLQSHFTYVLCGDGCLMEGISHEAIALAGHLKLNKLVLFWDDNNITIDGEVGLSDSTDQIARFQAVHWNTIRVDGHDPDAIAAAIEAAQKSDRPTFIACKTVIGFGAPNKQGTHKVHGNPLGAEEIAAARKSLNWEAEAFVIPEDVLDAWRLAGLRSTKTRQDWEARLEATETAKKAEFKRRFAGDLPGNFDSSIDAFKKKIIENNPTVATRKASEDSLEVINGILPEMVGGSADLTPSNNTKTSQMKSITPTDFSGRYLHYGIREHGMAAAMNGIALHGGLIPYAGGFLIFSDYCRPSIRLAALMGIRVVHVLTHDSIGVGEDGPTHQPVEQIAALRAIPNLLVFRPADETETAECWQLALEQKHRPSALALTRQNLTPSRKEYEEKNLSAYGAYELVSASDAKVSIFASGSEVEVALKAAATLKDKGVSARVVSVPCFELFKEQPETYRNAIIGKAPVKIAVEAAIRQGWDYFIGNDGAFVGMHSFGASAPAKDLFKHFGITAEAVVAAVEAKLA

SEQ ID NO: 35309 - protein, 480 aa, Saccharophagus degradans 2-40
MSTHTVDDEVDSLEPDNNQKILSTKLSRALKTTGMAAKSGIRHLNYLKNKTLTSSANVEKKAQLKLDHEAEIGRILFSGLSQMRGTALKASQLLSLEADLLPEGIRKELAKSCYQVPPINRALIRKMFIQELGKEPSKVFDKFEPQACAAASLGQVHKASITLPETGEQQTVAVKIQYPGIGESIDSDLKMLSFILNSLSKTTSHVPNKHVLETTLDEIERCLKDEINYEQEAENTRWFAHNLNVAGVRIPKVYNAFSTQRVICTEFLEGLHVEEWLSTNPTQAQRNRAGQIIFNIFTHGAFELNALHADPHMGNYLFLANGDIGLIDFGCVKKLDKAFTENMGHLVSAILNKNQPQVFESYKQLRILSQDMEYDRYINHVYPILGPLQDWMSTPYAPTRKDINGNTLSGPTESNYYDFSQLPPPPTDMNRANHKTAMESLYSLTRDQLYFDRSYFGVYQLLRKMKAVVDTSNKWIKASK

SEQ ID NO: 35310 - protein, 139 aa, Solibacter usitatus Ellin6076
MSVERTFSIIKPDAVKAGQAGEILAMIQKAGFKIIGLRMTRLTELQAGGFYAVHKERPFYQGLVKFMTEGPIIVMALEREDAVKGLREVMGATNPANAAEGTIRKKFAENIERNCIHGSDAPETAAVELAFFFSSAELL

SEQ ID NO: 35311 - protein, 341 aa, Agrobacterium tumefaciens str. C58
MTERLEDIAIKMVADGKGLLAADESTGTIKKRFDSINLESTETARRDYREMLFRSDDAMKKYISGVILYEETLFQKAADGTPFVDIIKAAGSLPGIKVDIGAKPMAFHPHEFITEGLDGLYERLRKYHEAGARFAKWRGVITIGEQRPSWGSIKANSQSLARYAALCQQADIVPIVEPEVLMDGEPGTHDIDRCAEVTQWVLQTVFADLFDARVNLEGMILKPNMIIDGKNARKASVEEVAEKTVKVLKATVPTAVPGIAFLSGGQSSEEATAHLSAMNAGYDLPWSLTYSYGRALQDTALKTWGGKSENVAAGQRAFTHRAAMNSLAAKGNWKQELEKAA

SEQ ID NO: 35312 - protein, 212 aa, Brassica napus
  misc_feature (125)..(125): Xaa can be any naturally occurring amino acid
  unsure (1)..(212): unsure at all Xaa locations
MNFEEQEEEMEMSGVHPPGGYDSMSGEGATSSGGGGGGRRTSVGEKTKYRECLKNHAVNIAGHAVDGCCEFMPSGEDGSLDALKCAACGCHRNFHRKETEIMSGRAHMVPTYYNRPSQLPPPGYXHRQPAASADEEDTSNPSSSGGTKAKRFRTKFTAEQKEKMFAFAERLGWRMQKHDDVAVEQFCAETGVRRQVLKIWMHNNKNSLGKKP

SEQ ID NO: 35313 - protein, 722 aa, Saccharophagus degradans 2-40
MASATAQADTGMNPDNDYWWPNRLSLEPLRDSSLSADPRGANFDYNEALKDLDVEALKKDLKQVMTASQDWWPADYGHYGPFFIRLSWHAAGTYRMIDGRGGADGGMQRFAPLNSWPDNASLDKARRLLQPIKQKYGNNLSWSDLLVLAGTIGMEDMGFPIVGFAFGRDDEWEPEEVNWGPEGQWLTDRRHSGDRKLDKPFGATEMGLIYVNPEGPHGNPDPIAAAHDIRQAFGRMGMSDEETVALIAGGHTFGKAHGAHKPSDCVGADPEAASMEEQGLGWTNKCGKGNAEDTVTSGLEGAWTVSPAEWTHNFLQNLYAFEWELTTSPAGAKQWVPKGGAATNMVPDAHDSSKRHAPIMLTTDLALKEDPAYRKITQRWLEDPEEFTRAFARAWFKLTHRDMGPVSRYKGELVPSDTFVWQDPVPVADYKQIGERDVKKLKAAILDSGLSTSDLVKTAWASAASFRTTDMRGGANGARIRLAPQKDWAVNQPQDLQRVLKVLEGVQREFNKKSRKTKVSLADVIVLGGAAAIEQAAKKAGHKVEVPFFPGRTDASQEMTDVSTFAWLEPKSDGFRNFHAEGYKRNPAEALVERAALLGLTAPEMTALVGGLRVLQANADGSQHGVFTDNPGSLTNDFFVNLVDMSTVWKKSDTEAGLYKGLDRNSGKVKWTATSADLIFGSNSELRAIAEYYSQSDSQKTFVQDFINAWSKVMTADRFDLK

SEQ ID NO: 35314 - protein, 1203 aa, Thermoanaerobacterium thermosulfurigenes
MNKKLFTNRFISFNMSLLLVLTAVFSSIPLHSVHAADNASVVANIVGEFQDQLGDSNWNIDSNITIMQYMGNGLYEFTTPTQLKAGSYQYKVALNHSWDGGGVPSQGNLTLNLANDSYVTFWFDYNTQSVTDSTKYTPIANDKLPRLVGTIQSAIGAGNDWKPETSTAIMTDDNFDNVYSYTAHVPKGDYQYKVTLGNTWDENYGANGVKDGSNIQINVTNDADITFYYDANTHNIWTNYSPILTGLDNNIYYDDLKHDTHDSFFRNPFGAVKVDQTVTLRIQAKNHDLESARISYWDDINKIRIELPMTRIGESPDGNFEYWEIKLSFDHPTRIWYYFILKDGTKTAYYGDNDDQLGGVGKATDTVNKDFELTVYDKNFDTPDWMKGAVMYQIFPDRFYNGDTSNDHAKTLSRGNDPIEFHNNWNDLPDNPNNAGTPGYTGDGIWSNDFFGDLKGIDDKLDYLKGLGVSVIYLNPIFESPSNHKYDTADYTKIDEMFGTTQDFEKLMSDAHAKGIKIILDGVFNHTSDDSIYFNRYGKYPGLGAYQAWKEGNQSLSPYGDWYTINSDGTYECWWGYDSLPVIKSLNGSEYNVTSWANFIINDENAISKYWLNPDGNLNDGADGWRLDVENEVAHDFWTHFRNAINTVKFEAPMIAENWGDASLDLLGDSFNSVMNYQFRNDIIDFLIGQSFDDGNGQHNPIDAAKLDQRLMSIYERYPLPAFYSTMNLLGSHDTMRILTVFGYNSADPNENSDAAKQLAEQKLKLATILQMGYPGMADIYYGDEAGVSGGKDPDDRRTFPWGNEDTTLQDFFKNISSIRNNNQVLKTGDLETLYAQNDVYAIGRRIINGKDAFGTSYPDSAAIVAINRSKSDKQIAIDTTKFLRDGVTFKDLINNNVSYSISNGQIVIDVPAMSGVMLISDDGQDLTAPQAPSNVVVTSGNGKVDLSWLQSDGATGYNIYRSSVEGGLYEKIASNVTETTFEDANVTNGLKYVYAISAIDELGNESGISNDAVAYPAYPIGWVGNLTQVSDNHIIGVDKPTEDIYAEVWADGLTNSTGQGPNMIAQLGYKYVSGTVYDSVYGSVYNSVYGVDDSGFTWVNAQYVGDIGNNDQYKASFTPDKIGQWEYLMRFSDNQGQDWITTSTLSFYVVPSDDLIKPTAPYLNQPGTESSRVSLTWNPSTDNVGNYTIMKFIGPMVEHLIK

SEQ ID NO: 35315 - protein, 249 aa, Azoarcus sp. EbN1
MYKIVLLRHGESTWNKDNRFTGWTDVDLTEKGVEEARGAGHLLKREGYTFDLAYTSVLKRANKTLNIVLEELDSLWLPVEHSWRLNERHYGDLQGLNKAETAAKFGDDQVLVWRRSYDTPPPPLPEGDERLTSGDPRYASLPRAQFPRTECLKDTVARFVPYWETVIVPNILAGRRILIAAHGNSLRALIKYLDNISDSEIVGLNIPTAQPLVYELDANLRPIRSYYLADADTIRAAEAAVAGQGKAKG

SEQ ID NO: 35316 - protein, 599 aa, Agrobacterium tumefaciens str. C58
MADIDEQKAAKQRSLKPLLGLFPYLRRYRGLMAAALFALVLSSATTLALPLAVRRIIDHGFQTPDGGMINSYFAMLLAIAVVLALASAMRYYYVMTIGERVVADLRRDVFAHLTTLSQQFFDSNRSGELTSRLTADTVQIRSAFGSSASVALRNIIMCCGAVAMMIYTSPGLSGLALLAIPFIVFPLIAFGRSVRARSRTTQDTLANSAAYASETIAASRTVQSFNAEVLANARYGASVEAAYQGARAAIGARSVLTAVAIALVFGSVVGILWYGAQNVLAGSMTAGTLGQFVLYSVIAASGLGQLSEVWGELAQAGGAAERLSELLNERSPVAEPAAPVAMPQPPRGEAEFDNVDFVYPLATGRPIVSGLSLKVAAGETVAIVGPSGAGKSTVFSLLMRFYDPQQGRITIDGVDIRNVSLADLRARLSIVPQDVAIFASSIHDNIAFGRPEATREDVRAAAIAAQADGFIERLGDGYDTQVGERGVTLSGGQRQRIAIARAILRDAPILLLDEATSALDAESETLVQKALDELMKTRTTIVIAHRLATVLKADRILVMDEGRIIEEGTHQSLIRQNGLYARLARLQFQTGPDELRAQA

SEQ ID NO: 35317 - protein, 392 aa, Mycoplasma arthritidis
MKDDACLLKKGSIVTIKTDENSYKNLVGDDKVITVSYRMDKDMHVGAKVLLDDGKLVTIVKEIKPEIILVEVQNDHVLKTNKRVNIPGIDFSMPFMSPKDREDIIWGAKYGVDFIAASFVNSAKNVHEIREILKQANAEHIQICSKIESQTGIDNIDEIIEASDSIMIARGDLGLEIPYYEVPYWEKKIIAKCRKANKEVIVATQMLDSMEKTPLPTRAEISDVYWATELGASATMTSGETASGQYPVEAIKTMATINHRAEQEYFNEIATSCNCQCQPKCELGHVAKELKEKTKTGDFPYTIAISEDGKLLKKIAKYKPNTTVIALVSDPKIETAFGITFGIFCEKNGAKAIEKVIKDPKYLNEILASHFDIKKGQKFLVIKDGLISENSL

SEQ ID NO: 35318 - protein, 275 aa, Oryza sativa
  misc_feature (26)..(26): Xaa can be any naturally occurring amino acid
  unsure (1)..(275): unsure at all Xaa locations
RSRTPSSWACSRRCSPPPSPEEGADXKLSRRYAAAPVCKWLTPNQDGVSMAALALMNQDKVLMESWYYLKDAVLDGGIPFNKAYGMTAFEYHGTDARFNRVFNEGMKNHSVIITKKLLDLYTGFDAASTVVDVGGGVGATVAAVVSRHPHIRGINYDLPHVISEAPPFPGVEHVGGDMFASVPRGGDAILMKWILHDALPEHGKVVVVECVLPESSDATAREQGVFHVDMIMLAHNPGGKERYEREFRELARAAGFTGFKATYIYANAWAIEFTK

SEQ ID NO: 35319 - protein, 336 aa, Candida albicans SC5314
MTDIAPPSAATPNDYILSLSPEQIEHDQKIGIKAIRLFLQSKTSYDVLPVSYRLIVLDTSLLVKKSLNILLQNNIVSAPLWNNQTSRFAGLLTSSDFINVIQYYLQFPEKFELVDQLTLGGLREIEKAIGVDQIETASIHPFKSLYEACVKMLESKARRIPLIDEDEKTKREIVVSVLTQYRILKFVALNCKETKMLLKPLKNLSGLGDVKKLSTCTMDTPVIEVIHLLTENSVSSIPIVDGQGKLINVYEAVDILALVKGGMYTDLDLSVGDALLRRSEEFEGVHTCTLNDRLSTIMDTIRKSRLHRLFVVDDEGKLVSVITLSDILNYILFGED

SEQ ID NO: 35320 - protein, 563 aa, Oryza sativa
MAPTAAVAGGGVEAEALLGLLQRVQSEALRAFGPNDFDPKLYVDLPLAADASAAAALASLPRAAPSRGEMEAYISRYFALAGSDLVAAADPPDFERDPPGFLPRVERAEARAWALEVHALWKDLTRRVAPAVAARPDRHTLLPLPGRVVVPGSRFREVYYWDSYWVVRGLLVSKMYETAKDIVLNLVYLVEKYGFVLNGARSYYTNRSQPPLLSSMVLDIYMATGDMAFVRRVFPSLLKEHSFWMSEVHNVAVMDNHGRVHNLSRYQAMWNKPRPESATIDEEFASKLSTAAKEKFYHQVASTAETGWDFSSRWMRDSTDMTTLTTSCIIPVDLNTFILKMEQDIAFFAKLIGESTTSEIFSEASKARHNAIDSVLWNADMEQWLDYWLPTDGNCQGVYQWKSISQNRAIFASNFVPLWLNAQHSGLEQFVDEAKSVRVMRSLQKSGLLQPAGIATSLSNTGQQWDFPNGWAPLQHLIVEGLLRSGSGEARELAEDIATRWVRTNYDAYKATGAMHEKYDVVTCGKSGGGGEYKPQTGFGWSNGVILSFLDEFGWPQDKKIDC

SEQ ID NO: 35321 - protein, 289 aa, Sulfolobus solfataricus P2
MSVVLKDSLWRYFAEFVGTFILILFGDGAIVASTLSSQPSFGFIMVSWGFGIVLAIYAVGPISGAHINPNVTLAFAVTKRIKWVDVIPYIVFQILGAAAATSVLLVWWGDVITRIDPPPFLYADIGAAFFTQYPEPGFWPQYWPKSYLPNVSSAGILYSQVNQIFPLWKGAFAEALMTFLLLLIVVAVTDPDSPFYSQSLAPWAIGIGYVMPFLLFEAQLTGGMINEARSWGPMLALYLFGYRTGAFNFRGEYFYVYGIPDFIGGILGALFWDHVLKPYLRFVKNINKK

SEQ ID NO: 35322 - protein, 362 aa, Shigella flexneri
MFRQGITGRSHLMSQNTLKVHDINEDAEFDENGVEVFDEKPLVEEEPSDNYLAEEELLSQGATQLVLDATQLYLGKIGYSPLLTAEEEVYFARRALRGDVASRRRMIESNLRLVVKIARRYGNRGLALLDLIEEGNLGLIRAVEKFDPERGFRFSTYATWWIRQTIERAIMNQTRTIRLPIHIVKELNVYLRTVRELSHKLDYEPSAVEIAEQLDKPVDDVSRMLRLNERITSVDTPLGGDSEKALLDILADEKENGPEDTTQDDDMKQSIVKWLFELNAKQREVIARRFGLLGYEAATLEDVGREIGLTRERVRQIQVQGLRRLREILQTQGLNIEALLPRVSKDLSERPLSSEAGFFCAQ

SEQ ID NO: 35323 - protein, 372 aa, Synechococcus sp. CC9605
MTTAPATANIPVTILSGFLGAGKTTLLNHILSNQQGVKTAVLVNEFGEIGIDNDLIVTTDEDMVELSNGCICCSINDELMEAVERVIERPEPLDYIVVETTGLADPLPVAMTFLGSELRDQTRLDSIITLIDAENFDDVVLDTEVGRAQVIYGDILLLNKCDLVSEERLEAVDQQLRDVKNDARILRSVKGDVPLPLLLSVGLFESDKVSSPADDPSLDHSDCDHDHGHCSHDHDHGHDRGHDHSQGHDHSHGHDHSHGDGHDHGHHHHSHNHGDHQDIEGFTSVSFQSDGPFSLRKFQNFLDNQMPQEVFRAKGVLWFNESERRHVFHLAGKRFSIDDTDWTGDRKNQLVLIGRDIDHTTLREQLQACVAH

SEQ ID NO: 35324 - protein, 178 aa, Rhodobacter sphaeroides
KPAVYFGGKARIIDFALSNAMNSGIRKMAIATQYKAHSLIRHIQRGWNFFREERNEYLDILPASQRVDENRWYLGTADAVTQNIDIVDSYDIKYVIILAGDHVYKMDYEIMLRQHCETGADVTIGCLTVPRAEATAFGVMHVDANLRITDFLEKPADPPGITGDEANALASMGIYVFK

SEQ ID NO: 35325 - protein, 481 aa, Solibacter usitatus Ellin6076
MVRTCLVIVACFFLASCHSPQAVSANNEKRQLPAANTGENLPILSYSPVVDHVAPAVVTIRASHRVRAPRQFPFSDTPLFREFFGGGSPVPRDRPEVESALGSGVIVRSDGHILTNHHVIDGAEDIKVDLSTRRTYSAKVVGSDSPSDIAVLKISGGDLPVLQLGDSDRVRVGDVCLAVGNPLAVGESVTAGIISAKGRSTDSVGGGSFQDFLQTDAPINQGNSGGALVNTRGELIGINSQILSSNGGNVGIGFAIPSNMAKSVMDQLIGKGSVQRGMLGVSIQPVTSDIASSLGLKDVRGILINSVTPAGPAEKAGLQRGDVILQVDGKDVNEPNQLRNEIAARAPGAEINLTIQRDGKQQQVRTKLGTLTPQTAAADAPGGGSGGGGKLGIGVVPLTPDLAAQLGLRRGAQGLAVQSIDPEGPAAQAGLREGDVIQEVNRQPVHTIDELRSALQKSGDRAPLLLINREGQSAYVPVPLK

SEQ ID NO: 35326 - protein, 327 aa, Synechococcus elongatus PCC 7942
MYYDADANLDLLNGKTVAIIGYGSQGHAHALNLRDSGVNVVVGLYPGSKSAAKAEAEGLKVLPVAEAAQAADWIMILLPDEFQKSVFENEIRPALSAGKVLAFAHGFNIHFAQIVPPADVDVVMIAPKSPGHLVRRTYEQGQGVPCLFAIYQDASGQARDRAMAYAKGIGGTRAGILETSFREETETDLFGEQAVLCGGLSALIKAGFETLVEAGYQPELAYFECLHEVKLIVDLIVEGGLAAMRDSISNTAEYGDYVTGPRLITEETKAEMKRVLADIQQGRFALDFVQECGAGKPVMTATRRLEAEHPIESVGKDLRAMFSWLKK

SEQ ID NO: 35327 - protein, 197 aa, Oryza sativa (japonica cultivar-group)
MSASRFIKCVTVGDGAVGKTCMLISYTSNTFPTDYVPTVFDNFSANVVVDGNTVNLGLWDTAGQEDYNRLRPLSYRGADVFLLAFSLISKASYENVSKKWIPELKHYAPGVPIILVGTKLDLRDDKQFFVDHPGAVPITTAQGEELRKQIGAPYYIECSSKTQLNVKGVFDAAIKVVLQPPKAKKKKKAQRGACSIL

SEQ ID NO: 35328 - protein, 121 aa, Triticum aestivum
  misc_feature (40)..(40): Xaa can be any naturally occurring amino acid
  misc_feature (78)..(78): Xaa can be any naturally occurring amino acid
  unsure (1)..(121): unsure at all Xaa locations
PLSPKFRGEHALRRYPTGEERCIACKLCAAACPANAITIXSEPRPDGSRRTTRYDIDMTKCIYCGFCQEACPVDAIVXGPNYENATINHEELFYNKEKLLSNGDRWEPQLARNIESQIRQF

SEQ ID NO: 35329 - protein, 207 aa, Brassica napus
  misc_feature (191)..(191): Xaa can be any naturally occurring amino acid
  misc_feature (197)..(197): Xaa can be any naturally occurring amino acid
  unsure (1)..(207): unsure at all Xaa locations
MSKSGGNQPVDRYLRRQVLGEGTYGVVYKATDTKTGKTVAVKKIRLGNQKEGVNFTALREIKLLKELNHPHIVELIDAFPHDGSLHLVFEYMQTDLEAVIRDRNIFLSPGDIKSYMLMTLKGLAYCHKKWVLHRDMKPNNLLIGENGLLKLADFGLARVFGSPNRRFTHQVFATWYRAPELLFGSRQYGAXVDVWAXGLIFPELLSS

SEQ ID NO: 35330 - protein, 1008 aa, Chlamydomonas reinhardtii
MPHEFKTAVVWFRRDLRVDDNPALVAALAAAPNVIPVFIWAPEEEGQFQPGRCSRWWSKHSLVDLQQALAALGSRLVIRRSTDSTAALLQLVTELGAEAVFFNHLYDPISLMRDHDCKRGLTAAGVAHRTFNGDMLYEPWDVLDPNKQPYSTFDDFWNSVRAMPVPPPFPVSAPASMPAVPAAVPSMTVAEVDWFFTPEQEASSDQLKFKWKPGVGGAISELEHFLAERLTEFEHDRAKVDRDSTSRLSPWIHIGSISVRYIFYRVRQCQAEWLAAGTDRAQSCDDFLQQMGYREYSRYLAFHFPFIHERSLLGHLRACPWRIDQHAFKAWRQGQTGYPIVDAAMRQLWSSGWCHNRGRVVAASFLVKDLLLPWQWGLKHYWDAQIDADLECDALGWQYVSGGMSDAHPFSYMMDLEKEARRFDPDGEYVRRWLPALSRLPTEYIHAPWKAPASVLAAADVELGCNYPLPIITRSDAKANVDYACGVLEKSAVAPTGSESSGRYPYRAPTYPNAGGGGGASGGVDGAGSSGGNPTAAMGASGGAGPSSGTGTGGQGGAFRGRGDGGGSAPVSQQGGMLPPGVAVCVTAGTGGTQPDSRTVSGAHAGVSNSAGGVACDMPPPSHSHPRGGSSGVAAAGVGGVSGGPSSGGAAAPGATRKATAPGGAVFYHPGEASGEGHALLERILQQQRRQRGAANRQDGSGTNQPPPPVSMPGMLDAAGAAGGGGGGGGGLAGLPGVLQGLHGGAGATAAPAVAWAGRVAAGGVDDMDAVALWQQQQQLLQGGAAAFAFEQAMELLLARRRAGDGVSGFCGGDAPGRGGGDADEADGLMLEEDSEEVVSNTVDLHLSAFTGASCHRQSGTARGARAAERRLKKEAGSPEVTDGGGSAGAGCGEEDAMQCEDEEHGERGSPARRTADEEAQPPAEEGGAGSEDAGAAASEGDEAEGYGSESASEDNGGATPVEEADQMVVDGGGGGGGGGGGGGGRGGGQHKRRRSQLEGEQGDAAWE

SEQ ID NO: 35331 - protein, 318 aa, Shewanella sp. MR-7
MANTLEQLKSYTTIVADTGDIEAIKRYQPEDATTNPSLILKAAQIPEYSALIDNAIAWAKLQSADIEQQIDDASDKLAVNIGVEILKLVPGRISTEVDARLSFDKEKSIAKAHKLVRLYQEAGVDKSRILIKLASTWEGICAAKELEQEGINCNLTLLFSFAQARACAEAGVYLISPFVGRILDWYKKDTGKDYDAVNDPGVVSVTEIYNYYKQHGYNTVVMGASFRNIGEIIELAGCDRLTIGPSLLEELANSQVAIQPKLIPASTTVAAGEPLTEAQFRWDFNQDPMAVDKLAEGIRNFAIDQGKLEVMLKAKLAN

SEQ ID NO: 35332 - protein, 472 aa, Mycobacterium bovis AF2122/97
MTRRGKIVCTLGPATQRDDLVRALVEAGMDVARMNFSHGDYDDHKVAYERVRVASDATGRAVGVLADLQGPKIRLGRFASGATHWAEGETVRITVGACEGSHDRVSTTYKRLAQDAVAGDRVLVDDGKVALVVDAVEGDDVVCTVVEGGPVSDNKGISLPGMNVTAPALSEKDIEDLTFALNLGVDMVALSFVRSPADVELVHEVMDRIGRRVPVIAKLDKPEAIDNLEAIVLAFDAVMVARGDLGVELPLEEVPLVQKRAIQMARENAKPVIVATQMLDSMIENSRPTRAEASDVANAVLDGADALMLSGETSVGKYPLAAVRTMSRIICAVEENSTAAPPLTHIPRTKRGVISYAARDIGERLDAKALVAFTQSGDTVRRLARLHTPLPLLAFTAWPEVRSQLAMTWGTETFIVPKMQSTDGMIRQVDKSLLELARYKRGDLVVIVAGAPPGTVGSTNLIHVHRIGEDDV

SEQ ID NO: 35333 - protein, 182 aa, Oryza sativa
MASPGVVCTTVTPTSSAGSDQVVAGGGEAARRPVAPAVMEERKRKRKESNRLSAQRSRARKQQQLDELAGQVAALRARNGALGLAAREAARRCAAVRAENELLRARSVELAARLDSLTDLAQCLHDAAAASSFAAAPPMMMAGAATAFPTGAVGAAAGFMMPQLPPPLLDATTMGMHCNYYY

SEQ ID NO: 35334 - protein, 563 aa, Uncultured crenarchaeote
MCGIVGILSKKERNVAPLIGKMLSCMKNRGPDGMGLSTENQIVYSDTFDNPLFSQVEGHDVLGHSRLAIVGGSCGQQPFVSCDKKLILEHNGEIYNYKEIRKNLSAHHTFTTSTDSEVIVHLLEDHYQNTKGDLIEAIRRTVTQLDGIYVLAIREQSTGDIVLVRDGIGVRQIYYGESSDFIAFASERKALWKIAMSDQIKRLLPGYALVISRKEGSSNFKTTLFPISVNTKKSICEKYSILYTDIDSAVNAYGDTLVESMRKRVSDFKKIGIVFSGGIDSVIVAYLAKQMAPEVICYTSGIKGSSDILNSLEIAEKLDLKLEIEQMTESDVESTIPKIISIIEDDNMGQVEVAIPIYGAVKLAHEQGIRVMLTGQGADELFGGYSWYSKIVKKHGYEKIQGYLIEDIKLLYKETLEREDKITMSQSIELREPFLDTNLIDTVLRIDPRLNIQNNGNNYDNLGKRVHRKLAEKLGIPKEIAYRIKEAAQHGSGIHNTLNTLAMKNGFTESKVNSSYLDKLKKRELIGSSQRYGHLFEKEQIWSLEPHIQMYLENISKNILPRN

SEQ ID NO: 35335 - protein, 361 aa, Arabidopsis thaliana
MAKSQIWFGFALLALLLVSAVADDVVVLTDDSFEKEVGKDKGALVEFYAPWCGHCKKLAPEYEKLGASFKKAKSVLIAKVDCDEQKSVCTKYGVSGYPTIQWFPKGSLEPQKYEGPRNAEALAEYVNKEGGTNVKLAAVPQNVVVLTPDNFDEIVLDQNKDVLVEFYAPWCGHCKSLAPTYEKVATVFKQEEGVVIANLDADAHKALGEKYGVSGFPTLKFFPKDNKAGHDYDGGRDLDDFVSFINEKSGTSRDSKGQLTSKAGIVESLDALVKELVAASEDEKKAVLSRIEEEASTLKGSTTRYGKLYLKLAKSYIEKGSDYASKETERLGRVLGKSISPVKADELTLKRNILTTFVASS

SEQ ID NO: 35336 - protein, 909 aa, Oryza sativa
MTDTTDDIAEGISFQAFEDDCRLLGSLLHDVLLRELGPRFIHLLERITILAQSAVNMRSAGVEDTAVVVEKQLGAELAAMSLEDSLCLARAFSHHLNLMTIADTYHRVRKARNFADLSKSCDDTFAKLIQSGVSPEELYDTVCKQEVEIVLTAHPTQINRRTLQYKHLRIAHLLEFNERADLSLEDKEILIEDLVREITAIWQTDELRRHKPTPVDEARAGLHIVEQSLWKAIPHYLRRVSNALKKNTGKPLPLTCTPIKFGSWMGGDRDGNPNVTAKVTRDVSILSQWMAIDLYIRELDTLSFELSINRCSEKLANLANDILLKECNDGESQIRMSKLPGNPKHKLMNTRRRLELLLEDLPCDRDTSEYYDTSDKLLEPLLLCYQSLQSCGSSVLADGRLADLIRRVATFGMVLMKLDVRQESGRHTETLDAITSYLDLGVYSEWDEQKKLDFLTRELKGKRPLVPPYIQVTADVQEVLDTFRVAAELGSDALGAYVISMASNKDARLTVSGDLGRPCPGGTLRVVPLFETVNDLREAGPAIRKLLSIDWYRDHIIKNHNGHQEVMVGYSDSGKDAGRFTAAWELYKAQEDVVAACNAFGIKVTLFHGRGGSIGRGGGPTYLAIQSQPPGSVMGTLRSTEQGEMVQAKFGLPQTSVRQLEIYTTAVLLATLRPPQPPRDDKWRGVMEEISRVSCAQYRSTVYENPEFIKYFQEATPQAELGYLNIGSRPAKRRTTPGISNLRAIPWVFAWTQTRLVLPAWLGVGRGLQDACDKGHTHELRAMYEEWPFFQSTVDLIEMVVAKADAPMAKHYDDVLVHDAGRRTLGAELRQELARTENCVLAVSGHKKLSANNRSLRKLIDSRLTYLNPMNMLQVEVLRRLRQDDDNRKLRDALLITINGIAAGMRNTG

SEQ ID NO: 35337 - protein, 505 aa, Chlorobium tepidum TLS
MKKKLTMLKSAALVSVGITAGALAFSNLDFSFNGGGNNGFMVSSHPNSSIAAETLRNHPIRTLNDLNDAFVDIAESATPSVVTIYTETEVDRRIMTPFDFFGKSFGEMFDFPLPEEPNVRKEVIHGLGSGVIVSQDGYILTNNHVIDQAGSIAVMTSDNRKFKAKIVGTDPRTDLAVLKISGSGLKPIAFGDSDKLRVGEWVLAIGSPLGENLARTVTQGIVSAKGRVNVGVADYENFIQTDAAINPGNSGGPLVNIGGELVGINTAIASRTGGFEGIGFAVPSNMAYRVYTSLVKNGKVERGYLGVTIQDIDENIAKGLQLKSPEGVLVGTVMQGGPAARAGLKSGDVILEFNGRKVNSAAELRNRIAAMAPGSSAAIRINRDGAILTLNARLESLPDNATASARSTESKNELLGFSVAPLTPELAGRLNLKADSRRIVVTSVSKSSRAFSVGLRPGDVVISVDKKPVDSVAAFNAIVKNKKRGDLLFLLVERGWSRMYFAFNL

SEQ ID NO: 35338 - protein, 388 aa, Lactobacillus gasseri
MLQDVYIVGMNRIPFGKYRGFYKDENAVDLGVLALKGLLKKNIVAQDKIDNILIGNVLSAGLGQNVARQIALKSGLPESVVATSVDDVCGSSLKALRLAQGQMLLGDSEIAVVGGAESMTNAPLLLNKSNKHDENPVYRDSLMIDGIGDAYSEKPMGITAENVADKYQVTRQDMDEFARDSHAKAYAAQENNWFEEEYTPVKLNEKVLDHDETIRPDTSLDALGQLKPVFKENGRVTAGNSSPLTDGASMVLLANQQKLDDLDLTPLAYLGAYAEIGCDPAYMGYAPYFAIEKLLKETNSTIDDYDLVEINEAFAAQAYAVARDLDIPKEKLNIAGGAISLGHPLGATGTRLVISAVNSLRKINGRRAIVSLCIGGGQGIAYETRRII

SEQ ID NO: 35339 - protein, 384 aa, Glycine max
VRVSVVDDATCSTWDLMRDFAPNGEGEGKDNDHEREEKEEEEEEEEEEGEVGGVRVESVEEENAAAIAEIVGDFSGFSTSNEDDSSSTSTGPRSNNISPNGRIKRVITAGNWQKGELLGRGSFGSVYEGISEDGFFFAVKEVSLLDQGNQGRQSVYQLEQEIALLSQFEHENIVQYIGTEMDASNLYIFIELVTKGSLRNLYQRYNLRDSQVSAYTRQILHGLKYLHDRNIVHRDIKCANILVDANGSVKLADFGLAKATKFNDVKSCKGTAFWMAPEVVKGKNTGYGLPADIWSLGCTVLEMLTGQIPYSHLECMQALFRIGRGEPPHVPDSLSRDARDFILQCLKVDPDERPSAAQLLNHTFVQRPLHSQSSGSASPYIRRG

SEQ ID NO: 35340 - protein, 309 aa, Triticum aestivum
MASHFVLSTGAKIPSVGLGTWQSEPGVVGDAVYAAVKAGYRHIDCAQVYGNEKEIGFALKKVFDEGITSRKDLFITSKLWCTNHAPEDVPVALDGTLQDLQTGYVDLYLVHWPIRMKKGAGFSPENVIPADIPATWAAMEGLYDSGKARAIGVSNFSCKKLEELLAVARVPPAANQVECHPVWQQAKLRDLCASKGIHFSAYSPLGSPGTFKAFSVLEHPVVVSPAEKLGKTPAQVALRWGIQAGHSVLPKSTHEERIRANFDVFDWSIPSDLFASFSEIEQTRLIRGKFWTHPEGVFKSEEEIWDGEI

SEQ ID NO: 35341 - protein, 169 aa, Oryza sativa
MASSATTVAPFQGLKSTAGMPVARRSNSSFGNVSNGGRIRCMQVWPIEGIKKFETLSYLPPLTVEDLLKQIEYLLRSKWVPCLEFSKVGFVYRENHKSPGYYDGRYWTMWKLPMFGCTDATQVLKELEEAKKAYPDAFVRIIGFDNVRQVQLISFIAYKPPGCEESGGN

SEQ ID NO: 35342 - protein, 308 aa, Silicibacter sp. TM1040
MILCCGEALIDMIPGTTETGQAAFVPHTGGAVFNTAIALGRLGRRVSLLSGVSRDLMGRKLEAALRESGVSEGHLIRSDRPTTLAFVELQNGHAKYAFYDENTAGRLITVADLPKLGAEVEALFFGGISLACEPCADTYASMLKRYGAERAVVLDPNIRPGFVPDEARYRARLKEMLAQADMVKVSDEDLAWLMPEQSDPQAQAAALQAWGPAVVLVTRGGDGAMGLLPNGESVTVAAERAEVVDTVGAGDTFNAGVMARLDESGALNKEALRKLDASTLAEALRWGAKVAAVTVSRAGANPPWRSEL

SEQ ID NO: 35343 - protein, 439 aa, ASPERGILLUS NIDULANS FGSC A4
MQLPSKPSSKPEKQMLTRADRHNALHDIVDRYRPDLQQYESVYRKIHSAPELAGQEKETSSLAASHLQRLGYEVHTNIGGYGVAGVLHNGPGSTVLLRADMDALPLEEKTDLPYASHRIIKNKAGAEVPVMHACGHDTHVAGLMGSAELLHSARDHWSGTLVLIFQPSEEELSGAQAMLDDGLYDKVPKPDVVLAQHVMRMKAGTVGIRAGRLLTASDAFDVRIFGRGGHGSSPHTCIDPIVIGASIITRLQTIVSREITPGELAIVTCGSIQAGYAPNIIPDECNLQLSVRSYDPKVRERLNTSIKRIIEAECDASDAPKKPVIKHTFTAPATINDEKTVKSLLRTFGSYFGSNLVEVEPAAASEDFSLLATAVGAPYVMWNFGGIDTEVWDDAVRQGKRDELPGNHSPFFAPAVEPTIVTAVDAMALGALTFLARDA

SEQ ID NO: 35344 - protein, 853 aa, Mycoplasma mobile 163K
MKNFKNILVELKNKLNREQFNYLNEKNNFQEKIKENFKAKSKDLHFRNNFSLEPKSGLLNDPNGLVFFNDFYYIFFQNSPHINKHDLKVWSLYKTKDFLNYTYEGQKISPSIEKDADGIYSGGSIVENDELYLFYTGIEKKYFRKINIEKIKNFFSLADFILESNMHKTLKEIYLESLISKIIKFIENLEESNIFLAKRNTSENFDKTFLFKRDRNLYTRHFRDPLALKKDNNFYLLIGAQLKETLKGVISVYKSKKVDKDYRLIGNIKFKNFSIESYMLECPEFLRINNKDIIIFSTQGKSYFNFRKNNESIHNAIYLVGKMNWNTLEFDVEFQDFLDYGFDFYAPQVFKNVDENILIGWNGRPDISFHDENLGWSFNLSIPRKLYLKNNELIQEPIFQLENEVLNVESNKISKKQNGLYEIRFEKEKNFSEISIFNEKHNISIKLDWDNLFINVNRTNMEVNYGENIGTNWVRKMPKKYSKMNLIVDNSLIHFYFDEGKFHFTFYYFIKKSNIKFKNFSNITFRQIKSLKIKDKSKKVLLIGEALIDTYKQNFEISRQVGGAPLNVSLALSKKGVQNSFFGVIGKDEDASLILEYFKRNNLDTSLLKIDPKLKTTVANVSINDEGERNFTFVRGADENLNFEYDALINQYDLVCFSSATAFLGGKLYKSYIKALNLSLDANIDVVFDPNYRDSLYSKNIEDFKQKAKYFITKSNVVKMSLEELEIIYKLKWNSKNDTETLHKEMKKIIENDQQFFLITLGKDGTLFIDKNKIKIIPSIKVKQVDTTGAGDVFLGSFISKYINRNNKDSNSKDFHNEIFEIIKYANVNGALATTIIGVENALKTEEEINELI

SEQ ID NO: 35345 - protein, 711 aa, Cytophaga hutchinsonii
MKKPTSKTEGTDPKFQDLQKNTSDATDQFMTTDQGLKINDDNNSLKAGERGPSLLEDFILREKITHFDHERIPERIVHARGSAAHGYFQVHESMAQYTKAGFLQDPSIKTPVFVRFSTVAGSRGSTDLARDVRGFSVKFYTAEGNYDLVGNNMPVFFIQDAAKFPDLIHAVKPEPHHEMPQAASAHDTFWDFISLMPESMHMIMWVMSDRAIPRSLRMMEGFGVHTFRFINKNNESHFVKFHWKPKQGTHSVVWDEAQKISGKNCDFHRQDLWEAIESGNFPEWELGVQLIPEADEHKFAFDLLDPTKLVPEEEVPVTIIGTMVLNRNPDNFFAETEQVAFHPGHLVPGIDFTNDPLLQGRLFSYTDTQLSRLGSPNFHEIPINRSVAPTHNNQRDGHMRQEINTGRVSYHPNSLGGGCPFQAKMAEGGFTSFNERIDAKKVRERSESFSDHFSQATLFFNSQTEVEKGHIIKALRFELGKVETEAIRVRMVGLLSQIDKTLATKVAAGLGIAVPAPAFPMNHGVGADDDFEKHEPKKAEQVTKSSDALTILRNPTVTPSIATKQIAFLCADEVSGASVVSYKNALERKGAVVKIIAPHLGFIKTEEGKKIKVDQSLLIAASVLFDAVFIPAGKGIKQLKGIKEVAEFITDTYKHCKVIGGEDEGALVIQSVQAIMEAGKNADEGIVLNKDTTAFVKALGKHRFWEREEAV

SEQ ID NO: 35346 - protein, 146 aa, Triticum aestivum
  misc_feature (122)..(122): Xaa can be any naturally occurring amino acid
  misc_feature (131)..(131): Xaa can be any naturally occurring amino acid
  misc_feature (136)..(136): Xaa can be any naturally occurring amino acid
  unsure (1)..(146): unsure at all Xaa locations
MMRWWWAGAFGAFKKRRASSRARAAAEAPQNNVALVVGSTGIVGAALLDILPLRDTPGGPWKVYALSRRPLPPWSAPLPPDVFHHHLDLADAAAVADTLAPLTDVTHLFYVAWDPRPTHGEXRKANGAMLXNVLSXLVPNCPGSSL

SEQ ID NO: 35347 - protein, 375 aa, Oryza sativa (japonica cultivar-group)
MAITVSIYLVKMPIYLETRGTSRISLVVHHIRRRTHSSSSSRLRFQRGGGAEQRRGMAAAQGSGVPAALALSSGHTMPSVGLGVWRMDSPAIRDLIHSALRIGYRHFDCAADYQNEAEVGDALAEAFQTGLVKREDLFITTKLWNSDHGHVVEACKDSLKKLRLDYLDLYLIHFPVATRHTGVGTTASALGDDGVLDIDTTISLETTWHAMEDLVSMGLVRSIGISNYDIFLTRDCLAYAKIKPAVNQIETHPYFQRDCLVKFCQKHGILVTAHTPLGGSTANTEWFGSVSCLDDPVIKSLAEKYGKTPAQLVLRWGLQRNTVVIPKTSKEERLQENFAVFDFAISDEDMEKMRSIDRKYRTNQPAKFWGIDLFA

SEQ ID NO: 35348 - protein, 353 aa, Glomus intraradices
MYNNNKSNTETLAKYLSLDQGGKVQAEYIWIDGDSGLRSKTRTLDFKPADVSEISEWNFDGSSTNQAPGDDSDVLLRPVAIFKDPFRGGDNILVLNECFNNDGTPNRTNHRHSCAKVMKTYTDQHPWFGIEQEYTLFESDGSVLGWPKGGFPGPQGPYYCSVGANVAFGRDVVEAHYRACLYAGVNISGINAEVMPGQWEFQVGPCEGIDMGDHLWIARFLLHRVAEDFGIIVSFHPKPIKGDWNGAGCHTNYSTQAMREEGGIKAIHAAIDKMAARHADHITVYGEDNDQRLTGRHETGHISQFSYGVANRGASIRIPRHVAAEGKGYLEDRRPASNIDPYRVTQIIVESSL

SEQ ID NO: 35349 - protein, 406 aa, Mesorhizobium sp. BNC1
MRRVVVTGLGIVSSIGNNAQEVTASLREAKSGISFSPDFAEHGFRCQVWGAPSLDPTDLVDRRAMRFLSKGGAWNHVAMEQAIADSGLEEQDITHERTGIIMGSGGPSTRIIVEAADTTREKGSPKRIGPFAVPKAMSSTASATLATWFKIHGVNYSISSACSTSAHCIGNAYELIQWGKQDMIFAGGHEDLDWTMSNLFDAMGAMSSKHNDTPSTASRAYDVTRDGFVIAGGAGVLVLEELEHAKARGAKIYAEIVGYGATSDGYDMVALSGEGAVRCMRQALSTVKGKVDYINTHGTSTPVGDSGEIGAVRQVFGNEIPPISSTKSLTGHSLGAAGAQESIYSILMMQEGFIGESAHITELDPEFEGVPIVRKRIDNAKIDTVLSNSFGFGGTNATLVFQRYAG

SEQ ID NO: 35350 - protein, 151 aa, Zea mays
MSATVVVSILQGAAAVLAFSRTSEFLSDGLKSYVREEDGAVILRMVGGLGVGIFCLEWVALALAFVLRYYVYVDRECGGNPMRRSAKVGGEDGAGTWPWPFQWNLDIDDLARLGCNFNETAPKHLNSTDLGALPRGNLTPTMPSSTITCGE

SEQ ID NO: 35351 - protein, 346 aa, Legionella pneumophila str. Lens
MKAFIYQGPGKKAIEERPTPIITNPTDAIIKVTKTTICGTDLHILKGDVVTCVPGRILGHEGIGVVDKVGQGVTEFQKGDLVLISCITSCSKCEYCRKGMYSHCAKGGWILGNTIDGTQAEYVRIPYADTSLYKIPEGIDEDVLVMLSDILPTGFECGVQNGKVQPGNTVAIVGAGPIGLSTLLTAQFYSPAEIIVIDLDDNRLEVAKRFGATATVNSSDGKAVDKIMQMTNGRGVDTAIEAVGIPATFVMCEDIVAPGGTIANIGVHGVKADLHLERLWSQNISITTRLVDTVTTPMLLKTVSAKKINPMLLISHRFKFAKILDAYETFAHAADTHALKVIINVS

SEQ ID NO: 35352 - protein, 482 aa, Shewanella sp. MR-7
MLLKDPSLLRQQCYINGQWCDAQSKETVAIANPATGAVIASVPVMGQAETQAAIAAAEAALPAWRALTAKERGAKLRRWFELLNENSDDLALMMTTEQGKPLAEAKGEVTYAASFIEWFAEEAKRVYGDTIPGHQGDKRIMVIKQPVGVTAAITPWNFPAAMITRKAAPALAAGCTMVVKPAPQTPFTALALAVLAERAGIPAGVFSVITGDAIGIGNEMCSNPVVRKLSFTGSTQVGIKLMEQCAPTLKKLSLELGGNAPFIVFDDANIDAAVEGAMIAKYRNAGQTCVCANRIYVQAGVYDEFARKLSIAVGKLKVGEGITEGVTTGPLINRAAVEKVQSHLEDALSKGATVVAGGKPHSLGGNFFEPTVLTHVDSSMRVAREETFGPLAPLFKFTDVDDVIKQANYTEFGLAAYFYGRDISLVWKVAEALEYGMVGINTGLISTEVAPFGGMKSSGLGREGSKFGIEEYLEIKYICMSV

SEQ ID NO: 35353 - protein, 833 aa, Saccharomyces cerevisiae
MNNAANTGTTNESNVSDAPRIEPLPSLNDDDIEKILQPNDIFTTDRTDASTTSSTAIEDIINPSLDPQSAASPVPSSSFFHDSRKPSTSTHLVRRGTPLGIYQTNLYGHNSRENTNPNSTLLSSKLLAHPPVPYGQNPDLLQHAVYRAQPSSGTTNAQPRQTTRRYQSHKSRPAFVNKLWSMLNDDSNTKLIQWAEDGKSFIVTNREEFVHQILPKYFKHSNFASFVRQLNMYGWHKVQDVKSGSIQSSSDDKWQFENENFIRGREDLLEKIIRQKGSSNNHNSPSGNGNPANGSNIPLDNAAGSNNSNNNISSSNSFFNNGHLLQGKTLRLMNEANLGDKNDVTAILGELEQIKYNQIAISKDLLRINKDNELLWQENMMARERHRTQQQALEKMFRFLTSIVPHLDPKMIMDGLGDPKVNNEKLNSANNIGLNRDNTGTIDELKSNDSFINDDRNSFTNATTNARNNMSPNNDDNSIDTASTNTTNRKKNIDENIKNNNDIINDIIFNTNLANNLSNYNFNNNAGSPIRPYKQRYLLKNRANSSTSSENPSLTPLISNLIMTAKFQKFLLMTKKKKKPDFRPFTSRDPNNQTSENTFDPNRFTMLSDDDLKKDSHTNDNKHNESDLFWDNVHRNIDEQDARLQNLENMVHILSPGYPNKSFNNKTSSTNTNSNMESAVNVNSPGFNLQDYLTGESNSPNSVHSVPSNGSGSTPLPMPNDNDTEHASTSVNQGENGSGLTPFLTVDDHTLNDNNTSEGSTRVSPDIKFSATENTKVSDNLPSFNDHSYSTQADTAPENAKKRFVEEIPEPAIVEIQDPTEYNDHRLPKRVKK

SEQ ID NO: 35354 - protein, 479 aa, Agrobacterium tumefaciens str. C58
MKRNRKVKILATLGPASSEEAMIEKLHLAGADLFRINMSHASHDVMRTLIQRIRSVESRNGRPIGILADLQGPKLRVGKFAETKVDLVPGQTFTLDNNDTPGDNTRVFLPHPEILEAVKPGHRLLIDDGKLHLRAEKSDGKSIVTTVVSGTRISDRKGISLPDTLLGVGVLTDKDRVDLDAVLETNEVDWVALSFVQRPEDLAEVRKISRGRVGLMSKIEKPQAVERIEEIIELSDALMVARGDLGVEMPLEAVPGIQKQLTRACRRAGKPVVVATQMLESMITAPVPTRAEVSDVATAVFEGADAIMLSAESASGDYPIEAVSTMASIASTVEQDPYYSNIIYAQRPQPEATGADAISLAARQIAETLKLAAIVTYTSSGTTGLRAARERPQVPIIALSPIIQTARRLSVVWGLHCVVTGDASDLDDMVNRACRIVVSEGFGKPGDRIIISAGVPLGTPGATNMVRIAYIGSDGQSGV

SEQ ID NO: 35355 - protein, 513 aa, Agrobacterium tumefaciens str. C58
MTAHVLVIDDDPVQRRLLKNAVERYGHLALLAENGRAGLELLKQYSGEINVIVLDLMMPEMDGLAFLKAVGELGTDVPVIVQTGQGGIDTVVQAMRAGAFDFVVKPVSPERIGAAISNALKLDRKEAKARTGRRGRSNAVNFTDIVSASPAMLRVIELAQRAAQSSIPVVLEGESGVGKEMVARAIQSGGDRANKPFITVNCGAIPHNLVESILFGHEKGAFTGATEKHVGKFMEADGGTLFLDEIGDLPLDVQVKLLRAVQQGEIETVGSARVQKVNVRLISATNKNLIEEVKEGRFREDLYYRLNVFPITIPALRRRKEDIPHLARVFAERFSAEQKLPNPVGLDASALALLTAYDWPGNIRQLENAVFRAVVLSQGSELSDSDFPQIALQLPEFSNGDDGDDIIRSPSGSSLKLAAYSPPPAAESHAVIEEPSDISTTIYRGGNLISSTDDSGNIRKLAEIEEELIRFALRFYRGQMSQVARKLGIGRSTLYRKLKDYGIDPDDPLRDVA

SEQ ID NO: 35356 - protein, 516 aa, Zea mays
MAAAMVRTMSTTAAGTPPVSVATINPKLVWVALICDRIAGRLKVSISVLKCEYAVRGEIVTHAQNLQQELQKNPESLPFDEILYCNIGNPQSLGQQPVTYFREVLSLCDHPALLDKSETHALYSSDAIERAWQILEKIPGRATGAYSHSQGIKGLRDEIAAGIAARDGFHASGDNIFLTDGASPAVHMMMQLLISSESDGILCPIPQYPLYSASIALHGGSLVPYFLNEETGWGLDVDELKKQLEEARSKGITVRALVVINPGNPTGQVLVEENQKKIVEFCKNEGLVLLADEVYQENIYVEDKPFHSFKKIARSLGYTDDDLPLVSFQSVSKGYYGECGKRGGYMEITGFSPEVREQIYKVASVNLCSNVSGQILASLVMNPPKAGDESFESFMSEKDGILSSLARRAKALEEAFNSLEGITCNKAEGAMYLFPRLHLPQKAIGAAQAVGTAPDAYYAKRLLEATGIVVVPGSGFGQVPGTWHFRCTILPQEDKIPAIVSRLKEFHEKFMDEFRD

SEQ ID NO: 35357 - protein, 387 aa, Alkaliphilus metalliredigenes QYMF
MKLESQIENLQVELNHIRRELHRIPELAFEEVETAQYIMRYLDDLGIFYEKGIAGTGVVAYIPGSLGKKTYCFRADMDALSVVEENEIDFRSMSEGRMHACGHDGHMTILLGVAKYLSLNKEKIKENVLLLFQPAEEGPGGALPVIESGILEKYNVDEIYGLHIFPGIEEGKIGLKSGPMMSQTGEFDVAVKGRSGHGAMPHTAIDSVVIASEMVLAMQSIVSRTINPIDPAVVTMGRIEGGERRNIIAKEVTLEGTIRAFSQENYDTIKERILEIKEGLSKAHRCEIEVIFRDMYPAVYNDEALTEALISAQEKGTVELIPPIMLAEDFAYYQREIPGVFFFLGSGNFDKGFIHPLHHGCFNFDEQILGYGVQCFVNILKQRGVTT

SEQ ID NO: 35358 - protein, 470 aa, Acinetobacter sp. ADP1
MSNEMHGQPSGEGELSRSLSNRHLQLIAIGGAIGTGLFMGSGKTISLAGPSILFIYLIIGVMVFFVMRALGELLLSNLQYKSFIDFSTDLIGPWAGYFVGWTYWLCWITIGIADLSAIIYYLQFFNNGMPFTPTEGAMISVAAIFFIMGLNLMTVKLFGELEFWFAMIKITAIVVLILVGLWMIFTGFTSTSGEVASFTHLWANGGFFPTGMHGFLAGFQIAIFAFVGVELVGTTAAETKNPEINLPKAVNSIPIRIIIFYVLALLIVMSVTPWNRIDPNISPFVNLFSQAGIAAAAIIMNLVVLSSVMSSMNSGVFSTSRMLFGLSKEKQAPQAFGALNKGRVPANALYFSTVCLLLGAALQYVVPNTVEAFTLATTLSTILFICVWLMIIWSYMVYYKKRPELHAKSIFKLPGGLFTCWILIIFFVGMIYVLSLEPDTMKALMVSPIWLVILVIGYFGFYKPRLKSKK

SEQ ID NO: 35359 - protein, 487 aa, Oryza sativa
MASSTGGLDHGFTFTPPPFITSFTELLSGGGGDLLGAGGEERSPRGFSRGGARVGGGVPKFKSAQPPSLPLSPPPVSPSSYFAIPPGLSPTELLDSPVLLSSSHILASPTTGAIPAQRYDWKASADLIASQQDDSRGDFSFHTNSDAMAAQPASFPSFKEQEQQVVESSKNGGAAASSNKSGGGGNNKLEDGYNWRKYGQKQVKGSENPRSYYKCTYNGCSMKKKVERSLADGRITQIVYKGAHNHPKPLSTRRNASSCATAAACADDLAAPGAGADQYSAATPENSSVTFGDDEADNASHRSEGDEPEAKRWKEDADNEGSSGGMGGGAGGKPVREPRLVVQTLSDIDILDDGFRWRKYGQKVVKGNPNPRSYYKCTTVGCPVRKHVERASHDTRAVITTYEGKHNHDVPVGRGGGGGRAPAPAPPTSGAIRPSAVAAAQQGPYTLEMLPNPAGLYGGYGAGAGGAAFPRTKDERRDDLFVESLLC

SEQ ID NO: 35360 - protein, 184 aa, Pseudomonas aeruginosa PAO1
MKPRVLLSVLALAGLPLSGWAADCPELLQGQLTKLRSKESIDLCQRYAGKPLVVVNTASHCGFTPQFKGLEALYQRYKGQGLEVLGVPSDDFKQEAADTAETAKICYGNYGVTFAMTQPQHVRGDEAIPLFRQLAEQSGQAPRWNFYKYVVDRQGRVVAQFSSKTTPDDPQLQAAIEKAIASQP

SEQ ID NO: 35361 - protein, 104 aa, Brassica napus
AFAAKDETGKRMEIVELPSHPFFIGAQFHPEYKSRPGKASPLFLGLIAPSCGELDSVMNPSSAHQHLISNCPKNVFVNGNSKKASNGLADVRHNNGYCNGLYTR

SEQ ID NO: 35362 - protein, 449 aa, Frankia sp. EAN1pec
MVVPSTAPASDDLFRRAQRVVPGGVNSPVRAFRAVGGTPRFMTSGSGPRLVDADGRTYVDLVCSWGPMILGHAHPDVVQAITAAAARGTSFGTPTPGEVELAELIVERVAPVEQVRLVNSGTEATMSAIRLARGFTGRPTIVKFAGCYHGHVDALLASAGSGVATLGLPDTPGVTGAATADTIVLPYNDLALVEATFAERGDTIAAVITESVAANMGVVPPLPGFNAGLRRLCDAHGALLVFDEVMTGFRVSRTGWWGLEGAVEGWAPDLFTFGKVMGGGLPAAAFGGRADVMARLAPAGPVYQAGTLSGNPLAVAAGLATLRACTDEVYATVDARAADVAGIVSTALNEQGVPHLLNSAGSLFSVFFTDATAVIDYAGAKRQASERYAAFFHSMLDAGVYLPPSAFEAWFVSAAHDDEAVERIAAAAPAAARAAAAVGAPVAVGGGAV

SEQ ID NO: 35363 - protein, 187 aa, Brassica napus
  misc_feature (162)..(162): Xaa can be any naturally occurring amino acid
  unsure (1)..(187): unsure at all Xaa locations
MTPLTLYSSAATVTLTSSPRVPFHPLASRARRGFVSFRLTAKKLSVRAMSELVQDKESVVAASTSFTESSEELNHSRTFLDARTEQDLICGIKKEKEAGRLPPNVAAGMEELYWNYKNAVLSSGAPGADKTVISNMSVAFDRMLLGVEDPYTFNPSHKAVRXPFGYYHLGRAGSRGVWRGAGRGGGG

SEQ ID NO: 35364 - protein, 361 aa, Chlorobium tepidum TLS
MSHQHPVYRRIVVKVGTNVITGRNGKLDPAILDSLTSQIAALMQDGVEVILVTSGAVSAGRGIVSLSGNLTPVETRQVLAATGQIRLINAYNDRFKKHGITGAQLLVTKGDFRDRQHYLNMRTCFEALLQQKIVPIVNENDAVAITELMFTDNDELSGLIASMLQVDANIILSNVDGLFDTQSEGNPVIEEIDPGTKNFSQYIRPGKSEFGRGGMLTKCNIAHKLSRLGITVHIANGTTPGILQTIAHGGKAGTKFIAQKPKQSRKRWVALSEGLEKGAVIINQGAIDALTSGQRATSLLPVGITGVEGSFQRGDIIRICSTDGKVIGYGMASCTAEKARSAMGQKGLKPVIHYDHLYLVP

SEQ ID NO: 35365 - protein, 331 aa, Triticum aestivum
  misc_feature (171)..(171): Xaa can be any naturally occurring amino acid
  misc_feature (233)..(233): Xaa can be any naturally occurring amino acid
  misc_feature (236)..(237): Xaa can be any naturally occurring amino acid
  misc_feature (245)..(245): Xaa can be any naturally occurring amino acid
  misc_feature (260)..(260): Xaa can be any naturally occurring amino acid
  unsure (1)..(331): unsure at all Xaa locations
MSSGTGKVVCVTGASGYIASWLVKFLLQRGYTVRATVRDTADPKKTLHLQALDGAKDRLHLFKASLLEEGSFDDAVAGCDCVFHTASPFYHNVKDPKAELLDPAVNGTLNALRSCKKASIKRVIVTSSMAAVAYNGKPRTPDVVVDETWFSSAEVCEKNKQWYVLSKTLAXEEAAWKYADDNGLEIITITPQWVIGPLLQPTLNTSTEAILKFINGSSSTYANFCFGWINVKXVAXXHILAYEVXSANGRYCMVERVIHXSDLVKIIHEMYPEFPVPDKCADDAPFATIYQVSKNKIRSLGMELTPLETSLKETIESLREKGFVTSESSHL

SEQ ID NO: 35366 - protein, 208 aa, Brassica napus
  misc_feature (26)..(26): Xaa can be any naturally occurring amino acid
  misc_feature (183)..(183): Xaa can be any naturally occurring amino acid
  unsure (1)..(208): unsure at all Xaa locations
VHEYISAFLLVLGLILFTLADAQMSXNFSMIGILMITGALIMDAFLGNLQEAIFTMNPETTQMEMLFCSTVVGLPFLFVPMVLTGELFRAWTACWQHPYVYGVLVFEAMATFIGQVSVLSLIALFGAATTALITTARKGVTLLLSYLIFTKPLTEQHGSGLLLIAMGIVLKMVPMDSKPPSKXPARPAARNAGGEGGREEEEERKSLV

SEQ ID NO: 35367 - protein, 337 aa, Oryza sativa (japonica cultivar-group)
MADVGGRARAPKMATMAAGVALHLHLQGMKVKAIRVHKIGGPEVLTWEEVEIGEPSEGEIRIKNKAIGVNYVDIYYRTGLHQEPLPFVPGKEAVGVVSAVGPGVTGIEVGDVVGYADTPMGTYTEEQIIPATLAIPIPPSVDHITAASVLLKGMTTYVLVKQAFKWANALGATVIGTVSTQEKAIQAAEDGCHHVIIYTEEDFVAQVAEITSRKGVHVVYDAVGKDTFKGSMECLMPRGCMISYGQCSGRPDPVPVSDLASKSLILGRPGMRHYTATRDELLHAAGEVFAGVAAGVLRVRVNHVYPLHEAARAHADLEARRTSGSVVLLPAMPAADS

SEQ ID NO: 35368 - protein, 338 aa, Haemophilus influenzae Rd KW20
MAILVTGGAGYIGSHTVVELLNVGKEVVVLDNLCNSSPKSLERVKQITGKEAKFYEGDILDRALLQKIFAENEINSVIHFAGLKAVGESVQKPTEYYMNNVAGTLVLIQEMKKAGVWNFVFSSSATVYGDPKIIPITEDCEVGGTTNPYGTSKYMVEQILRDTAKAEPKFSMTILRYFNPVGAHESGLIGEDPNGIPNNLLPYISQVAIGKLAQLSVFGSDYDTHDGTGVRDYIHVVDLAVGHLKALQRHENDAGLHIYNLGTGHGYSVLDMVKAFEKANNITIAYKLVERRSGDIATCYSDPSLAAKELGWVAERGLEKMMQDTWNWQKNNPKGYRD

SEQ ID NO: 35369 - protein, 403 aa, Phyllotopsis sp. MB35
HVDSGKSTTTGHLIYKCGGIDKRTIEKFEKEAAELGKGSFKYAWVLDKLKAERERGITIDIALWKFETPKYMVTVIDAPGHRDFIKNMITGTSQADCAILIIAGGTGEFEAGISKDGQTREHALLAFTLGVRQLIVAVNKMDTTKWSEDRFNEIIKETSTFIKKVGYNPKSVAFVPISGWHGDNMLEESTNMPWFKGWTKETKAGVVKGKTLLDAIDAIEPPVRPHDKPLRLPLQDVYKIGGIGTVPVGRVETGIIKAGMVVNFAPSNVTTEVKSVEMHHEQLEQGNPGDNVGFNVKNVSVKDIRRGNVASDSKNDPAKEAASFNAQVIVLNHPGQIGAGYAPVLDCHTAHIACKFAELIEKIDRRSGKVMEASPKFVKSGDACIVKLVPSKPMCVESYNEYP

SEQ ID NO: 35370 - protein, 379 aa, Ganoderma tsugae
YKCGGIDKRTIEKFEKEAAELGKGSFKYAWVLDKLKAERERGITIDIALWKFETPKFMVTVIDAPGHRDFIKNMITGTSQADCAILIIAAGTGEFEAGISKDGQTREHALLAFTLGVRQLIVAVNKMDTTKWSEDRFNEIIKETSTFIKKVGYNPKAVAFVPISGWHGDNMLEESSNMTWYKGWTKETKAGVVKGKTLLDAIDAIEPPVRPSDKPLRLPLQDVYKIGGIGTVPVGRVETGVIKAGMVVTFAPTNVTTEVKSVEMHHEQLEQGLPGDNVGFNVKNVSVKDIRRGNVASDSKNDPAKEAASFTAQVIILNHPGQIGAGYAPVLDCHTAHIACKFAELIEKIDRRTGKSIEDKPKFVKSGDACIAKLVPSKP

SEQ ID NO: 35371 - protein, 268 aa, Nocardioides sp. JS614
MATAQVSTTELQRFRLDDRVAIVAGGSGGVGVRTCAALAGVGAKVAVIGRSEAGLAAARSAVEDAGGEALVITGDMTQKEAADDAIAQTLGAFGRVDVLVNGIGGGAGTALHAAEDYPQADWNRILDLNLTTALLVSQAAARAMVAGGRGGAILNISSVRGQLGIDAGFSAYVAAKGALDALTRQHATEWAKHDIRVNTISPTFVRTEQAAELLAAPGFYDNLVSRIPLHRIAETDDLVGAVLFFCTDASSFVTGQLLTLDGGLTATQ

SEQ ID NO: 35372 - protein, 201 aa, Carboxydothermus hydrogenoformans
GIDPGPIARASLFSLFRNFKSGEKVVLKIKRPDIEETIKTDLEVIKKYLLPQLRALGFISHFDLNKIFNLFEIKLKEELDFLNELQNLKIFHRALKNYEDLIIPKAFKELSGRNVLVMEYVDGNLLKNFLEQKVYYPTLGEKLIHNFCRLLFWERIFHADPHPGNIIFTKNKKLCFLDLGAVGFVDQRTVEILARTIYFIY

SEQ ID NO: 35373 - protein, 371 aa, Nocardioides sp. JS614
MSDQVTGPAAPSPGLAVSPLLRMTEETPTRLWSDSVMPRELSAAIGWGAVGATCNPVIALAALRDDLPHWQRRIREYADAHPTASESRIGWAIVEELSIEAASLLTGAFAEHAGRNGRLSVQTDPRHYRDADALVAQSVQFDALAPNIIVKVPATEVGIRAMEEATYRGVSINATVSFTVPQAVAVAEAIERGLERREAEGLDVTGMGPVCTIMLGRLDDWLKALAARDGHIVDAESLEWAGVAVFKRAYRIFRERGFRTRLLSAAFRNHMHWSELVGGDVVISPPFDWQVRLNASGIEPLPLIDEPVADAILDGLNRGLPEFRRAYEPDGMSISEFEDFGATRRTLRQFLVACAELESVVRDVLLPDPTT

SEQ ID NO: 35374 - protein, 404 aa, Albatrellus higanensis
DSGKSTTTGHLIYKCGGIDKRTIEKFEKEAAELGKGSFKYAWVLDKLKAERERGITIDIALWKFETPKFMVTVIDAPGHRDFIKNMITGTSQADCAILVIAAGTGEFEAGISKDGQTREHALLAFTLGVRQLIVAINKMDTTKWSEDRFNEIVKETSNFIKKVGYNPKAVAFVPISGWHGDNMLEDSVNMTWFKGWTKETKAGVVKGKTLLDAIDAIEPPVRPSDKPLRLPLQDVYKIGGIGTVPVGRVETGIIKAGMVVTFAPTNVTTEVKSVEMHHEQLEQGNPGDNVGFNVKNVSVKDIRRGNVASDSKNDPAKEAASFTAQVIILNHPGQIGAGYAPVLDCHTAHIACKFQELVEKIDRRTGKSIEASPKFVKSGDACIAVLVPSKPMCVEEYNQYAPLG

SEQ ID NO: 35375 - protein, 482 aa, Zea mays; identical to SEQ ID NO: 864

SEQ ID NO: 35376 - protein, 117 aa, Glycine max
  misc_feature (66)..(66): Xaa can be any naturally occurring amino acid
  unsure (1)..(117): unsure at all Xaa locations
GKEWRQRQIRKITDRVFDKVKNQMETDKLNFEDLYIAVLLVYNDINKYIPGPHFDPPSKDKVREVXTAPTVAVATKKATEGVPGVGKLVQKIPNSVYASLVTIAAVWFQKKAQSSSL

SEQ ID NO: 35377 - protein, 385 aa, Cupriavidus necator
MSEAQPLVTPKPKKSVALSGVTAGNTALCTVGRTGNDLHYRGYDILDIAETCEFEEIAHLLVHGKLPTKSELAAYKAKLKSLRGLPANVKAALEWVPASAHPMDVMRTGVSVLGTVLPEKEDHNTPGARDIADRLMASLGSMLLYWYHYSHNGRRIEVETDDDSIGGHFLHLLHGEKPSALWERAMNTSLNLYAEHEFNASTFTARVIAGTGSDMYSSISGAIGALRGPKHGGANEVAFEIQKRYDNPDEAQADITRRVENKEVVIGFGHPVYTTGDPRNQVIKEVAKKLSKDAGSMKMFDIAEALETVMWDIKKMFPNLDWFSAVSYHMMGVPTAMFTALFVIARTSGWAAHIIEQRIDNKIIRQSANYTGPENLKFVPLKDRK

SEQ ID NO: 35378 - protein, 486 aa, Thermotoga maritima MSB8
MKVVFVSYEVFPFAKVGGLADVAGTLPKYLKKHGVDVTIVMPKHRIVEKNAEKFGYEIKKVAESLSVSHVKTDQKFDIYESVLPGSDVKTYFVANDYYFSAEDVYAGPDLGEQAIFFCAATLDLVKHLDLKPDIVHVNDWQTALIPVYLKTVYRDDPYFSRTATVLTIHNLGYQGVFDPKYLSFAGLPDYVYTIDGLEFYGQLNFLKGGIVFSDVINTVSPTYAEEIQTEEYGEKLDGVLRMRSKDLYGILNGIDYELYNPATDRYIYVNYDVNRLELKWENKVKLQEELGLPVNKETAVAGLISRLVPQKGLDLLVDVMDYLTLFDLQIVVLGTGDEQYENAFRKFQERYPDKVSANIKFDVELAQKIYAGADIFLMPSRYEPCGLGQMFSMRYGTIPVVRYTGGLADTVKEYDPQSMEGTGFGFKKYDSAHLLKAVSKALHFYYREKDHWRRIMTNAMNTDLSWDRSAKEYVDLYKKALAKVGR

SEQ ID NO: 35379 - protein, 302 aa, Aspergillus fumigatus
KRSFILRSADMYFKYTAAALAAVLPLCSAQTWSKCNPLEKTCPPNKGLAASTYTADFTSASALDQWEVTAGKVPVGPQGAEFTVAKQGDAPTIDTDFYFFFGKAEVVMKAAPGTGVVSSIVLESDDLDEVDWEVLGGDTTQVQTNYFGKGDTTTYDRGTYVPVATPQETFHTYTIDWTKDAVTWSIDGAVVRTLTYNDAKGGTRFPQTPMRLRLGSWAGGDPSNPKGTIEWAGGLTDYSAGPYTMYVKSVRIENANPAESYTYSDNSGSWQSIKFDGSVDISSSSSVTSSTTSTASSASSTS

SEQ ID NO: 35380 - protein, 764 aa, Vitis vinifera
MAILSDLGTEILVPACAIVGIVFSVVQWILVSRVKLSPERHSLSNSSKNGTAEYLIEEEEGLNDHSVVQKCAEIQNAISEGATSFLYTEYQYVGIFMVAFAILIFVFLGSVAGFSTKSQPCLYNKGEMCKPALANAIFSTISFLLGGLTSLLSGFLGMKIATYANARTTLEARKGVGKAFITAFRSGAVMGFLLAANGLLVLYIAINLFEIYYGDDWEGLYEAITGYGLGGSSMALFGRVGGGIYTKAADVGADLVGKVERGIPEDDPRNPAVIADNVGDNVGDIAGMGADLFGSYAESSCAALVVASISSFGINHEMTAMFYPLIISSIGILVCLITTLFATDFFEIKAVKEIEPALKKQLIISTILMTAGIAFVSWIALPSSFTIFNFGSQKVVKNWQLFLCVGVGLWAGLIIGFVTEYYTSNTYSPVQDVADSCRTGAATNVIFGLALGYKSVIIPIFAIAVSIFVSFSFAAMYGIAVAALGMLSTIATGLAIDAYGPISDNAGGIAEMAGMSHRIRERTDALDAAGNTTAAIGKGFAIGSAALVSLALFGAFVSRAAISTVDVLTPKVFIGLLVGAMLPYWFSAMTMKSVGSAALKMVEEVRRQFNTIPGLMEGTAKPDYATCVKISTDASIKEMIPPGALVMLTPLIVGTLLGVETLAGVLAGSLVSGVQIAISASNTGGAWDNAKKYIEAGASEHAKALGPKGSDPHKAAVIGDTIGDPLKDTSGPSLNILIKLMAVESLVFAPFFAAHGGLLFKIWK

SEQ ID NO: 35381 - protein, 423 aa, Acinetobacter sp. ADP1
MSLSYEIENNGAWQTYLAQVDRVAPYLEADLIPYINTLKRPKRALIVDVPIVMDDGAIQHFEGYRVQHNLSRGPGKGGIRYHPDVELNEVMALSAWMTIKTAVLNLPYGGAKGGIRVDPKKLSARELERLTRRFTSEISPIIGPQNDIPAPDVGTNADIMGWMMDTYSSIKGHTVTGVVTGKPVHLGGSLGRVRATGRGVFVTGLEVAKKINLSIENSRVAVQGFGNVGSEAAYLFNKANAKVVCAQDHTGTIFNDDGLDVKSLQEHVAQTGGVAGFPDSSKIEDAEFWNVEMDILVPAALEGQITAERAQTLKAKLVLEGANGPTYPDADDVLGQRNIIVVPDVLCNAGGVTVSYFEWVQDMSSYFWTEDEINARLDKLMIQAVDDVWKKAQEKSCTMRTAAYILACERILKARKERGIFPG

SEQ ID NO: 35382 - protein, 326 aa, Pseudomonas aeruginosa PAO1
MPGTPTTQPLRHSHRFDQGNPLAERNTRWAVLLTACMMVAEIAGGWLFNSMALLADGWHMSSHALALGLAVLAYGAARRYANDPRFSFGTWKIEVLGSYTSALLLLLVAGLMLYQSVERLLDPSPIHYQQAMLVAALGLLVNLACAWLLRDGHAHHGHGHSHHHHHHHHHHHHHHDHHAHRHDLNLRAAYLHVLADAATSLLAIVALAGGLLWNAAWLDPLMGIVGAVLVSVWACGLIRQSSRVLLDAQMDAPVAAEIRAAIASSPLPAELLDLHLWQVGQGKYACLLSLLTTEEGSADYFKRRLAEHEELVHITVEVNPLLPLAA

SEQ ID NO: 35383 - protein, 429 aa, Glycine max
  misc_feature (83)..(83): Xaa can be any naturally occurring amino acid
  unsure (1)..(429): unsure at all Xaa locations
MSFRSIVRDVRDSFGSLSRRSFDVRLTGHHRGKSQGSVQDLHDQPLVIQNSRWASLPPELLFDIIRRLEESENTWPARKHVRXVACAAVCQSWRNMCKDIVKSPEFCGKLTFPVSLKQPGPRDGIIQCFIKRDKSNLTYHLFLCLSPALLVENGKFLLSAKRTRRTTYTEYVISMDADNISRSSNTYIGKLRSNFLGTKFIIYDTQPPYSSAHICPPGTGKTSRRFYSKKVSPKVPSGSYNIAQVTYELNVLGTRGPRKMHCVMHSIPASALDAGGTVPGQPELLPRSLEDSFRSISFSKSLDHSIEFSSSRFSEIGESCIEDDDGKMRPLVLKNKPPRWHEQLQCWCLNFRGRVTVASVKNFQLIAATQPAAGAPTPSQPAPPEHDKIILQFGKVGKDMFTMDYRYPLSAFQAFAICLSSFDTKLACE

SEQ ID NO: 35384 - protein, 410 aa, Brassica napus
  misc_feature (13)..(13): Xaa can be any naturally occurring amino acid
  unsure (1)..(410): unsure at all Xaa locations
MAAEMALVKPISXKFASPRLSNPSKYLSGQRFSTVIRMSATSSPPPPATATAKSKKGTKKEIQESLLTPRFYTTDFEEMEQLFNTEINKNLNEEEFIALLQEFKTDYNQTHFVRNKEFKEAADKLQGPLRQIFVEFLERSCTAEFSGFLLYKELGRRLKKTNPVVAEIFSLMSRDEARHAGFLNKGLSDFNLALDLGFLTKARKYTFFKPKFIFYATYLSEKIGYWRYITIYRHLKQNPEFQCYPIFKYFENWCQDENRHGDFFSALMKAQPQFLNDWQAKLWSRFFCLSVYVTMYLNDCQRTDFYEGIGLNTKEFDMHVIIETNRTTARIFPAVLDVENPEFKRKLDRMVVIYEKLMAVGKTDDPSFVKNLKKVPLVAGLVSEILAAYLMPPVESGSVDFAEFEPNLVY

SEQ ID NO: 35385 - protein, 105 aa, Fusarium subglutinans
GGKAPRKQLASKAARKSAPSTGGVKKPHRYKPGTVALREIRRYQKSTELLIRKLPFQRLVREIAQDFKSDLRFQSSAIGALQESVESYLVSLFEDTNLCAIHAKR

SEQ ID NO: 35386 - protein, 282 aa, Deinococcus radiodurans R1
MVHRRWQPRPLPGGPVHHLSPLPPLVTFLRFEGGPMHAVILAGGQGTRLRPYTTRVPKPLVPIGGELSILEIVLHQLKSFGFTRVTLAVGHLSHLIRAFVGNGRQYGLDIDYTEEETPLGTIGPVLNVLPWLPEHFLIMNGDVLTDLNYGAFLRGHMASGDPLTVSTYHREIRSEFGVLDVDDSGEHIVAFREKPAVPFQVSMGVYGMTKSTLGRYQPGQVLGFDTLMLDLLAAGERPRSDLFGGYWLDIGRPEDYDTANEQWNEMQKVLLPGGIPPRPPQL

SEQ ID NO: 35387 - protein, 463 aa, Triticum aestivum
  misc_feature (195)..(195): Xaa can be any naturally occurring amino acid
  unsure (1)..(463): unsure at all Xaa locations
MDSQSAVTMEAGAPTRKESGRLPSRHGGHAHGHSGLARTAHGMSSSSLRKKSDATLVRKVPVASLRPVLANLQEVLLGTKLAVLFIAVPLAVAAQCFRFGQVWVFALSLIGLIPLAERVSFLTEQIALYTGPTIGGLLNATCGNATELIIAVFALVQGKIEVVKCSLLGSVLSNLLLVLGTSLFCGGIKNLGGRXQPYDRKQADVSTGLLTLGVLCQSLPLLLRYAVSSGEHAVATDTTVLELSRACSFIMLLAYVAYLFFQLKTHRQLFEPQEIEGGDDDEEEAVLGFGSALFWLILMTIIIAVLSEYVVGTIEPTSQSWGLSVSFISIILLPIVGNAAEHAGAVIFALKNKLDITLGVALGSATQISMFVVPLSVLVAWIMGIQMDLDFKLLETGSLFISVLVTAFTLQDGTSHYLKGVLLLLCYIVIGACFFVTRQPAPHANGNGTLLDVPTGPMIVQVA

SEQ ID NO: 35388 - protein, 361 aa, Glycine max
  misc_feature (186)..(188): Xaa can be any naturally occurring amino acid
  unsure (1)..(361): unsure at all Xaa locations
MARYGEGDKRWIVEDRPDGTNVHNWHWSETNCLDWSKTFFTSLLTNLPILDGEGNLFLKTTSLRSLDGEAYINVRKGKIIPGYEISLTLNWQGEAKDTLGTSLLKVDGTVEIPYISDENADEDPEVRVTVDDEGPVGMRIKDAMLSKGKPLILEKVRVWVQSMAKGGPVKDELEPKKVAPSLAPSXXXAVSGGRQRQTTTPTTMKTTAAAPKKEEKKEKVKKGRKSISMTERFNCRAKDLFEILMDENRWKGFTQSNARISKEVGGEFSIFDGSVTGTNLELQEGKLIVQRWRFGSWNDGVQSTVRLEFEEPESGVTVVKLTHTDVPEEDRYGNATVVENTERGWRDLIFQRIRAVFGFGI

SEQ ID NO: 35389 - protein, 351 aa, Nocardioides sp. JS614
MTQIMQALVVREPNVLEIAEVPVPEPGRNEVLARVRSVSICGTDAHLINGDYPGFWPPQFPFTPGHEWAGDVVALGEGADTFGWRVGDRVAGTSHSACGACQKCVEGQYNLCENYGRPALHAQYGHNAQGVNATYAVHNVKSIFRLPDEVSFDVGALADPASIALHVARRGNIKPGDTVAVTGAGAIGLLAADAALIDGAARVIVVGRGHRLERAAALGFETVDTRTGDPVAEVRGLTSGLGADVVLECAGVPETLIWGMAMLRRGGRCAMVGIPTEDVSLKCQPLVLDELELVGSRASAGEMRRVLPFIANGRMRAEELITHHFPLSEYDKALATFNDRASGAIKIIVNP

SEQ ID NO: 35390 - protein, 779 aa, Frankia sp. CcI3
MLRDSARFSRNGCLLAGSSLVPRWFLAGSRWRRGRPRRRRDAVRKRGLLVSSRVGPGTPGQHQVVSEVTIMTDPGTSRLPRDDAKQQQLDAVRIGDDGARMTTDQGIGVEHTDDSLAAGERGPTLLEDFHFREKLTRFDHERIPERVVHARGAGAYGYFEAYESLADVTRAHFLGEDGRRTPVFVRFSTVGGSRGSADTVRDVRGFAVKFYTEEGNFDLVGNNMPVFFIQDGIKFPDFVHAVKPEPHNEIPQASSAHNTLWDFVSLVPESMHMMMWLMSDRALPRSYRMMQGFGVHTFRFVDAAGQGTFVKFHWRPKLGTHSLVWDETQKIAGKDPDFNRRDLWESIENGTFPEWELGVQLVPESDEHAFDFDLLDATKIIPEERVPVRPVGRLVLNRNPGNFFAETEQVAFCVQNVVPGIDFTNDPLLQARLFSYLDTQLIRLGGPNFAQLPVNRPVAAVHNNSRDGYGQHRIQQSQTSYFPNSISGGCPVLSDPAHGGYVHYAERVDGNTIRKRSESFKDFYSQATLFWNSMSSWERRHIVDAFSFELGKVDYTQIKERVLGHLAQVDHELAAGVAENLGLPVPPESTPNHGRSSPALSQADQPSGVATRRIAVLAADGVDEVALRSATAALREQGAILEVLAPHGGMLATVSGDALPVDRTLVTMSSVLYDAVFVAPGERGVTALTHNGEAVHYVGEAYKHAKPIGAVGAGVSLLEIASLPGARVADQGDAVVSDRGIVTVRDLAGPSVLGDFGSAFATAVAAHRHFDRALEAVAA

SEQ ID NO: 35391 - protein, 203 aa, Shewanella sp. MR-7
MISILVSDVIENNEFANLGAPNEKDIMIKLPLVIFASLLSTSAFAATCPSYLDVEVRKLHSDEKINLCELTQGKPVLLVNTASNCGYTPQFKALEALHKEYKDKGLVVIGFPSDDFFQEENDEKDTAKVCYINYGVTFTMLATSPVRGSDANSVFKYLGDKAGSPKWNFYKYVVSGDGNTVQQFNSKVKPDSAELKQAIESVL

SEQ ID NO: 35392 - protein, 813 aa, Escherichia coli
SSMQLGSNVPFPRQLTVTRDGDIMILRTPIISESYSPDESPSSDAKNSQNMLGYIALELDLKSVRLQQYKEIFISSVMMLFCIGIALIFGWRLMRDVTGPIRNMVNTVDRIRRGQLDSRVEGFMLGELDMLKNGINSMAMSLAAYHEEMQHNIDQATSDLRETLEQMEIQNVELDLAKKRAQEAARIKSEFLANMSHELRTPLNGVIGFTRLTLKTELTPTQRDHLNTIERSANNLLAIINDVLDFSKLEAGKLILESIPFPLRSTLDEVVTLLAHSSHDKGLELTLNIKSDVPDNVIGDPLRLQQIITNLVGNAIKFTENGNIDILVEKRALSNTKVQIEVQIRDTGIGIPERDQSRLFQAFRQADASISRRHGGTGLGLVITQKLVNEMGGDISFHSQPNRGSTFWFHINLDLNPNIIIEGPSTQCLAGKRLAYVEPNSAAAQCTLDILSETPLEVVYSPTFSALPPAHYDMMLLGIAVTFREPLTMQHERLAKAVSMTDFLMLALPCHAQVNAEKLKQDGIGACLLKPLTPTRLLPALTEFCHHKQNTLLPVTDESKLAMTVMAVDDNPANLKLIGALLEDMVQHVELCDSGHQAVERAKQMPFDLILMDIQMPDMDGIRACELIHQLPHQQQTPVIAVTAHAMAGQKEKLLGAGMSDYLAKPIEEERLHNLLLRYKPGSGISSRVVTPEVNEIVVNPNATLDWQLALRQAAGKTDLARDMLQMLLDFLPEVRNKVEEQLVGENPEGLVDLIHKLHGSCGYSGVPRMKNLCQLIEQQLRSGTKEEDLEPELLELLDEMDNVAREASKILG

SEQ ID NO: 35393 - protein, 218 aa, Glycine max
  misc_feature (32)..(32): Xaa can be any naturally occurring amino acid
  unsure (1)..(218): unsure at all Xaa locations
MVQTRKFRGVRQRHWGSWVSEIRHPFLKRRVXLGTFETAEEAARAYDQAAILMSGRNAKTNFPILQTPEGDPKTTLTPIDHETSSSSTTTSKELEEILHAKLRKCGKLPSPSMTCLRLDPENSHIGVWQKRAGQRSDSNWVMMVPPLGKKGGANEGGTGGDASCSNSFPFSECDPTPQVARQELLRTEMDEEERIALQMIEELLSRNCPTSPSFNNLY

SEQ ID NO: 35394 - protein, 149 aa, Arabidopsis thaliana
  misc_feature (109)..(109): Xaa can be any naturally occurring amino acid
  unsure (1)..(149): unsure at all Xaa locations
GPPALKAGKEGAEYLGTGPPKFHFSGQDGIDAKKDGIYPVGTLDGAPFKASPPVFLMSRKIKSLGGKRVLSGEGAAEIFGGALFFHKAPTKKKFPQKTWRRGFISPPKXRHHQFFLLTLIRRAGDNLQIKALPKYDCLKANKSTSAFGL

SEQ ID NO: 35395 - protein, 988 aa, Synechococcus sp. CC9605
MGHDSVSRGMNPDQVGRSEWIETFRSRSRRDLRGRWLRSGAAQAGFFLDESWGFTHRPDWAKRGLLIWPRGRQWLRLEQRLSWPDGWSTSDSCCARLVLSWWAEQMRLWVDGVLVHEGDLFDTACRWPLPARCRQGASLDLVLELCSPLHDDGALISSHLDLEPQFAGPDPEGTLLPAALELHLAADGDLPSHWADLDPSGVEAQDAVATHLHQVNPPRGSLHWLGHAHLDLAWLWPVADTWQAAERTFRSALDLMRRWPELRFAHSTPALYAWMEQHRPALFAEIQAASRAGRWEPINGPWVETDCVLVSTASLWNQFALGQKDSLRRFPEWTHELAWLPDSFGFAAGLPAVAAATGVRWFCTHKLAWNAENPFPHRLFRWRGRGRSELRSLMLPPIGRRADPVEMQGEQRAWHQATGLEAALWIPGVGDHGGGPTEELLEQIGLWEKQAAAVPTRAGTVREFLANLEQDDQAWAVWRDELFLELHRGCATSRPDQKRHNRTLERLLREADAASALLALAGRDGGGSDWRPLLFQQFHDILPGTSIPEVFEQAEPVWRSARRQARGERDRRLARLTRQKDTAAAWSWWGLQPLASWSPLVRLPAGSWSSEGVSLPQQAAAGGGAWVQLPRQHGSCSVPLRREPGMASCAAQPRQPVVITSLGAGVWRLVNGLIDLDVSAVGLMALRDRDGRNQLSSPLQLERYRDCGEFWDAWDLAADYRSQPLGVLGTDSLEWLDQGPLVAHLVLRRQLGASCMRLDLRLKADTAWLELICSINWCQTHELLRLDLPLATPAVRIAADTSGGVIERPAEPMTVRERARWEVPVISWFASQSQAPGGGMAVLLDGPQGVDWSSDRLGISLLRGPTWPDPSADQGWHRQRLALMPFSGSWSEAGVPQAAIAFREPGWCAALPAELRQWFPSLPLQLTPVALERHANVCLLKLLNAGSARCRWTPGADWSVRRDVDSSAADAVVIAPGELVSLVVDQSS

SEQ ID NO: 35396 - protein, 486 aa, Saccharomyces cerevisiae
MVHLGPKKPQARKGSMADVPKELMQQIENFEKNFTVPTETLQAVTKHFISELEKGLSKKGGNIPMIPGWVMDFPTGKESGDFLAIDLGGTNLRVVLVKLGGDRTFDTTQSKYRLPDAMRTTQNPDELWEFIADSLKAFIDEQFPQGISEPIPLGFTFSFPASQNKINEGILQRWTKGFDIPNIENHDVVPMLQKQITKRNIPIEVVALINDTTGTLVASYYTDPETKMGVIFGTGVNGAYYDVCSDIEKLQGKLSDDIPPSAPMAINCEYGSFDNEHVVLPRTKYDITIDEESPRPGQQTFEKMSSGYYLGEILRLALMDMYKQGFIFKNQDLSKFDKPFVMDTSYPARIEEDPFENLEDTDDLFQNEFGINTTVQERKLIRRLSELIGARAARLSVCGIAAICQKRGYKTGHIAADGSVSTRYPGFKEKAANALKDIYGWTQPHLDDYPIKVVPAEDGSGPGAAVIAALAQKRIAEGKSVGIIGA

SEQ ID NO: 35397 - protein, 215 aa, Corynebacterium diphtheriae
MTTATAGLAVELKQSTAQAHEKAEHSTFMSDLLKGRLGVAEFTRLQEQAWLFYTALEQAVDAVRASGFAESLLDPALNRAEVLARDLDKLNGSSEWRSRITASPAVIDYVNRLEEIRDNVDGPALVAHHYVRYLGALSGGQVIARMMQRHYGVDPEALGFYHFEGIAKLKVYKDEYREKLNNLELSDEQREHLLKEATDAFVFNHQVFADLGKGL

SEQ ID NO: 35398 - protein, 485 aa, Saccharomyces cerevisiae
MVHLGPKKPQARKGSMADVPKELMDEIHQLEDMFTVDSETLRKVVKHFIDELNKGLTKKGGNIPMIPGWVMEFPTGKESGNYLAIDLGGTNLRVVLVKLSGNHTFDTTQSKYKLPHDMRTTKHQEELWSFIADSLKDFMVEQELLNTKDTLPLGFTFSYPASQNKINEGILQRWTKGFDIPNVEGHDVVPLLQNEISKRELPIEIVALINDTVGTLIASYYTDPETKMGVIFGTGVNGAFYDVVSDIEKLEGKLADDIPSNSPMAINCEYGSFDNEHLVLPRTKYDVAVDEQSPRPGQQAFEKMTSGYYLGELLRLVLLELNEKGLMLKDQDLSKLKQPYIMDTSYPARIEDDPFVFLEDTDDIFQKDFGVKTTLPERKLIRRLCELTGTRAARLAVCGIAAICQKRGYKTGHIAADGSVYNKYPGFKEAAAKGLRDIYGWTGDASKDPITIVPAEDGSGAGAAVIAALSEKRIAEGKSLGIIGA

SEQ ID NO: 35399 - protein, 376 aa, Bacillus cereus G9241
MILDLGDIKVKKQRIVVKIGSSSLADSHGGISKEQLSDHVAALARLKEEGHEVLLITSGAVAAGFSALGYPSRPVTIKGKQAAAAVGQSLLMQAYTEEFRKYGIVTAQLLLTRSDFSRKEQYSNAYATLGELLNRSALPIINENDSISLEELTFGDNDMLSALVSGLVSADMLMIFTDVNGLYDKNPQKNEDAKKYYFLPEVTEEIASLAGDAGSKLGTGGMKSKIDAAKTALSLGVSVFIGTGRGQEKFVDVLKGKGDGTYIGNAPQKEMKMTKQWIALHSVVSGQIEVDAGAATAIIQHGKSLLPAGVTNVSGFFQVGEVVEVMTQQGRVIGKGQCTYSAEELREVKGMQSQDIQARGERHSYEVIHRDYWVSL

SEQ ID NO: 35400 - protein, 486 aa, Saccharomyces cerevisiae
MVHLGPKKPQARKGSMADVPKELMQQIENFEKNFTVPTETLQAVTKHFISELEKGLSKKGGNIPMIPGWVMDFPTGKESGDFLAIDLGGTNLRVVLVKLGGDRTFDTTQSKYRLPDAMRTTQNPDELWEFIADSLKAFIDEQFPQGISEPIPLGFTFSFPASQNKINEGILQRWTKGFDIPNIENHDVVPMLQKQITKRNIHIEVVALINDTTGTLVASYYTDPETKMGVIFGTGVNGAYYDVCSDIEKLQGKLSDDIPPSAPMAINCEYGSFDNEHVVLPRTKYDITIDEESPRPGQQTFEKMSSGYYLGEILRLALMDMYKQGFIFKNQDLSKFDKPFVMDTSYPARIEEDPFENLEDTDDLFQNEFGINTTVQERKLIRRLSELIGARAARLSVCGIAAICQKRGYKTGHIAADGSVSTRYPGFKEKAANALKDIYGWTQPHLDDYPIKVVPAEDGSGPGAAVIAALAQKRIAEGKSVGIIGA

SEQ ID NO: 35401 - protein, 490 aa, Neisseria gonorrhoeae FA 1090
MNQTSRDLTRISHNTKIVATLGPGSNNVELLEDMIRVGGLNVVRFNFSHGTPEFHQENARIVREAAKRAGQEIAIIADLQGPKIRVGKIAGGGIELNKGETLVLDAALEGEGTREAVGLDYRDLPDDVAAGDVLWLDDGLLTLTVESVEGSRIITRVENSHILKSNKGINKRGGGLSAGALTEKDFRDLKTAIAIGCDYLAISFVKSAEDLHIARAKVEEEMKGSTAVRPGLVSKIERVEAIENLDEIILAGDGIMVARGDLAVEVGHAAVPALQKRMIRRARELRRFSITATQMMESMITNPVPTRAEVSDVANAVLDGTDAVMCSAETAVGAYPFETVSQMAIICAAAEKEQDSLNGVAEQTEYPEAVSTNLAIAGGAVSVARAVHAKAIVALTESGSTAFEISRHNITLPIFALTPSVSAQRRMAMYRGVRPLILATSTDHDTALNEVETMLVEHNILHSGDQYIITSGSQMRESGSTNTLEVLRVK

SEQ ID NO: 35402 - protein, 362 aa, Arabidopsis thaliana
  misc_feature (12)..(12): Xaa can be any naturally occurring amino acid
  misc_feature (106)..(106): Xaa can be any naturally occurring amino acid
  misc_feature (126)..(126): Xaa can be any naturally occurring amino acid
  misc_feature (130)..(130): Xaa can be any naturally occurring amino acid
  misc_feature (249)..(249): Xaa can be any naturally occurring amino acid
  misc_feature (310)..(310): Xaa can be any naturally occurring amino acid
  unsure (1)..(362): unsure at all Xaa locations
SATETQIRIGVXGCADIARKVSRAIHLAPNATISGVASRSLEKAKAFATANNYPESTKIHGSYESLLEDPEIDALYVPLPTSLHVEWAIKAAEKGKHILLEKPVAXNVTEFDKIVDACEANGVQIXDGTXWVHNPRTALLKEFLSDSERFGQLKTVQSCFSFAGDEDFLKNDIRVKPGLDGLGALGDAGWYAIRATLLANNFELPKTVTAFPGAVLNEAGVILSCGASLSWEDGRTATIYCSFLANLTXEITAIGTKGTLRVHDFIIPYKETEASFTTSTKAWFNDLVTAWVSPPSEHTVKTELPQEACXVREFARLVGEIKNNGAKPDGYWPSISRKTQLVVDAVKESVDKNYQQISLSGR

SEQ ID NO: 35403 - protein, 215 aa, Corynebacterium diphtheriae
MTTATAGLAVELKQSTAQAHEKAEHSTFMSDLLKGRLGVAEFTRLQEQAWLFYTALEQAVDAVRASGFAESLLDPALNRAEVLARDLDKLNGSSEWRSRITASPAVIDYVNRLEEIRDNVDGPALVAHHYVRYLGNLSGGQVIARMMQRHYGVDPEALGFYHFEGIAKLKVYKDEYREKLNNLELSDEQREHLLKEATDAFVFNHQVFADLGKGL

SEQ ID NO: 35404 - protein, 268 aa, Chlorobium tepidum TLS
MVSGNDNNHHAAQRARMLLTQIAPNFLDPKHEWQRIFAELWGTFLLVLVAAGGPVAATSSGNHAGDALLPVAPGLMVMAIIYFMGTVSGAHLNPAVTLAFAMRRNFPWVRVPGYILAQVAGGWLAALFLGFMFGNAAVAPGMTLPGHEVTPLKALVMEMVLTAALVNTILGTSSGARNIGTNGAIAVGGYIALAGMWAAPVSGASMNPVRSLAPALVCGDTTLAWVYVAGPIAGALIGVVFEWILKGPPTTAGTVAAQGTLDIDDREG

SEQ ID NO: 35405 - protein, 420 aa, Chlorobium tepidum TLS [sequence omitted]

SEQ ID NO: 35406 - protein, 215 aa, Corynebacterium diphtheriae
MTTATAGLAVELKQSTAQAHEKAEHSTFMSDLLKGRLGVAEFTRLQEQAWLFYTALEQAVDAVRASGFAESLLDPALNRAEVLARDLDKLNGSSEWRSRITASPAVIDYVNRLEEIRDNVDGPALVAHHYVRYLGELSGGQVIARMMQRHYGVDPEALGFYHFEGIAKLKVYKDEYREKLNNLELSDEQREHLLKEATDAFVFNHQVFADLGKGL

SEQ ID NO: 35407 - protein, 580 aa, Gibberella zeae
MKVVLVSGGVISGVGKGIIASSAGLLLKTLGLRVTAIKTDPYINTDAGLLNPLEHGECFVLDDGGETDLDLGNYERYLGIQLSRDSNITTGKIYKQVIEKERRGDYLGKTVQVVPHITDAIQDWIERVAKIPVDASGEAPDVCIIELGGTIGDLESGPFVEALSQLRHRLGRDNFLSISVSYVPIINGEEKTKPTQHAIRQVRSAGLIPDVIACRCERELDQATITKIARSCQVEDEQAIGVRNMDTIYQVPLLLEQEGLLKLLQKGLALDKCQVTPPMAQKGQALWDLWKKTVVPDRHLEPVNIILVGKYVSLDDSYLSVHKALEHSAMRCNRKLNLVSVDSEHLEPEMQEKDPRKFHEAWAHVVRAQGIIVPGGFGTRGIQGMVDVAKWARERKLPYLGICLGMQTAVIEYARNVMGLKGATSEEFSATAEHRVVIFMPEGSKEQMGGTMRLGSRTSHFKPGTEWSKLRGLYGGVDVVEERHRHRYEVNPDYIEDLEKAGLSLTSMDDQGVRVETIELKDHPFFVGLQAHPEYKSKTLAPAPSLLGLVAASSGCLDEIIEAAHKKQSSSNGVSDVTNF

SEQ ID NO: 35408 - protein, 857 aa, Oryza sativa (indica cultivar-group)
MATAEVGGGGGEGDAAAAAVARAGGGGGGGGGGEDALFTELWSACAGPLVTVPRVGEKEFYFPQGHIEQVEASTNQVGEQRMQLYNLPWKILCEVMNVELKAEPDTDEVYAQLTLLPELKRQEDNGSTEEEVPSAPAAGHVRPRVHSFCKTLTASDTSTHGGFSVLRRHADECLPPLDMSRQPPTQELVAKDLHGVEWRFRHIFRGQPRRHLLQSGWSVFVSAKRLVAGDAFIFLRGENGELRVGVRRAMRQQTNVPSSVISSHSMHLGVLATAWHAVNTGTMFTVYYKPRTSPAEFVVPYDRYMESLKRNYSIGMRFKMRFESEEAPEQRFTGTIVGMGDSDPAGWPESKWRSLKVRWDEASSIPRPERVSPWQIEPAVSPPPVNPLPVPRTKRLRPNATALPADSSAIAKEAATKVVVESEPNGTQRTFQTQENATPKSGFGNSSELESAQKSIMRPSGFDREKNNTPIQWKLGSDGRMQMSKPESYSEMLSGFQPPKDVQTPQGFCSLPEQITAGHSNFWHTVNAQYQDQQSNHNMFPSSWSFMPPNTRLGLNKQNYSMIQEAGVLSQRPGNTKFGNGVYAALPGRGTEQYSGGWFGLMMPNSHMDDTQPRLIKPKPLVVAHGDVQKAKGASCKLFGIHLDSPAKSEPSKSPSSVVYDGTPQTPGATEWRRPDVTEVEKCSDPSKAMKPLDTPQPDSVPEKPSSQQASSQQASRNMSCKSQGVSTRSCKKVHKQGIALGRSVDLTKFNGYEELIAELDDMFDFNGELKGPKKEWMVVYTDNEGDMMLVGDDPWIEFCDMVHKIFIYTREEVQRMNPGTLNLRSEDSHANSMERGSVGREMRGCLSTSSLNSENC

SEQ ID NO: 35409 - protein, 197 aa, Triticum aestivum
GIEASRLLESEGVQTHLTFVYSFAQAAAAAQAGASVVQIFVGRLRDWARNHSGDPEIDEALKKGEDAGLALAKKVYAYIHRNGYKTKLMVAAIRNKQDVFSLLGIDYIIAPLKILQSLEESVTDPDVKYGYVPKLTPAIGKTYNFTEEELVKWDQLSLSAAMGPAAEELLASGLEGYVNQARRVEELFGKIWPPPNV

SEQ ID NO: 35410 - protein, 657 aa, Deinococcus radiodurans R1
MTALPFSPTLACKSKGNACPLRHDLPARLCAAGRAGASFCPLIQGVLMYPTATLSAQHDHTPGYTERLGALLGGHVRVRLRTTLPVLGVRLKVVQIGEIETLPAREVTGLQGEGRWFEADLPLHEARVRYAWHLDLPGDHLNLTRLGLHHARRGFRSWFQYLAGYQAPEWAWKSVFYQIFPDRFRNGDSTNDVQTGEYLYEGRPVEKVEWTHPVDAWGDIHGHYGGDLAGITQAVPYLQALGVTGLWLTPIFTSPSNHRYDITDYRAIDPHLGGDAAWDALVQATDAAGIRIVLDGVFNHMGNENALFQAALAAEDAPERAMFTWRDTPGKPPYHSFFDVATLPKIDYANERAVEEFFSGERSVVRHWLRRGAAGWRLDVAHMLGKGGTEEDNLALHRVLKAAARQEKADAYVFGERFYDPELALDGQGEDGAMNYHGFGLPVMQWLAGATYFNEPSRLDGTELAEILWDAYHALPPQAALNMFNLLESHDIGRALWRLGGDRTKYRAALTLLLAYAGVPCLYYGSEIGLSQSRDGNMPWCREPMPWDEARWDMELLAHVKALVKVRRETPVLHTGALQFIHAEPDALAFLREVTGPDGAAERVVALASRRAGAHPVTFTLPAGEWQDALSGERLGGGEVTLDAAGGQLLLSLPLSR

SEQ ID NO: 35411 - protein, 175 aa, Mycoplasma mobile 163K
MICCGGRNMKTIYLGGGCFWGIEGYFQKIKGIIDTDVYYLNGGFEGVSYRDVCNASGHVEAVELIYDETLISSKEIWNLFSDLIDPYSINKQGNDRGVQYRSGIYAKDKAILDEFKKYNKEFEVKHGRKTAFEFKLINDKTRAEEYHQNYLIKNPNGYCHIDINNIEKKYLKTSF

SEQ ID NO: 35412 - protein, 514 aa, Wolinella succinogenes
MGFLRLYSPWRVWKVFRFLATIFLLIKKRDSFLWITPLSPRALHGVILDLGASFIKLAQVLATRSDFFDESYLEPLRTLHDDIPPMDHEAFSRVFERSFGESDPFLEFASKPLASASIGQVHRARLKSGEEVAVKLLREGIGARVQADICIITFFNLLFRPLFSPYTKHSVESVLLEFSSMILKEVNLAQERYHLELFWEVYRESGVLFPLPFADYCTSEALVMSFHEGVRFDDKEGLLTLGVDFGSLMEKLVEFYVEQMLVTGLFHADPHPGNLLVDASGNLIFLDFGMVKKISTPTRIAIIELVKAAHERDFEHYILACKKLGIIAQEAPSGEMEEFASRMFAIFDNTSLDSASMQKLAFEVLESMRDMPFKLPQEAIYILRVSAIIEGLGTRYIENFNGIKDILPILQKNLSRALGMREGLLEGIWSEAKSLPMSLKHLKNILAKADEGELRVRIAQGDAEALAWRLKGYIRGVLPGILSLLGAFFLLGAGFREEAFWLFGAGIVWLFYKV

SEQ ID NO: 35413 - protein, 684 aa, Sinorhizobium meliloti
MATKVKENEEADVEREGAPDGPLLDLSDDAVKKMIKAAKKRGYVTMDELNSVLPSEEVTSEQIEDTMSMLSDMGINVIEDEEAEEAAASDDDDGADEGESEGGELAPASGTALAASKKKEPTDRTDDPVRMYLREMGSVELLSREGEIAIAKRIEAGRETMIAGLCESPLTFQALIIWRDELNEGQTLLREIIDLETTYSGPEAKAAPQFQSPEKIEADRKAAEEKEKVRRTRTAANDDDITNVGGEGQAPEEEEEDDDESNLSLAAMEAELRPQVMETLDVIAETYKKLRKLQDQQVEARLAATGTLSPAQERRYKELKDELIKAVKSLSLNQNRIDALVEQLYDISKRLTQNEGRLLRLAESYGVKREAFLEQYSGAELDPNWMKSISNLAGKGWKEFARAENQTIRDIRQEIQNLATETGISIAEFRRIVSMVQKGEREARIAKKEMVEANLRLVISIAKKYTNRGLQFLDLIQEGNIGLMKAVDKFEYRRGYKFSTYATWWIRQAITRSIADQARTIRIPVHMIETINKIVRTSRQMLHEIGREPTPEELAEKLAMPLEKVRKVLKIAKEPISLETPVGDEEDSHLGDFIEDKNALLPIDAAIQANLRETTTRVLASLTPREERVLRMRFGIGMNTDHTLEEVGQQFSVTRERIRQIEAKALRKLKHPSRSRKLRSFLDS

SEQ ID NO: 35414 - protein, 344 aa, Sinorhizobium meliloti
MTNMMKALVKTKPEVGLWMERVPVPEIGPNDVLIRVRKSAICGTDVHIWNWDQWAEKTIPVPMVVGHEFMGEVVEVGPAVSKHHVGERVSGEGHIVCGKCRNCRAGRGHLCRNTLGVGVNRPGSFAEFVCLPEYNVVSIPDDVPDEIAAIFDPFGNAVHTALSFDLVGEDVLVTGAGPIGIMGAMVAKRCGARKVVITDINPVRLDLARKLGIDHVVDASKEKLADVMRVIGMTEGFDVGLEMSGAAPAFRDMIDKMNNGGKIAILGIAPAGFEIDWNKVIFKMLNLKGIYGREMFETWYKMIAFVQGGLDLSPIITHRIGIDDFRDGFEAMRSGNSGKVVMDW

SEQ ID NO: 35415 - protein, 185 aa, Triticum aestivum
MAPTVMASSATSVAPFQGLKSTAGLPVSRRSNGASLGSVSNGGRIRCMQVWPIEGIKKFETLSYLPPLSTEALLKQVDYLIRSKWVPCLEFSKVGFIFREHNASPGYYDGRYWTMWKLPMFGCTDATQVINEVEEVKKEYPDAYVRIIGFDNMRQVQCVSFIAFKPPGCEESGKGLNSSLTTGHI

SEQ ID NO: 35416 - protein, 395 aa, Sinorhizobium meliloti
MTTAFLSHLRSELEDLKQAGLYKSERVITSKQSGEIEVASGGRVLNFCANNYLGLADSEELAQAAKSALDRYGYGMASVRFICGTQEEHKELEARISSFLGMEDTILYSSCFDANGGLFETLLGEDDAIISDALNHASIIDGVRLSKARRFRYANNDMAALEEELKKAEGSRFKMIATDGVFSMDGIIANLQGVCDLAEKYGAMVMVDDSHAVGFVGKHGRGSAEHCGVEGRVDIITGTLGKALGGASGGYTSAKADVVEWLRQRSRPYLFSNTLAPVIAAASLKVFELIENGDALRNRLYANAALFRSEMSGLGFTLAGEGHPIIPVMLGDAALAQEMAARMLKKGVYVVGFSFPVVPKGQARIRTQMSAAHSEADVRRAIAVFEEVGRELGVI

SEQ ID NO: 35417 - protein, 806 aa, Anabaena variabilis ATCC 29413
MSELMQAILDSEEKNDLRAFISELRLQDKNYLLRNDILNVYSEYCSKCQKSETSYKFSNLGKLIYYTQEIIQEDSNFCFIIRPNIAAQEVYRLTADLDVEPMTVQELLDLRDRLVNKFHPHEGDLLELDFGPFYDYTPTIRDPKNIGKGVQYLNRYLSSKLFQDSQQWLESLFNFLRLHNYNGIQLLINYQIQSQQQLSQQVKKALNFVSDRPHDEPYEQFRLQLQAMGFEPGWGNTASRVRDTLNILDELIDSPDPLTLEAFISRIPMIFRIVLVSAHGWFGQEGVLGRPDTGGQVVYVLDQAKNLEKQLQEDAILAGLEVLNVQPKVIIFTRLIPNSDGTLCNQRLEKVHGTENAWILRVPLREFNPKMTQNWISRFEFWPYLETFAIDSERELLAEFHGRPDLIVGNYTDGNLVAFLLARRMKVTQCNIAHALEKSKYLFSNLYWQDLEEKYHFSLQFTADLIAMNAANFVISSTYQEIVGTSDSVGQYESYKCFTMPELYHVVNGIELFSPKFNVVPPGVNENSYFPYTHTQDRIESDRDRLEEMLFTLEDSSQIFGKLDDPNKRPIFSMARLDRIKNLTGLAECFGKSKELQEHCNLILVAGKLRIEESEDNEERDEIVKLYRIIDEYNLHGKIRWLGVRLSKNDSGEIYRVICDRQGIFVQPALFEAFGLTILESMISGLPTFATQFGGPLEIIQDQINGFYINPTHLEETATKILDFVTKCEHNPNYWKIISEKAIDRVYSTYTWKIHTTKLLTLARIYGFWNFASKEKREDLLRYLESLFYLIYKPRAQQLLEQHKYR

SEQ ID NO: 35418 - protein, 215 aa, Nitrosomonas europaea ATCC 19718
MIEAVLFDFDGTLADTAPDLGRALNRQRTARNQPPLPIELIRTEASAGARGLLSLGFDLKPGDPEYQAMREEFLSFYTEQLCQDTCLFPGITELLEQLDSRAIPWGIVTNKPAKFTGPLMHLLGLHHRAACIISGDDTPYSKPHPEPLLTACRQINMAPDHCIYLGDDIRDVQASLAAGVKPIVALYGYLGNCAPPETWGAAELIDHPRDLLHHI

SEQ ID NO: 35419 - protein, 645 aa, Sinorhizobium meliloti 1021
MCGFGGYLGSIRDGKPLLERMTAAIGHRGPDERGIFTAPGAGLGHVRLSIVGLGDGQQPMSNPSGELTIAFNGEIFNYVELRDELRARGRQFRTSSDTEVILHLYEEMGEDCLSLLNGDFAFAIWDARRRRMMLARDRMGVRPLFHTLKGGTLYFASEVKALLEVPGVSAEIDPIALDQIFTLWAPIAPRTPFRDIHELEPGHLMIADQNGTTTRPYWQLDYPDRDERPAYAEESRAAEELRALLTDATRIRMRADVPVGAYLSGGLDSSIISALAAGMTSQGLRTFSVTFDSAEHDESAFQEEMAAALGTEHRAVACRAGDIARDFPDVIRFTEKPIIRTAPAPLYKLSGLVREAGLKVVLTGEGADEVFAGYDIFKEARVRRFCGRQPGSRIRPHLFRKLYPYLPGLQQQSAEYLAAFFGAGDVALDDPLFSHRPRLKGTAATKMFFSSDLRAELTGYDAAEELVSRLPAAFGRWHPLHQAQYLESRFLLPGYILSSQGDRMAMAHGIEGRFPFLDHRLVEFAAKLPPEMKLRGLVEKHILREATKDLLPPAIGRRTKQPYRAPDSHSFSGAGELDYVRSAMSEDAVAAGGLFNAKAVTKLYEKCQSRPASGFRDNAAFVGVLSTQLWLQTFTGTSLRKAEAA

SEQ ID NO: 35420 - protein, 480 aa, Oryza sativa
  misc_feature (320)..(320): Xaa can be any naturally occurring amino acid
  unsure (1)..(480): unsure at all Xaa locations
MVLSHASSGRDDAVRCTFATRYACETLPRFRMPEQSIPREAAYQIINDELMLDGNPRLNLASFVTTWMEPECDKLIMDSVNKNYVDMDEYPVTTELQNRCVNMIAHLFNAPIKEDETAIGVGTVGSSEAIMLAGLAFKRKWQNKRKEQGKPCDKPNIVTGANVQVCWEKFARYFEVELKEVKLSEGYYVMDPVKAVEMVDENTICVAAILGSTLTGEFEDVKLLNNLLTEKNKETGWDVPIHVDAASGGFIAPFLYPELEWDFRLPLVKSINVSGHKYGLVYPGVGWVIWRSKEDLPEELIFHINYLGTDQPTFTLNFSXKGYKNIMQNCMENTAILREGIEATGRFEILSKEAGVPLVAFSLKDSGRYTVFDISEHLRRFGWIVPAYTMPANAEHVAVLRVVIREDFSRSLAERLVSDIVKILHELDAHSAQVLKISSAIAKQQSGDDGVVTKKSVLETEREIFAYWRDQVKKKQTGIC

SEQ ID NO: 35421 - protein, 145 aa, Brassica napus
MGRRPARCYRQIKNKPYPKSRYCRGVPDPKIRIYDVGMKRKGVDEFPYCVHLVSWEKENVSSEALEAARIACNKYMTKSAGKDAFHLRVRVHPFHVLRINKMLSCAGADRLQTGMRGAFGKPQGTCARVDIGQVLLSVRCKDNNA

SEQ ID NO: 35422 - protein, 220 aa, Candida albicans SC5314
MARRPARCYRYCKNKPYPKSRYNRAVPDAKIRIYDLGRKKATVDEFPLCIHLVSNELEQLSSEALEAARICANKYITKVSGRDSFHLRVRVHPFHVLRINKMLSCAGADRLQQGMRGAWGKPHGLAARVSIGQIIMSARTKDSNKDVVIEGLRRARYKFPGQQKIIISKKWGFTPLNRDEYIAKKTNGEVIDDGAYVKFLSRKGNLEANLQQFPNYQYSA

SEQ ID NO: 35423 - protein, 485 aa, Agrobacterium tumefaciens str. C58
MHSGKTAPAEREVFVEEDLGYHKALKPRQIQMIAIGGAIGTGLFLGAGGRLAQAGPALVFVYALCGFFAFLVLRALGELIMHRPSSGSFVSYAREFYGEKMAFAAGWMYWLNWAMTSVADVTAVALYMNFFKQYVPWLAGIDQWVFAMTALVVVLAMNMLSVKVFGELEFWFSLIKVLALAIFLVVGVYFVIFGTPIEGHVTGFSLITDNGGFFPNGILPAFVIIQGVVFAYASIELIGTAAGETEDPRKVMPRAIRAVVLRLVVFYVGSVLLFTLLLPYTAYKAGESPFVTFFGSIGVEGADVIMNLVVLTAVLSSLNAGLYSTGRILHSMAVSGSAPAALAKMNKNGVPYGGIAVTAVVTVLGVALNAVVPSSAFEIALNLSALGIICAWAVIVLCQLKLWQLSQRGEIVRPDFRMFGAPYTGILTLIFLFGVLVLMAFDYPVGSWTIASLIVIIPALVIGWYLLRDRIYRLAAERAGSGVSH

SEQ ID NO: 35424 - protein, 400 aa, Mycobacterium bovis AF2122/97
MTGASTTTATMRQRWQAVMMNNYGTPPIALASGDGAVVTDVDGRTYIDLLGGIAVNVLGHRHPAVIEAVTRQMSTLGHTSNLYATEPGIALAEELVALLGADQRTRVFFCNSGAEANEAAFKLSRLTGRTKLVAAHDAFHGRTMGSLALTGQPAKQTPFAPLPGDVTHVGYGDVDALAAAVDDHTAAVFLEPIMGESGVVVPPAGYLAAARDITARRGALLVLDEVQTGMGRTGAFFAHQHDGITPDVVTLAKGLGGGLPIGACLAVGPAAELLTPGLHGSTFGGNPVCAAAALAVLRVLASDGLVRRAEVLGKSLRHGIEALGHPLIDHVRGRGLLLGIALTAPHAKDAEATARDAGYLVNAAAPDVIRLAPPLIIAEAQLDGFVAALPAILDRAVGAP

SEQ ID NO: 35425 - protein, 43 aa, Paeonia anomala
GHNIVLISNHQTEADPAIIALLLEKTNPRISEDLTYVAGDRVI

SEQ ID NO: 35426 - protein, 265 aa, Mentha x piperita
MASVKKLAGKVAIVTGGASGIGEVTARLFAERGARAVVIADMQPEKGGTVAESIGGRRCSYVHCDITDEQQVRSVVDWTAATYGGVDVMFCNAGTASATAQTVLDLDLAQFDRVMRVNARGTAACVKQAARKMVELGRGGAIICTASATVHHAGPNLTDYIMSKCGVLGLVRSASLQLGVHGIRVNSVSPTALATPLTATIGLRTAADVESFYGQVTSLKGVAITAEHVAEAVAFLASDEAAFVTGHDLAVDGGLQCLPFVAVAK

SEQ ID NO: 35427 - protein, 1250 aa, ASPERGILLUS NIDULANS FGSC A4
MTVYIASLFLPYTVSFRPPEESQALPSSPLSQHQAPESVSTTPNPAVSLFEKRNKTPNVGLTPGATTDHERIFTSDPNKAADPNRSEYPFPNPDNGYDYEHLTESEAHSPAWGVRTALNQPKPQSAFLASPSILRHQEPLNLSTDSLPKVDGPSSVPPKKHFRKPSGRSHNRKPSFSENEWKITTAEQGNGGLRNAVRAAAETGQLEDKVWVGTLGMPTDALTESTKATISEKLEGEYDCLMVDVSDSDFDGHYTHFCKTILWPVFHYQIPDNPKSKAYEDHSWVYYVKLNQVFAERIARNWRRGDTIWVQDYHLLLVPAMLRKLLPDAQIGFFLHVAFPSSEVFRCLAPRKELLEGMLGANLVGFQTEEYCRHFLQTCSRILSVEATNDGLQLEDRFVNVRKFPIGIDPLSWDKRRKAADVEQWIKTISDRYAGKRLIVARDKIDQVRGIRQKLLSYELFLNTHPEWREKVVLIQVATSTTEQPELEAMISDIVMRINSTHSTLAHQPLVFLKQDLAFPQYLALISVADAMMITSLREGMNLTSHEFVYCQDGKYGAQRYGSLILSEFTGSASVFGNHALLVNPWDYHQCADAIHTALSRSEEKRQQVWTQLHEAVLQNSTSNWVKSFSETLSRVWHEQSSREIMAVPRLPMNKLEDRYRQAKRRLIILDYEGTLASWGSPKSIIVTTPQRAITTLADLTEDPRNVVYVMSARMPEELERLFRLVSGLGLIAENGCFIREPYSETWSKLTNQDQTDAWKTAVRQMLEYYRQRAEGSWIEQRHCSLVFHYEAAEDHAAACRLASECADHINDACANQGVHAILVDGVLVVEATSTNKASAAELAWRSCLKQENDAGRPDFLLAIGDSRDDEPVFRWANKLESAHAVSYAMTVTLGSRSTEARATLTQGVAGTAHGAQFEEAIRVTPLGHNRYSAFLQKSFCIGTVPHGGYTSAVLYRLALVHFATAHPNLYKGEPATPISMHLTFLRRTAEGPAKLRVHDMKLGKRTSSLHVELLQPKDQAQSGTEIDEREMEVKVAGYITVSPASSEVGVSAKTNWELHPKPVSGSRSDGGVDFDRLSKTGRDEAWARQDPPFAQFRKATTQVELYGIDPALKKRKNGIVDQWARLKPEGQLTRWSNEAVVFLTDMFPMALDGFDTMADGRESGSATGGAGPTAKYWFPTVSLSIDFKKRLPPAGEEWLYSRVVTKEVRDGRTDLDVTILDAKGEIVALSTQIGLVVSASRNIGKRARL

SEQ ID NO: 35428 - protein, 41 aa, Paeonia lactiflora
GHNVVLISNHQTEADPAIIALLLEKTNPRISEDLTYVAGDR

SEQ ID NO: 35429 - protein, 414 aa, Saccharomyces cerevisiae
  misc_feature (235)..(236): Xaa can be any naturally occurring amino acid
  unsure (1)..(414): unsure at all Xaa locations
SATLFNNIELLPPDALFGIKQRYGQDQRATKVDLGIGAYRDDNGKPWVLPSVKAAEKLIHNDSSYNHEYLGITGLPSLTSNAAKIIFGTQSDALQEDRVISVQSLSGTGALHISAKFFSKFFPDKLVYLSKPTWANHMAIFENQGLKTATYPYWANETKSLDLNGFLNAIQKAPEGSIFVLHSCAHNPTGLDPTSEQWVQIVDAIASKNHIALFDTAYQGFATGDLDKDAYAVRXXLSTVSPVFVCQSFAKNAGMYGERVGCFHLALTKQAQNKTIKPAVTSQLAKIIRSEVSNPPAYGAKIVAKLLETPELTEQWHKDMVTMSSRITKMRHALRDHLVKLGTPGNWDHIVNQCGMFSFTGLTPQMVKRLEETHAVYLVASGRASIAGLNQGNVEYVAKAIDEVVRFYATEAKL

SEQ ID NO: 35430 - protein, 77 aa, Avicennia germinans
MSCCGGNCGCGSGCMCGGGCGGCKMYPNLSYSEAATEPLVLGVAPQKTNYEGCMEDVTVENGCKCGDNCTCNPCNCK

SEQ ID NO: 35431 - protein, 322 aa, Candida tenuis
MSASIPDIKLSSGHLMPSIGFGCWKLANATAGEQVYQAIKAGYRLFDGAEDYGNEKEVGDGVKRAIDEGLVKREEIFLTSKLWNNYHDPKNVETALNKTLADLKVDYVDLFLIHFPIAFKFVPIEEKYPPGFYCGDGNNFVYEDVPILETWKALEKLVAAGKIKSIGVSNFPGALLLDLLRGATIKPAVLQVEHHPYLQQPKLIEFAQKAGVTITAYSSFGPQSFVEMNQGRALNTPTLFAHDTIKAIAAKYNKTPAEVLLRWAAQRGIAVIPRSNLPERLVQNRSFNTFDLTKEDFEEIAKLDIGLRFNDPWDWDNIPIFV

SEQ ID NO: 35432 - protein, 492 aa, Oryza sativa (indica cultivar-group)
MDPYKHRPSSGSNSTFWTTNSGAPVWNNNSALTVGERGPILLEDYHLIEKLAQFDRERIPERVVHARGASAKGFFEVTHDISHLTCADFLRAPGVQTPVIVRFSTVVHERGSSETLRDPRGFAVKFYTREGNFDLVGNNMPVFFIRDGMKFPDMVHAFKPSPKTNMQENWRIVDFFSHHPESLHMFSFLFDDVGIPLNYRHMEGFGVNTYTLINKDGKPHLVKFHWKPTCGVKCLLDDEAVTVGGTCHSHATKDLTDSIAARNYPEWKLYIQTIDPDHEDRFDFDPLDVTKTWPEDIIPLQPVGRMVLNKNIDNFFAENEQLAFCPAIIVPGIHYSDDKLLQTRIFSYADTQRHRLGPNYLMLPVNAPKCAYHNNHHDGSMNFMHRDEEVNYFPSRFDAARHAEKVPIPPRVLTGCREKCVIDKENNFKQAGERYRSFDPARQDRFLQRWVDALSDPRITHELRGIWISYWSQCDASLGQKLASRLNLKPNM

SEQ ID NO: 35433 - protein, 581 aa, Cryptococcus neoformans var. grubii
MANAPHGGVLKDLLVRDAALHDSLLEEARSLNDIFLTERQLCDLELILNGGFSPLEGFMDEQDYTSVVETLRLAPFNGHKYGHVFPIPITLDVSQEDINTLGLKQGARVALRDPRDDAALAILTVSDIYRPNKATEAEKVMGADDIAHPSVAYLRNNVKEFYVGGKVQAIQAPTHFDYVPLRYTPAELRAHFHKLAWRKVVAFQTRNPMHRAHRELTVRAARQRRANVLIHPVVGLTKPGDVDHYTRVRAYQALMPSYPEGMAHLALLPLAMRMAGPREAVWHAVIRKNFGATHFIVGRDHAGPGKNSQGKDFYGPYDAQELVTQFKDELQIEMVPFQAMTYLPGSDEYQPVDEVPKGTPTADISGTELRKRLRTGASIPDWFSYTGVVKVLRESYPPRPQQGFTILLTGLHNSGKDTIARALQVTLQQQGSRSVSLLLGEELRSDLDPQIGRAITPEQKHINLERIGFVAAELTKAGAAVIAAPTAPYERSRQAFKKQVVGSGGGNYFLVHVATPLEWCEKVDRRGLYKAARAGEIKNLTGVDDVYEAPENADLVCDLRIDTVPEIVHSIIMILESQNLV

SEQ ID NO: 35434 - protein, 178 aa, Frankia sp. EAN1pec
MTVHDFTVEATDGTSRSLRDYAGKTLLIVNVASKCGLTPQYEGLEALYRDLKGRGLEILGFPCNQFGGQEPGTDAEIQEFCSTNFDVTFPVFSKIEVNGPGAAPLYDYLRSEAPGDFGPESGFLYEHIKRSRPEAIGTDEVKWNFTKFLVDGEGKVVRRFEPTVTPDELRGELDTSLA

SEQ ID NO: 35435 - protein, 159 aa, Zea mays
IKQATGGSSLRSVFTFATVEEFWSLFNNMKGPSKLAGGADFYCFKHNIEPKWEDPICANGGKWTMNFPKEKSDKPWLYTLLALIGEQFDHGDEICGAVVNVRGKQERISIWTKNASNEAAQVSIGKQWKEFIDYNNSIGFIIHEDAKKLDRGAKSAYTA

SEQ ID NO: 35436 - protein, 490 aa, Thermotoga maritima MSB8
MKEIDELTIKEYGVDSRILMERAGISVVLAMEEELGNLSDYRFLVLCGGGNNGGDGFVVARNLLGVVKDVLVVFLGKKKTPDCEYNYGLYKKFGGKVVEQFEPSILNEFDVVVDAIFGTGLRGEITGEYAEIINLVNKSGKVVVSVDVPSGIDSNTGKVLRTAVKADLTVTFGVPKIGHILFPGRDLTGKLKVANIGHPVHLINSINRYVITREMVRSLLPERPRDSHKGTYGKVLIIAGSRLYSGAPVLSGMGSLKVGTGLVKLAVPFPQNLIATSRFPELISVPIDTEKGFFSLQNLQECLELSKDVDVVAIGPGLGNNEHVREFVNEFLKTLEKPAVIDADAINVLDTSVLKERKSPAVLTPHPGEMARLVKKTVGDVKYNYELAEEFAKENDCVLVLKSATTIVTDGEKTLFNITGNTGLSKGGSGDVLTGMIAGFIAQGLSPLEASTVSVYLHGFAAELFEQDERGLTASELLRLIPEAIRRLKE

SEQ ID NO: 35437 - protein, 649 aa, Lactobacillus gasseri
MCGICAFFDPELKDKDCAIQGMMDTIKHRGPSSDGKYTNDQVALGFRRLSIIDLRGGSQPIFNEDKSRAIIFNGEIYNFKPLRKELIDAGHTFTTKADTEVLLHGYEEWGMDGLLKRVRGMFAFVIWDDNTKTLYGARDFFGIKPMYYSDQNGKLIVGSELKSFLAYPGFKKELNTEAVKPYLMNQYNDLKETFFKGVYRFPAGHWFEYKDGKMKTHQYWDAKYVENSLSFEETLDKINEDLKETVDLYRNADVPVGAFLSEGIDSSYLTSLLDPEDVFSVSFDDSTYNEASKAKALSDLHGWKFFADKVDADEAMRDFPEMQYHMDEPDANPSIIPLWYLCKLARKHVTVALSGEGADELFAGYVNYGMHTHNDVIKVFTAGLKKLPKKSRVRLAHKIKKMPNFPGKVHMYTNLAEPSEFYVGQSVIYDMDYPTIFTSKDANNILRDKYKNDLTVNGIYQEDFKKVKNIDEVKQMQYIDLHHFMLNDIEQKADKISMAHSLELRVPYLDKKIAELANSIPTKYLVNRHDTKYALRKASEKVLPEEWAQRPKLGFPTPIKQWLKEPRFYKQVRELFTEDFVNDIFDQKKIVKLLDDNYKGDGSARRQIWAIYTFLVWYKLFFVDYDETVKKYQHVQPEVAELIESGRLV

SEQ ID NO: 35438 - protein, 367 aa, Triticum aestivum
MATPQIYRKTLLPVLLLLAAAALYPAAADGDEVLALTESTFEKEVGQDRGALVEFYAPWCGHCKKLAPEYEKLAASFKKAKSVLIAKVDCDEHKSVCSKYGVSGYPTIQWFPKGSLEPKKYEGQRTAEALTEYVNSEAATNVKIAAVPSSVVVLTEETFDSVVLDETKDVLVEFYAPWCGHCKSLAPIYEKVASVFKQDEGVVIANLDADKYTSLAEKYGVSGFPTLNFFRKGNQAGEEYESGREFDDFVKFINEKSGTSRDSKGQLTSEAGLVASLDALVKEFHSAADDKRKEILSKIEEEAAKLSGPAVKHGKIYVNVAKKILQKGSDYTKKETERLHRLLEKSISPSKADEFAIKKNILSAFSS

SEQ ID NO: 35439 - protein, 303 aa, Deinococcus radiodurans R1
MTSLPLIVSAGEALTDLVTAGGNTWHAHPGGAGWNVARACARLGVPSAFAGAVGQDNFGDDLHRESLEAGLDPRFLQRVPAPTLMAVVYSTRPPQYRFLGENSADLHFDPTRLPGGWLGAARWLHVGGISLARWPLADTLLGVIEAARAAGVRISFDPNARIAHRHPDYPAVFAAVTKRADLLKFSDEDLAFFFPGASEAQALQELRGLNPRCPIVVTRGAAGASLYHSAGRVDLPTVPVEVADTVGAGDSLCAGLLVSATERPDALWTEHLRFGLGAASVTCAHAGAYAPTREEVAALSSGK

SEQ ID NO: 35440 - protein, 411 aa, Streptococcus thermophilus CNRZ1066
MEKFNWKKIVAPIAMLIIGLLGGLLGAFILLTAAGVSFTNTTDTGVKTAKTVYTNITDTTKAVKKVQNAVVSVINYQEGSSSDSLNDLYGRIFGGGDSSDSSQENSKDSDGLQVAGEGSGVIYKKDGKEAYIVTNNHVVDGAKKLEIMLSDGSKITGELVGKDTYSDLAVVKVSSDKITTVAEFADSNSLTVGEKSIAIGSPLGTEYANSVTEGIVSSLSRTITMQNDNGETVSTIAIQTDAAINPGNSGGALVNIEGQVIGINSSKISSTSAVAGSAVEGMGFAIPSNDVVEIINQLEKDGKVTRPALGISIADLNSLSSSATSKLDLPDEVKSGVVVGSVQKGMPADGKLQEYDVITEIDGKKIGSKTDIQTNLYSHSIGDTIKVTFYRGKDKKTVDLKLTKSTEDISD

SEQ ID NO: 35441 - protein, 477 aa, Stigmatella aurantiaca
MRRAKIVCTLGPASQSQDMLEALIEAGMDVARLNFSHGSHEQHAENIAKLRAASLKLRKAVGILGDLQGPKIRTGRFITGSTVLKEGAIFSITTDESVKGNDDIVSTTYAHLAADVNPGDRILLDDGLLELKVLETDKKQLLRTQVVIGGTLKNNKGINLPGVAVRADALTPKDREDLVFGIKEGVDFLALSFVRQPADIELARQAMAEAGRQVPIVAKLEKPEAIARLDAILDKTDGVMVARGDLGVEIPPEEVPAVQKDIIRRSNQRGLPVIVATQMLNSMIENPRPTRAEASDVANAVFDGADAVMLSGETASGRYPIESVQMMDRIVLAAESAGRAQSSLGRIPDGPIGVPSHFPDVIARVACQAAQASGASLIAAFTLSGVTARLLAHYRPAVPIVAFSPNQEVRRRLALLWGVVPRVLEPIQETEAMVKRVEEELLARGLARKGERIVIVFGAPVGQPGKINSLRLHTIQG

SEQ ID NO: 35442 - protein, 351 aa, Mycobacterium leprae
MTVGFTSDIKNLLPMLAVFKPTVVVSVPRVFEKVYNTAEQNAANEGKSRIFAMAAQTAVEWSEASHRGGPGLLLRARHAVFDRLVYRKLRAALGGDCHASVSGGAPLGARLGHFYRGVGLTIHEGYGLTETSAAITLNQAGNVKVGTVGNLLPGNSMRIADDGELLVRGNVVFSGYWHNEQGTIEAFTEGWFKTGDLGAIDEDGFLTITGRKKEIIVTAGGKNVAPALLEDQLRAHPLISQALVVGDAKPFVGALITIDPEAFNGWKQRNSKAADAAIGDLTTDPDLVAEVDAAVKQANLSVSHAESIRKFRILPVDFTEQTGELTPTMKVKRNVVAQKFASDIEAIYEKD

SEQ ID NO: 35443 - protein, 250 aa, Cynodon dactylon
MERVEVLGGGSSAGQVRKKRMRRKSTGPDSIAETIKRWKEHNQKIHEDRKAPAKGSKKGCMAGKGGPENGNCAYRGVRQRTWGKWVAEIREPNRGRRLWLGSFPTALEAAHAYDEAARAMYGPTARVNFSESSADANSGCTSALSLLASNIPPASQRSDDKDEVESVETEVHEVKMEVNDDMRSVHVERKTLEVFQSEESVLRKEGDVSYDYFHVEDVLEMIIVELNAAKKIEVHEEYQDGDDGFSLFSY

SEQ ID NO: 35444 - protein, 250 aa, Cynodon dactylon
MERVEVQGGASSAGQVRKKRMRRKSTGPDSIAETIKRWKEHNQKIHEDRKAPAKGSKKGCMAGKGGPENGNCAYRGVRQRTWGKWVAEIREPNRGNRLWLGSFPTALEAAHAYDEAARAMYGPTARVNFSESSADANSGCTSALSLLASNIPPASQRSDDKDEVESVETEVHEVKMEVNDDMRSVHVERKTLEVFQSEESVLRKEGDVSYDYFHVEDVLEMIIVELNAAKKIEVHEEYQDGDDGFSLFTY

SEQ ID NO: 35445 - protein, 230 aa, Oryza sativa
MVRGKTQMKRIENPTSRQVTFSKRRNGLLKKAFELSVLCDAEVALIVFSPRGKLYEFASASTQKTIERYRTYTKENIGNKTVQQDIEQVKADADGLAKKLEALETYKRKLLGEKLDECSIEELHSLEVKLERSLISIRGRKTKLLEEQVAKLREKEMKLRKDNEELREKCKNQPPLSAPLTVRAEDENPDRNINTTNDNMDVETELFIGLPGRSRSSGGAAEDSQAMPHS

SEQ ID NO: 35446 - protein, 133 aa, Zea mays
MSATVVVSILQGAAAVLAFSRTSEFLSDGLKSYVREEDGAVILRMVGGLGVAIFCLEWVALALAFVLRYYVYVDRECGGNPMRRSAKVGGEDGAGTWPWPFQIWIHTRTILKASWARLTRYEQIGHISRARLQ

SEQ ID NO: 35447 - protein, 306 aa, Nocardioides sp. JS614
MNSPGVLVIGEALIDIVEAPSGAVAEAPGGSPLNVAVTLGRLGVPVTLATALGDDERADRIQAHLADSGVALAAGARTLDRTASARARMQSDGSALYDLDVTWDPATPDPGGATAIHAGSIALFQEPGASRVGDVLRRAPAGAMISLDPNIRPSLLPGRRRVVAQFEQLAALAHLVKLSDEDAAWLYPDLTWRQVAQHLLRLGPTLVVVTRGGQGSHLAAAGITVDRPAITSVIADTIGAGDSFMGALIRQALALGVIDRLVSRSALGSHDLVTLGDAAGLVAAVTVSRVGADPPWDWEIDAALTE

SEQ ID NO: 35448 - protein, 377 aa, Arabidopsis thaliana
MHKLRPYLLMIFLQFGAAGTYIVIMATLNQGQNRYVVIVYRNLVAALVLAPFALIFERKVRPKMTLSVLWKIMALGFLEPVLDQGFGYLGMNMTSATYTSAIMNILPSVTFIIAWILRMEKVNIAEVRSKAKIIGTLVGLGGALVMTLYKGPLIPLPWSNPNMDQQNGHTNSSQDHNNWVVGTLLILLGCVAWSGFYVLQSITIKTYPADLSLSALICLAGAVQSFAVALVVERHPSGWAVGWDARLFAPLYTGIVSSGITYYVQGMVMKTRGPVFVTAFNPLCMILVALLASFILHEQIHFGCVIGGAVIAAGLYMVVWGKGKDYEVSGLDILEKNSLQELPITTKSEDDNKLVSSISDNSNVTIPGGAHSNTSGI

SEQ ID NO: 35449 - protein, 438 aa, Synechococcus sp. CC9605
MASADATQTANGGALLVRWQGLIAPDQAVLKRLESLAGLLLLVLLTGLPLFSRTGLALVVTACGALWLLWCLCSPPHERIGTISRWLMLFLAIAIVATGCSPVPIAASKGLIKLLSYLGVYALLCKLLLSNSRWWDRLVAGLLSGGLLSSVLALRQLYASSEELARWADPNSISAGTIRIYGPLGNPNLLAGYLLPLIPFAAIALVRWRGVGAQLFAGTTLVLAPTATLFTYSRGGWLGMVAAGAVLLLLLLLRWTRHWPPLWRRLVPLAMLLVGAACLVVAATQIDPIRTRITSLLAGRGDSSNNFRINVWMAAIQMVQDRPWLGIGPGNAAFNSIYPLYQQPKFNALSAYSVPLEILVETGIPGLLACLGLLATSLRQGLLQLNANGSSALTSIASLAAIAGLLMQGSTDTIFFRPEVQLIGWFALASLVSQPMKS

SEQ ID NO: 35450 - protein, 262 aa, Chromobacterium violaceum ATCC 12472
MSRIANCFAELAGKKALIPFITAGDPHPGLTVSLMHGLVDGGADIIELGVPFSDPMADGPVIQRASERALKHKVGLRHVLEMVAEFRRDNATTPVVLMGYLNPLCAMGYTEFASRAKAAGVDGVLTVDCPPEEAAELESALDAHGLDTVFLVAPTTPPSRVAEIAKLARGYVYYVSLKGVTGAGHLDIEDVARKIAALRQQLPLPIGVGFGIRDAATAKAIAAAADAVVVGSRLVQEIEAATPETAREQLTRLVAELKAAIR

SEQ ID NO: 35451 - protein, 492 aa, Prunus persica
MDPYKYRPSSAFDSPFWTTNSGAPVWNNNSSLTVGSRGPILLEDYHLVEKLANFDRERIPERVVHARGASAKGFFEVTHDISQLTCADFLRAPGVQTPVIVRFSTVIHERGSPETLRDPRGFAVKFYTREGNFDLVGNNFPVFFVRDGMKFPDMVHALKPNPKSHIQEPWRILDFFSHHPESLHMFTFLFDDLGVPQDYRHMEGSGVNTYTLINKAGKAQYVKFHWKPTCGVKCLLEDEAIKVGGANHSHATKDLYDSIAAGNYPEWKLYIQTIDPDHEDRFDFDPLDVTKTWPEDILPLQPVGRLVLNKNIDNFFAENEQLAFCPAIVVPGVYYSDDKLLQTRIFSYSDTQRHRLGPNYLQLPVNAPKCSHHNNHHEGFMNFMHRDEEVNYFPSRYDPVRHAERFPIPPNILSGKREKCIIEKENNFKQPGERYRSWAPDRQERFIHRWVDALSDPRVTHEIRSVWISYWSQADKSLGQKLASRLNVRPSI

SEQ ID NO: 35452 - protein, 516 aa, Zea mays
MAAAMVRTMSTTAAGTPPVSVATINPKLVWVALICDRIAGRLKVSISVLKCEYAVRGEIVTHAQNLQQELQKNPESLPFDEILYCNIGNPQSLGQQPVTYFREVLSLCDHPALLDKSETHALYSSDAIERAWQILEKIPGRATGAYSHSQGIKGLRDEIAAGIAARDGFHASGDNIFLTDGASPAVHMMMQLLISSESDGILCPIPQYPLYSASIALHGGSLVPYFLNEETGWGLDVDELKKQLEEARSKGITVRALVVINPGNPTGQVLVEENQKKIVEFCKNEGLVLLADEVYQENIYVEDKPFHSFKKIARSLGYTDDDLPLVSFQSVSKGYYGECGKRGGYMEITGFSPDVREQIYKVASVNLCSNVSGQILASLVMNPPKAGDESFESFMSERDGILSSLARRAKALEEAFNSLEGITCNKAEGAMYLFPRLHLPQKAIGAAQAVGTAPDAYYAKRLLEATGIVVVPGSGFGQVPGTWHFRCTILPQEDKIPAIVSRLKEFHEKFMDEFRD

SEQ ID NO: 35453 - protein, 214 aa, Arabidopsis thaliana
MVSLKLQKRLAASVMKCGKGKVWLDPNESSDISMANSRQNIRKLVKDGFIIRKPTKIHSRSRARKMKIAKMKGRHSGYGKRKATREARLPTKVLWMRRMRVLRRLLKKYRETKKIDKHMYHDMYMRVKGNVFKNKRVLMESIHKSKAEKAREKTLSDQFEAKRAKNKASRERKHARREERLAKSPGGDVAPVAAPAPAATPAPTAAVPKKKSKK

SEQ ID NO: 35454 - protein, 492 aa, Prunus persica
MDPYKHRPSSAFDSPYWTTNAGAPVWNNDSSLTVGPRGPVLLEDYHLVEKLATFDRERIPERVVHARGASAKGFFEVTHDISQLTCADFLRAPGVQTPVIVRFSTVIHERGSPETLRDPRGFAVKFYTREGNFDLVGNNFPVFFVRDAMKFPDAIRAFKPNPKSHIQETWRILDFFSHLPESLHTFAFFYDDLGVPQDYRHMEGSSVHAYTLISKAGKVHYVKFHWKPTCGVKCLLEDEAIKVGGANHSHATKDLYDSIAAGNYPEWKLYIQTMDPDHEDRFDFDPLDLTKTWPEDILPLQPVGRLVLNKNIDNFFAENEQLAFNPAHVVPGIYYSDDKVLQTRIFAYSDTQRHRLGPNYLQLPVNAPKCPHHNNHHEGFMNFMHRDEEVNYFPSRHDPVRHAERYPIPSNILSGKREKCVIEKENNFKQPGERYRSWAPDRQERFIRRWVDALSDPRVTHEIRSIWISYWSQADKSLGQKLLSRLNVRPSI

SEQ ID NO: 35455 - protein, 463 aa, Bacillus cereus G9241
MQHTNKSGTLNRGLKERHITLMSLGSAIGVGLFLGSASAIKLAGPSILLGYMIAGLVIFFIMRALGEMAIEQPVAGSFSKYAYDYLGPLAGYITGWNYWFLWVVTCMAEITAAGIYMQYWFPDIPCWTWALLALLLMSAFNFLSVKVFGELEFWFALIKIVTIICMIVVGAGIILFGFGNGGIATGISNLWSHGGWFPNGFSGLLLSMQMVLFAYLGVELIGVTAGEAQNPKKTLAKAIDNVFWRILLFYVGALFVMMAIYPWNELGEKGSPFVLTFQQIGIAKAAGIINFVVLTAALSSCNGGLFSTGRMLYTLAQQKKAPERFGRLNKNGIPSQGIIATAIVLLVGVILNYLVPAKVFTWLTSISTFGAIWTWGIILVAQIKFRKSLPAQNKQKLSYKMPLYPISSYFSLAFLALVLCIMAYSEDTRIALIVGPIWLIGLAIVYYMKGFHKIDETPNSKIS

SEQ ID NO: 35456 - protein, 466 aa, Frankia sp. EAN1pec
MAAHFDLVVLGGGPGGYVAAIRAAQLGLSVAVVEEKYWGGVCLNVGCIPSKALLRNAELAHLFAHEAKTFGISGEVSFDFGAAFDRSRQVAEGRVKGVHFLMKKNKITEFTGRGTFRDPNTLDVALSAGGTDQVSFDHAIIATGSRVRLLPGVELSDNIVTYETQILTRELPRSMAIVGAGAIGMEFAYVLRNYGVDVTIIEFLDRALPNEDADVSKEIVRQYKKLGVPILTSTKVETVTDNGSSVTVEYTGKDGARGSLEVDKVLMSIGFAPNVEGFGLENTGVALTDRGAIAIDDHMRTNVEHIYAIGDVTAKLMLAHVAEAQGVVASETIAGAETVMLGDYRMMPRATFCQPQVASFGLTEAQAREEGHDIKVAKFPFTANGKAHGLGDPNGFVKLISDTKYGELLGGHLIGPDVSELLPELTLAQKWDLTALELARNVHTHPTLSEALQEAIHGLAGHMINL

SEQ ID NO: 35457 - protein, 112 aa, Glycine max
MAGLQRSAVSFRRQGSSGFVWDDRFLQEELNKVKEDHNNNNNHDHDNDDGGEIKELQVQTTPPLQRIRSNGGARGYRTGKVSPAIEPPSPRLSACGFCAAFGKAGDNKHRPR

SEQ ID NO: 35458 - protein, 490 aa, Ralstonia solanacearum
MTRQTMARSAVGLAAVLAVAGGYAYLQKDVMTRAVAAPLAASATAQTSAAPMAVAVPMDFSAIVERYGPAVVNISTTARAQRTSIQGLPPGVSPDDPFAEFFRRFMPQAPQQQGDQVVKGLGSGFIVSPDGLILTNAHVVDGAQEVSVKLTDRREFKAKVLGVDKQSDVAVLRIAASNLPTVQIGSPAGTKVGEPVLAIGSPYGFENTVTAGIVSAKSRSLPDDTYVPFIQTDVAVNPGNSGGPLFNQRGEVIGINSQIYSQTGGYQGLSFAVPIDVAMKVEQQLVATGKVTRGRLGISVQEVDQSLADSFNLPKPEGALVNAVEKDGPAAKAGLQPGDVILQIGDVHIGHSGDLPEQVAEIKPGSTVPLQIIRHGKPTALSVTVGEAKDAKVAANTSAAPDKGRLGLAVRPLQAEEKRQSGLPGGLVVMDSSGPAAKAGIQPGDVILSLNGTPVSSAQELRALVDRAGKHVALLVQRDDAKIFVPLDLG

SEQ ID NO: 35459 - protein, 488 aa, Triticum aestivum
  misc_feature (290)..(290): Xaa can be any naturally occurring amino acid
  misc_feature (403)..(403): Xaa can be any naturally occurring amino acid
  misc_feature (407)..(407): Xaa can be any naturally occurring amino acid
  misc_feature (416)..(416): Xaa can be any naturally occurring amino acid
  unsure (1)..(488): unsure at all Xaa locations
MVISHASSSAGEAVYSTFSSRYVREELPRYRMPEGSIPKEAAYQIISDELMLDGNPRLNLASFVTTWMEPECGKLMMDSVNKNYVDMDEYPVTTELQNRCVNMIAHLFNAPIGEDETAIGVSTVGSSEAIMLAGLAFKRKWANKMKEQGKPCDKPNIVTGANVQVCWEKFARYFEVELKEVKLTEGYYVMDPKKAVEMVDENTICVAAILGSTLTGEYEDVKLLNDLLVAKNKETGWDVPIHVDAASGGFIAPFLQPELEWDFRLPLVKSINVSGHKYGLVYPGVGWVIXWRSKADLPDELIFHINYLGTDQPTFTLNFSKGASQIIAQYYQLIRLGFEGYKHIMENCKLNAAVLKEGIDATGRFDVLSKADGVPLVAIRLKDSTNFSVFDISENLRRFGWIXPAYXMPADAEHVXVLRIVIREDFNRSLAQRLLADINKIVGELDAHAIHAIKLSTAAAAEGASKSTVDAVTEAFKGLAGNKKAGVC

SEQ ID NO: 35460 - protein, 545 aa, Arabidopsis thaliana
MGNCNACVRPDSKESKPSSKPKKPNRDRKLNPFAGDFTRSPAPIRVLKDVIPMSNQTQISDKYILGRELGRGEFGITYLCTDRETHEALACKSISKRKLRTAVDIEDVRREVAIMSTLPEHPNVVKLKASYEDNENVHLVMELCEGGELFDRIVARGHYTERAAAAVARTIAEVVMMCHSNGVMHRDLKPENFLFANKKENSPLKAIDFGLSVFFKPGDKFTEIVGSPYYMAPEVLKRDYGPGVDVWSAGVIIYILLCGVPPFWAETEQGVALAILRGVLDFKRDPWPQISESAKSLVKQMLDPDPTKRLTAQQVLAHPWIQNAKKAPNVPLGDIVRSRLKQFSMMNRFKKKVLRVIAEHLSIQEVEVIKNMFSLMDDDKDGKITYPELKAGLQKVGSQLGEPEIKMLMEVADVDGNGFLDYGEFVAVIIHLQKIENDELFKLAFMFFDKDGSTYIELDELREALADELGEPDASVLSDIMREVDTDKDGRINYDEFVTMMKAGTDWRKASRQYSRERFKSLSINLMKDGSLHLHDALTGQTVPV

SEQ ID NO: 35461 - protein, 1098 aa, Saccharomyces cerevisiae
MALIVASLFLPYQPQFELDTSLPENSQVDSSLVNIQAMANDQQQQRALSNNISQESLVAPAPEQGVPPAISRSATRSPSAFNRASSTTNTATLDDLVSSDIFMENLTANATTSHTPTSKTMLKPRKNGSVERFFSPSSNIPTDRIASPIQHEHDSGSRIASPIQQQQQDPTTNLLKNVNKSLLVHSLLNNTSQTSLEGPNNHIVTPKSRAGNRPTSAATSLVNRTKQGSASSGSSGSSAPPSIKRITPHLTASAAKQRPLLAKQPSNLKYSELADISSSETSSQHNESDPDDLTTAPDEEYVSDLEMDDAKQDYKVPKFGGYSNKSKLKKYALLRSSQELFSRLPWSIVPSIKGNGAMKNAINTAVLENIIPHRHVKWVGTVGIPTDEIPENILANISDSLKDKYDSYPVLTDDDTFKAAYKNYCKQILWPTLHYQIPDNPNSKAFEDHSWKFYRNLNQRFADAIVKIYKKGDTIWIHDYHLMLVPQMVRDVLPFAKIGFTLHVSFPSSEVFRCLAQREKILEGLTGADFVGFQTREYARHFLQTSNRLLMADVVHDEELKYNGRVVSVRFTPVGIDAFDLQSQLKDGSVMQWRQLIRERWQGKKLIVCRDQFDRIRGIHKKLLAYEKFLVENPEYVEKSTLIQICIGSSKDVELERQIMIVVDRINSLSTNISISQPVVFLHQDLDFSQYLALSSEADLFVVSSLREGMNLTCHEFIVCSEDKNAPLLLSEFTGSASLLNDGAIIINPWDTKNFSQAILKGLEMPFDKRRPQWKKLMKDIINNDSTNWIKTSLQDIHISWQFNQEGSKIFKLNTKTLMEDYQSSKKRMFVFNIAEPPSSRMISILNDMTSKGNIVYIMNSFPKPILENLYSRVQNIGLIAENGAYVSLNGVWYNIVDQVDWRNDVAKILEDKVERLPGSYYKINESMIKFHTENAEDQDRVASVIGDAITHINTVFDHRGIHAYVYKNVVSVQQVGLSLSAAQFLFRFYNSASDPLDTSSGQITNIQTPSQQNPSDQEQQPPASPTVSMNHIDFACVSGSSSPVLEPLFKLVNDEASEGQVKAGHAIVYGDATSTYAKEHVNGLNELFTIISRIIED

SEQ ID NO: 35462 - protein, 472 aa, Mesorhizobium loti MAFF303099
MAAVRDLKATEMAASGGDDAIELGKRHLIQPWPYAGSVGAEARALIGEGDGIYITDNTGKRLIDGPAGMWCVNVGHRREELARVMYDQAMALSYNTPWYTMNAPSAELAMRIAGHAPDDLSHVFYTTGGSSAVETALRFMQFYNNVRGRPEKKLILSRGGAYHGSTYLSASLNGRPRDRDWMDGADELVIKLSSPDPFRRPQGMSLAAFTDFLVDQFRDTVARVGADKIGAFVGEPVQASGGVVIPPDGYLKRIREICRVNDILYVSDEVVTGFGRLGHVFASGDVFGIDPDMITFAKGVTSGYFPLGGVIISERLLQELRRSNHPDAMFGHGLTYTSHPVGCAVALKNLDLLEESVLAHTQAVAPYFQAQLKTLEELPLVGEVRGAGLMGCVECVADRESKNPLQLDKDVGKRIDAHCHELGLLVRPLINMCVMSPPLIITREQIDDMVGILREGISRTMDDLWKEGVWRG

SEQ ID NO: 35463 - protein, 357 aa, Zinnia elegans
MDTMNQSSCTVPPGFRFHPTDEELVGYYLRKKVASQKIDLDVIKDIDLYRIEPWDLIERCRIGYEEQNEWYFFSHKDKKYPTGTRTNRATMAGFWKATGRDKAVYEKLRLIGMRKTLVFYKGRAPNGQKTDWIMHEYRLESEENGPPQEEGWVVCRAFKKRATGQTRTTPAWESNYFLDESSLLTSTMDDYTTIQPSNIPLTSSFMCKQELEASENLNFIHCDQFIQLPHLESPSLQSIKRPISSILYEHDQQEDDQITKRITNNVRSKDEVRDWRDLDKFVASQLSQEEEIRCVEEGFSTNFQENIDHSTSLSHMFNYQDGIEEYSGCDKGGKLNGFLSSTSSDHFDVGICIFDKL

SEQ ID NO: 35464 - protein, 389 aa, Pseudomonas aeruginosa
MPKALRFLGWPVLVGVLLALLIIQHNPELVGLPRQEVHVEQAPLLSRLQEGPVSYANAVSRAAPAVANLYTTKMVRKPSHPLFDDPMFRRFFGDNLPQQKRMESSLGSAVIMSAEGYLLTNNHVTAGADQIIVALRDGRETIAQLVGSDPETDLAVLKIDLKNLPAMTLGRSDGIRTGDVCLAIGNPFGVGQTRDHGHHQRHRTQPARPDTYEDFIQTDAAINPGNSGGALVDAAGNLIGINTAIFSKSGGSQGIRSPSRPSWTLEVMQSIIEHGQVIRGWLGVEVKALTPELAESLGLGETAGIVVAGRLSRGPAARGGLLPGDVILTIDKQEASDGRRSMNQVARTRPGQKISIVVLRNGQKVNLTAEVGLRPPPAPAPQQKQDGGE

SEQ ID NO: 35465 - protein, 81 aa, Zea mays
QTDELANGMEKVAVSEPEKHGHNEEEHEVVGEEKEGLLAKLHRTSSRSRSSGDEEEEAVGGDSEVIGRKKKEMGLEERLEE

SEQ ID NO: 35466 - protein, 500 aa, Oryza sativa (indica cultivar-group)
  misc_feature (214)..(214): Xaa can be any naturally occurring amino acid
  unsure (1)..(500): unsure at all Xaa locations
MDPYKHRPSSSFNGPLWSTNSGAPVWNNNNSLTVGSRGPILLEDYHLVEKLANFDRERIPERVVHARGASAKGFFEVTHDITPHLRRLPPRPGRPDPGHRPLLHRHPRARQPGDPPRPAWLRHQVLHPGGQLGPRRQQLPRLLHPRRHEVPGHGALAQAQPQVARPGELAHPRLLLPPPGEPPHVHLPLRRHRHPRRLPPHGRFRRQHLHARHXAGKSHYVKSTWKPTCGVKSLLDDEAVTVGGTNHSHATQDLYDSIAAGNFPEWKLFIQTIDPDHEDRFDFDPLDVTKTWPEDIVPLQPVGRMVLNPQHPTTFFSENEQLALRAAGVLPRGSWGPGDLLAPDDKPLQERGIFSYSDTQRHRLGPNYLLLPPNAPKCAHHNNHYDGFMNFMHRDEEVDYFPSRYDPAKHAPRYPIPSATLTGRREKVVIAKENNFKQPGERYRSWDPARQDRFIKRWIDALSGPRLTHEIRSIWLSYWSQADRSLGQKLASRLSAKPSM

SEQ ID NO: 35467 - protein, 205 aa, Oryza sativa (japonica cultivar-group)
MSWLGKLGLGGLGGSPRASAASAALAQGPDEDRPAAGNEFAQFGAGCFWGVELAFQRVPGVTRTEVGYSQGNLHDPTYEDVCTGATYHNEVVRVHYDVSACKFDDLLDVFWARHDPTTPNRQGNDVGTQYRSGIYYYTPEQEKAARESLEKQQKLLNRTIVTEILPAKRFYRAEEYHQQYLAKGGRFGFRQSAEKGCNDPIRCYG

SEQ ID NO: 35468 - protein, 237 aa, Oryza sativa (japonica cultivar-group)
MGRGKIVIRRIDNSTSRQVTFSKRRNGLLKKAKELSILCDAEVGLVVFSSTGRLYEFSSTNMKTVIDRYTNAKEELLGGNATSEIKIWQREAASLRQQLHNLQESHKQLMGEELSGLGVRDLQGLENRLEISLRNIRMRKDNLLKSEIEELHVKGSLIHQENIELSRSLNVMSQQKLELYNKLQACEQRGATDANESSSTPYSFRIIQNANMPPSLELSQSQQREGECSKTAAPELG

SEQ ID NO: 35469 - protein, 139 aa, Pasteurella multocida subsp. multocida str. Pm70
MAVERTLSLIKPDAVKRHLIGAILSRFEQAGFRVVAAKMLHLTQAQAEGFYAEHQDKAFFPELVAYMISAPVLALVLEKENAVKDYRTLIGATNPAVAAEGTIRRDFAIDGRHNSVHGSDSLDSAKREIAYFFVESEIF

SEQ ID NO: 35470 - protein, 228 aa, Geobacter sulfurreducens PCA
MLSAVIFDFDGIIVDTEPLHYRAFQAILEPIGFGYSWEAYVDVYMGYDDRDAFREAFRVRGADLEDRELEGLIARKAAAFQEIIASGVTPYPGVVELIRNIKANHPVALCSGALRSDILPILEGLGLSGIFDVMVTADEVSASKPDPASYALAVRRLTAAFPNRQIRPETCIAIEDTPAGIASATGAGIGVLAVTNSYPAVRLGGARRVVDSLADVGLADLAALAGQE

SEQ ID NO: 35471 - protein, 420 aa, Glycine max
MASLPLGHHHHHHKPAAAAIHPSQPPQSQPQPEVPRRSSDMETDKDMSATVIEGNDAVTGHIISTTIGGKNGEPKETISYMAERVVGTGSFGVVFQAKCLETGEAVAIKKVLQDRRYKNRELQLMRLMDHPNVISLKHCFFSTTSRDELFLNLVMEYVPESMYRVIKHYTTMNQRMPLIYVKLYTYQIFRGLAYIHTALGVCHRDVKPQNLLVHPLTHQVKLCDFGSAKVLVKGESNISYICSRYYRAPELIFGATEYTASIDIWSAGCVLAELLLGQPLFPGENQVDQLVEIIKVLGTPTREEIRCMNPNYTEFRFPQIKAHPWHKVFHKRMPPEAIDLASRLLQYSPSLRCTALEACAHPFFDELREPNARLPNGRPLPPLFNFKQELAGASPELINRLIPEHIRRQMGLSFPHSAGT

SEQ ID NO: 35472 - protein, 532 aa, Mesorhizobium sp. BNC1
MIFRFFRIVAAASSLILLYLGERRRGVGADASALPVRLRQMLDELGGSFIKIGQALSMRPDLFPEAYLRQLRDLREHARPFSAQEARAELENAMRRPLDEVFRTFESEPFAAASIAQVHRATLTDGQDVIVKIRRPHMRERIDGDMRILVGVARLAGVAVPGLRRFQPARLAREIWANLRRETDLLQEARNIRRFREAYKQRADVYVPAAFEALCSEAILVQVMSHGRSIEDPAVVQDGPRIAGVLVDFYLEQLLKTGLFHGDPHPGNLFVMEDGRICFHDFGLVGYLDRTTRRNLGIFLQAFVQQDAGWMLDAAIALSLIDRQAERTLFVQGIEEILSDYSSLPLKDWSIADAFLRVMRLGDGAHVVVPYNLMVFVRALFLIEGCLRRLDPDFNVLDTLIAKGEAAVAHTLGGRPDRAAMARLKTELALSAEDLPALLASWLHRAHQDGGDLALGLRVHHSDETERRLDRRAVLAALALLSVGILVTSALLAEARVGPDVLGLPVAALIGFVVAIWLCLRVLGLVSSLWRR

SEQ ID NO: 35473 - protein, 162 aa, Arabidopsis thaliana
  misc_feature (133)..(133): Xaa can be any naturally occurring amino acid
  unsure (1)..(162): unsure at all Xaa locations
MVAISEIKSTVDVTAANCLMLLSRVGQENVDGGDQKRVFTCKTCLKQFHSFQALGGHRASHKKPNNDALSSRLMKKVKTSSHPCPICGVEFPMGQALGGHMRRHRNESGAAGGALVTRALLPEPTVTTLKKSXSGKRVACLDLSLGMVDNLNLKLELGRTVY

SEQ ID NO: 35474 - protein, 250 aa, Glycine max
MAKTYPVVSAEYQEAVEKARQKLRALIAEKNCSPLMLRLAWHSAGTFDVSSKTGGPFGTMKKPAEQAHAANAGLDIAVRMLEPIKEEIPTISYADLYQLAGVVAVEVSGGPVIPFHPGREDKPQPPPEGRLPDATKGSDHLRQVFGKQMGLSDQDIVALSGGHTLGRCHKERSGFEGPWTRNPLKFDHSYFTELLSGDKEGLLQLPSDKTLLTDPVFRPLVEKYAADEKAFFEDYKEAHLRLSELGYAEA

SEQ ID NO: 35475 - protein, 214 aa, Glycine max
  misc_feature (78)..(78): Xaa can be any naturally occurring amino acid
  misc_feature (153)..(153): Xaa can be any naturally occurring amino acid
  misc_feature (201)..(201): Xaa can be any naturally occurring amino acid
  misc_feature (206)..(206): Xaa can be any naturally occurring amino acid
  unsure (1)..(214): unsure at all Xaa locations
MAVSAITGARLTLGIGLAIPLSSPTRSRTVAMAVSVDPKTDNKLTLTKSEEAFAAAKVRMTSLFLPSFLLSILIFDFXFQELMPGGVNSPVRAFKSVGGQPIVIDSVKGSRMWDIDGNEYIDYVGSWGPAIIGHADDQVLSALVETMKKGTSXGAPCLLENTLAELGINAVPSIEMVRFVNSGTEACIGAQRLARAYTGRXKIIKXEGCYMAML

SEQ ID NO: 35476 - protein, 1626 aa, Nostoc punctiforme PCC 73102
MMNQPNAFDSLDEIAIVGMNGRFPRAKNIEQFWQNLRDGVESISFFSDEELLSSRIDPATLSQPQYVKAGSVLEDIELFDASFFDFSAKEAQITDPQHRLFLECAWEALESAGYNSEIYAGRIGVYAGASLNTYFLTNLYTQPKIIESVGSYRISIGNSPNFLPTYVSYKLNLKGPSLNVQTACSTSLVAVHLACQSLLNGESDIALAGGVSIQVPHKTGYRYQQGGIMSPDGHCRAFDAKAQGIISGNGVGIVVLKRLEDALADGDCIHAVIKGSAINNDGSLKVGFTAPSVDGQAKVIAEALAMARVESETISYVETHGTGTVLGDPIEIASLTQAFRPTDKKNFCAIASVKTNIGHLDAAAGVAGLIKTVLALKHQQIPPSLHFEQPNPQIDFANSPFYVNDKLSEWKSNGTPRRAGVSSFGIGGTNAHVILEEAPVWEQGRQRRQGRKYHLLVISAKTKSALETATANLANHLKQHLELNLADIAYTLGVGRRGFSDRRILVCQNLNDAVTVLETPVSERVFTKFTEPSGQQIAFMFPGQGTQYVNMGRELYETEIIFRKQVDYCCEFLKSYLKLDLRTLLYPHQQTEALTQQLQQTHITQSAVFVVEYALAQLWMAWGVRPNAMIGHSIGEYVAACIAGVFSLEEALILVANRGQLMQQLPSGTMMAVSLPEKKIQPMLGKKLSLAAINAPDMCVVSGLEEAVDDLQKRLIDQGVDCHRLHTSHAFHSSMMDSILLPFQEQVSKISLNSPKIPFVSNVTGTWITPAQATDPKYWARHLRQTVRFSEAIAELLQQPKRILLEVGPGRTLSTLANKQKAAQQVILSSLRHPQNQQSDVAFLLNTLGRLWLEGINVDWSEFYADEERHRIPLPTYPFERKRYWIEPILANDDNLSPKNEILVSQPEDIITNSIKVPDTQIVNQPIANTAIEQIISQHLQVMSKLVDLLPQGSLAREVLPSLGAIHQDGQIAQTSTNGSAFSGNQSTFTKAESEQQIKDRKINPTPKAASQQIEKESMMLSPRQQRHLDSLIAHFVKRTQESKRLTQAYRSCHANSRAVSGFFPFIKEMIYPIHAERGEGARLWDVDGNEYVDISMGFGTLLFGHSPSFAIAAIQEQSKQGILNGPQSRFAGQLAELICELTGAERTAFCNDGTEAVMAAVRIARSVTGRSKIALFAGSYHGGSDGVLVKGVRTNDGTLRSVPMTSGIPSSLAEDVMVLEYGTPESLNILKDNAHNLAAILVEPIQSSRPDFQPKEFLFQLRQLTQETGTVLIFDEVVTGFRMHPGGVQALWGIQADITTYGKAVAAGIPIGVVAGKAVFMDALDGGMWNYGDESYPQVKTTFFAGTFFKHPLIMGVAWATLNHIKNSGSKLQEELNQRTTQLAETLNSYFEQKQVPIRVVNFGSLFRFNCQTQLGNLFFYHLLAKGIYVWEGRTLYLSTAHTDKDVEQVISAVKESVVEMQAGGFFTSEQTSKNSGQTSANQTLTGSSLNLATESLSVTSNVKSADELFENLIEQIPNALGNTYAASRKKIEKTIADIWQELFGFDNVNIHDNFFELGGDSLTALQAISLLNKKLDLDIPIESIYEAPTINSLTNIVCPEQNEILSAKQSISRGQRRREKRNQR

SEQ ID NO: 35477 - protein, 593 aa, Zea mays
MDTAIGSVPAASDAARHPAPSASAPRDATLGRHLARRLAEVGARDVFTVPGDFNLTLLDELEAEPGGVRLVGCCNELNAAYAADGYARARAGGVGACAVTFTVGGLSAINGVAGAFSENLPVVCIVGGPNSNDYGSNRILHHTIGLPDFTQELRCFQNVTCYQAVVNNLEDAHEQIDTAISTAIKESKPVYISISCNLPSIPHPTFSRHPVPFFLSPRLSNQMNLEAAVEAAAAFLNKAVKPVLVGGPKMRVSKAWEALAELADACGYPVAVMPSAKGLVPEHHSRFIGTYWGAVSTPFCAEIVESADAYLFAGPVFNDYSSVGYSLLLKKEKAIIVQPERVVVGHGPAFGCVLMKDFLHALATRLKKNTAAYENYRRIYVPLGEPLPSEPGEPLRVNVLFKHIQAMLSGDTAVIAETGDSWFNCQKLKLPEGCGYEFQMQYGSIGWSVGATLGYAQAAKDKRVIACIGDGSFQVTAQEVSTMLRWGHNSIIFLINNGGYTIEVEIHDGPYNVIKNWNYTGLVEAFHNGEGACYTAKVRTEEELTEALEAALGPKKDCLCFIEVIVHKDDTSKELLEWGSRVSAANSRPPNPQ

SEQ ID NO: 35478 - protein, 471 aa, Bacillus cereus G9241
MNQQVEQTDLKRTMKSRHLFMIALGGVIGTGLFMGSGQIVHNAGPGGAILAFLVGGFVMYLTMLCLGELSVAMPEAGSFQSYASKFISPGFGFVVGWMYWLNWAVTVGVELTTVSILMKRWFPDVSSWIWCVTFAAALFLVNALSAKAYAEAEFWFASVKVATIVVFIVLGGAVMFGLLDFNGKPAPMLHNFTENGGLFPNGALAVLLTMITVNYSFQGTELIGIASGESENPEKTIPKAIKNTIWRTLFFFVLAISVVVGLLPWQEANLVESPFVLVFDVAGVPYAADIMNFVIITAVLSVANSGLYANSRMLWAMAKQGMASPAFTKLTKKGVPLNALIFSLIFASLSLLTSVFAADTVFLVLTSIAAMAAVVVWMSIAASQFFFRRNFVKNGGDINDLKYRTPLYPLVPIVAFSLNFITFVSLAFIPDQRIALYCGIPFMVICYILYQVKYKKIVTFEQQQTIPQEIN

SEQ ID NO: 35479 - protein, 465 aa, Zea mays
MALLRLLAFSLLFAVATPVRDIADDACSSQVKGFQHLNNSSGLHLTLHHPQSPCSPAPLPADLPFSAVLAHDGARIASLAARLAKTPSSRPTLLDESRAGSSSSSPDDESSLASVPLGPGTSVGVGNYVTRMGLGTPAKSYVMVVDTGSSLTWLQCSPCVVSCHRQSGPVFNPKASSSYASVSCSAQQCSDLTTATLNPASCSTSNVCIYQASYGDSSFSVGYLSKDTVSFGSTSVPNFYYGCGQDNEGLFGQSAGLIGLARNKLSLLYQLAPSMGYSFSYCLPTSSSSSGYLSIGSYNPGQYSYTPMASSSLDDSLYFIKMTGIKVAGKPLSVSSSAYSSLPTIIDSGTVITRLPTGVYSALSKAVAGAMKGTPRASAFSILDTCFQGQAARLRVPEVTMAFAGGAALKLAARNLLVDVDSATTCLAFAPARSAAIIGNTQQQTFSVVYDVKNSKIGFAAAGCS

SEQ ID NO: 35480 - protein, 231 aa, Leccinum variicolor
  misc_feature (133)..(141): Xaa can be any naturally occurring amino acid
  unsure (1)..(231): unsure at all Xaa locations
AVNDPFIDLDYMVYMFKYDSVHGRFKGDVHAKDGKLYINGKAITVYAERNPSDIKWGSVGAEYIVESTGVFTTIEKAAAHLKGGAKKVIISAPSADAPMFVCGVNLDKYDSKYTVISNASCTTNCLAPLAKVXXXXXXXXXGLMSTIHATTATQKTVDGPSAKDWRGGRAVNGNIIPSSTGAAKAVGKVIPALNGKLTGLAFRVPTNDVSVEDLVVRLEKSASYDDIKAAF

SEQ ID NO: 35481 - protein, 232 aa, Zea mays
  misc_feature (2)..(2): Xaa can be any naturally occurring amino acid
  misc_feature (10)..(10): Xaa can be any naturally occurring amino acid
  misc_feature (219)..(219): Xaa can be any naturally occurring amino acid
  unsure (1)..(232): unsure at all Xaa locations
GXAERGELAXESVRLRAELKKGATGLPFPEVISANIGNSQQLDQKPITFFRQVLSLLENPQLLEHEDVLLEKLGYKSDVIARAKWLLSEVSSVGAYSASSGVSGIKESIARFLERRDGIPADPKHIYLSAGASSGVNTLLHIICANKNSGVLVPIPQYPLYTASLSVLDAVCVPYLLDESKAWGTDLDIMRASYEKAKADGVDTRALVVINPGNPTGAXLSEADVRATIQFA

SEQ ID NO: 35482 - protein, 391 aa, Bacillus cereus G9241
MDVAKELVLSKDQLVEWRRHFHKYPELSFQEEKTSQFVFDILREIPCLEVSRPTKYSVMARLIGKQPGKIVAVRADMDALPIHEENEFDFISTYPGVMHACGHDGHIAILLGVVHKLVEAREKIKGEIRFLFQHAEENFPGGAEEMVAAGVMEGVDYIIGAHLWASLEVGKVGVIYGPAMAAPDVFKIIIEGKGGHAGIPHETVDSIAIGTQVISQLQQIVSRLTNPLDSLVVSVTQFHAGTTHNVIPEQAEIEGTVRSLRHELREETEKRIEQIVKHVTEAYGAKYTFSYEYGYRPVVNDYEVTEIIEQTALQLYGRERVTRLQPTMAGEDFSAFLQKAPGTFFFIGAGNKEKGIIYPHHHPRFTIDEDALPIGVQVFVSSIMNFISKGE

SEQ ID NO: 35483 - protein, 282 aa, Leccinum variicolor
  misc_feature (136)..(153): Xaa can be any naturally occurring amino acid
  unsure (1)..(282): unsure at all Xaa locations
AVNDPFIDLDYMVYMFKYDSVHGRFKGDVHAKDGKLYINGKAITVYAERNPSDIKWGSVGAEYIVESTGVFTTIEKAAAHLKGGAKKVIISAPSADAPMFVCGVNLDKYDSKYTVISNASCTTNCLAPLAKVINDXXXXXXXXXXXXXXXXXXQKTVDGPSAKDWRGGRAVNGNIIPSSTGAAKAVGKVIPALNGKLTGLAFRVPTNDVSVVDLVVRLEKSASYDDIKAAFKEASESPELKGIIDYTDEAVVSTDFTGNPASSIFDASGGIMLNPNFVKLIA

SEQ ID NO: 35484 - protein, 213 aa, Brucella suis 1330
MADLPDSLLAGYKTFMSEHFAHETARYRDLAEKGQSPETLVVACCDSRAAPETIFNAAPGEIFVLRNVANLIPPYEPDGEYHAASAALEFAVQSLKVKHIVVMGHGRCGGIKAALDTESAPLSPSDFIGKWMSLISPAAEAISGNALMTQSERHTALERISIRYSLANLRTFPCVDILEKKGKLTLHGAWFDISTGELWVMDHRTGDFKRPEL

SEQ ID NO: 35485 - protein, 245 aa, Oryza sativa
  misc_feature (200)..(200): Xaa can be any naturally occurring amino acid
  misc_feature (213)..(213): Xaa can be any naturally occurring amino acid
  unsure (1)..(245): unsure at all Xaa locations
MPSRTAPFISRLRLLRTAAALSPFSSSAPPRHSPRILRAIPVGAPHPPRVSAAVSPLVRPVAAGFALFSMATAASSAASVHDFTDYAFWCLQDASGKDVDLSTYKGKVLLIVNVASQCGLTNSNYTELSQLYEKYKDQGFEILAFPCNQFGGQEPGTNEEIVQFACTRFKAEYPIFDKVDVNGDNTAPIYKFLKSSKGGXLFGDNIKWNFSRXLVDKEGRVVQRYAPTTSPLSMEKDIKKLLGSS

SEQ ID NO: 35486 - protein, 328 aa, Vibrio parahaemolyticus RIMD 2210633
MSNRVPTNILTGFLGVGKTTTILNLLKNKPENENWAVLVNEFGEIGIDGALMTDQGALIKEVPGGCMCCTAGVPMSVGITALLRQKPDRLLIEPTGLGHPKQVIATLTSEQYLPYVDLKATIALVDPRNLSDEKYTSNQNFVDQLDSADVVIGSKVDLCSSHDIDVFNDWVTDQTPAKVFSKLIHNGELPIEVLDIERVHGSASSHIETHHHEHAHQEPQFQLPPGEAFIRKENKGQGYFSCGWLFGAEYKFDFDKLFSMLSDLTAERVKAVVNTNQGCYAFNVANRVVSVNEISLEGFESRLEVIDSQLLPWDELEQILLQLAGVEG

SEQ ID NO: 35487 - protein, 218 aa, Arabidopsis thaliana
MDSSLKTQEPQVVETSPSPVAQEPPQVADKPAIVPSPIAQEPDNDVPAPGNEFAEFAAGCFWGVELAFQRIPGVTVTEVGYTHGISHNPSYEDVCTNTTNHAEVVRVQYDPKECTYETLLDLFWSRHNPTTLNRQGELLGAQYRSGIYFYTPEQEKLARESLEKEQKKLEDKIVTEILPAKKFYKAEEYHQQYLVKGGMHGNAQSPAKSCKDPIRCYG

SEQ ID NO: 35488 - protein, 510 aa, Petunia x hybrida
MAGGFAAGSGGGDYEGKVTTFGIMTCLVAATGGLLFGYDIGISGGVTSMDEFLLKFFPNVYHKEKALKAGGNQYCKFDDHLLQLFTSSLYLAALVASFAASITTKAFGRKISMLIGGLIFLVGAVLNGAAMNLAALIIGRLLLGVGIGYANQSVPVYLSEMAPPKLRGALNVCFQMAVTLGIFVANMVNYGTSSMKKNGWRVSLVLAAVPAIIMTVGAVFLPDTPNSLIDRGQKEKAKAMLQKIRGTNNVDNEFEDLIIASDMSKLVTDPWGNIMKPRYRPQLTIAVLIPFFQQLTGINVIMFYAPVLFKTLGFGDEAALMTAVITGLVNVFATLISIFTVDRFGRRFLFLAGGLLMLICQAAVGSVIGSVFGTDGLGTFSKGLGNVTVGLICLYVAAFAWSWGPLGWLVPSEVFPMEIRSAGQSITVSVNMFFTFVIGQLFLTMLCEMKFGLFFFFAGFVVLMTLFIFFFLPETKGIPIEEVNRIWKNHWFWKSYVPNDDDDHHSKNQV

SEQ ID NO: 35489 - protein, 359 aa, Zea mays
MAGPAPDRAALTVGPGMDMPIMHDSDRYELVRDIGSGNFGVARLMRDRRTSELVAVKYIERGEKIDENVQREIINHRSLKHPNIIRFKEVILTPTHLAIVMEYASGGELFERICKNVRFSEDEARYFFQQLISGQVCHRDLKLENTLLDGSDAPRLKVCDFGYSKSSVLHSQPKSTVGTPAYIAPEVLLKKEYDGKIADVWSCGVTLYVMVVGAYPFEDPEEPKNFRKTIQRILNVQYAIPDNVNISPECRHLISRIFVGDPATRITIPEIRNHSWFLKNLPADLMDDDSMSNQYEEPDQPMQTMDQIMQILTEATIPPACSRSINVLADGLDMDDDMDDLDSDSDLDVDSSGEIVYAM

SEQ ID NO: 35490 - protein, 455 aa, Schizosaccharomyces pombe
MREVISVHVGQAGVQIGNACWELYCLEHGIGPDGFPTENSEVHKNNSYLNDGFGTFFSETGQGKFVPRSIYVDLEPNVIDQVRTGPYKDLFHPEQMVTGKEDASNNYARGHYTVGKEMIDSVLERIRRMADNCSGLQGFLVFHSFGGGTGSGLGALLLERLNMEYGKKSNLQFSVYPAPQVSTSVVEPYNSVLTTHATLDNSDCTFMVDNEACYDICRRNLDIERPTYENLNRLIAQVVSSITASLRFAGSLNVDLNEFQTNLVPYPRIHFPLVTYSPIVSAAKAFHESNSVQEITNQCFEPYNQMVKCDPRTGRYMATCLLYRGDVIPRDVQAAVTSIKSRRTIQFVDWCPTGFKIGICYEPPQHVPGSGIAKVNRAVCMLSNTTSIAEAWSRLDHKFDLMYSKRAFVHWYVGEGMEEGEFSEAREDLAALERDYEEVGQDSMDNEMYEADEEY

SEQ ID NO: 35491 - protein, 258 aa, Zea mays
  misc_feature (49)..(49): Xaa can be any naturally occurring amino acid
  misc_feature (60)..(60): Xaa can be any naturally occurring amino acid
  misc_feature (86)..(86): Xaa can be any naturally occurring amino acid
  misc_feature (129)..(129): Xaa can be any naturally occurring amino acid
  misc_feature (155)..(155): Xaa can be any naturally occurring amino acid
  misc_feature (179)..(179): Xaa can be any naturally occurring amino acid
  misc_feature (190)..(190): Xaa can be any naturally occurring amino acid
  misc_feature (214)..(214): Xaa can be any naturally occurring amino acid
  misc_feature (226)..(226): Xaa can be any naturally occurring amino acid
  misc_feature (231)..(231): Xaa can be any naturally occurring amino acid
  misc_feature (238)..(238): Xaa can be any naturally occurring amino acid
  misc_feature (248)..(248): Xaa can be any naturally occurring amino acid
  misc_feature (252)..(252): Xaa can be any naturally occurring amino acid
  unsure (1)..(258): unsure at all Xaa locations
MDRLPFIFLPCKMRLLLGLLLLPLTSPEIGDEDSDIYYQDGSYVTTTIXDHTSAGCCKPXTTGDSPARDFYITGFPVLSATTDPAXTGCNEQEPYDPNLITGIQRLNQQWSNIRRPNNHGLEQTGRTSXKNDGDCSDLIEIDYFETALSFRRTIXPLVLLQAKGIEPDFILYSLYGIPXAFKRGINAHSXFIQRSTGYPFDKHMLLQLDICAAXISTIINCPATQXDTCSXVILFHPXQKWMLKQQLXQDDXPFQLPG

SEQ ID NO: 35492 - protein, 44 aa, Paeonia mairei
GHNIVLISNHQTEADPAIIASLLEKTNPRISEDLTYVAGDRVIT

SEQ ID NO: 35493 - protein, 161 aa, Arabidopsis thaliana
  misc_feature (17)..(17): Xaa can be any naturally occurring amino acid
  misc_feature (47)..(47): Xaa can be any naturally occurring amino acid
  unsure (1)..(161): unsure at all Xaa locations
MNSGCISSCISDAHDPXVPVRPVRASYVNLYTWPESDAEFDRSVRRXGGLPAARVVDSISCRQMYLRSYTFSREDDESKSEKVSSGTQTSCLGRVKGTASSRRKSKEENGIIIVESTKPRRRGEKRRVSRKNKQEQACSVILRIFRRLLSCAATVDVVDPN

SEQ ID NO: 35494 - protein, 273 aa, Thiobacillus denitrificans ATCC 25259
MSRIGQTFTALKAQNRKALISFITAGDPGKGLTVPLMHALVDAGTDIIELGVPFSDPMADGPVIQRASERALANKVGLKDVLAMTAEFRKVNTSTPVVLMGYANPFEHMGYETFAEAAKTAGVDGVLTVDIPPEESLGVSDVFKAHDLDPIFLLSPTTPESRVAQVAAVAGGFIYYVSLKGVTGSANLDTEEVARKVAMVRKHCDLPVGVGFGIRDAATAEAVARIADAVVVGSRIVNEIETAPEGECGARVKHLVADLRRGVDAASKQTENK

SEQ ID NO: 35495 - protein, 41 aa, Paeonia lutea
GHNIVLISNHQTEADPAIIALLLEKTNPRISEDLTYVAGDR

SEQ ID NO: 35496 - protein, 254 aa, Zea mays
  misc_feature (223)..(223): Xaa can be any naturally occurring amino acid
  unsure (1)..(254): unsure at all Xaa locations
MNALAATSRNFKQAAKLLGLDSKLEKSLLIPFREIKVECTIPKDDGTLASYVGFRVQHDNARGPMKGGIRYHHEVDPDEVNALAQLMTWKTAVANIPYGGAKGGIGCSPGDLSISELERLTRVFTQKIHDLIGIHTDVPAPDMGTNAQTMAWILDEYSKFHGYSPAVVTGKPVDLGGSLGRDAATGRGVLFATDALLAEHGKGIAGQRFVIQGFGNVGSWAAXLITEAGSKVIAISDVTGAVKNSHGIDIAQLM

SEQ ID NO: 35497 - protein, 531 aa, Streptomyces coelicolor A3(2)
MAEKTEAATGGAGAGKQPRSVRVVLLALMIAMMLAMLDNMIIGTAMPTIVGELGGLEHLSWVVTAYTLATAASTPLWGKLGDMYGRKGVFMTSIVIFLAGSALSGMAQDMGQLIGFRAVQGLGAGGLMVGVMAIIGDLIPPRERGKYQGMIAGVMALSMIGGPLVGGTITDHWGWRWSFYINIPLGVIALIAISAVLHLPKKRSEARIDYLGAALLTIGITAIVLVTTWGGTEYAWTSARIMELIGIGVAALVGFVFWQTRAAEPILPLHIFRSRNFTLMSVIGFIVGFVMFGATLFLPLYQQSVQGASATNSGLLLLPMLGAMLVTSMVAGRVTTSTGRYKIFPVAGGALMTVGLYLLSTMDTDTTRFTSGLYMAVVGLGMGCLMQITMLVAQNSVEMKDMGVASSSTTLFRTLGSSFGVAIMGALFNNRVQDVMAERAAGSGAKATEQSATLTADALNALPAAIRDAYQHAVSAGTHTAFLLGSAVAVLALVASFFVKEVPLKGAGPKAADAPADGDPATAKAPVTEAV

SEQ ID NO: 35498 - protein, 327 aa, Neurospora crassa
MATTIKVAVTQAEPIWLDLQASIQKAVSLVHEAASNGAKIVAFSETWAPGYPGWCWARPVDPALNTKYAYNSLTANSPEMEQLQQAAKEDSIAVVIGFSERSSSGSLYIGQAIISPQGEVALQRRKLKPTHMERTIFGDGSGPDLNCVAELDFGSELGSIKVGTLNCWEHAQPLLKFHEIQQGVVIHIAMWPPIDPYPGVEFPGLWSMTADGCQNLSQTFAVESGAFVLHCTAVCNESGIEAMDTRNGMVFREPGGGHSCVIGPDGRRLTQPLADKPSAEGIVYADLDLTRVVTNKSFQDIVGHYSRPDLLWLSYDKEKKDAAVHRN

SEQ ID NO: 35499 - protein, 411 aa, Deinococcus radiodurans R1
MCPARSHLFVTPAGTFDRPFFAPWKKGRCYPLLTMSNIAKGLEGVLFTESKLTFINGSEGILTHLGIPIQEWAEKSTFEELSLALLDAKLPTAEELAKFDAELKANRAIPDQLVGIIRDMPKGVHPMQALRTAVSYLGLLDPQAEDITPEARRAISTRMIAQFSTIIAAINRAQEGQDIVAPRADLTHAGNFLYMLTGNEPTPEQARLFDIALVLHADHGMNASTFTAIATSSTLSDMYSCMVSAIGALKGPLHGGANEAVMTMLDEIGTVDKAEAYITGKLDNKEKIMGVGHRVYKYFDPRSRVLRDYAEHVANKEGKSNYYQILEAIEKIIVDRMGAKGIYPNVDFYSGTVYSDLGIKKEYFTPIFALARISGWCASVIEYSQDNRLLRPDAEYTGARDQHYVDIKDRQ

SEQ ID NO: 35500 - protein, 473 aa, Malus x domestica
MRMLSRNATFNSHGQDSSYFLGWQEYEKNPYHEVHNTNGIIQMGLAENQLCFDLLESWLAKNPEAAAFKKNGESIFAELALFQDYHGLPAFKKAMVDFMAEIRGNKVTFDPNHLVLTAGATSANETFIFCLADPGEAVLIPTPYYPGFDRDLKWRTGVEIVPIHCTSSNGFQITETALEEAYQEAEKRNLRVKGVLVTNPSNPLGTTMTRNELYLLLSFVEDKGIHLISDEIYSGTAFSSPSFISVMEVLKDRNCDENSEVWQRVHVVYSLSKDLGLPGFRVGAIYSNDDMVVAAATKMSSFGLVSSQTQHLLSAMLSDKKLTKNYIAENHKRLKQRQKKLVSGLQKSGISCLNGNAGLFCWVDMRHLLRSNTFEAEMELWKKIVYEVHLNISPGSSCHCTEPGWFRVCFANLPERTLDLAMQRLKAFVGEYYNVPEVNGGSQSSHLSHSRRQSLTKWVSRLSFDDRGPIPGR

SEQ ID NO: 35501 - protein, 2177 aa, Neurospora crassa
MRFFSLHRRSHSKEKEKEKEKEKEKRKSITLPLLRPRSTERPRTTESTLTSTTTTTPALTPTPTLTITDTTAATTPTITTAKPVTPPRTTTPPRTVIESPDSHCSNQYAIARSHTGPTDGYALNPPEASAPSEQLEHQDQMTGGANGRGGLGSLQLPTPHLRASNQHTLAPVVDDIRSRDSVRKPSRLSSEVSFNDSPFSEPTSEERDLQQVENGKRTVGESQRGKMDTSEAKRQLSQYRLHLAREMEKREIVAATENRLAIPGPARVSPIQEEASSPSPQLPQSGSEPTTTSTESGNTIRGGVTPGLTARTPSYPFPRMASSPGFPHSGLPFHRPFTTLSPTTFPTTHSSTGAHVSFAGIQGLDHSVSNPSTPASAMTFLPPGCSGTVQGEFATPNLYDLTLMLSAEPGLDAWWHTVVQIMTEVYRAERVTLAVPADPTDIENVPWGQKATYNPHQEDGLSLGYLARGSSFVHSSTDDITDLYQNNDESLKPKGLARPGLPSRHSFSSYEDSKDKKESIERTPVTPLRPPMASRSKTAHPGVGRDRDVSEDDDVAVSLNREALAEHDALEGQQPIPSWEAPITNKREGHGKLLNVLQALDYEADPLIDHNGVLRVLERGRVVALTRSYPYLTQTSSTDSKAADPRVATRSQSPEGPRKKIKKIRTRSESATKLSALLGSATLSTAAGRTSGGHGLEKKATGIASRLDDEYPRPPTPKYEEYEQAPPSPWSQSPAPSPAVRADPSENPFFADAMVDEESFNPGSAPPDYSALQPPEAIGVDNSWTVLHIPLTHVLLSKPQQPGFKLDSTFLEQKMSQRGKSSHTPTIPTPYQEPVAKEKHAPIAILSILSPIIPYPTNLRHSLEHLAPHLATSFSLCRHYTNLETELNGLQKRRPQTVGFGALGPDGRPLADPTAFTMGYLPTDDSISQQSHAGSITSPSEYSGPSRSVIHSPNGTPTWDSSALSYLMGKRSSSASPAPVAAGDSYFTTTPKPGGTGVGQRTKTGSRESTTLERKGSLKIPGGKSQWQDAAGVAPVSQESQGSGESNRRSIDEPSPTNSQQKTAVLKEQREERGGIASSQPVETQRRKPAGTPTGQHRHTQLHSYGADFATTFQSLPPSSTVGKGINQGATASRQGSISSTDMTPPSDKLKGLILDSLPAHVFVALPQTGEIVWVNSRFLTYRGQTSSDLAADPWGSIHPEDREEYLRKWSASVRTGEPLSETVRIRRFDGAYRWFQARAVASKDKRGVIMQFLGSYMDIHDKHVAQLRAARQEEIEVSEAKHRLLANLIPQIIFTATEDEGITFANEQWLSYTGQGFDDVLGLGFMDFVHPEDLAKCRIPLERPTSPHVRQDKTKHDHSPSPSKFGMAAMGKQPATPHAENVSGPVHPALTRHSSSTSSSANDLAGPNLSELARQGVIKISTDSKGQLSYTTEIRLRSKTGEYRWHLIRCVEIDNVDFGNGVSSYFGSATDINDLKLLETKLKEAMESKSRFLSNMSHEIRTPLIGISGMVSFLQDTTLNEEQRDYTNTIQTSANSLIMIINDILDLSKVDAGMMKLNYEWFHTRSLIEDVNELVSTMAIAKRLELNYVVEEDVPAWVKGDKVRIRQVLLNVIGNAIKFTNEGEVFSRCKVVVPNHGHLYENEIMLEFSIIDTGRGFTEEEAELIFKPFSQIDGSSTRQHGGSGLGLVISRQLVELHGGKMDGKAVLGKGSTFTFTARFGLPTESDNPDLAAPPAPTPGLIPEMNILRRSSMASPHSRPYLTSAPSSGSVVPVESDTRSPAAVSTGSSEPSIHSSRTRNTERSSISSVNVGSLARFSEAARASGHDLSQMKLEMPHGRGGGGSDAGTTPTPSNSSNERLSRPTIKEGGGSEDSDGYHTSLFSILIICPQTHSREATTKHIEMTLPKSNPHQITAVASVQEARKLIGGEDPVFFTHVVVNLPTPEQIIELMDEVQRSTMIGRGVTILILSDSVQRQAVLKQVAGTQYEDILSENRVTYIYKPVKPSRFAVIFDPAKERDLSIDRNRSTAEQLVENQKQSYLEVEKRMGNKGYKVLLVEDNLVNQKVLQKYLKKVGVDVELVADGVECTDVVFSRPHDYFSLILCDLHMPRKDGYQACREIREWEAKGNFPGRALPIIALSANVMSDVQDKCLQAGFNDYVTKPVDFINLSNALSRFF

SEQ ID NO: 35502 - protein, 543 aa, Pseudomonas syringae pv. syringae B728a
MTRYIFVTGGVVSSLGKGIASASLAAILEARGLKVTMLKLDPYINVDPGTMSPFQHGEVFVTHDGAETDLDLGHYERFIRTTMTQNNNFTTGRVYEHVLRKERRGDYLGATIQVIPHITDEIKRRIIKGAGDADVALVEIGGTVGDIESQPFLEAIRQLRFEVGARRAMLMHLTLVPYIATAGETKTKPTQHSVKELRSIGLQPDVLVCRSDHPIDVSSRRKIAQFTNVEERAVIALEDADTIYKIPGILHSQGLDDFVVERFGLQCGGADLSEWDKVVDAKLNPEHEVTIAMVGKYMELLDAYKSLIEAMSHAGITNRTKVNLRYIDSEDIENQGTGLLEGVDAILVPGGFGLRGVEGKITAVQFARENKVPYLGICLGMQVAVIEFARNVLGWKDANSTEFDRTSAHAVVGLITEWEDATGAVETRTESSDLGGTMRLGAQECQLEAGSLVHDCYTKDVIVERHRHRYEVNNNLLPQLIEAGLKISGRSGDGALVEVVEAPDHPWFVACQFHPEFTSTPRDGHPLFSGFVKAALAQHQKNS

SEQ ID NO: 35503 - protein, 734 aa, Kluyveromyces lactis NRRL Y-1140
MMNFFKSQNEGNNAAVPRPKSAGTAGAGFFPSIGSHSATATPTTALSEHSYAMGTTGLNQNRQQQENILDHMKASMDSNIQEQQQQQQQQQQQQRAPQYAQSSDAAQPSMAAAPEISTTDNGSSTSSRSDSNNSNGQLPRGKLRIVIAEALNLSIRSPSASQPYVVCTFESSEFISNGPESLDNKYPSISAANSNNQWSKGLLNTNEKLKRPLYTRQSSSQLDKLGNNQLNLKRGSINPVWEHEATFDVLGTHSELDISIYDAAQDDMFLGQVRLHPNMNAVTPGVHSEWHKLKSRALGEHVTGDILIHWEYTSTKKRQYGPQDFEVLRLLGKGTFGQVYQVRKKDTMRIYAMKVLSKKVIVKKNEIAHTIGERNILVRTASKSSPFIVGLKFSFQTPTDLYLVTDFMSGGELFWHLQKEGRFTEDRAKFYIAELVLALEYLHDNDIVYRDLKPENILLDANGNIALCDFGLSKADLKDRTNTFCGTTEYLAPELLMDETGYTKMVDFWSLGVLIFEMCCGWSPFFASDNQKMYQKIAFGKVKFPRDVLSPEGRSFVKGLLNRNPKHRLGAIDDGRELRAHPFFNDIDWEAVRQKKIPPPFKPHLISETDTSNFDPEFTQTSTSFMNKQPIAATPLSPAMQAKFVGFTFVDESAIDEHYNNAYNNRKFLQNSYFMEPGSFIPGNPNLPPDEDVIDDEEEDNDRLAAVKGSGGISVDYDGDHHMDDEFVNGRFEI

SEQ ID NO: 35504 - protein, 398 aa, Arabidopsis thaliana
MRSSDHMAFAGVLPIVFLLILSSADLAASQSQPGPTNQPYNYGRLSPAMAVIVVILIAALFFMGFFSIYFRHCSGVPDAGVSPAGGARSRATVNAAARGLDVSVVETFPTFLYSDVKTQKLGKGELECAICLNEFEDDETLRLLPKCDHVFHPHCIDAWLEAHVTCPVCRANLAEQVAEGESVEPGGTEPDLELQQVVVNPEPVVTAPVPEQLVTSEVDSRRLPGVPVDLKRVKFSRSHTTGHSVVQPGECTERFTLRLPEDVRKRIMKDWKLNRTNSLLVLPRGGSSRRGKPIDRSRARSDRWLFRKTPSFLWRSRDDGSIRLGATGSVRASAVPNSTGSDSVRAGDRWAFLRNASFLWRNSSVHVPRGGVNKDGEGTSVKSTGASGSTSGSVRLPV

SEQ ID NO: 35505 - protein, 295 aa, Caulobacter crescentus CB15
MAVNSLSVMSPDGGLSRYLTEIRKFPMLSKDEEFMLAQRWKEHQDPQAAHKMVTSHLRLVAKIAMGYRGYGLPIGEVISEGNVGLMQAVKKFEPEKGFRLATYAMWWIRASIQEYILRSWSLVKMGTTAAQKKLFFNLRKAKSQIAAFQEGDLHPDQVSQIATKLGVLDSEVISMNRRLSGPDASLNAPLRRDGESEWQDWLADEEQVSQETRVAEDEEKSLRMSLLEEAMVELTDRERHILTERRLKDDPTTLEELAAQYGVSRERVRQIEVRAFEKLQKTMREAAIAKNMVDA

SEQ ID NO: 35506 - protein, 552 aa, Xylella fastidiosa Temecula1
MKALFRACRIGKVMLRYRLDTLLDGTAVERWLRLAKPFVPRISAEIVEQSRGRRLRLALQELGPIFVKFGQILSTRRDLVPQDIGDELVMLQDRVEPFEGQTARSIIETALGKSVESAFAHFDTVPLASASISQVHAATLHDRRAVVVKVLRPDIEHQISDDIALLKSLATLVEHTHPNADKIRPREIVAEIETTLAAELDLQREGANASVLRRFWEASDDIYVPEVIWSHTAERVLTLERMYGIPSDDIALLDASGIDRKALSSKGIRVFYTQVFRDNFFHADAHSGNIWVDSDPARKSNPRFIVLDFGIMGQLSQKDQYYLAENFMAIFHKDYRRIAELHVEAGWIPPHVRIEELEAAARSVCEPYFTRPLSQISLAEVMMKLFHVARRYQLTLQPQLILLQKTLLNIEGVGRQLDPELDIWVVARPVLERILRARYSPRHALKELNKRLPEIMTHAPDTPRLIHTWLVQQVESRKQNDVYLQQIRALAMTLQGLQRRVVNAIVGSGLLVAAAVLYGLHPDGLYLGTIPVWSLISGCIGALALFSAWWRS

SEQ ID NO: 35507 - protein, 161 aa, Kluyveromyces lactis NRRL Y-1140
MSKFYELAPKDKKGEPFPFTQLEGKVVLIVNVASKCGFTPQYKELEALYKKYEDKGFIVLGFPCNQFGHQEPGTDEEISQFCQLNYGVSFPILKKVDVNGSEADPVYDFLKNEKSGLLGFKGIKWNFEKFLVDKKGTVVERYSSLTKPSSLEEPIEKLLNE

SEQ ID NO: 35508 - protein, 442 aa, Xylella fastidiosa Temecula1
MSTLTLPSDLRLPVTVFSGFLGAGKTTLLNRLLNNRDGLRVAVIVNDMSEVNIDAQLVRDGGAALSRTDETLVEFSNGCICCTLRDDLSKEVKRLALEQRYDYLLIESTGIGEPMPVAATFAVRDADGFCLSDVARLDTMVTVVDGSQFTALFSSMNTLADLGQQADSDDTRSLADLLGQQIEFADTIVISKCDLIDATQLARVRAVVRGLNRDAQIIEAHLGEVPLPQLVGTGRFDFTRAQLAPGWMRELRGEHTPETEEYGITSFVYRARRPFHPLRFNHLLAHGLSGVIRSKGFFWLASRMDWVGELSSVGSATRTQAAGFWYAARHRVDVHEENMPPQIGIAPLPYTELGWQRQQNDCWTAPLPAPHEVSDPGEYVAMQRLWHPQWGDRRQELAVIGLDMDKDVARNELDACLLSNEELRMGPMYWSALPDPFPQWRR

SEQ ID NO: 35509 - protein, 393 aa, Streptomyces aureofaciens
MQTQTLTVNVSRPVSDTAGASGTARTAAAPEARRTDEPVDEAVDEAADPAARAAGDETAEDEGPDEGPEVLELIEHVPPPRTRGAESGGAGPSADLFRQYLREIGRIPLLTAAEEVDLARRVEAGLFAEEKLGGAADLDSQLAVDLDRLVVMGRMAKRRLIESNLRLVVSVAKRYVGRGLTMLDLVQEGNLGLIRAVEKFDYARGYKFSTYATWWIRQAMSRALADQARTIRVPVHVVELINRVVRVQRRMLQERGYEPTAEEVAVHLELTPERVLEVLRLAQEPVSLHAPVGEEDDVALGDLIEDGDAASPVESAAFFLRCEHLEAVLSTLGERERKVVQLRYGLADGRPRTLEEIGRIFGVTRERIRQIESKTLNKLRDHAFADQLRGYLD

SEQ ID NO: 35510 - protein, 261 aa, Arabidopsis thaliana
MASVLEKTKSKKIVFPTKKELSEAMATYTANLSAKFCKERGYFTVVLSGGDLISWLSELLEPKYQESIEWSKWHIFWVDERVVPLDHEDSNYKLAFDGFLSKVPIPIANIYPIDKDCAALGDAKSAALLYEECLKRLVNRNIIRTYKSSGFPQFDLQLLGMGPDGHMASLFPGHYQIKEKANLVTYITDSPKPPPKRITFTLPVINCASYNLMAVCDEAQADAVAKVFNHNFDLPAAWLTADVEAIWFLDQAAASKIPKGL

SEQ ID NO: 35511 - protein, 561 aa, Bacillus cereus G9241
MIHLKTQYTVSTYLLDRLSELGIEHIFGVPGDYNLAFLDDVIAHENVEWIGNCNELNAAYAADGYARIKGIAALITTFGVGELSAINGIAGSYAENVPVIKITGTPPTTVMENGALVHHTLGDGKFDHFSNMYREITVAQSKLTPEHAAEEIDHVLRACWSAKRPVHIQLPIDVYNKPINKPTEPILHKPVVSNKDALDKMLLHATSKINSAKKPVILADFEVDRFHAKEYLYQFVEKTGFPIATLSMGKGIFPEKHSQFIGIYTGDVSSPYLRKRIDESDCIISIGVKLTDTITGGFTQDFTKEQVIEIHPYTVKIIDKKYGPVVMKDVLQQLSNVIEHRNEETLDIKPFISESLSITEKFNPKPQMVTQKRFWQQIYHFLQENDVLLAEQGTPFFGSAAIPLPNNTTYVVQPLWGSIGYTLPALLGTQLANVSRRNILITGDGSFQLTVQELSTILRQNLKPIIFLINNNGYTVERAIHGQNEPYNDIQMWDYTKLANVFGSKEKSLTCKVENEIELAEVLTDITLNNKQLTFIEVVMSQGDQPELLAKLGERFGKQNS

SEQ ID NO: 35512 - protein, 268 aa, Sinorhizobium meliloti 1021
MMDGASNAAPRIRGLPALFDLSGRVALITGSSGGLGLTMAHALCEAGASVILNGRDEARLAGARAELEEHGFTVGTSAFDVTKSAEIGRAVADILAERGRIDILVNNAGIQHRTPLHEFPEDAFRRVIETNLTSAFLVGQAVVQGMIERREGTIINICSVQSELARPSIAPYAASKGGLKMLTKGMALDWGRYGIRVNGLAPGYFKTELNSALVSDEKFSTWLEQRTPLGRWGDTGELAAAAVFLASAASSFVTGHILYVDGGITSCL

SEQ ID NO: 35513 - protein, 262 aa, Lilium longiflorum
MVDAVSRCDVFLPCQHRPAVPVPVSHVRFKFSFPVLESNFLGTRLVIKQSKAIHQNSNPQAISVQMALSIGKAMKWWEKGLHPNMKEITSAQDLVYSLQNAGNKLVIVDFFSPGCGGCRALHPKICQFAEMNLDVQFLQVNYEEHKSMAYSLNVHVLPFFRFYRGAHGRLCSFSCTNATIKKFRDALAKHNTDRCSLGPTKGLEEKELVALAANRELGFSYTPKPEHEPVHQPDALPKPARPSPKVPLTRDAEEKVLAGAGR

SEQ ID NO: 35514 - protein, 1205 aa, Bacteroides fragilis YCH46
MKLHIAMLAATLLLSGGASYAQGNKQEKKAKAYMVADAHLDTQWNWDVQTTIKEYVWNTINQNLFLLKKYPNYVFNFEGGVKYAWMKEYYPAQYEEMKKYIGEGRWHISGSSWDATDALVPSTESFIRNIMLGQQYYRQEFGVESTDIFLPDCFGFGWTLPTIASHCDLIGFSSQKLDWRVHPFYGKSKHPFTIGLWKGIDGSSIMLAHGYDYGRRWNDEDLSENEQLKELAGRTPLNTVYRYYGTGDIGGSPTLASVRSVEKGLRGNGPVEIVSATSDQLYKDYLPYKNHPELPVFDGEQLMDVHGTGCYTSQAAMKLYNRQNELLGDAAERAAVTAEWLNQAKYPGSTINEAWKRFIYHQFHDDLTGTSIPRAYEFSWNDELISLKQFSNVLTSSIHGIGRELDTRVSGIPVILYNALGFTVTDIAEIELDLPKAPKEITVYDEKGKKVSAQLISYTDGKARILVEATVPATGYVVYDVRTSGTGASNISTNVNTLENSLYKITLDKNGDIVSLTDKKNGKELVKAGKSIRLALFTQNKSYNWPAWEVLKETTDRTPVSITDDVKITLVEDGTLRKSLCVEKRHEESVFRQYIRLYEGSRAERIDFYNEIDWQSTNALLKAEFPLNIENEKATYDLGIGSIQRGNNTETAYEVYAQYWADLTDRDGSYGVSVMNDSKYGWDKPDNHTIRLTLLHTPETRGGYAYQDHQDLGHHTFTYSLIPHQGALDKPATVEKAEKLNQQLKAFRTEKHKGNAGKSFSFVASDNRNVLIKALKKAEETDEYVVRVYETEGRKAQSATLTFAGEIISASEANGTEKTIGNATFEGNKLQVNITPYSVRTYKVRLKPSGREASPIEYAALPLDYDRKCASYNEFRGEGDFESGYSFAAELLPDSLIAGQITFRLGEKEIANGMSCEGDTLQLPAGNKYNRLYILAASTEGDNQADFRIGKQTASFVVPFYTGFIGQWGHKGHTEGYLKDAEIAYVGTHRHASNGDQPYEFTYMFKFGMDIPKGATSVILPRNEKVVLFAATLVAENEPATTVAGTLFRTNNVGNAATAGNDEEAVRENILKGAKIIACSGYTNDEEKPDFLLDGKTDTKWCDVSQTPNYVDFDLGEAQNISGWKMVNAGQESHSYITNGCFLQGKMNPGDEWTTLDAIDGNHANVVSRPLNYDGKVRYIRLLVTRPTQSTGGRDTRIYELEVYK

SEQ ID NO: 35515 - protein, 44 aa, Paeonia lutea
GHNIVLISNHQTEADPAIIALLLEKTNPRVSEDLTYVAGDRVIT

SEQ ID NO: 35516 - protein, 586 aa, Mycobacterium bovis AF2122/97
MRKHPQTATKHLFVSGGVASSLGKGLTASSLGQLLTARGLHVTMQKLDPYLNVDPGTMNPFQHGEVFVTEDGAETDLDVGHYERFLDRNLPGSANVTTGQVYSTVIAKERRGEYLGDTVQVIPHITDEIKRRILAMAQPDADGNRPDVVITEIGGTVGDIESQPFLEAARQVRHYLGREDVFFLHVSLVPYLAPSGELKTKPTQHSVAALRSIGITPDALILRCDRDVPEALKNKIALMCDVDIDGVISTPDAPSIYDIPKVLHREELDAFVVRRLNLPFRDVDWTEWDDLLRRVHEPHETVRIALVGKYVELSDAYLSVAEALRAGGFKHRAKVEICWVASDGCETTSGAAAALGDVHGVLIPGGFGIRGIEGKIGAIAYARARGLPVLGLCLGLQCIVIEAARSVGLTNANSAEFDPDTPDPVIATMPDQEEIVAGEADLGGTMRLGSYPAVLEPDSVVAQAYQTTQVSERHRHRYEVNNAYRDKIAESGLRFSGTSPDGHLVEFVEYPPDRHPFVVGTQAHPELKSRPTRPHPLFVAFVGAAIDYKAGELLPVEIPEIPEHTPNGSSHRDGVGQPLPEPASRG

SEQ ID NO: 35517 - protein, 1063 aa, Saccharomyces cerevisiae
MDDYHVNTAFSMGRGNQQDDGNSERNSMHTQPSTMAPATLRMMGKSPQQQQQQNTPLMPPADIKYANNGNSHQAEQKERQVELEGKSRENAPKPNTTSQSRVSSSQGMPKQFHRKSLGDWEFVETVGAGSMGKVKLAKHRYTNEVCAVKIVNRATKAFLHKEQMLPPPKNEQDVLERQKKLEKEISRDKRTIREASLGQILYHPHICRLFEMCTLSNHFYMLFEYVSGGQLLDYIIQHGSIREHQARKFARGIASALIYLHANNIVHRDLKIENIMISDSSEIKIIDFGLSNIYDSRKQLHTFCGSLYFAAPELLKANPYTGPEVDVWSFGVVLFVLVCGKVPFDDENSSVLHEKIKQGKVEYPQHLSIEVISLLSKMLVVDPKRRATLKQVVEHHWMVRGFNGPPPSYLPKRVPLTIEMLDINVLKEMYRLEFIDDVEETRSVLVSIITDPHYGLLSRQYWTLAAKMNAESSDNGNAPNITESFEDPTRAYHPMISIYYLTSEMLDRKHAKIRNQQQRQSHENIEKLSEIPESVKQRDVEVNTTAMKSEPEATLATKDTSVPFTPKNSDGTEPPLHVLIPPRLAMPEQAHTSPTSRKSSDNQRREMEYALSPTPQGNDYQQFRVPSTTGDPSEKAKFGNIFRKLSQRRKKTIEQTSVNSNNSINKPVQKTHSRAVSDFVPGFAKPSYDSNYTMNEPVKTNDSRGGNKGDFPALPADRENMVEKQREKQIEEDIMKLHDINKQNNEVAKGSGREAYAAQKFEGSDDDENHPLPPLNVAKGRKLHPSARAKSVGHARRESLKYMRPPMPSSAYPQQELIDTGFLESSDDNKSDSLGNVTSQTNDSVSVHSVNAHINSPSVEKELTDEEILQEASRAPAGSMPSIDFPRSLFLKGFFSVQTTSSKPLPIVRYKIMFVLRKMINEFKEVKGGFVCMQRFSSNNVAAKREGTPRSIMPLSHHESIRRQGSNKYSPSSPLATNTHQRNSSITETYGDDKHSGTSLENIHQQGDGSEGMTTTEKEPIKFEIHIVKVRIVGLAGVHFKKISGNTWLYKELASSILKELKL

SEQ ID NO: 35518 - protein, 44 aa, Paeonia delavayi
GHNIVLISNHQTEADPAIIALLLEKTNPRISEDLTYVAGDGVIT

SEQ ID NO: 35519 - protein, 367 aa, Oryza sativa
MAEEPAAAQPQYFDAGAVVDPTFDFFIDHNNFLGMPPPPVQQADDHAMNNVVADASMNYFYGGGAMVFGGGAPMGETVEQAAPPVPAPVAVAPVVMNRDDDEVNNQGGRRHRAAPTNTTRRFWTTEEHRATLIYSSYDFDDPLITNLLITMTRMKKNMYFLCFTMQFLRGLRVYGRGEWKSISMNFVRSKTPVQVSSHAQKYFRRVESAAADKQRYSINDVGLNDDTAAMDGTNSYSNNNFGGWQSLAFAGGHLEPVSGGGAARQVIAPASSSAAAMNSAAQFWAPMLFNPQIQQQFMQMQAQTQQAWNDQHMMMAAAPMEGATDTNFEPAGAVNYYYYQQQQEEEEGGAYGVPADQWMMNQNNNMF

SEQ ID NO: 35520 - protein, 290 aa, Arabidopsis thaliana
MAFTLGGRARRLVSATSVHQNGCLHKLQQIGSDRFQLGEAKAIRLLPRRTNMVQELGIREEFMDLNRETETSYDFLDEMRHRFLKFKRQKYLPEIEKFKALAIAQSPKVMVIGCADSRVCPSYVLGFQPGEAFTIRNVANLVTPVQNGPTETNSALEFAVTTLQVENIIVMGHSNCGGIAALMSHQNHQGQHSSLVERWVMNGKAAKLRTQLASSHLSFDEQCRNCEKESIKDSVMNLITYSWIRDRVKRGEVKIHGCYYNLSDCSLEKWRLSSDKTNYGFYISDREIWS

SEQ ID NO: 35521 - protein, 1153 aa, Saccharomyces cerevisiae
MPNPNTADYLVNPNFRTSKGGSLSPTPEAFNDTRVAAPATLRMMGKQSGPRNDQQQAPLMPPADIKQGKEQAAQRQNDASRPNGAVELRQFHRRSLGDWEFLETVGAGSMGKVKLVKHRQTKEICVIKIVNRASKAYLHKQHSLPSPKNESEILERQKRLEKEIARDKRTVREASLGQILYHPHICRLFEMCTMSNHFYMLFEYVSGGQLLDYIIHDGSLKEHHARKFARGIASALQYLHANNIVHRDLKIENIMISSSGEIKIIDFGLSNIFDYRKQLHTFCGSLYFAAPELLKAQPYTGPEVDIWSFGIVLYVLVCGKVPFDDENSSILHEKIKKGKVDYPSHLSIEVISLLTRMIVVDPLRRATLKNVVEHPWMNRGYDFKAPSYVPNRVPLTPEMIDSQVLKEMYRLEFIDDIEDTRRSLIRLVTEKEYIQLSQEYWDKLSNAKGLSSSLNNNYLNSTAQQTLIQNHITSNPSQSGYNEPDSNFEDPTLAYHPLLSIYHLVSEMVARKLAKLQRRQALALQAQAQQRQQQQQVALGTKVALNNNSPDIMTKMRSPQKEVVPNPGIFQVPAIGTSGTSNNTNTSNKPPLHVMVPPKLTIPEQAHTSPTSRKSSDIHTELNGVLKSTPVPVSGEYQQRSASPVVGEHQEKNTIGGIFRRISQSGQSQHPTRQSGTYSSKENLQHICQNQMKFPSKYRKAIVVLYQTYIPSARRYPSYVPNSVDVKQKPAKNTTIAPPIRSVSQKQNSDLPALPQKRQLIVQKQRQKLLQENLDKLQINDNDNNNVNAVVDGINNDNSDHYLSVPLSVPKGRKLHPSARAKSVGHARRESLKFTRPPIPAALPPSDMTNDNGFLGEANKERYNPVSSNFSTVPEDSTTYSNDTNNRLTSVYSQELTEKQILEEASKAPPGSMPSIDYPKSMFLKGFFSVQTTSSKPLPIVRHNIISVLTRMNIDFKEVKGGFICVQQRPSIETAAVPVITTTGVGLDSGKAMDLQNSLDSQLSSSYHSTASSASRNSSIKRQGSYKRGQNNIPLTPLTTNSIHQRKTSIPMSPNYGNQSNGTSGELSSMSLDYVQQQDDILTTSRAQNINNVNGQTEQTNTSGIKERPPIKFEIHIVKVRIVGLAGVHFKKVSGNTWLYKELASYILKELNL

SEQ ID NO: 35522 - protein, 334 aa, Clostridium thermocellum ATCC 27405
MKNRVISLLMASLLLVLSVIVAPFYKAEAATVVNTPFVAVFSNFDSSQWEKADWANGSVFNCVWKPSQVTFSNGKMILTLDREYGGSYPYKSGEYRTKSFFGYGYYEVRMKAAKNVGIVSSFFTYTGPSDNNPWDEIDIEFLGKDTTKVQFNWYKNGVGGNEYLHNLGFDASQDFHTYGFEWRPDYIDFYVDGKKVYRGTRNIPVTPGKIMMNLWPGIGVDEWLGRYDGRTPLQAEYEYVKYYPNGVPQDNPTPTPTIAPSTPTNPNLPLKGDVNGDGHVNSSDYSLFKRYLLRVIDRFPVGDQSVADVNRDGRIDSTDLTMLKRYLIRAIPSL

SEQ ID NO: 35523 - protein, 853 aa, Neurospora crassa
MDYDDDAPPDLIETNEIILEEEKPVKVPITIVTGYLGAGKTTLLNYILTAQHGKKIAVIMNALDIEKSLTVNKDGESVEEWMEVGNGCICCSVKDTGVNAIESLMEKKGKFDYILLETTGLADPGNLAPLFWMDDGLGSTIYLDGIVTLVDAKNILRSLDDPAGKVEGHEETDEHGHGPVMTTAHVQISHADVIVINKSDLVSEDELQAVQDRITSINGLAKIHITKQSVVPELEGFLLDLHAYDRVEELDKPSLGHSHLDKTISTLSIPLPVLTSAQVEKLDAWLRSILWENILPGHENATDRPAFEIHRLKGRLVLEDGSEKMVQGRYLGTLQRLHIPSQMEVLVIRTTHCTCAASACRPPGVQLPLVSKARPGIHLQTSIHSGSAPRHHRYHSSPFNRRHNLLIATTGKQHSFFLPFARPLRETGLTTAEYHESARYGGNPALFISTHRRLPRCLPCCPVFSKSAIADNRWIMATAYSSPTRNRCWTLGWIEIMDRLVVPLPRRQRQRMDVAVNMLLLCPARNSDYGAVPQSLRGMSGFGGQQQQPQQSGRGVANRLPNGKLGAVSGGSGWAFGSGMPMGGSPGVPPGSARQLGGGNVSFAQSLSGSQPATPLDLSSANGELGGMPGLGFGSTPSIHPNRTNNGLLNALTGNTRTTDGRSPTAIGRPHDQRSPVNEEEGRQKPPVYREDGMASRSSVGDAVSQAIGTRNPLGAIGNDPPSAKGKEEDRGRTNEVQDPLEGMPAIEKFGLKGLRTLMNNFPDYNSLIIGIDPSSLGLELNSSELYSTQIYSILDDVPPRPAVPKFKIPECYMVKNVQPIEAKIQSFNEETLMWIFYSCPGDIKQQLAAAEL

SEQ ID NO: 35524 - protein, 304 aa, Synechococcus sp. CC9605
MVAGAVGTTGVALWLRRDRRYESSESVASAYDAWTEDRLLEQLWGEHVHLGHYGTPPGSFDFREAKEAFVHELVRWSGLDQLPAGSRVLDVGCGIGGSARILARDYGLDVLGISISPAQVERATQLTPSGLSCRFQVMDALDLQLPDQSFDAVWSVEAGPHMPNKQRYADELLRAMRPGGLLAVADWNRRDPSDGGMTRTERWVMRQLLNQWAHPEFASIKGFRQNLDNSVHHRGEIVTGDWTQATLPSWIDSIIEGIRRPWAVVSLGPKAVLQGLRETPTLLLMHWAFATGLMQFGVFRISKD

SEQ ID NO: 35525 - protein, 213 aa, Triticum aestivum
  misc_feature (100)..(100): Xaa can be any naturally occurring amino acid
  misc_feature (165)..(165): Xaa can be any naturally occurring amino acid
  unsure (1)..(213): unsure at all Xaa locations
MEDERSTQSYQGGEAAEQVEVTDRGLLGNLLGKKKAEEDKEKEEELVTGMEKVSAEEPEVKKEEHEDGEKKETLFSKLHRSSSSSSSSSDEEEEEVIDDXGEVIKRKKKKGLKEKLQGKLPGHKDTEGEHVTGLPAPGAPASVQTHGGHHDTDVVVQKIDGDVEXEAAPGRCPKEEKKRLLGKIPGKSCPGAHKNPENPACGAPYTQLVSRTR

SEQ ID NO: 35526 - protein, 250 aa, Glycine max
MEDYVIKTIVVGVVSWTSAFVLVRRIFPKRSFDFCNRVVSTLHATLAVTLAWLSVKDWRCPICPVGSKSSPKQMQVLAVSLSYLIYDLACCQLDERVNLDNTVHHLVSIVGIGAGLSHQKCGSEMVATIWITEISSPFLHLRELLKELGYRDTLLNLAADILFAAIFTFARMVVGPCLTYVTLSANYPLLIKAMGLGLQLVSAFWFFKIVRMMKHKLTKRTTSKNGLLTQNYNRVGNHQEGARHKDTSIS

SEQ ID NO: 35527 - protein, 299 aa, Thermotoga maritima MSB8
MFLVISVVGSSNIDIVLKVDHFTKPGETQKAIEMNVFPGGKGANQAVTVAKIGEKGCRFVTCIGNDDYSDLLIENYEKLGITGYIRVSLPTGRAFIEVDKTGQNRIIIFPGANAELKKELIDWNTLSESDILLLQNEIPFETTLECAKRFNGIVIFDPAPAQGINEEIFQYLDYLTPNEKEIEALSKDFFGEFLTVEKAAEKFLELGVKNVIVKLGDKGVLLVNKNEKKHFPTFKVKAVDTTAAGDVFNGAFAVALSEGKNPEEAVIFGTAAAAISVTRLGAQSSIPAREEVEAFLKNL

SEQ ID NO: 35528 - protein, 509 aa, Ralstonia solanacearum
MSFPSRSLRVSLLALAALTAFHAGAVTLTRDNGAPVGDNQNSQTAGPNGPVLLQDVQLIQKLQRFDRERIPERVVHARGTGAHGVFVASKDISDLTRAKVFTPGEETPVFVRFSSVIHSGHSPETLRDPRGFATKFYTREGNWDLVGNNLPVFFIRDAMKFPDMVHSLKPSPDSNVQDPNRFFDFFSHQPESTHMLTRVYTDYGTPTSYREMDGNSVHAYKFVNAKGEVHYVKFHWKSLQGQKGLSAKEVEAIQGKDFNHMTRDLIANIDKGNYPKWDLYIQVLKPEQLAKFDFDPLDATKVWPDVPEVKVGTMTLNKNPENVFQETEQAALAPSNLVPGIEPSEDRLLQGRIFSYADTQLYRVGTNGLQLPVNRPRTSAANYNQDGDLNAGARKGSVNYQPSAHADLSDAATVKYSQLPVSGTTQQQRIARTQNFKQAGDYYRSLTAKEQANLVSNLAGDLGQVKDDGVKYTMLSYFQKADAGYGRALAQAVKADPARVESLAAKLQD

SEQ ID NO: 35529 - protein, 225 aa, Anabaena variabilis ATCC 29413
MVTAILFDLDGTIVNTDPIHYQAWQQMLWKYNIEIDEKFYKSRISGRLNPEIVKDILPELSSAAGREFADEKEALFRQLASHLQPLNGFAELIAWTELHQLKRALVTNAPRLNAEFMLEVLGITESFHQIVLADDCVAGKPDPAPYQVALGKLGISAEKAIALEDSPSGIRAAVGAGIRTIGIASTHDPDVLQEVGSFMAIHDFTDLHLWTLLNSLIEPDLIRST

SEQ ID NO: 35530 - protein, 2365 aa, Streptomyces avermitilis MA-4680
MPVSNFDTSGLFAVEDIVIAVSPLAVPSARVTAAAVRAGGLGVLDLTSGGRRAAAELALAEEWSAAGFGVRLSDNDAFPARDLPARVHTVLLTSDASCTPGDFPGHRVLVEVTGHEQALRALSAGAHGLIARGHEAGGPVGELGTFVLVQQLLADRELDLPVWACGGAGPHTAAAVVAGGGAGVVLDTQLALLTEAEAGLPAGTSVLLTGLDGSETTVENGRRVVRRRGAPDGAPAPEIGQDGFLAARFHERWGTVHAAVRGVRDAVLDALKSAGPALGPDSAGSRALGTELPVVQGPMTRVSDQAAFAAEVSGHGALPFIALALSGAEQTRTVLERTRDALGHAPWGVGVLGFADEEIKAAQLEVVREIRPSHAIIAGGRPAQAAALEAVGISTFLHVPSPGLLKQFLEAGARKFVFEGAECGGHVGPRGSFPLWEAQLCVLDDFLAGAKNGTAAELQLLFAGGVHDERSAAMVTALAAPLSARGAAVGVLMGTAYLFTEEAVSAGAVLPLFQRQVIAAERTDLLETAPGHATRCVRSPFTDEFAAVKEELAARDVPGREAWERLEQLNVGRLRLASKGLERAGGELHEVGEERQLAEGMFMAGEVAVLRSAITTVADLHASVTTGAAGFLAARLDALGIEEPAIAASPEPLDIAVVGMACMFPGAPDLAAFWANVLAGADAVTEVPATRWDADLYHDLNGAGEKTPSRWGGFLPEIPFEPLRYGIPPASLPAIEPVQLLALEAARRALEDSGYGSRSFDRARASVVFGAEAGSDLSNAMTLRSVLPAYLGTLPPALAEQLPRLTEDSFPGILANVIAGRIANRLDLGGANYTVDAACASSLTAVDVACKELSGGTSDLVLCGGADLHNGINDYLLFASAHALSPSGRSAPFDSAADGIALGEGVGCVVLKRLADAERDGDRIYAVIKGVGSASDGRALGLTAPRPEGQYNALTRAYRNAGVSPAEVGLVEAHGTGTVVGDRTELGSLTRVFEEAGAEPGRCALGSVKSQIGHTKCAAGLAGLIKASLALHTGVKPPTLHLAEPNPAWDAQSSPFAFHTEARPWPAAPAERVAGVSAFGFGGTNFHVVLRAYEDGPPPVTAAQQWPAELFTFRGADRAAAVRAATELLALVEADPGPHEPWRLRDFALGASRRAESAGTRGARTWIALVAESAEELAALLRRAVAGEHAPKEGLFTADDTETGEVALLFPGQGSQRPGMFAELFVAFPELQRHLRLDETTARVLFPPTAFDEASRKEQQERITDTTVAQPALGLTGLAAFQLLTRAGIRPAMAAGHSYGELAALAAAGALTPDALVRTSRGRAAAVLGAAGDGDPGTMAAVAAGEPEVAAALAAAGLDGSVVTANRNSPRQTVISGPTDDVLTAVERLRAQGLGAKRIPVACAFHSPLVAAAGEAFAKVLADVPVGATDFPVWSNRTAARYPESPEAIRAELAAQIGAPVRFADQIEAMYEAGARVFVEAGPGSVLTRLVGTVLGDRPHRTVALEKGRHTGLVGFLAALAQLAVAGVDVRTSWLFQGRGAVDAARAPRRVRAAWTVDGHLIRTADGAIPAAALHPAERVPEALVTHSTSAGPVAATGSEALISEFLRTSREMIAAQRDVMLGYLGADPAVRPPAPAAAPATYADAPVTYADAPVTVTAPPAAPAAVAAVAEPAGGSVLSVVLDVIGERTGYPVDMIEPDLDLEADLSVDSIKRAEIAGELAARLGLTTTADTDVEELAKARTAAAITALVERVTGPGAVPTPAPAAQAPAPAAGPAPTAESVLALVLDVIGERTGYPVDMIEPDLDLEADLSVDSIKRAEIAGELAARLGLTTTADTDVEELAKARTAASIAELVAGARGEAAEARAPEVTPAATPQSAPAGAEPLVVAPKRLVMREFDLAPAEPAPTGDRLTGRNFLLLGTGPVADALTARLTAHGAHALTADEPPADEKFDGLIHLVAPDAPPVLPDTFPVYRQVLAGNPRWVLASGTSAGLRGFFRSVAREYPDTVARVVEHAPGTAPEDIAAGLVAELTADDREPVVLRSPGTRRGLRMAEEGLGLLGGTGAGPAGDGAAEAAALGLDTDSVVLLVGGARGITARFAATLAAACRCRIELFGRTALPEGAEDPALAPAVTTGELRAALIAGGLRVPAEIERAIGRIQAEREVRGTLRRLAALGSEVRYRTVDALDGDAVRRAVKEIHAEHGRLDAVVYAAGVIEDKLIAEKSPRSYDRVFRTKADGARELLDAISELPDGPRFAVLFGSIAATLGNRGQSDYAAANDALETLGTRWADAGAGRRGLTVHWGPWAPTGDGNHGMVTPELMRHYAARGIRLIDPDEGTMSLLRELAWGPEGDTAVVYTASGW

SEQ ID NO: 35531 - protein, 245 aa, Bacillus cereus G9241
MIKLVLIRHGQSLWNLENRFTGWTDVDLSENGLSEAREAGAILKKNGYTFDVAYTSVLKRAIRTLWIVLHEMDLAWVPVHKSWKLNERHYGALQGLNKDETAQKYGEEQVHIWRRSIDVRPPALTEDDPRYEMNDPRYKALKKGEFPLTECLVDTEKRVLAYWHSEIAPKLKNGNKVIISSHGNTIRSLVKYLDNLSSDGVVSLNIPTSIPLVYELDDDLRPIRHYYLSMDGEVPEGEIPKHISF

SEQ ID NO: 35532 - protein, 466 aa, Phaseolus vulgaris
MALFMAILGVLVLLLCFCSALLKWNEVRFRRKGLPPGAMGWPVFGETTEFLKQGPNFMKNKRARYGSFFKSHILGCPTIVSMDPELNRFILMNEAKGLVPGYPQSMLDILGTRNIAAVHGSTHKYMRGALLSIISPTLIRDQLLPKIDEFMRTHLMDWDNKVINIQEKTKEMAFLSSLKQIAGMESSSIAQPFMTEFFKLVLGTLSLPINLPRTNYRGGLQARKSIISILSQLLEERKASQDVHVDMLGCLMKKDENRYKLSDEEIIDLVITIMYSGYETVSTTSMMAVKYLHDHPKVLEEIRKEHFAIRERKKPEDPIDCNDLKSMRFTRAVIFETSRLATIVNGVLRKTTHDMELNGYLIPKGWRIYVYTREINYDPFLYHDPLTFNPWRWLGNSLESQSHFLIFGGGTRQCPGKELGIAEISTFLHYFVTRYRWEEVGGDKLMKFPRVVAPNGLHIRVSSFSN

SEQ ID NO: 35533 - protein, 880 aa, Silicibacter sp. TM1040
MSIDNTAAVTDASATTPTAQGEAQAMLDAVSRVHAMIEFELDGTIRTANENFLKVTGYQLDEIRGKHHRMFCDPDYVASDTYKDFWLQLAMGQPASGEFHRIGNGGKDVWIDAHYTPILDAAGKPYKIVKLATDITAQKESEAVNLRRRAGFEHSSVAMMTVDRDFVVKDINAATNTLLDEYKDVFSEVWPGFDPTKMIGSCIDRFHKNPAHQRNLLSDPKNLPFKTDITVGEMKFALNVDGIFDDDGTYVGNLLEWADVTEARLNAGVLNALDRSQAIIEFKLDGTITAANENFLAVTGYGLQEIKGQKHRIFVDETTASSTEYKDFWQSLAQGETRTGEFRRFAKDGSELWIQATYNPIFDGNGDVFKVVKFAVDITDQMKLRETAKTLSLVANETDNSVLIADADGRIEYVNPGFTKLTGHEYKDVIGKKPGELLQGRHTDPETRKRIRENINAQKPFYDEILNYTKDGEAYWISLAINPVFDEAGKLQKFVSIQTNITDVKLQQQDFNCKLEAISNASAVIEFTPDGNVIDANENFCATTGYSLEEIKGRHHRMFCERDYAASPEYTAFWERLRSGISDTGKYQRFGKGEKEIWLSASYSPIFDQENNVVKVVKFANDITTAVELEREVSRIASEFVTRSEDISGQANKVAEGAQSLGCTTEEISASIEELSASIDSIAQNSKHSDDIAQSTRDEADLGAKAIERSIESMELINSSSEEINEIVKVISEIASQTNLLAFNAAIEAARAGEHGLGFSVVADEVRKLAERSSQATKEISKLINETVKRVSQGSQVSIEAGDAFKKILSGIKDTTDSIKQISVAAREQQTAARDVSDAIQNIVDATEQAVIASDAIAASTNELNGGAQELTQEIAKLGQ

SEQ ID NO: 35534 - protein, 482 aa, Nicotiana glutinosa
MGFISGNKKLLSKIATSDGHGENSAYFDGWKAYENDPFHLTQNPNGVIQMGLAENQLCFDLIQEWVVNNPKASICTAEGAQDFNDIAIFQDYHGLREFRKAVSRFMEKVRGDKVTFDPDHIVMSGGATGAHETLAFCLADPGDAFLVPTPYYPGFDRDLRWRTGVQLFPVVCESFNNFKITKEALESAYEKAQESNIRVKGLLINNPSNPLGTILDRETLKDILRFINDKNIHLVCDEIYAATVFSQPDFISISEVMQEVNGCNENLVHVVYSLSKDLGFPGFRVGIIYSYNDVVVSCARKMSSFGLVSTQTQFLIASMLSDEIFVENFIAKSSVRLSQRHGFFTKGLAQVGISSLKSNSGLFFWMDLRRLLKESTFEAELDLWHIIINEVKLNVSPGVSFHCSEPGWFRVCFANMDDETMRVALRRIKHFVLQRKGLIEVATKKQCRRRRKREISLSFRRLDDFMNSPHSPMSSPMVQART

SEQ ID NO: 35535 - protein, 613 aa, Mycoplasma mobile 163K
MNTNKLDTLAINTLKVNGIAQILKANSGHPGIVLGAAKIMHNLFSNHINFNVENPNWINRDRFILSSGHGSALLYAQLRAIGLLDVKELHNFRQVDSKTPGHPEYLHTLGVEATTGPLGQGVAIAVGIALAEANLNARFNEISHFTYVLLGDGDLQEGVANEAMQFAGTNQLNKLILIHDSNRIQLDTPVENVSKVDIKKMVESFGFQHISATNENFNEAVEIAKKNSKPSFIEVRTIIGEDSIEAGTTKVHGTPLTKEDFSNLKKKLNWEYSDDFHLPIEVIEHYKKTLHTRSKKAFNNFKASKSLETFLATKSIDIKVELPKNKATRETGGLVIDFLNKNDIRWIGGSADVGSSTKGLGGDGDFSISNKKGRNIRYGVREFAMASIANGIALHSNFKTFVTTYFSFSDYLKPAARLSALMNLPVIYIFTHDSIQVGEDGPTHQPIEQLAMWRSIPNFKVYRPADEKEVLGAFKLALESKSNPSVLVLSRQAITSLEETNANKVSQGAYHVLKSSSEWTLVSTGADLANAYKIAKELKLNLVSLPSFDFKNISWDINKAISIETATTFGWTKFAKYNFGIDTFGASGKPDDVMKKFEMDLNSLLPKIKKLIK

SEQ ID NO: 35536 - protein, 556 aa, Mycobacterium bovis AF2122/97
MPDDIAAADPTDTQPHLRRDLANRHIQLIAIGGAIGTGLFMGSGRTISLAGPAVMVVYGIIGFFVFFVLRAMGELLLSNLNYKSFVDFAADLLGPAAGFFVGWSYWFAWVVTGIADLVAITGYARFWWPGLPIWVPALVTVALILAVNLFSVRHFGELEFWFALIKVAAIVCLIAVGAILVATNFVSPHGVHATIENLWNDNGFFPTGFLGVVSGFQIAFFAYIGVELVGTAAAETADPRRTLPRAINAVPLRVAVFYIGALLAILAVVPWRQFASGESPFVTMFSLAGLAAAASVVNFVVVTAAASSANSGFFSTGRMLFGLADEGHAPAAFHQLNRGGVPAPALLLTAPLLLTSIPLLYAGRSVIGAFTLVTTVSSLLFMFVWAMIIISYLVYRRRHPQRHTDSVYKMPGGVVMCWAVLVFFAFVIWTLTTETETATALAWFPLWFVLLAVGWLVTQRRQSRRSFGFHCQVVGVRQQLGRGMARLAMKIHARPKLRSAVVVEPVSAGEPGARRSAKSVRKLASDDSQSAHCPVAVVGLADGGRDPQYHHDGPDR

SEQ ID NO: 35537 - protein, 569 aa, Magnaporthe grisea 70-15
MAVTVSRASEPTPMVRKDSAVDLGSPTPLPVTLLSGFLGSGKTTLLQHILRSDHGLRIAVIVNDIGAVNVDANLINHHVTQTTEKVIALQNGCICCTLRGDLLEELVRLSELHTFDYVIVESSGISEPEQVAETFDSKLAETMGALGDGSAGAEGALDEAMQAVLKKLADAGGVGSFARLDTTVTVIDAFTIMNDFHTDQLLSSRRGDVGPEDERTVSDLMVDQIEFADVIVLNKTDMVDRATKQRVIDLITKLNHRAKVIETSHGKVDVKAIVNTGLFDLEHAQTGYGWLQDLHELTLREVSYHGPLESSSVPIKTSANMQPQVNGRKTITPKPETEEYNVRNFVYRRQRPFHPLRLYKLLFDKFILQLEHPEEDDDQDEEEDEEEDEDDEWEEANSDQEEQEADPLDAPSNEAILANKRASPLFARLFRSKGEFFLATRPHRAGEWSQAGAMLTMTGGRPWFATLPESEYLTGNADIDALVMHDLESGGEWGDRRQELVFIGEKLDIPALERVLDACLLTDEEWKKWQKVMRSGVLSPQGKMERLARLFDDGFPDWPEDEGHEGHGH

SEQ ID NO: 35538 - protein, 472 aa, Azorhizobium caulinodans
MAETSYDVIVIGGGPGGYVAAIRAAQLGFKTAVVEKKHLGGICLNWGCIPTKALLRSAEIYHYMEHAKDYGLSAEKIGFDIGAVVKRSRGVSQQLNTGVGFLMKKNKIDVIWGSATLTAPGKIKVEAAPDAPKGALGGGDYLAKHIIVATGARPRALPGIEPDKKLIWTYFEAMVPDRMPKSLLVMGSGAIGIEFASFYKTMGADVTVVEVMPQILPVEDAEIAALARKRFEKQGMKILSGAKVTKLEKKADSLTVHVVNSKGAKQDFQVERMISAVGVVGNVDGLGLENLGVKIERGIIVTDGYGRTNVPGVYAIGDVAGAPMLAHKAEHEGVICVETIKGLHTHPMDKAKIPGCTYCQPQVASVGLTEAKAKEDGRDIRVGRFRFGGNGKAIALGEDQGLVKTIFDKKTGQLLGAHMVGAEVTELIQGFVVAMNLETTEEELMHTVFPHPTLSEMMKEAVLDAYGRVLNA

SEQ ID NO: 35539 - protein, 199 aa, Pasteurella multocida subsp. multocida str. Pm70
MLDVKILAQYAGLIFDMDGTVVDTMPCHERAWLKVADKVGYPLSPSVMYELAGAPLRTIAQEMMLRANMPLTQLQEVMKLKRQFGHALIMAEATLLPAAEIVKSYHNQKPMALGTGSHREITHKLLNKLEIAHCFDAVVTSEDVAKHKPEPDTFLRCAELIGVNPQTCLVFEDADLGVQAGLAAGMHVFDVRTHTLITE

SEQ ID NO: 35540 - protein, 330 aa, Rhodobacter sphaeroides 2.4.1
MPDTILVTGGAGFIGSHTCKALARAGHRPVSFDNLSTGHADAVRFGPLVQGDVRDPNAVEAALRAHGAKAVIHFAASAYVGESMADPAKYYDNNVGGMIGLVQGCRAAGVSRIVFSSSCATYGTPDRLPIRETTPQRPINPYGRTKLIGEEILRDLGVEGMRHVALRYFNAAGADPEGELGERHDPETHLLPLALRAASGQGGPLSIFGTDYPTPDGTCIRDYIHVADLARAHVLALGRLMAGGESLAVNLGTGRGQSVREIVAAIERITGRAVPVRLEARRPGDPAELVADPALAASELGFRTQLSDIGSIVRHAAPWFGLEPAHVEAA

SEQ ID NO: 35541 - protein, 641 aa, Helicobacter pylori 26695
MRLSNADLERLKSMANALRFLCADMIDKANSGHPGVCLGLADVMVVLSLHLNLNPTNPKWLNRDRLVFSGGHASALAYSLLHLWGFDLSLEDLKRFRQLHSKTPGHPELHHTEGIEITTGPLGQGFANAVGFSMASQYAQNLLDKEAISHKVYCLCGDGDLQEGISYESASLAGHLRLDNLIVIYDSNQISIEGAINISFSEQVKTRFVAQNWEVLECDGHDYQAIHNALEEAKKSTKPTLLIAHTIIGKGAVGLEGSEKTHGSPLNKEVLKQSKENAQINPNESFIISPKNKMHFEEVKVRGVSLEALWEKSLSPKIKEKIHALKDFDFSAIHYPTFKKGESLATRVSNGMILNAIAKECEGFLGGSADLAPSNNTQLKHSGDFPLGQNLHFGIREHAMGAITNALAAYGLFVPFCATFFVFSDYLMPSIRLSALMKLKALFIFTHDSIGVGEDGATHQPIEQLNHLRALPNFYAFRPSDAFENTACMQIALSLNAPSGLILSRQNLPVLDEVSKERVLKGAYVKHHSKDPIITLVASGSEVSLALESAKILERENIQTQVISAPCFDLLIEQDESYLKELFKGKVLVIEASRAIEWYRFADKIIGMDSFGSSAKGDKLFEKFGFSVENITAQAKRLLNA

SEQ ID NO: 35542 - protein, 916 aa, Cucumis sativus
MRLSTAGFSPQAPEGERRVLNSELWHACAGPLVSLPAVGSRVVYFPQGHSEQVAISTNREVDAHIPSYPSLPPQLICQLHNVTMHADIETDEVYAQMTLQPLTAQEQKEPYLPAELGAPSKQPTNYFCKTLTASDTSTHGGFSVPRRAAEKVFPPLDFSQQPPAQELIARDLHDNEWKFRHIFRGQPKRHLLTTGWSVFVSAKRLVAGDSVIFIWNEKNQLLLGIRRANRPQTVMPSSVLSSDSMHLGLLAAAAHAAATNSRFTIFYNPRASPSEFIIPLAKYVKAVYHTRVSVGMRFRMLFETEESSVRRYMGTITGISDLDSTRWPNSHWRSVKVGWDESTAGERQPRVSLWEIEPLTTFPMYPSPFPLRLKRPWPTGFPSFHGLKEDDLGLNSQLMWLRGDGLDRGIQPLNFPGIGVAPWMQPRLDASMVGLQPEIYQAMAAAALQEMRTVDPAKAQAASLLQFQQTQNLPNRPANFMPPQMLQQPQPQPQPPQTFLQGDENQHLSHSQAQSQPTAVLQQEIKHQTFNNHPQQQQQQQQQQQQQQQQPQQQVFDHHQIPSPMSTMSQFSSASQSQAQSLQTIPPLCRQQSFSDSNPNHVTSPIISPLHSLLGGSFSQDESSQMLNLPRNNPMIHSSTWPSKRAAIDPLLSSGNSQFVLSQGENIGTTPANISQNAFTLPPFPGRECSLDQGNVDPQSNLLFGVNIEPSSLLMQNGMPNLRGICSDSDSTAIPFSSNYVNTAGTNFSANPTGTGTPSNCNEDSGFLHSPENTGQVNPPTTTFVKVYKSGSFGRSLDISKFSRYHQLRSELAHMFGLEGELEDPLRSGWQLVFVDRENDVLLLGDDPWPEFVNSVWCIKILSPQEVQDMGKRGLELLNSVPIQRLSNGSCDNYANRQESSRNMNSGITSVGSLEY

SEQ ID NO: 35543 - protein, 397 aa, Frankia sp. EAN1pec
MENAVIVDVVRTPSGRGKPGGALSETHPVELLATTLKALTSRNDFDPALIDDVIAGCVGQAGEQSANIGRSAVLSAGYPESVPATTVDRQCGSSQQALHFAAQGVMAGAYDVVVACGVESMSRVPMRFAAAGKDPRGPGMIARYPEGLANQGIGAELIAARWKLTREELDEFSALSHQRAAATAEAGGFDNEIVPVEALAPDGSTFTHTVDQTVRPTTTAEGLAALKPSFYTEQFAQRFPEIGWHITPGNSSPLTDGASAALIMSESKAVELGLRPRARFHAFALAGSEPLIMLTGPAPATRKILARSGLRIDDIDAYEVNEAFASVPLFWAKEFDADPARLNPRGGAIALGHPLGGSGVRLMATMVNYLEATGGRYGLQTMCEGGGMANATIIERL

SEQ ID NO: 35544 - protein, 376 aa, Nicotiana benthamiana
MADANMGGGGGGQFPDFPSVLTHGGQYVQYDIFGNFFEITTKYRPPIMPIGRGAYGIVCSVLNTELNEMVAVKKIANAFDNYMDAKRTLREIKLLRHLDHENVIGLRDVIPPPLRREFSDVYIATELMDTDLHQIIRSNQGLSEDHCQYFMYQLLRGLKYIHSANVLHRDLKPSNLLLNANCDLKICDFGLARPNIENENMTEYVVTRWYRAPELLLNSSDYTAAIDVWSVGCIFMELMNRKPLFAGKDHVHQIRLLTELLGTPTEADLGFLQNEDAKRYIRQLPQHPRQQLANVFPHVNPLAIDLVDKMLTLDPTRRITVEEALDHPYLAKLHDAGDEPICPVPSSFDFEQQGIGEEQIKDMIYQEALSLNPEYA

SEQ ID NO: 35545 - protein, 321 aa, Silicibacter sp. TM1040
MAKMLIDGALTEKPKQGDGVFRRMSSGFRGWIEPHRDAEFPAEAGRYHLYVSMACPWSHRTTIVRALKGLEEIISVTQMDPLAGPDGWRIDTEAFDPAVGVPSDDYLYQVYQRAEPGQTGPVTVPVLFDKRSNRIVSNDSGQIMRMLNSAFDEFTYRAPDFYPPDLQQDIDRISDEIYAPINNGVYRAGFATTQAAYDEAITALFEKLDELDALLATRRYLTGERLTEADWRLFTTLVRFDPVYVTHFKTDRKRIADYGNLSPYLRDLYQVPGVAGTIDMNAIRQHYFLSHRHINPHGIVSAGPQLDLNRPHGRDIPVLGS

SEQ ID NO: 35546 - protein, 205 aa, Vibrio sp. Ex25
MTAETTVKDENIVWHQHSVDKQFRAELKKQKPAVLWFTGLSGAGKSTVAGALENRLAALGYHTYLLDGDNVRHGLCSDLGFSEQDRRENIRRIGELAKLMADAGLIVLSAFISPHRAERQLVRDLLPEGEFIEVFVNASLEVCEGRDPKGLYRKARAGEIPNFTGIDSEYQAPENPEIDLPAGEKSVDELVDLCLEALKSRAVIR

SEQ ID NO: 35547 - protein, 330 aa, Sinorhizobium meliloti
MGRLVNGVWQDVWYDTRATNGHFKRSESQFRNWITADGSPGPSGEGGFEAEAGRYHLYVSLACPWAHRTLIFRKLKKLEDLVSLSVVDPLMLANGWEFKGEDGEGENGGTADHLFGSRMLWEVYLRADPVYSGRVTVPVLWDKRKNTIVSNESAEIIRMFNSAFDRLTGSTEDFCPQELRPEIDALNARIYDAVNNGVYKAGFATSQAAYEESVTALFAMLDELENRLASKRYLTGDRLTEADWRLFTTLVRFDPVYVGHFKCNIRRIADYPNLYGYLRELYQVPGVAETVNMHHIKAHYYRSHTTINPTGIVPVGPALDLEAPHGRDRL

SEQ ID NO: 35548 - protein, 432 aa, Saccharomyces cerevisiae; identical to SEQ ID NO: 743

SEQ ID NO: 35549 - protein, 588 aa, Brassica napus
MASTFTATSSIGSMVAPNAHKTDKKLMNKLSSSSFGRRQNVFPKLRRSSPAVVCAAKELHFNKDGTTIRKLQAGVNKLADLVGVTLGPKGRNVVLESKYGSPRIVNDGVTVAREVELEDPVENIGAKLVRQAAAKTNDLAGDGTTTSVVLAQGFIAEGVKVVAAGANPVLITRGIEKTAKALVAELKKMSKEVEDSELADVAAVSAGNNAEIGSMIAEAMSRVGRKGVVTLEEGKSAENALYVVEGMQFDRGYVSPYFVTDSEKMSVEFDNCKLLLVDKKITNARDLVGVLEDAIRGGYPILIIAEDIEQEALATLVVNKLRGTLKIAALKAPGFGERKSQYLDDIAILTGATVIREEVGLSLDKAGKEVLGHAAKVVLTKETSTIVGDGSTQDAVQKRVTQIKNLIEQAEQDYEKEKLNERIAKLSGGVAVIQVGAQTETELKEKKLRVEDALNATKAAVEEGIVVGGGCTLLRLASKVDAIKAALDNDEEKVGADIVKRALSYPLKLIAKNAGVNGSVVSEKVLSNDNVKFGYNAATGKYEDLMAAGIIDPTKVVRCCLEHAASVAKTFLMSDCVVVEIKEPEPVP

SEQ ID NO: 35550 - protein, 168 aa, Brassica napus
  misc_feature (152)..(152): Xaa can be any naturally occurring amino acid
  unsure (1)..(168): unsure at all Xaa locations
MVNAMVERATSEMLIGPDWAMNLEICDMLNSDPVQAKDVVKGVKKKIGSRNPKTQLLALTLLETIVKNCGDMVHMHVAEKGVIHEMVRIAKKKPDFHVKEKILVLIDTWQEAFGGPRARYPQYYAGYQELLRAGAVFPQRSERSAPVFTPPXTQPLSSYPPNLRNAGP

SEQ ID NO: 35551 - protein, 474 aa, Rhizobium etli
MSISKFSSTFARVGAALAALLAPAVAFAQETAAPAARPRLPRFTMDKGDNTWMLVSSALVLLMTIPGLALFYGGLVRAKNMLSVLMQVFMITAVVSLIWVTYGYSLAFTDGGSLNSFIGGFSKAFLAGVNTSSLAETFSKGVAIPEYTFIVFQMTLPCITPGLIVGAFAERVKFSAVMLFVVLWVTFIYFPMAHMVWFWGGPSSYSAPAGLIFSYGAIDFPGATVVHINAGNRGLVAAIMLGKRTGYKKEIMRPHSMTLTMVGASLLWVGWFGFNAGSNLEANGYASLAMINTFVAAAAAVSWCIVESLARGKASMLGGASGAVAGLVAITAAAGFAARWASIVLGLVVSPICYFFVDVVKNKFNYDDSLDVFGVHCIGGIIGALGTGILVNPALGGAGIVDYSTADFAATYRGTATQVLNQAKGVLTTLLWSGIGSAILYKIVDVVIGLRVSVEAEREGLDLSTHGEPAYHAS

SEQ ID NO: 35552 - protein, 461 aa, Mesembryanthemum crystallinum
MQSQSNDEDNNAHYDFDLFVIGAGSGGVRAARFSAKFGAKVGICELPFHPISSEVIGGVGGTCVIRGCVPKKILVYGASFSGELQDARNYGWELNENIDFNWKKLLQKKTDEILRLNNIYKRLLSNAGVKLYEGEGKIVSPNEVQVTQLDGTKLSYSAKHILIATGSRAQRPDIRGQELAITSDEALSLEELPKRAVILGGGYIAVEFASIWRGMGATVDLFFRRELPLRGFDDEMRAVAARNLEGRGVNMHPRTNLTELVKTDGGIKVRTDHGEELMADVVLFATGRSPNTKRLNLDAVGVNVDKTGAIKVDDYSQTSVPSIWAIGDVTNRMNLTPVALMEGTCFAKSLFGGQPTKPDYKDIPCAVFSIPPLSVVGLSEEQAIEQSNGDVLVFTSSFNPMRNTISQRQEKSVMKLVVDAETDRVLGASMCGPDAPEIMQGIAVALKCGATKAQFDSTVSR

SEQ ID NO: 35553 - protein, 161 aa, Trema virgata
MSSSEVDKVFTEEQEALVVKSWAVMKKNSAELGLKFFLKIFEIAPSAKNLFSYLKDSPIPLEQNPKLKPHAMTVFVMTCESAVQLRKAGKVTVRESNLKRLGAIHFKNGVVNEHFETRFALLETIKEAVPEMWSAEMKNAWGEAYDQLVAAIKFEVKPSST

SEQ ID NO: 35554 - protein, 249 aa, ASPERGILLUS NIDULANS FGSC A4
MTEQTLPDYVLDPSAVLNDTAASWRYGRIPDYTKTREFYEKTKTTSHPATSLASLVQNLVKNWEIEASFKTSLDDWRTINPETYTFSLNGGPAQPGEHMLRVGTYNALINANEYYDPEQNDFEGSHKSFKRMMPTFAWEVKEVYCGPPVVVARWRHWGLMKGDYVGKNGRGEVVRVKAHGGPIDIEGIVVAKVNEKLQLEKIDVWFDPMEMFRQISRDEQREELSRGDSAAAAPGDLAGACPVMRAGNE

SEQ ID NO: 35555 - protein, 212 aa, Vibrio sp. Ex25
MLNKQTLISIEDALPGRDQPMQVEDHHFVNKSNLKAPLEPHQQQILLGMGCFWGAERVFWQLDGVISTSVGYAGGYTPNPTYEEVCTGKTGHTEVVRVVFDERVISLEKLLAVFWEKHDPTQGMRQGNDLGTQYRSAIYTYSAKQQESAEKSKLLYQQALQEELRANITTEIQPAGPYYFAETYHQQYLAKNPDGYCGIGGTGVCFPPSLQS

SEQ ID NO: 35556 - protein, 204 aa, Triticum aestivum
  misc_feature (127)..(127): Xaa can be any naturally occurring amino acid
  unsure (1)..(204): unsure at all Xaa locations
MVQSKKKFRGVRQRHWGSWVSEIRHPLLKRRVWLGTFETAEEAARAYDEAAILMSGRNAKTNFPVPRSANGEIIVAPAVARDGRGGVGSSSSGAAGASSLSQILRAKLRKCCKTPSPYPSPASDLDXPKKSTLGVWQKARGAPAPNSKLGHEPSRLNKEAGRTAGGPPQRPNGQPRGPGNSFGPSHEHPPPTGLPRSVRPTGRD

SEQ ID NO: 35557 - protein, 402 aa, Thermoplasma acidophilum DSM 1728
MEYRFSDIFRYIKPSEIRSLLKYTSDPELISFGGGMPNPESFPIKEMKEILNDVIDNYGKKALQYGTTEGLDPLRDELAKYVEKTEGIRAKREEIILTTGSQQALYAIGKIFTNPGETVITEGPTYVGAISAFNSNKAEMIAIDLDDKGMDVDALEERIRNFMANGTKPKFIYVIPTFQNPAGTTMVLDRRKQLLEISKRYEIPIVEDNPYGQLRYDGDPVPSIKSMDDDGNVIYLGTFSKVMAPGLRLGYVIADRQIVEKINLVKQGLDLASDSLSEYIAYEYLKRGDIYRQIPKTVSLYRKKRDLMLKSIAEYFPEGVKYTKPNGGMFLWVSLDEKIDTTRMLERALKAKVAYVSGAAFYPHGEKHNSMRLNFTYSDDDKIVEGIKRLAYVINEEMEVVE

SEQ ID NO: 35558 - protein, 320 aa, Emericella nidulans
MDKSQQPSSFQQLEKLGEGTYATVFKGRNRQTGELVALKEIHLDSEEGTPSTAIREISLMKELKHESIVSLYDVIHTENKLMLVFEYMDKDLKKYMDTRGDRGQLDQATIKSFMHQLMSGIAFCHDNRVLHRDLKPQNLLINKKGQLKLGDFGLARAFGIPVNTFSNEVVTLWYRAPDVLLGSRTYNTSIDIWSAGCIMAELYTGRPLFPGTTNEDQLQKIFRLMGTPSERSWPGISQLPEYRANFHVYATQDLGLILPQIDPLGLDLLNRMLQLRPEMRIDAHGALQHPWFHDLPQLQAQLQQQQMAGYGGMMPPQQAY

SEQ ID NO: 35559 - protein, 368 aa, Pseudomonas fluorescens PfO-1
MTTLKSTPRADGFYMPAEWAPQTQTWMIWPERPDNWRLGGKPAQAAHAAVAKAIARFEPVTVAVSAGQYENARARLDVPNIRVVEMSSDDAWVRDSGPTFVINNSGEVRGVNWDFNAWGGFDGGLYSPWNRDSQVGGKILEIERSPRYRTEGFVLEGGSIHVDGEGTLITTEECLLNRNRNPHLGREEIEAMLSENLSVDKIIWLPDGLFNDETDGHVDNFCCYVRPGEVLLAWTDDPQDPNYPRCQAAMKVLESSTDAKGRPFTVHKMPIPGPLFATEEECAGVDPVDGTQERNPSVRLAGSYVNFLIVNGGIIAPSFDDPMDAPAREILQNLFPQHEVVMVPGRELLLGGGNIHCLTQQQPAPHKE

SEQ ID NO: 35560 - protein, 547 aa, Escherichia coli
AAKDVKFGNDARVKMLRGVNVLADAVKVTLGPKGRNVVLDKSFGAPTITKDGVSVAREIELEDKFENMGAQMVKEVASKANDAAGDGTTTATVLAQAIITEGLKAVAAGMNPMDLKRGIDKAVTAAVEELKALSVPCSDSKAIAQVGTISANSDETVGKLIAEAMDKVGKEGVITVEDGTGLQDELDVVEGMQFDRGYLSPYFINKPETGAVELESPFILLADKKISNIREMLPVLEAVAKAGKPLLIIAEDVEGEALATLVVNTMRGIVKVAAVKAPGFGDRRKAMLQDIATLTGGTVISEEIGMELEKATLEDLGQAKRVVINKDTTTIIDGVGEEAAIQGRVAQIRQQIEEATSDYDREKLQERVAKLAGGVAVIKVGAATEVEMKEKKARVEAALHATRAAVEEGVVAGGGVALIRVASKLADLRGQNADQNVGIKVALRAMEAPLRQIVLNCGEEPSVVANTVKGGDGNYGYNAATEEYGNMIDMGILDPTKVTRSALQYAASVAGLMITTECMVTDLPKNDAADLGAAGGMGGMGGMGGMM

SEQ ID NO: 35561 - protein, 96 aa, Holospora obtusa
MTKFKPLGDRILVKRVEAEERTSGGIVIPDTAKEKPIEGTVIAVGPGARDPQGNLIALEVKQGDRVLFGKWSGTEVKLSGEDYIVMKESDVFGTIA

SEQ ID NO: 35562 - protein, 131 aa, Brassica napus
HASADAWAVSIKILPVGIHMGQIEEIKVAEETAEKVKGLRERFKEKIVMLGVDDLDMFKGISLKFWAMGQLLEQNKELRGKVVLVQITNPARSSGKDVQDVETQIHLIADEVNNKFGRPGSGYKPIVFVNG

SEQ ID NO: 35563 - protein, 488 aa, Nostoc punctiforme PCC 73102
MQIQTPDWVKHAVFYQIFPDRFARSKQPRKRLLQEARWEDWDSMPTLQGYKGGDLWGIMEDLDYIQNLGINAIYFTPIFQSASNHRYHTHDYYQVDPMLGGNEAFKELLDAAHQRNIKVVLDGVFNHSSRGFFFFHDVLENGPHSPWVNWFKIEGWPLSPYNGEFPANYVGWAGNRALPEFNHDNPEVREYIMEIAEYWLKFGIDGWRLDVPFEIKTPGFWQEFRDRTKAINPEAYIVGEVWGDSRQWLDGTQFDGVMNYLFAGPTIAFAAGDRVVLEQVQSRDYQPYPPLFAAEYATKIQEVLQLYPWEIQLTQLNLLASHDTARLMTIAGGDIASVELSTLLLLTFPGAPSIYYGDEVGLPGGIDPDSRRGFPLEANWNQEIFNTHRQLITIRQTYPALRTGDYQVLYAQGQLYLFARTLGTEELIIAINAGTSSATANVDVASLHTQPNKLLYGTAEAEWNGEEGTQQLSLTLPARSGCILGTGD

SEQ ID NO: 35564 - protein, 673 aa, Vibrio vulnificus CMCP6
MKQVLTTLSLAVTAALLAGCNASSKVDTPPTANAYRCDAVSMNKADDLRIYQVMVESFVNGNDQIGHGTGYGTSHHKGDIQGIIDSLDYIQSLGMNGIWLTPIFNSEPKAGQDHWADRLDATGYFATNYFEVDPRFGTMDDAKRLVEEAHARGLYVFFDGVFGHHKGNVAASPTGKLPAGSNNPVDYPESLAFYQEVAEFWIKELKIDGWRLDQAYQVPKEAWVEIRKTVDNASKAVTYTNSKGETVNPLGYMVAEIWAGENRIIETGYGSNENPALCSAFDFPVRYRLVETFGVNEAGVGGKSGEWLAEGMNLHALYPEHAKPNLMIGNHDLVRFGDLLQRGNIAQPQDEEYWLRHKAVFAFQAAYTGPITLYYGDEIGDQVENFAAKVEQDCAVKGLCDDHVARSSGKVEGVTATLNANEQDLKHYIQQLMNLRNQHPALSQGKRVNVLADNKTYIDHKSTDSEAILYVANISKHLQYLQLDAVKAGSEGHLTDLINGEEIKLIDGQYLIPLAPLEARFLSIEQPAKAGPQIAKMALASGIGEGFMAQCDNPTVDEKGPMRKKLYVVGDFSDSSWQHKDHRQFEYKGDGIYQVVTNEKPGSYRMQYAAKTWTPQFTAKGLSLKLGQENPLIKGGYGKDTAVTIMDEGRYVWSLQFDEQGTPLNVMASKCAE

SEQ ID NO: 35565 - protein, 95 aa, Paracoccus denitrificans
MAFKPLHDRVLVRRVQSDEKTKGGLIIPDSAKEKPAEGEITSVGEGARKDSGELIAPAVKAGDRVLFGKWSGTEVTVDGEELLIMKESDILGIIA

SEQ ID NO: 35566 - protein, 393 aa, Streptococcus pneumoniae TIGR4
MKHLKTFYKKWFQLLVVIVISFFSGALGSFSITQLTQKSSVNNSNNNSTITQTAYKNENSTTQAVNKVKDAVVSVITYSANRQNSVFGNDDTDTDSQRISSEGSGVIYKKNDKEAYIVTNNHVINGASKVDIRLSDGTKVPGEIVGADTFSDIAVVKISSEKVTTVAEFGDSSKLTVGETAIAIGSPLGSEYANTVTQGIVSSLNRNVSLKSEDGQAISTKAIQTDTAINPGNSGGPLINIQGQVIGITSSKIATNGGTSVEGLGFAIPANDAINIIEQLEKNGKVTRPALGIQMVNLSNVSTSDIRRLNIPSNVTSGVIVRSVQSNMPANGHLEKYDVITKVDDKEIASSTDLQSALYNHSIGDTIKITYYRNGKEETTSIKLNKSSGDLES

SEQ ID NO: 35567 - protein, 459 aa, Malus x domestica
MMPFSVLQVKRLQLELITPAKPTLQEAKFLSDIDDQEGLRFQVPVIMCYKDNPSLNKNCNPVKVIREALSRALVYYYPLAGRLKEGPNRKLMVDCNGEGILFVEASADVTLEQLGDKILPPCPLLEEFLFNFPGSDGIIGCPLLLVQVTCLTCGGFILALRVNHTMCDAPGLLLFLTAIAEMARGAHAPSILPVWERELLFSRDPPRITCAHHEYEDVIDHSDGLYASSNQSNMVQRSFYFGAKEMRVLRKQIPPHLISTCSTFDLITACLWKCRTLALNINPKEAVRVSCIVNARGKHNNVRLPLGYYGNAFAFPAAISKAEPLCKNPLGYALELVKKAKATMNEEYLRSVADLLVLRGRPQYSSTGSYLIVSDNTRAGFGDVNFGWGQPVFAGPAKALDLISFYVQHKNNTEDGILVPMCLPSSAMERFQQELERITQEPKEDICNNLRSTRIMSMM

SEQ ID NO: 35568 - protein, 393 aa, Nicotiana benthamiana
MDGSGQQSDTMMSDAGAEQPPPAAQPVAGMDNIPATLSHGGRFIQYNIFGNIFEVTAKYKPPILPIGRGAYGIVCSALNSETIENVAIKKIANAFDNKIDAKRTLREIKLLRHMDHENIVAIRDIIPPPQREAFNDVYIAYELMDTDLHQIIRSNQGLSEEHCQYFLYQILRGLKYIHSANVLHRDLKPSNLLLNANCDLKICDFGLARVTSETDFMTEYVVTRWYRPPELLLNSSDYTAAIDVWSVGCIFMELMDRKPLFPGRDHVHQLRLIMELIGTPSEAEMEFLNENAKRYIRQLPLYRRQSFTEKFPHVHPDAIDLVETMLTFDPRRRITVEGALAHPYLNSLHDISDEPICMTPFSFDFEQHALTEEQMKELIYRESLAFNPEYQHM

SEQ ID NO: 35569 - protein, 327 aa, Anaplasma marginale str. St. Maries
MERMSKAVVIDRNGDAGVLKYVDVDVGEPGKGEVLIEHTAIGLNRYDVEYRTGTRKVPSFPAVLGVEAVGVVRQLGPGVEALNVGDRVGYCTAPGGAYSETRLINQKYLFKIADDISDEVAAAVMLKAMAAHYLTHRIYDIRPGTFALVHGVSGGVGQILCQWARYKGGKVIGVVESGARLGVAKEVGCAYVVNLKDDDITKEVMTITGDRGVNVVYDPIGAAVSKMSFGVLGHFGLYISYGSISGRMPSVSMSMLSARSWFITSPTIQHYKRSRLELGLTAMEIFEMLRRGHIRAEINKTYKFKDIAKAHKDLEDRKLSGLGVITM

SEQ ID NO: 35570 - protein, 110 aa, Glycine max
  misc_feature (78)..(78): Xaa can be any naturally occurring amino acid
  misc_feature (96)..(96): Xaa can be any naturally occurring amino acid
  unsure (1)..(110): unsure at all Xaa locations
MDYQYILGGIMACSFAFLYVVYSFGAKVTDSSSIHVKSNECAKISSENGICSHEDAGSADIIIVGAGVAGSALACTLXKDGPAKCIVIERDLSEPXQIRGEMLPPGGYLK

SEQ ID NO: 35571 - protein, 464 aa, Yarrowia lipolytica CLIB122
MRANFIQPQQVHQGFVNGNAGPDPRMGMMGQAGGAQGVNGMMRSTATQNQGGQQAQNSTPVRSAQQPGQQQQQQQQPNSGQRPGSALGLNSTPGQQTGGQQQGFPGMVNPLPMGMRNPMMMGQQGGVSGGRRGPGGAGGPPMMGAAQMQHLSQQQQQQQHPAPVREVWGFNLEEEMARVREVSERARYVSLECKFPGIVARPIGQFRSTNEYHYQTLRANVDLLKVIQVGLSFSDDSVAPPVTWQFNFRFDETQDMCSEDIKDLLKQSGVDFVRHQQHGIDAFNFGELLISSGLVLDDGIEWITFHAGYDLGYVLGIMLNKELPAEEQQFLAQVRRYFPRVWDLKNAVKNSGLTIRSNSLSSLAEDLRVRDQEVTNNQAGADAKLAAECFFEMRRYLGDQMALEMANKLCGLSELHPEQLMLLEEDEDAPGEDLTEVPVPTVQKPKEKQDGVNVFQFSKMGGGK

SEQ ID NO: 35572 - protein, 390 aa, Bacillus cereus ATCC 14579
MREAVIVAGARTPIGKAKRGSLKTVRPDDLGALVVKETLKRANYEGPIDDLIFGCAMPEAEQGLNMARNIGGLAGLSYDVPAITINRYCSSGLQSIAYGAERIMLGHSEAVLSGGAESMSLVPMMGHVVRPNSRLVEAAPEYYMGMGHTAEQVAVKYGISREEQDAFAVRSHQRAAKALAAGNFADETVPVDVTLRSVGSNNKLQEETITFAQDEGVRAETTLDILGKLRPAFNVRGSVTAGNSSQMSDGAASVLLMDREKAVSDGMKPLAKFRSFAVAGVPPEVMGIGPIAAIPKALKLAGLELSDIGLFELNEAFASQSIQVIRELGLDEEKVNVNGGAIALGHPLGCTGAKLTLSLIHEMKRRNEQFGIVTMCIGGGMGAAGVFELL

SEQ ID NO: 35573 - protein, 206 aa, Oryza sativa (indica cultivar-group)
MASRRRTLLKVIILGDTGVGKTSLMNQYVNKKFSNQYKATIGADFLTKEVQFEDRLFTLQIWDTAGQERFQSLGVAFYRGADCCVLVYDVNSMKSFDNLNNWREEFLIQASPSDPDNFPFVLLGNKVDVDSGNSRVVSEKKAKAWCASKGNIPYFETSAKDGTNVEEAFQCIVKNALKNEPEEELYVPDTVDVVGGNRAPRSSGCC

SEQ ID NO: 35574 - protein, 540 aa, Alkalilimnicola ehrlichei MLHE-1
MTRYIFITGGVVSSLGKGITAASLGTILQARGLSVSMTKLDPYINVDPGTMSPFQHGEVYVTDDGAETDLDLGHYERFVRTTMTRNNNYTTGRIYESVIRKERRGEYLGGTVQVIPHITDEIKRSIQQGADDADIALIEIGGTVGDIESLPFLEAIRQMGAELGRGRCLFMHLTLVPFIGAAGEMKTKPTQHSVKELRSIGIQPDILVCRASQRIPEEERRKIALFTNVEPRAVVSCLDVDNIYKIPEVLHRQGLDNIVAEKLGLELPPASLQDWQRVVEAMQNPEGEVTIAMVGKYVDLTDAYMSLNESLRHAGIQTRHRVNIRYIDSEELEREGTHALDGVDAVLVPGGFGERGVEGKILAARYARERKVPYLGICLGMQVAVIEYARNVAGLEGAHSTEFTRHPHHPVIGLITEWMTDEGTVEQRSEDSDLGGTMRLGAQPCRLTEGSLARQVYGKDVVEERHRHRYEFNNHYLEALEAAGLRFSGWSHDRKLVEVVEQPDHPWFLACQFHPEFTSTPRDGHPLFAAFVRAAIAHRG

SEQ ID NO: 35575 - protein, 459 aa, Nocardioides sp. JS614
MADADFDVLILGAGSGGYACALRSAQLGLSVGLVEKSHLGGTCLHIGCIPTKALLHAAEVADQAREAETFGVRATLEGIDMAGVNAYKDGVVSRLFKGLTGLIKGRGITVIEGAGRLTGPRTVTVGETAYTGKHVVLASGSYARTLPGLEIDGERVITSDHALRLDRVPASVVVLGGGVIGCEFASVWRSFGADVTIVEALPRLVAVEDEASSKALERAFRKRGIVFRTGTPFQSVKHTDTGVAVTVEGGDVIEADLLLVAVGRGPVTEGLGYDEQGVTMDRGFVLTDERCRTNLDGVYAVGDIVPGPQLAHRGFQQGIFVAEDIAGLDPSPIDEAGIPRVTYSHPEVASVGLDEARAAETYGADGIETLTYDLGGNGKSQILKTQGFVKLIRRKDGPVVGVHMVGDRVGELIGEAQMIYNWEGYPEDVAPLVHAHPTQNEALGEAHLALAGKPLHAHS

SEQ ID NO: 35576 - protein, 554 aa, Schizosaccharomyces pombe
MSSSIPPRLYDMSPTESKKQEDVSETELVYPVELADATIQPSKSDDDLFDSNDFSKTYLAKSRILSNAMNEIGFGRYQWYLFFVAGFGWMSDNIWPVCTSLILMRLDEVDGPHPPAEGRAPYLTLSQNLGLLVGAMVWSLSADTIGRRWAFNLTFLFTGVFAVIAGASPNFASICVFDALWSFGVGGNLPVDSAIFLEALPSSHQWLLTVMSFWWAIGQVIANLVSWGLISNFSCPDDESVCHRADNKGWRYFLFTMGGMTLLMFAARFLVSVYESPKFYLAKGDDYKAVETIHKIARINGKTCTLTVEELYAIDRQEQEESDLDDSKSSDAKSVTQGTTNLIVEKLRKYNFEHIRQCFGSRKLAISSILVILSWAVIGLAFPLYNAFLPYYLETRGNANEPLSVAKTYRNSLIVSAIGVPGSLIAGVLVEFRIGRKGTLCLSLILTGVFLFASTTAKTSNAYLGWNCTFSFFSDIMYGVLYAYTPEVFPSKVRGTAVGLAASANRILGIFSPVIAMRANLTTSAPIFVSGALFIFAGILVVFFPYEPRGKSSF

SEQ ID NO: 35577 - protein, 562 aa, Shewanella sp. MR-7
MDDNKRPLYLPFAGPAILEAPLINKGSAFSEEERIFFNLEGLVPYAIETIEEQASRAYDQFRSFNNDLDKHIYLRNIQDTNETLFYRLVQNHISEMMPIIYTPTVGLACERFSKNYRRNRGLFISYPNKDRIDDILNNSTRQKVKIIVVTDGERILGLGDQGIGGMGIPIGKLSLYTSCGGISPAYTLPITLDVGTDNPQLLEDPMYMGWRHPRIGGEEYAEFIEAFMQAVHVRWPDTLIQFEDFAQKNAMPILERYKERYCCFNDDIQGTAAVTVGSLLAACKAAGTELNKQRVAFLGAGSAGCGIAEAIVAQMVSEGISDEQARSQVCMVDRWGLLLDNMPNLLPFQQKLAQKCADISHWNNFSDNISLLDVVNNVKPTVLIGVSGAPGLFTEEIVRAMHSHCERPIIFPLSNPTSRVEATPKDILHWTSGQALVATGSPFEPVVVDGETYEIAQCNNSFIFPGIGLGVLASGARHVSDAMLMASSRALAECSPLAINGSGPLLPKLEDIHSVSKHIAFAVGKVAIEQGLSLPASDELLMQSIEDNFWKPEYRRYKRTSF

SEQ ID NO: 35578 - protein, 229 aa, uncultured Pseudomonas sp.
HFNRENIPERRVHAKGSGAFGTFTVTKDITQYTSAKLFESVGKQTPTFLRFSTVGGERGSADTERDPRGFALKFYTEEGNWDIVGNNTPVFFIRDPLKFPDFIHTQKRLPQSNLKSAQMMWDFWSHSPEALHQVTILFSDRGIPDGYRHMHGFGSHTYSLINAQGERHWVKWHYKTKQGIKNLAPAEAARLAGTDPDYAQRDLFGAIERGDFPKWRVCIQIMTEAQANA

SEQ ID NO: 35579 - protein, 161 aa, Trema virgata
MSSSEVDKVFTEELEALVVKSWAVMKKNSAELGLKFFLKIFEIAPSAKNLFSYLKDSPIPLEQNPKLKPHAMTVFVMTCESAVQLRKAGKVTVRESNLKRLGAIHFKNGVVNEHFETRFALLETIKEAVPEMWSAEMKNAWGEAYDQLVAAIKFEVKPSST

SEQ ID NO: 35580 - protein, 441 aa, Xanthomonas axonopodis pv. citri str. 306
MSLSPQRDARLPVTVLSGFLGAGKTTLLNRILHNRDGLRVAVIVNDMSEVNIDAQLVREGGAALRRTEETLVEFSNGCICCTLRDDLLQEVRRLAEQGRYDYLLIESTGIAEPMPVAATFAVRDADGFSLSDIARLDTMVTVVDGSRFLEDFGSAATLADLGQQAGPDDTRGLVQLLGEQVEFADVLVISKCDRIDAQQLQRLRAVLRALNRDAAIVDAAHGEVPLQQLLDTGRFDFTRAQLAPGWMQELRGQHTPETEEYGISSFVYRARRPFHPQRFARMVHSGLPQVIRSKGFFWLASRMDWVGELSSVGGATQTSAAGFWFAARHRVDAQAVGQPLQTSITPLPYTDIGWQRQQTQCWTAPLPQPHEVGDASEYAAMQRLWHPLWGDRRQELAVIGVDMDAPRTRAVLDACLLSDQELRQGPAQWQLLDDPFPHWAR

SEQ ID NO: 35581 - protein, 161 aa, Trema virgata
MSSSEVDKVFTEEQEALVVKSWAVMKKNSAELGLKFFLKIFEIAPSAKNLFSYLKDSPIPLEQNPKLKPHAMTVFVMTCESAVQLRKAGKVTVRESNLKRLGAIHFKNGVVNEHFETRFALLETIKEAVPEMWSAEMKNAWGEAYDLLVAAIKFEVKPSST

SEQ ID NO: 35582 - protein, 150 aa, Brassica napus
MEMMSSSSSSTTQVVSLREMGMYEPFQQLSGWENAFNTIGSSNQNNNNNNNNPSSSTVPEVDARADADDNNKANYTSMYNNSVEAEPSSNNDQDDDQINDKMKRRLAQNREAARKSRLRKKAHVQQLERSRLKLSQLEQELARARQQGLC

SEQ ID NO: 35583 - protein, 201 aa, Magnetospirillum magnetotacticum MS-1
MVAADQALPGRASEMRVPERHYVLDTLLKPPFPVGMETAIFAMGCFWGAERLFWKTGGVYSTSVGYGGGFTPNPTYEEVCTARTGHAEAVLVAFDPAEVPYSALLRLFWEGHNPTQGMRQGNDIGTQYRSAIYWTSPAQKDEAEASRLAYGQALQRAGFGAITTEIAQAGPFYWAEGHHQQYLAKEPGGYCGLGGTGVRCG

SEQ ID NO: 35584 - protein, 204 aa, Triticum aestivum
HEAFPTPPRSANHRLLLPPPFSPLRSSPPARAFFIRVSGRGMADDDSGSPRGGGGVREQDRFLPIANISRIMKKAVPANGKIAKDAKETLQECVSEFISFVTSEASDKCQKEKRKTINGDDLLWAMATLGFEEYVDPLKIYLQKYRDMEGDSKLTSKSGEGSVKKDIIGAHSGATSSNAQAMVQHGAYAQGMGYMQPQYHNGDT

SEQ ID NO: 35585 - protein, 172 aa, Oryza sativa
  misc_feature (61)..(61): Xaa can be any naturally occurring amino acid
  misc_feature (93)..(93): Xaa can be any naturally occurring amino acid
  misc_feature (108)..(108): Xaa can be any naturally occurring amino acid
  misc_feature (125)..(125): Xaa can be any naturally occurring amino acid
  misc_feature (151)..(151): Xaa can be any naturally occurring amino acid
  unsure (1)..(172): unsure at all Xaa locations
AVRKGMLHSRGELLLMLDADGATKVTDLEKLEAQVRALAKKAESSLAPSNSPSQRLSDAEXAVFGSRAHLEKQALATRKWYRNFLMKGFHLVXLLTAGPGIRDTQCGXKMFTRAAARKLFTNIRXKRWCFDVELVYLCKHLRIPMAEVSVXWTEIPGSKVRIQASAYGIELC

SEQ ID NO: 35586 - protein, 404 aa, Burkholderia fungorum LB400
MGIGCAPTLDLTQMMAYKASTVEKMSNSIHKLLRKQGVTLIHGDALLAAAGQVIVRKTGGVQQTLSGTALVIATGSVPIPLPFAAFDHMRILDSADALSLGKVPRHLAIIGAGAVGVELGSIWQRLGSRITLIERCDRICHWLDRDVTATLERSLRQRGIDIRVSSDVVGLDKHSDSVSVQLRAAASGKITHIDADRVLVAIGRRPSTAGMNLASVGMQTGYKSTLSQQGPATPVTSMTNGSGIWVIGDAGPGPMLMSKAEEEAIACAERIAGLPGFVSYPSIPYVLHTSPEVAMIGRTEDELRGTGAAYRVGYYPLAANPRAAICGTSEGFVKLLVDADTNLIAGAHLIGPGAADLISQVAIAMEASMICEDFARICHPYPVWSEALRQAAMAAGGWMMHVAI

SEQ ID NO: 35587 - protein, 276 aa, Bacillus sp.
MKKKLVLFSMCLLLFSGLISGLVQSPQVAEAAERPIGTAFVETFESYDSERWSKAGVWSNGQMFNATWYPEQVTFSNGKMKLQIEKEDNETASPPYKAGELRTNDFYHYGLFEVSMKPAKSTGTVSSFFTYTGPWDWENDPWDEIDIEFLGKDTTKIQFNYFTNGVGGNEHYHELGFDAADDFNTYAFEWRPESIRWFVNGELVHTATENIPQTPQKIMMNLWPGIGVDGWTGRFNGEDTPVVTQYDWVKYTPLEELGCYNEKNNKYKKCKKTKVK

SEQ ID NO: 35588 - protein, 313 aa, Rhodobacter sphaeroides 2.4.1
MERQRVIAVGSYPDWDRQAMEASFTVTTVPQLADLAGLDPALRAEAVAVAYKGGAPFGGEAMDLLPALGIIANFGVGFDAIDVEAARARGIRVTNTPDVLNDDVADTALAMMLALCRRIPEGDRFVREGRWPKGDFPLNRKFSGGRAGIMGLGRIGRAIADRLVAFGMEIHYHSRSAKDVPAGWTFHATPEGLAAEVDWLVVALVGGPATESYVSAEVIACMPQDAVLVNISRGSTVDEAALLSALEAGRIGAALDVFRNEPEIDPRFHALSNVILQPHQGSGTVETRRAMGELQRANITAFLQGEPLLTPVA

SEQ ID NO: 35589 - protein, 516 aa, Candida albicans
MFTNSIISKSTTRLTQLSRQLSTTTMAPTSTKNSIKHFDYLVIGGGSGGVASARRAAKYGAKVLLIESNFKKFGGTCVNVGCVPKKVMWYTADLAHKKHDLYAYGLDKEPDSIKYGDFDWAKLKHKRDAYVTRLNGIYENNLKREKVDYAYGFAKFINSEGEVEVTLSGDQELPFLDEGKTYKKGEKLVFSADKNFDCHWWYSNCSSSVPGAELGTTSDGFFALEKQHKKVAIVGAGYIGVELSGVFSSLGSETHFFIRGDTVLRSFDEVIQNTVTDYYIDNLGINIHKQSTITKIEGSKDGKKVVHLKDGTSVEVDELIWTVGRKSLIDIGLDKVGVKINDKQQIVADEYQVTNNPKIFSLGDVVGKVELTPVAIAAGRRLSNRLFGGPEFAKDKLDYNNIPSVIFSHPEAGSIGLSTKEASEKYGEENLKIYQSKFTAMYYAMMDDQKDKSPTVYKIICAGPEEKVVGLHIVGDSSAEILQGFGVAIKMGATKKDFDNCVAIHPTSAEELVTMT

SEQ ID NO: 35590 - protein, 453 aa, Chromobacterium violaceum ATCC 12472
MAIRHGIDLDKARALHARETADFLARRPRSLALAERAGGHLLFGVPLHWMDDWPTPRSLFLAEARDARLTDVDGHVYADFCLGDTGAMFGHSPAPVAQAIALESARGMTAMLPGEDALWVAEELSRRFGLPVWQFALSASDANRFAIRWARAVTGRDRILVFNGCYHGTVDDVFVDLADGEARPRASLLGQVYDLTEHTRVAEFNDLEGLEAALADGRVACVLAEPAMTNIGMVLPDPGYWEQAQAIIRRHGSLLLLDETHTISCGPGGYTAAHGLRPDMLVLGKPLAGGLPAAAYGFSADLAARAQQAKRAAPPGHSGIGTTLSANRLACAAMRANLSQVMTDDNYRIMLERAGRLAQGLRELFARFALPWCVTQLGARCEFQFAARPPRNGSEAGAGQDEELERYIHLYLLNRGLLITPFHNMLLLSPHTEDADAQRLLEVFGEWLEQARA

SEQ ID NO: 35591 - protein, 270 aa, Thermoplasma acidophilum DSM 1728
MKVAVVQMESSTDREKNIEASYRLLEKAKNSDLVVFPEYQIYAPAFDGKDDMKTISEPLDGKFVKSITEIARSESQKIILNIPERNQYNLKPFNTAIYIDELGLILKYRKLHLFDAFGFRESSVFEKGDARPAIFNGSGDPLGVLICYDLRFPEPARMLALDGAKLIIYQAGWFAGERKYDQWKTLLKARAMENGVFVIGAAQTGHRFTGHSMVISPYGDVLAEMGTDEGVITFDIDFSLVEKYREEVPVLKHRRTDVYDVLDVDAFKLI

SEQ ID NO: 35592 - protein, 552 aa, Burkholderia vietnamiensis G4
MTKYVFVTGGVVSSLGKGIAAASLAAILESRGLKVTLLKLDPYINVDPGTMSPFQHGEVFVTEDGAETDLDLGHYERFISTKMRKANNFTTGQIYESVIRKERRGDYLGKTVQVIPHITNEIQAFIERGAASATCGEPDVAIVEIGGTVGDIESLPFLEAARQMSLRLGRNSACFVHLTLVPYVATAGELKTKPTQHSVQKLREIGILPHVLLCRADRRIPDDESKKISMFSNVPEDAVISVWDADSIYKIPQMLHDQGLDRIICDELKLSPKEADLSMWSELVEKLEHPKHEVTIGMVGKYVDLTESYKSLIEALRHASLHTSTKVNIEYIDSEEIESNGVDSLKHLDAVLVPGGFGRRGTEGKIAAIRYAREAKVPYLGICLGMQLAVIEFARDVVGLKQANSTEFDPDTPERVVALITEWYDREGKVETRTESSDLGGTMRLGSQRCPIKPGTMAEEIYGKDVNERHRHRYEVNNRFVPQLEAGGLIISARTPSEDLPEMMELPRSMHPWFVGVQFHPEFTSTPRDGHPLFKSFVEAALANKQARGAEA

SEQ ID NO: 35593 - protein, 441 aa, Thermoplasma acidophilum DSM 1728
MKYIVVSSRCPFSHDKAAGKEIIKENVGGVATALRRAMEKYGGTWICWGDGKLDGKYLDEDVGKYRIRRVMLSVPEKHGYYDLYSNRTLWPLFHYFRERVKYTDNGYEIYRRVNEKFTNMIVQSLSPEDVIWIHDYQLSLVPKMLRDRGITNRIIFTWHIPWVSKEMFETLPESRDIIDSLSRSDFITFHTETYRKNFTDLLDENSRAKSLVIPLGIDYRYFSKTRGTDIKSYALMDRKLIFSIDRLDYTKGLVNRVLSIEELLRRHPDLVGKFVYVMIVTPSRTTVSDYVAMKRELEMHIGRINGEFGSISWMPILYMYRKISDKMLVSYYKNADIALITPLIDGLNLVSKEFVASSDKGILILSRFAGASNCLDGAVVVNPNSLGEVAEAIYSAMNMGEDEIRERLRKMKEEVSRRDTDWWIRRINAIAKRKINDRTVT

SEQ ID NO: 35594 - protein, 227 aa, Momordica charantia
MGRGKIEIKRIENTTNRQVTFCKRRNGLLKKAYELSVLCDAEVALIVFSSRGRLYEYSNNSIKTTIGRYKKACSDSSATSSVTELNTQYYQQESAKLRQQIQMLQNSNSNLVRHLMGDSLSALTVKELKQLENRLERGITRIRSKKHEMLLAEIEYLQKREIELENENVCIRTKIAEVERLQQANMVSGQELNAIQALASRNFFTPNMMEGGAVTFSHQDKKMLHLG

SEQ ID NO: 35595 - protein, 400 aa, Staphylococcus aureus subsp. aureus COL
MAKIPVTVLSGYLGSGKTTLLNHILQNREGRRIAVIVNDMSEVNIDKDLVADGGGLSRTDEKLVELSNGCICCTLRDDLLKEVERLVKKGGIDQIVIESTGISEPVPVAQTFSYIDDELGIDLTAICRLDTMVTVVDANRFVHDINSEDLLMDRDQSVDETDERSIADLLIDQVEFCDVLIINKIDLISEEELAKLEKMLSALQPTAKIIKTTNSEVDLKEVLNTQRFDFEKASESAGWIKELESGGHASHTPETEEYGISSFVYKRRLPFHAKRFNDWLESMPNNVVRSKGIVWLAQYNHVACLLSQAGSSCNIHPVTYWVASMSEAQQTQILAERQDVAAEWDPEYGDRHTQFVIIGTELDEEKLTKELDACLVNAQEIDADWQQFEDPYQWQIRPAR

SEQ ID NO: 35596 - protein, 388 aa, Leuconostoc mesenteroides subsp. mesenteroides ATCC 8293
MAINDKTLEDKLTKVRHQLHQHPELSNQEHQTTLFLNSYLETLGYHIVTPQKLLTGVIAEIGPSESNVIIGLRSDIDALPIAEKTGLNYASVNEGIMHACGHDFHMASLLGAAELLADQANKLTGRVRLIFQPAEEIHVGAQAVAEAGGIKNLNAIIGFHNKPDLKVNEIGILSGGLMAAVDQFKVTFRGQGTHAAMPQLGNDPIVALTSTVNTLQTVVSRKTDPQSPVVVSVTHIDGGSTWNVLPDVAWFEGTVRSFDLASRQLAREQFYQIVNGQAATFGLAVDISWIEGPNVVNNDSELTPIVIEETKQHAKLLTPKPSNAGEDFSYFSQKVPSVFAFIGSAGTTDWHHDDLIIDDRGLLPAARWYFYTANRLLAHFSGTTTNDR

SEQ ID NO: 35597 - protein, 338 aa, Haemophilus ducreyi 35000HP
MAILVTGGAGYIGTHTVVELLNANKEIVILDNLSNSNQIALERIHTITGKHAKFYLGNILDRAILRKIFAENQIDAVIHFAGSKAVGESVSEPLRYYQNNVTGSIVLLEEMLTAGINTIVFSSSATVYGDPKTIPIVESCPVGQTTNPYGTSKYMVERILEDTVNANPQFSAVVLRYFNPIGAHPSGLIGEDPNGIPNNLLPYISQVAIGKLPQLSIFGNDYDTADGTGIRDYIHVVDVAIGHLKALDKHHLESGFHVYNLGTGTGYSVLDMVRAFETANHLQIPYQVVDRRPGDIAVCYSEPSKARQMLGWKTERNLEQMMKDTWHWQKNNPNGYHD

SEQ ID NO: 35598 - protein, 493 aa, Ralstonia solanacearum
MALTFDQLRHTGLIRTDNLIDGRWSAGADGARYAVTDPATGSIIAQVADSSAADARAATDAAARALPAWRDTLPAERAAILRRWHAAIVANADALGRLISLEQGKPFAEGRGEVMYGASYVAWFADEATRIYGDLIPQQQRGKRMSAIKEPIGIVAAITPWNFPLAMIARKIAPALAAGCTVVAKPAEDTPLTALALAQLAQEAGLPPGVLNMIAASRERGVAAVADWLQDGRVRKITFTGSTPVGKHLARESAGTLKKLSLELGGNAPFIVFDDADLDAAIAGLLSAKFRNGGQTCVCPNRVYVQAGVYDRFAAMLAARVSALKVAPATDPDAQIGPMINARAVDKIERHVQDAVAHGARVLAGGKRLPEVGAHFYAPTVLADAHPGMALCGEETFGPVVPLFRFTDEAEAVQAANDTPFGLAAYFYSQDVRRIDRVAHALEAGIVGINEGALASEAAPFGGVKESGYGREGSKYGLDDYLSIKYLCQGGLA

SEQ ID NO: 35599 - protein, 360 aa, Leuconostoc mesenteroides subsp. mesenteroides ATCC 8293
MSDQTLQKELENIEVTDTLQACPIDFSQSKVANPRAHQKQKEYDNGKDKSNFNEREKFSAYQGPQFKARFTDGTLPVTPNRYRLIWSRHCPWANRIAIGIDLLGLDQVISNGIVDPLRPAGVVGDWFFTLDDGDVDPVLGIHSLGEAYRLADPSYDKRTTVPALVDTQTGKVVNNDYNNLIKEFALAWQEYVPETAPDLYPKNLRSDIDALSDIILMDINYAVNEAGHGRSQADYKKWYDKVFNRLDWLEERLANQRYLFGDQITLVDINLYVTLSRFDLVFYQKYFVNKKRLVDYPNLWNYAKDLYAIPAFGDNTNFESMRQRFYEVDHTPQEDLPRIIPLGPDDSIWEEANDRAEKFG

SEQ ID NO: 35600 - protein, 102 aa, Aspergillus nomius
DKDGDGQITTKELGTVMRSLGQNPSESELQDMINEVDADNNGTIDFPEFLTMMARKMKDTDSEEEIREAFKVFDRDNNGFISAAELRHVMTSIGEKLTDDEV

SEQ ID NO: 35601 - protein, 583 aa, Streptomyces avermitilis MA-4680
MIVNEPVPDTFEDTPAKDRDPEWFKRAVFYEVLVRSFQDSNGDGVGDLKGLTAKLDYLQWLGVDCLWLPPFFKSPLRDGGYDVSDYTAVLPEFGDLADFVEFVDAAHQRGMRVIIDFVMNHTSDLHPWFQESRSNPDGPYGDYYVWADDDKQYQDARIIFVDTEASNWTYDPVRKQYYWHRFFSHQPDLNYESAAVQEEILAALRFWLDLGIDGFRLDAVPYLYNEEGTNCENLPATHEFLKRVRKEIDTHYPDTVLLAEANQWPEDVVDYFGDFPSGGDECHMAFHFPVMPRIFMAVRRESRYPVSEILAKTPAIPSSCQWGIFLRNHDELTLEMVTDEERDYMWAEYAKDPRMRANIGIRRRLAPLLDNDRNQIELFTALLLSLPGSPILYYGDEIGMGDNIWLGDRDAVRTPMQWTPDRNAGFSSCDPGRLYLPTIMDPVYGYQVTNVEASMSSPSSLLHWTRRMIEIRKQNPAFGLGSYTELQSSNPAVLAFLREAPSTGGNGDDLVLCVHNFSRFAQPTELDLRAFSGRHPVELIGGVRFPAIGELPYLLTLAGHGFYWFRLRKDVTQVTKVSLFVSS

SEQ ID NO: 35602 - protein, 119 aa, Glycine max
  misc_feature (8)..(8): Xaa can be any naturally occurring amino acid
  misc_feature (16)..(16): Xaa can be any naturally occurring amino acid
  misc_feature (22)..(22): Xaa can be any naturally occurring amino acid
  misc_feature (56)..(57): Xaa can be any naturally occurring amino acid
  misc_feature (62)..(63): Xaa can be any naturally occurring amino acid
  misc_feature (67)..(67): Xaa can be any naturally occurring amino acid
  misc_feature (72)..(72): Xaa can be any naturally occurring amino acid
  misc_feature (74)..(74): Xaa can be any naturally occurring amino acid
  misc_feature (77)..(77): Xaa can be any naturally occurring amino acid
  misc_feature (83)..(86): Xaa can be any naturally occurring amino acid
  misc_feature (88)..(89): Xaa can be any naturally occurring amino acid
  misc_feature (92)..(93): Xaa can be any naturally occurring amino acid
  misc_feature (96)..(96): Xaa can be any naturally occurring amino acid
  misc_feature (101)..(102): Xaa can be any naturally occurring amino acid
  unsure (1)..(119): unsure at all Xaa locations
SEGISRVXRDADNLQXQQLEQXDVLSSVATVLSDLCGPGEWMPMEKLHTELLDQYXXVWHHXXVRRXLTSKXWXPPXSKRKPXXXXLXXLRXXPDXFVINXXSVGRVTPEFVSLVSLIS

SEQ ID NO: 35603 - protein, 233 aa, Haemophilus ducreyi 35000HP
MHYLIFPTAQCAVEKIAQEFILYSQLNRPVHISLSGGSTPKLLFKTLAQIPYINQINWQNLHFWWGDDRMVPATDPESNYGEVQKLLFDHIQIPPTNIHSIRGEQPPETELARFTQELNECLPNLTFDWIILGMGNDGHTASLFPYQTDFADQHLAIIAKHPVTGQLRISKTAKLIEQAARITYLVTGQSKATILKEIHDLPATQLAYPAAHIRAKNGITEWYLDQQAAELFR

SEQ ID NO: 35604 - protein, 233 aa, Plesiomonas shigelloides
MFKPFSAEFFGTFWLVLGGCGSALISAAFPQLGIGFLGVALAFGLTVVTMAYAVGHISGAHFNPAVTLGLWAGGRFPAARVLPYIIAQVIGGIAAAAVLYGIASGKAGFDATTSGFAANGYGIHSPGGYALSACMLSEFVLSAFFVIVIHGATEKRAPAGFAPLAIGLTLTIIHLVSIPVTNTSVNPARSIAAAVFQGTWALDQLWMFCLIPSLGGIAGGLIYRALLARPAEA

SEQ ID NO: 35605 - protein, 212 aa, Ralstonia eutropha JMP134
MNRRQTAFAASVRRAMFATALALAAASAALLPHPARAADKPAAMPAAAPAGNCPASLNFQFPRLQDEAPQNLCQYAGKVVLVVNTASYCGFTPQYEGLEALYSKYRDRGLVVLGFPSNDFSQEPGSSKEIADFCYNTYGVKFPMLGKSHVRGGDVNPMYALLAKETGTAPKWNFYKYLIDRSGNVVGSYNSMTKPDDKQFVAKIEQLLSSPR

SEQ ID NO: 35606 - protein, 614 aa, Mycobacterium tuberculosis H37Rv
MTTLLRLATAGSVDDGKSTLIGRLLYDSKAVMEDQWASVEQTSKDRGHDYTDLALVTDGLRAEREQGITIDVAYRYFATPKRKFIIADTPGHIQYTRNMVTGASTAQLVIVLVDARHGLLEQSRRHAFLASLLGIRHLVLAVNKMDLLGWDQEKFDAIRDEFHAFAARLDVQDVTSIPISALHGDNVVTKSDQTPWYEGPSLLSHLEDVYIAGDRNMVDVRFPVQYVIRPHTLEHQDHRSYAGTVASGVMRSGDEVVVLPIGKTTRITAIDGPNGPVAEAFPPMAVSVRLADDIDISRGDMIARTHNQPRITQEFDATVCWMADNAVLEPGRDYVVKHTTRTVRARIAGLDYRLDVNTLHRDKTATALKLNELGRVSLRTQVPLLLDEYTRNASTGSFILIDPDTNGTVAAGMVLRDVSARTPSPNTVRHRSLVTAQDRPPRGKTVWFTGLSGSGKSSVAMLVERKLLEKGISAYVLDGDNLRHGLNADLGFSMADRAENLRRLSHVATLLADCGHLVLVPAISPLAEHRALARKVHADAGIDFFEVFCDTPLQDCERRDPKGLYAKARAGEITHFTGIDSPYQRPKNPDLRLTPDRSIDEQAQEVIDLLESSS

SEQ ID NO: 35607 - protein, 310 aa, Oryza sativa
MERAVPVRKTHASTAGLLSWSESPGPDNAAAAAGAAAPPSSRPSLKPAGGITPAMFGAPVTDLEAEDLTKRKMCSGSKMKEMTGSGIFSAQGANGDSETGSGDSNPPSKTSLRMYQQTVTGISQISFSAEGSVSPKKPSSLPEVAKQRELSGTLESEADAKLKKQNSEAKSKELSGSDIFGPPPEVPSRPLAARNLELQGNLDFALPQPRSIHTSVKVSNPAGGPSNIMFGEEPAVKTAKKIHNQKFHELTGNNIFKEEAPPGSAEKSLSTAKLKEMSGSNIFADGKVASRDYFGGVRKPPGGGSSIALV

SEQ ID NO: 35608 - protein, 344 aa, Sinorhizobium meliloti 1021
MTKYKLEYIWLDGYTPVPNLRGKTQIKEFDAFPTLEQLPLWGFDGSSTQQAEGRSSDCVLKPVAVYPDPVRTNGALVMCEVMMPDGKTPHPSNTRATVLDDESAWFGFEQEYFFYKNGRPLGFPEQGYPAPQGPYYTGVGYKNVGDIARQIVEEHLDICLAAGINHEGINAEVAKGQWEFQVFGKGSKKAADEVWLARYLLLRLTEKYGIDVEFHCKPLGDTDWNGSGMHANFSTAYLREVGGKDYFEALMAAFEKNLHDHINVYGPDNHLRLTGKHETAPWDKFSYGVADRGASIRVPHSFVNNGYRGYLEDRRPNSQGDPYQIASVILKTISSVPTAVAKVA

SEQ ID NO: 35609 - protein, 224 aa, Sinorhizobium meliloti 1021
MRIEPVFLFDLDGTLVDSVYQHVLAWKEALDAEGIDLSVWRIHRKIGMSGGLFTDQLLRETNMEISGDRVARLRQRHAEAYRRQADSIRPLPGARELLTWLTDAKISYAIATSGRMETAAVNLAALGVDPAVVPVVTRDVVKYAKPDPDLFLAAAEQLGAPIETAVVVGDSIWDMLAAVRCRALAIGLLSGGYGHEELRQAGAYRIFDDPADMLHHIDEVGGRR

SEQ ID NO: 35610 - protein, 536 aa, Geobacter sulfurreducens PCA
MKTKFIFVTGGVVSSIGKGLASASLGALLESRGLRVTMQKLDPYINVDPGTMSPFQHGEVFVTDDGAETDLDLGHYERYTSARLSKRSNFTTGQVYFSVIEKERRGDYLGGTVQVIPHITDEIKHKILENAKGADVAIVEVGGTVGDIESLPFLEAIRQFKADRGAGNVLYIHVTLVPHIKTAGELKTKPTQHSVKELREIGIQPDILICRCEMELPRDMKAKIALFCNVEEKAVITSTDAEHIYAVPLALHKEGLDEQVVEKLNIWTKAPDLSPWHSVVEKLRSPLRGEVRIAIVGKYVNLTESYKSLSEALTHGGIANDCRVVLTYLDSERIESEGIGSSFDDIDAILVPGGFGERGTEGKIKAIEYARTQKIPFFGICLGMQMAVVEYARNVCGLEDACSSEFRPDCANPVISLMEEQRDIDRLGGTMRLGAYPCSLTKGTFAQKAYGSLEISERHRHRYEYNNAFRETLVANGLVVSGLYKEGDLVEIVEVADHPWFLGCQFHPEFKSKPLNPHPLFRAFIAAALDRKDKRR

SEQ ID NO: 35611 - protein, 726 aa, Crocosphaera watsonii WH 8501
MSKTIIVSNRLPVKIERNQAGEFEYKTSEGGLATGLGSVYKEGDNIWVGWPGLAVNKTEDKEEICSRLKESNMSPVFLTKNEIEEYYEGFSNETLWPNFHYFNQYAVYSDVFWNTYKKVNKKFAKKLEEIIEDGDKIWIHDYQLLVLPAMIRETHPNSSIGFFLHIPFPSYESFRLLPWRTDLLTGMLGADFIGFHTYDYVRHFLSSVNRLVGITDNDGHMNVGNRLAMADAIPMGIDYNRYAQAAADPETLASEVKYRISLGDVKLILSIDRLDYSKGIPQRLRAFEQFIEENEEFREEVSLLILVVPSRDQVPMYANLKKEIELLVGSINGKFGTINWRPIHYFYRSYPLHSLSAFYRMSHVALVTPLRDGMNLVCKEFVASKLDKKGVLILSETAGSAKELSDAILINPNDTNQMVEAMKEALKMPEEEQIARMETMQKSLKRYDINAWVKLFMKGLEQVKEEQENLRTKPISSVVKNKLLQEYRSSKKRIIFLDYDGTLVGFYANPNDSVPDAELEELMTKLTADTNNQVVVISGRGRDFLEKWLSKFNVDFIAEHGVWHKENGKEWECFVELDTSWQEEFDRVLEMYVDRTPGSFIERKDFSMVWHYRKVEPGLGELRSRELANLLKYLSADKDLQVQEGDMVIEIKNARVNKGVAAASWLKKNDYDFSFACGDDWTDEDTFKAMPEDAFTVKVGSSSSAAKYRVENFKDIRKLLLSLANQ

SEQ ID NO: 35612 - protein, 247 aa, Mycoplasma pulmonis UAB CTIP
MHLDILGEFLGTLVLILLGNGVGMSTHLKRMLANQHGKWIMIALGWGLAVLMGVIVAFSLNSPAHLNPAVSIFALVSGSLALWKFFVYFLVQVLGAFIGQVILYIINYKNIKETNDWNLMRAMSATGGVYDNFNEKGLVQNLLYEYVASLVLIGVIFALSKGKNTQAFQSLGAIPVMLLVLSIGLSLGSVSGYAINPARDFGPRLAFWVFSTLVWKQKSASAQWSYSFVPIVSPLLAGTTIGLFALI

SEQ ID NO: 35613 - protein, 107 aa, Anaplasma marginale str. St. Maries
MTRSVTKNVRRIVMNLAMLHDNVLVEALEDSGGNSPIQLPDSAKKKPTRGKVVSVGPGALNSEGKVTPMSVRAGDVVYYRQWAGNEVELEGKKFIVMKESDIIAKEA

SEQ ID NO: 35614 - protein, 395 aa, Arabidopsis thaliana
MVMAMDRIALFSSSSSSVYRHRSSHSHGSKSSRVFTIRSDSTAVGRKLYIPPREVHLQVKYSMPPQKLEIFKSLEGWANENLLAYLKPVEKSWQPTDFLPEPESEGFYDQVKELRERCKELSDDYLIVLVGDMITEEALPTYQTMINTLDGVRDETGASPTPWAVWTRAWTAEENRHGDLLNKYLYLSGRVDMRQIEKTIQYLIGSGMDPKTENNPYLGFIYTSFQERATFISHGNTARLAKDLGDLTLGKICGTIAADERRHEHAYTKIVEKLFEIDPDTTVVGFADMMRKKISMPAHLMYDGRDDNLFDHFSSVAQRLGVYTAKDYADILQHLVERWNVEKLSDLSSEGNRAQDYLCGLPARIRKLEERAQGRTKEAAKNIPFSWIFGREVRA

SEQ ID NO: 35615 - protein, 135 aa, Nicotiana glauca
MAYSKVIVALMLALVVGSAFAQAPGASPAASPKSSPPPVASSPPLATPPSAVTPVSAPANAPTTASSPSESPLASPPAPPTVDTPASSPSGGTAPPSISESPSGSPTSSPNSASFNRVAVAGSAVVAIFAATLML

SEQ ID NO: 35616 - protein, 479 aa, Oryza sativa
MAGRSSSSFRLLDLVRPFMPLLPEVREPDGRRVPFRRKLACTAAALFAFLACSQLPLYGLHRAAAAGGGADPFYWVRAILASNRGTVMELGITPVVTAGTLVQLLVGSNLVRADSSNPDDRALLSAAQKLLSIVITAGEATAYVLSGAYGSVGVLGAGNAVLVVLQLVLGGMVAIFLDELLQKGYGFGSGISLFTAANTCEGVVTRALSPATMDRGRGAEFVGAVTAAAHLLATRARKLSAVREAFFRGGGGGSLPDLRGLAATCAVFLAAVYLQGVRVALPVRPRNAPRSHRGGAYSVRLLYTSGMPVVLLSSAVSSLYVVSQALYRRFGGSLLVDLLGKWTPDAAVPVGGIAYYVTAPASAASAAANPLHAAMYVAFVLAACAALSRAWVVVSGSSSRDVARRLREQQMVMPGMREASMQRELERYIPAAAALGGVCVGALTVAADLMGAVGSGAGMLLAVTTVYQCYEAFEKEKTY

SEQ ID NO: 35617 - protein, 454 aa, Saccharomyces pastorianus
MSEPEFQQAYDEVVSSLEDSTLFEQHPKYRKVLPIVSVPERIIQFRVTWENDKGEQEVAQGYRVQYNSAKGPYKGGLRFHPSVNLSILKFLGFEQIFKNSLTGLDMGGGKGGLCVDLKGRSNNEIRRICYAFMRELSRHIGQDTDVPAGDIGVGGREIGYLFGAYRSYKNSWEGVLTGKGLNWGGSLIRPEATGYGLVYYTQAMIDYATNGKESFEGKRVTISGSGNVAQFAALKVIELGGTVVSLSDSKGCIISETGITSEQIADISSAKVNFKSLEQIVGEYSTFTENKVQYISGARPWTHVQKVDIALPCATQNEVSGDEAKALVAQGVKFVAEGSNMGSTPEAIAVFETARATASTLKESVWYGPPKAANLGGVAVSGLEMAQNSQRITWSSERVDQELKKIMVNCFNECIDSAKKYTKEGNALPSLVKGANIASFIKVSDAMFDQGDVF

SEQ ID NO: 35618 - protein, 454 aa, Saccharomyces monacensis
MSEPEFQQAYDEVVSSLEDSTLFEQHPKYKKVLPIVSVPERIIQFRVTWENDKGEQEVAQGYRVQYNSAKGPYKGGLRFHPSVNLSILKFLGFEQIFKNSLTGLDMGGGKGGLCVDLKGRSNNEIRRICYAFMRELSRHIGQDTDVPAGDIGVGGREIGYLFGAYRSYKNSWEGVLTGKGLNWGGSLIRPEATGYGLVYYTQAMIDYATNGKESFEGKRVTISGSGNVAQFAALKVIELGGTVVSLSDSKGCIISETGITSEQIADISSAKVNFKSLEQIVGEYSTFTENKVQYISGARPWTHVQKVDIALPCATQNEVSGDEAKALVAQGVKFVAEGSNMGSTPEAIAVFETARATASTLKESVWYGPPKAANLGGVAVSGLEMAQNSQRITWSSERVDQELKKIMVNCFNECIDSAKKYTKEGNALPSLVKGANIASFIKVSDAMFDQGDVF

SEQ ID NO: 35619 - protein, 655 aa, Mesoplasma florum L1
MINKNNNNLNALRILGVSAINKANSGHPGIVLGAAPIVYTLFNKIMKHNPKNPKWFDRDRFVLSAGHGSALLYSALHLAGYNLSMDEIKNFRQWNSKTPGHPESHLTEGVDVTTGPLGQGIAMAVGLAIAESHTASVYNQSDLKLVDHHTFVLCGDGDLQEGVAQESISLAGRLKLNKLILIHDSNDIQLDDKVEKAQSENMHERFKAAQWNTLKINDGEDLVAIEKAINDAKVSDKPTYIEVKTIIGIGATKQGTSAVHGAPIGSDIETVKNVFDWKFDDFEIPTDIYKHWNENISKNLIIEKKWNETLNTLKTKNPELAKQFTDAINKEINFDFEALKGKTPEKAEATRVSSGNIWDSINSQVKFLIGGSADLVSSTRIKGADGQFDIDNRSGRNILYGVREFAMGAINNGIHQHGGLIPFSSGFFVFSDYMKPAMRLSSIMNTQQLFIFTHDSVAVGEDGPTHQPIEQLAMIRSIPNHITFRPADYAETLASYKIALQDLKKCPSTLVLTRQDLVQLPHNDVYEEVKKGAYIIFDQPNASVTLIATGSEVGLAIETAKRLKEDNIIAKVVSMPSTNLFDQQDQSYKDKIIDKSTLRVSIEMGTTYGWSKYTGDNGLNIGIDVFGASAPANTVISQYGFTSEQIFNKIKKVIK

SEQ ID NO: 35620 - protein, 280 aa, Oryza sativa
MGFGSREMACALVALVLGLCCVGGARATGRIDEGLEVMWGDGRGSVSPDGQVMALSLDHTSGSGWRSKNTYLFARVDLQIKLVANNSAGTVTTCYFMSEGEWDIHDEVDLEFLGNVTGQPYTLHTNVFANGTGGKEQQFHLWFDPTTDFHTYSIVWTSQHILVLVDGTPIREMKNHADKGIAYPSSQRMRLYGSLWNADDWATQGGRVKTDWSQAPFVARYRNFTATEAASSSSPAGYDQQMDATAQQAMKWARDKYMVYDYCADSKRFPQGFPPECSMP

SEQ ID NO: 35621 - protein, 331 aa, Methanothermobacter thermautotrophicus str. Delta H
MVIIHSPSYDLHNHEGHVENSGRTRAILRAIESSDLSPRFVEPGMAGIDDILMVHSSTHVEYLEVFAGRGGGWLDYDTYMTPESFSVARLSAGGAMLAAEEALRDGWSYSLGRPPGHHATYDRSMGFCIFNNIAIAIEHARRNLGVSRPLVLDFDVHHGNGTSSIFYRDRDVMYISIHQDPRTLFPGTGFIDETGSGEGEGFNLNIPMPRGSGNREYLWILGMILPAVLEGFRPDMIFVSAGFDAHRRDPLAEIMVDEEFFSWIGWFIHQTGLPCTAVLEGGYDPEALGRSNIAFMRGLDGEEYEPETAAPGGVSEIFSQLSDRFSAYFNF

SEQ ID NO: 35622 - protein, 496 aa, Nicotiana tabacum
MVLSKTASESDVSIHSTFASRYVRTSLPRFKMPENSIPKEAAYQIINDELMLDGNPRLNLASFVTTWMEPECNKLMMDSINKNYVDMDEYPVTTELQNRCVNMIAHLFNAPLGDGETAVGVGTVGSSEAIMLAGLAFKRKWQNKMKAQGKPCDKPNIVTGANVQVCWEKFARYFEVELKEVKLSDGYYVMDPEKAVEMVDENTICVAAILGSTLNGEFEDVKRLNDLLIEKNKETGWDTPIHVDAASGEFIAPFLYPELEWDFRLPLVKSINVSGHKYGLVYAGIGWAIWRNKEDLPDELIFHINYLGADQPTFTLNFSKGSSQVIAQYYQLIRLGFEGYKNVMENCQENARVLREGLEKSGRFNIISKEIGVPLVAFSLKDNSQHNEFEISETLRRFGWIIPAYTMPPNAQHVTVLRVVIREDFSRTLAERLVIDIEKVLHELDTLPARVNAKLAVAEANGSGVHKKTDREVQLEITTAWKKFVADKKKKTNGVC

SEQ ID NO: 35623 - protein, 609 aa, Saccharomyces uvarum
MPLSEDFGSSGKKEASPDSISIRSFSAVNNLQSSSSEKNYSGQTTRNNKLIHRFVDSFKRAEGSTTHTKQINENTSDLEGDVNSFTSDSKLKKSMKSRHVVMMTLGTGIGTGLLVANAKGLHYGGPAALVIGYFLVSFVTYFMIQAAGEMAVTYPTLPANFNAYSSIFISKPFGFATVWVYCFQWLTVLPLELITAAMTIKFWNDTINPDIFILIFFVFLLFIHFFGVKGYGETEFIFNCCKILMIAGFIILSVVINCGGAGNDGYIGGKYWRNPGAFAGDTSAGRFKNVCYILVTAYFSFGGMELFALSVQEQANPRKTTPVAAKRSIYRILVIYLLTMILIGFNVPYNDDQLMGAGGSATHASPYVLAASIHGVKVVPHIINAVILISVISVANSSLYAGPRLMCSLAQQGYGPKFLDYVDREGRPLIALIVCSVFGVIGFVAASSKEEVVFAWLAAIAGLSELFTWTSIMLSHLRFRQAMKVQGRSLDELGYKATTGIWGSAYGVFFNILVFIAQFWVALAPLNNGGKCSAESFFQSYLAFPIWIAFYLGYMIYNRDFTFLNPLDKIDLDFHRHIYDPELMRQEDLENEERKRDMSLMRKTYLFWC

SEQ ID NO: 35624 - protein, 129 aa, Rhodospirillum rubrum
MAVDLNMKILIVDDYKTMLRIIRNLLRQLGFNNIDEAMDGSAALQMLRTNGGYGLVISDWNMEPMTGLQLLREVRADGKLKSLPFIMVTAESKSENVIAAKEAGVSNYIVKPFNAETLKAKMQSVIGEF

SEQ ID NO: 35625 - protein, 174 aa, Brassica napus
MTDLYVSLFISNYSPTPIQKVVSLVSRTGRDLQRYDTTGYRQVVGCIPYRYKNDGEIEVLLISAQKKGKGMLLPKGGWEIDESIEEAALRETMEEAGVTGHLEETLGKWQYQSKRHSMVHDGFMFPMLVSEQFEQWPESGFRQRKWVCLSEAIDLCQNWWMREALDAFIDRKCL

SEQ ID NO: 35626 - protein, 136 aa, Triticum aestivum
MLLRLRGDLPGRPRYSSHPEVESWTSPDLSAGGLGQSVKPSRLRSYVMSFDSDTLQTYATIRSKVAFGIIEKHTEALFGKPEIVITPEGTVDSSKDEYVRISFSGLRRLILEAVTFGSFLWDVESYVDSRYHFVTN

SEQ ID NO: 35627 - protein, 365 aa, Prunus dulcis
MGSTGETQMTPTQVSDEEANLFAMQLASASVLPMVLKAAIELDLLEIMAKAGPGVFLSPTDIASQLPTKNPDAPVMLDRMLRLLASYSILTYSLRTLADGKVERLYGLGPVCKFLTKNEEGVSIAPLCLMNQDKVLLESWYHLKDAVLEGGIPFNKAYGMTAFEYHGTDPRFNKVFNRGMADHSTITMKKILETYKGFEGLTSVVDVGGGTGAVLNMIVSKYPSIKGINFDLPHVIEDAPQYPGVEHVGGDMFVSVPKGDAIFMKWICHDWSDEHCLKFLKNCYAALPDNGKVILGECILPVAPDSSLATKGVVHIDVIMLAHNPGGKERTEQEFQALAKGAGFQGFNVACSAFNTYVIEFLKKN

SEQ ID NO: 35628 - protein, 268 aa, Datura stramonium
MAGREIGGGDRRWSLRGMTALVTGGTRGIGYAIVEELANFGAEVYTCSRSQNDLDECLEKWRRKGFKVSGPVCDVSSISQRQTLMESVTSSFNGKLNILINNAGTTIPKEATNFTAEDYSIIMGTNFEASYNLCQLAHPLLKASGNASIVFNSSAAGVIAVPLSSIYAASKGAINQVTKSLACEWAKDSIRVNAVAPWIINTPIIEAACQVPSQKKNIESLIGRAPMKRAGEPSEVSSLVTYLCLPTASYITGQIICVDGGYTVNGFI

SEQ ID NO: 35629 - protein, 463 aa, Pseudomonas fluorescens PfO-1
MSSTQSSNGLEQGLKPRHVTMLSIAGVIGAGLFVGSGHAIAAAGPAVLLAYAAAGALVVLVMRMLGEMAVASPDTGSFSTYADRAIGHWAGFTIGWLYWWFWVLVIPLEANAAATILHAWFPGVDIWAFALIITMLLTVTNLFSVKNYGEFEFWFALLKVVAIIGFIILGVAAIFGFLPNSQVSGVSHIFDTQGFLPNGMGAVLGAILTTMFSFMGTEIVTIAAAESKNPGKQISKATNSVIWRIGLFYLVSIFIVVALVPWNDPVLASVGSYQTVLERMGIPNAKMIVDIVVLVAVTSCLNSALYTSSRMLFSLGKRGDAPVMSTRTNKSGTPYWAVMLSTGAAFLCTFANYVAPAAVFEFLLASSGAIALLVYLVIAISQLRMRKQRMARGEKIVFSMWLFPGLTYAVIAFIVAALTIMLFQDAHRVEILATGLLSLVVVATGLLVARRRKMENRGAAVLN

SEQ ID NO: 35630 - protein, 307 aa, Vibrio sp. Ex25
MLPFIYHPIYSQLELPEGHRYPIMKYQYLYESVLVHMEKDNWKEHVQFFQPEALTVEEVKRVHDQEYVDLLVNGNMPAAKMRRIGFPWSESLITRTLTSAAGTALTANKALEYGVAIHLSGGYHHAHKEFGSGFCLFNDLVIAARQALEVEHVDKVLIIDSDVHHGDGTATLCHDEPDIITLSFHCDKNFPARKPQSDLDVPLVRGTGDEDFLMAFKEVVDMALNLHRPDLVIYDAGVDIHQDDELGYFDVSTQGILERDRFLMQTMKSRGIPVAAVVGGGYRTNHADLVPIHLQLINAAKEVFVGK

SEQ ID NO: 35631 - protein, 168 aa, Burkholderia fungorum LB400
MTTQTETALLAGGCFWGMQDLLRRYPGVLSTRVGYTGGDVPNATYRNHGTHAEALEVVFDPRQISYRQILEFFFQIHDPTTKNRQGNDVGTSYRSAIFYLDDEQKRVAENTVADVEASDLWPGKVVTEIAPAGPFWEAEPEHQDYLERIPNGYTCHFVRPDWKLPKRG

SEQ ID NO: 35632 - protein, 418 aa, Xanthomonas axonopodis pv. citri str. 306
MSPDLRQLHTFGELDPPQRLLMGPGPVNAHPRVLRAMAADLLGQFDPEMTTYMNEVMALYRPLFGTENRWTFLVDGTARAGIEAALVSLVSPGERVLVLNFGRFGLLLTEILGRLGADVHSVDAPWGQVLPLSAIAEAIERVAPQLVATVHGDTSTTMAQPLDGVGALCRAAGALSYVDATATIGGMPIASDRWDVDVVTGGLQKCLGGPSGSAPITVSERAAEAIFARRHVERGIVRADIANGSGPRIASNYFDLAMIMDYWSDKRLNHHTEATTMLYGARECARVALQEGLDARFARHAAAGRAVSAGIRALGLEVFGDDAHRMTNVTGVVIPPGIDSEAVRRRMREDFEIEIGTAFGPLQGRIWRIGAMGYNAMKHKVLITLAALEAVLRAEGYACTHGLAVEAALAAWHAEVQA

SEQ ID NO: 35633 - protein, 492 aa, Prochlorococcus marinus str. MIT 9313
MTTAPLPRSRRRTVRLQEASLLEGPMLLLRSIRGFSSNRSLTWLACVPLALFGLGLFNLSAHAAEMPELNAAFLANNLWLLVATILVIFMNAGFAMVEAGMCRQKNAVNILAKNLFVFALAVSSYWFIGYSLMYGDPVSAGWLYFNGLFFDPAVTPELISEAGLVPSVDFLFQAAFAGTAATIVSGLVAERVKFGEFVVFSLVLTGFIYPIAGSWEWNGGWLNTAFGEGVEFIDFAGSSIVHSVGAWAGLVGAMLLGPRIGKFVGGKAQAIPGHNMSIATLGALILWIGWYGFNPGSQLAMDQWVPYVAVTTTLAAAGGAIGATIISTLCSGKPDLTMIINGILAGLVSITAGCGNLTLVGAWVAGLIGGFIVVFSVSALDSLGIDDPVGAFSVHGICGIWGTLVIGLWGFDIQGDGSALGLFVGGGASQLWAQFVGCAAYAIWTVVTCWIAWSVIGALFGGIRVTEAEEIEGLDIGEHGMEAYPDFASAGN

SEQ ID NO: 35634 - protein, 164 aa, Glycine max
FGSSKVSDVELDQISLLPNAEYLLTSFLSIWEKADLIKVSDVELEFLTGSDKIDDESALSLWHPNLKLLLVTLGEHGSRYYTENFKGSVDAFHVNTVDTTGAGDSFVGALLSKIVDDQSILEDEPRLREVLKYANACGAITTTQKGAIPALPKEEDALKLIKGA

SEQ ID NO: 35635 - protein, 338 aa, Geobacter sulfurreducens PCA
MKIYYDKDCNQSVLKGKRVAVIGYGSQGHAHANNLKDSGVDVVVGLKADSSSVAKATGAGLTVLPTADAVKGADVVMILLPDEIQGDVYREEVGPYLKQGAYLAFGHGFNIHFGQITPRPDINVIMAAPKGPGHLVRHEYTRGGGVPCLIAIHHDPSGNSRDVALAYASAIGGGRAGIIETSFKEETETDLFGEQAVLCGGISALIQAGFETLVEAGYSPEMAYFECLHETKLIVDLIYEGGIANMRYSISNTAEYGDLTRGPRVITDETKKEMKQILWEIQSGQFAKEWMLENKANKPTFNALRRKGMEHPIEDVGARLRSMMSWIGSSKIVDKSKN

SEQ ID NO: 35636 - protein, 213 aa, Mesorhizobium loti MAFF303099
MIPTITAFERSPDGGKGLARDTRVRWALEEVGQPYEVRLVSFAGMKAPDHLAIHPFGQIPTYEEGSLCLFETGSIVFHLAEQHAGLLPRDRDARARAITWMFAALNTVEPPILELTTARIFEADRSWSEQRLPLVKDRVRARLDQLSAYLGAAEWLDGAFSAGDLLMVSVLLRLRMSGILDEYQNLAAYVARGEARPAYARAFAAQFAVNAAS

SEQ ID NO: 35637 - protein, 378 aa, Burkholderia vietnamiensis G4
MSLFSAVQLAPRDPILGLNEAFNADARPTKVNLGVGVYTNEEGKIPLLRAVREAEKARVDAGLPRGYLPIDGIAAYDAAVQKLLLGNDSPLIAAGRVVTAQALGGTGALKIGADFLRTVNPNVKVAISDPSWENHRALFEAAGFEVVAYPYYDAATHGVNFEAMLAALNGYAAGTIVVLHACCHNPTGVDLTEAQWQQVVDVVKARNLVPFLDIAYQGFGDGIDADAAAVRLFAAADLNAFVSSSFSKSFSLYGERVGALSIITSSKEEATRVLSQLKRVIRTNYSNPPTHGGAVVAAVLASPELHASWVQELGEMRDRIRAMRNGLVERLKASGVERDFSFINAQRGMFSYSGLTSAQVDPSARRIRASNAVGTGRI

SEQ ID NO: 35638 - protein, 295 aa, Brassica napus
  misc_feature (195)..(195): Xaa can be any naturally occurring amino acid
  unsure (1)..(295): unsure at all Xaa locations
MNRGIEVMSPATYLETSPNWLFQENRGTKWTAEENKKFENALAFYDKDTPDRWFKVAAMLPGKTVGDVIKQYRELEEDVSDIEAGLIPIPGYASDSFTLDWGGYDADNMNGYYFAAVGGKRGSAARAAEHERKKGVPWTEEEHRQFLMGLKKKGKGGRRNIARNFVTTRTPTQVASHAQKYFIRQVNGGKDKRRXSSIHDITTVNIPDSFDAAAADTAITNAPCSPPSLGGSQREGSGQWDGQTINDETAGTFYNPNAFQETLLGMSSTPYMAKLQEQSFLNASQFESYNAYLQM

SEQ ID NO: 35639 - protein, 538 aa, Aeropyrum pernix K1
MSPRKYVIVTGGVLSSVGKGLTTASLALLLSSRGYSVEAIKIDPYINVDAGTMNPYMHGEVFVTEDGGETDLDIGHYERFLGKNLSRKHNITTGQIYFSVISKERSGDYLGQTVQVIPHITDEIKSRIKEVGDVSGADVVIVEIGGTVGDIEGLPFLEAARQMRLEEGFDNTFFIHVALSPYLPTTGEQKTKPVQHSIQELRRIGIQPDAVVVRSHQPLEQEGLRKIALYATLPMENVINSYDIENIYRLPLLLEKQGLARLVERRLFGRETRPDLSRWEEFVALYEKASRRVKVAMVGKYTKLRDSYISIVEALKHASAYEGVRPELLWVESTDIERGVVDVDRVFEEADGAIVLPGFGVRGVEGKIEAIRRFREGKKPMLGICFGMQLSVVEYARNVLGLKEAHTTEVNPETPHPVVDLLPEQRGIDKLGGTMRLGARPVRIVEGTILWSLYGRELASERHRHRYEVNPTYVDRLVEAGLVVSAWSQEGYVEAVELRPRDHPFFLATQFHPEFKSRPLNPAPVFKGFVTAVARLRG

SEQ ID NO: 35640 - protein, 1060 aa, Pseudomonas aeruginosa UCBPP-PA14
MFKASHVLQGEDQTRSAAEFFPVISANYAVDEEAYLGELLQLADPGPDGIEAIRRNARALIETVRSRDNAVDTLDALLRQYSLDTQEGLMLMCLAEALLRVPDAATADALIRDKLSAADWQRHLGQSDNVLVNFAAWGLVMTGKVVNIDERTDGRAPSVISRLVQRSGEPVIRAAMNQAMKLMGKQFVLGRTISEALKNGRPCREQGYTYSFDMLGEAALTAADAEKYMADYRQAIDTVGAEPQVGPGPRPSISIKLSALHPRYEVAQRERVLSELFANVLELAVRARKLNVGITIDAEEADRLELSLELYEKLMRDPAIAGWGEFGLVIQAYSKRCLPVLVWLTLLGRELGARIPLRLVKGAYWDSEIKQCQVQGADGYPVYTRKEGTDTSYLACARYLLSEHTRGVIYPQFASHNAHTVTAILALADEARAAGGEERDFEFQRLHGMGDALYDTVIEKYRRNVRIYAPVGAHKDLLPYLVRRLLENGANSSFVHKLVDPRVPVETLIQHPVTQLRQFKTLANDRIPLPQAIFGAGRKNSQGINMNIQNQWNELELAYKPHLTRQWQAAPIVNGEKLSGPAHEVRCPYDLERLVGSVQYASAEQAGKALDVLQAAWPRWSATPVDERAGILERLADLLEAQRGELMALCTLEAGKSLQDGIDEIREAVDFCRYYAQQARQRLVREELRGPTGERNELFYEGRGIFACVSPWNFPLAIFLGQISAALVAGNTVLAKPAEQTSLIAARTVELMFEAGLPRDVIALLPGDGATLGGVFCRDARVAGVAFTGSTDTARIINRQLAEKPGAIATLIAETGGQNAMIVDSTALPEQVIKDAVQSAFTSAGQRCSALRVMYVQQDIAERVIELLKGAMAELKVGPTDVRVSDVGPVIDAEAKAGLEQHIAALKAAGKLIAETKVPGNLNGHFVAPVAFEISGIDELKKENFGPVLHVVRYAAQDLEKVVQAINATGFGLTMGVHSRNEETARRIEELARVGNLYINRNQIGAVVGVQPFGGHGLSGTGPKAGGPNYLLRFVSERTTSVNTTAVGGNASLLSLADAE

SEQ ID NO: 35641 - protein, 679 aa, Streptomyces avermitilis MA-4680
MAPHPEAAALLARSHRLGADPRNTNYAGGNASAKGTATDPVTGGDVELMWVKGSGGDLGTLTEAGLAVLRLDRLHALKGVYPGVEREDEMVAAFDYCLHGKGGAAPSIDTAMHGLVDAAHVDHLHPDSGIALACAADGEKLTAECFGDSVAWVPWRRPGFQLGLDIAAVKEANPQTIGCVLGGHGITAWGATAEECERNSLHIIRTAEAFLAERGKAEPFGPVIEGYAALGAPERRERAAALAPYVRAVAAQDRPQVGHFTDSEVVLDFLASAGHPRLAALGTSCPDHFLRTKVRPLVLDLPPTADLDTAVARLTELHAEYRAEYAAYYQRHALPDSPAMRGADPAIVLVPGVGMFSFGKDKQTARVAGEFYVNAINVMRGAEAVSTYAPIEESEKFRIEYWALEEAKLQRLPKPKPLATRVALVTGAGSGIGKAIAERLVAEGACVVVADLNAENAADVASALGGPDKAVAVTVDVTSEEQIAEAFKAAVLAFGGVDLVVNNAGISISKPLLETTAKDWDLQHDIMARGSFLVSREAARVMTQQKLGGDIVYIASKNAVFAGPDNIAYSATKADQAHQVRLLAAELGEHGIRVNGVNPDGVVRGSGIFAGGWGAQRAATYGIEEEKLGEFYAQRTILKREVLPEHVANAVFALTGGDLTHTTGLHVPVDAGVAAAFLR

SEQ ID NO: 35642 - protein, 607 aa, Solanum tuberosum
MASITASHHFVSRSQTSLDTKSTLSQIGLRNHTLTHNGLRAVNKLDGLQSRTNTKVTPKMASRTETKRPGCSATIVCGKGMNLIFVGTEVGPWSKTGGLGDVLGGLPPALAARGHRVMTISPRYDQYKDTWDTSVAVEVKVGDSIEIVRFFHCYKRGVDRVFVDHPMFLEKVWGKTGSKIYGPKAGLDYLDNELRFSLLCQAALEAPKVLNLNSSNYFSGPYGEDVLFIANDWHTALIPCYLKSMYQSRGIYLNAKVAFCIHNIAYQGRFSFSDFPLLNLPDEFRGSFDFIDGYEKPVKGRKINWMKAGILESHRVVTVSPYYAQELVSAVDKGVELDSVLRKTCITGIVNGMDTQEWNPATDKYTDVKYDITTVMDAKPLLKEALQAAVGLPVDKKVPLIGFIGRLEEQKGSDILVAAIHKFIGLDVQIVVLGTGKKEFEQEIEQLEVLYPNKAKGVAKFNVPLAHMITAGADFMLVPSRFEPCGLIQLHAMRYGTVPICASTGGLVDTVKEGYTGFHMGAFNVECDVVDPADVLKIVTTVARALAVYGTLAFAEMIKNCMSEELSWKEPAKKWETLLLGLGASGSEPGVEGEEIAPLAKENVATP

SEQ ID NO: 35643 - protein, 1230 aa, Candida albicans
MSILSENNPTPTSITDPNKSSHLHNPELNSGTRVASGPGPGPEAESTPLAPPTEVMNTTSANTSSLSLGSPMHEKIKQFDQDEVDTGETNDRTIESGSGDIDDSQQSHNNNNNNNNNNNESNPESSEGDDEKTQGMPPRMPGTFNVKGLHQGDDSDNEKQYTELTKSINKRTSKDSYSPGTLESPGTLNALETNNVSPAVIEEEQHTSSLEDLSLSLQHQNENARLSAPRSAPPQVPTSKTSSFHDMSSVISSSTSVHKIPSNPTSTRGSHLSSYKSTLDPGKPAQAAAPPPPEIDIDNLLTKSELDSETDTLSSATNSPNLLRNDTLQGIPTRDDENIDDSPRQLSQNTSATSRNTSGTSTSTVVKNSRSGTSKSTSTSTAHNQTAAITPIIPSHNKFHQQVINTNATNSLSSLEPLGVGINSNSSPKSGKKRKSGSKVRGVFSSMFGKNKSTSSSSSSNSGSNSHSQEVNIKISTPFNAKHLAHVGIDDNGSYTGLPIEWERLLSASGITKKEQQQHPQAVMDIVAFYQDTSENPDDAAFKKFHFDNNKSSSSGWSNENTPPATPGGSNSGSGSGGGGAPSSPHRTPPSSIIEKNNVEQKVITPSQSMPTKTESKQSENQHPHEDNATQYTPRTPTSHVQEGQFIPSRPAPKPPSTPLSSMSVSHKTPSSQSLPRSDSQSDIRSSTPKSHQDVSPSKIKIRSISSKSLKSMRSRKSGDKFTHIAPAPPPPSLPSIPKSKSHSASLSSQLRPATNGSTTAPIPASAAFGGENNALPKQRINEFKAHRAPPPPPSAPPAPPVPPAPPANLLSEQTSEIPQQRTAPSQALADVTAPTNIYEIQQTKYQEAQQKLREKKARELEEIQRLREKNERQNRQQETGQNNADTASGGSNIAPPVPVPNKKPPSGSGGGRDAKQAALIAQKKREEKKRKNLQIIAKLKTICNPGDPNELYVDLVKIGQGASGGVFLAHDVRDKSNIVAIKQMNLEQQPKKELIINEILVMKGSSHPNIVNFIDSYLLKGDLWVIMEYMEGGSLTDIVTHSVMTEGQIGVVCRETLKGLKFLHSKGVIHRDIKSDNILLNMDGNIKITDFGFCAQINEINSKRITMVGTPYWMAPEIVSRKEYGPKVDVWSLGIMIIEMLEGEPPYLNETPLRALYLIATNGTPKLKDPESLSYDIRKFLAWCLQVDFNKRADADELLHDNFITECDDVSSLSPLVKIARLKKMSESD

SEQ ID NO: 35644 - protein, 357 aa, Lycopersicon esculentum
MKKGSFAPNLKLSLPPPDEVALSKFLTESGTFKDGDLLVNRDGVRIVSQSEVAAPSVIQPSDNQLCLADFEAVKVIGKGNGGIVRLVQHKWTGQFFALKVIQMNIDESMRKHIAQELRINQSSQCPYVVICYQSFFDNGAISLILEYMDGGSLADFLKKVKTIPERFLAVICKQVLKGLWYLHHEKHIIHRDLKPSNLLINHRGDVKITDFGVSAVLASTSGLANTFVGTYNYMSPERISGGAYDYKSDIWSLGLVLLECATGHFPYKPPEGDEGWVNVYELMETIVDQPEPCAPPDQFSPQFCSFISACVQKHQKDRLSANDLMSHPFITMYDDQDIDLGSYFTSAGPPLATLTEL

SEQ ID NO: 35645 - protein, 512 aa, Arabidopsis thaliana
  misc_feature (188)..(188): Xaa can be any naturally occurring amino acid
  unsure (1)..(512): unsure at all Xaa locations
FTTTYFASAETLGCNNNFVLVKVPTRVNGSEYTEYVGVGARFGPTLESKEKHATLIKLAIADPPDCCSTPKNKLTGEVILVHRGKCSFTTKTKVAEAAGASAILIINNSTDLFKMVCEKGENVLDITIPVVMLPVDAGRSLENIVKSNAIVTLQLYSPKRPAVDVAEVFLWLMAVGTILCASYWSAWXVRKEAIEQDKLLKDGSDELLQLSTTSSRGVVEVTVISAILFVVVASCFLIMLYKLMSFWFIEVLVVLFCIGGVEGLQTCLVSLLSCFRWFRRFGESYVKVPFLGAVSYLTLAICPFCIAFAVFWAVKRQYSYAWIGQDILGISLIITVLQIVRVPNLKVGFVLLSCAFMYDIFWVFVSKWWFRESVMIVVARGDRSGEDGIPMLLKIPRMFDPWGGYSIIGFGDIILPGLLVTFALRYDWLANKRLKSGYFLGTMSAYGLGLLITYIALNLMDGHGQPALLYIVPFILGTLFVLGHKRGDLKTLWTTGEPDRPCPHVRLQPQSS

SEQ ID NO: 35646 - protein, 347 aa, Kluyveromyces lactis NRRL Y-1140
MRPIVLKGHERPLTQVKFNRDGDLVFACSKDSVASIWYAINGERLGTLDDHSGTIWSIDVDESTTYALTGGADFCFKIWKVATGVAVHSVSTRSPVLRVEFSPDGSKLLIVLDAVMGHIGSIVVYSLIRNENGEIVNVKEEPDYEITTIEQATKVFVASWSYNGKYIIAGHEDGQISAYYGENGEFVQAKKIHEKSIKDIQFSPDRTYFITSSRDSVASLVDVDTFEVLKTYKADCPLNSASITPLKEFVILGGGQDAKDVTTTSAREGKFEARIYHKVFQDEIGRVKGHFGPLNYVAVSPTGTSYASGGEDGYIRLHHFDKSYFDFKYDVEKTFEVERRQQLQKQE

SEQ ID NO: 35647 - protein, 537 aa, Buchnera sp.
ARVKMLRGVNVLADAVKVTLGPKGRNVVLDKSFGAPSITKDGVSVAREIELEDKFENMGAQMVKEVASKANDAAGDGTTTATLLAQSIVNEGLKAVAAGMNPMDLKRGIDKAVISAVEELKNLSVPCSDSKAITQVGTISANADEKVGALIAEAMEKVGNDGVITVEEGTVFKNELEVVKGMQFDRGYLSPYFINKPETGIVELENPYILMADKKISNVREMLPILESVAKSGKPLLIISEDLEGEALATLVVNSMRGIVKVAAVKAPGFGDRRKAMLQDISILTGGSVISEELAMDLEKSTLEDLGQAKRVVINKDTTTIIGGVGEKHAIQSRIGQIRQEIQEATSDYDKEKLNERLAKLSGGVAVLKVGAATEVEMKEKKARVEDALHATRAAVEEGVVAGGGVALVRVAGKISTLRGHNEDQNVGIRVALRAMEAPLRQIVSNSGEEPSVVTNNVKDGKGNYGYNAATDEYGDMIDFGILDPTKVTRSALQYAASVAGLMITTECMVTDLPKEDKSSDIGSSPAGGMGGMGGMM

SEQ ID NO: 35648 - protein, 391 aa, Arabidopsis thaliana
MTMMFDLTQDLVKEILSRVPITSLGAVRSTCKGWNALSKDRILCKAKPKQQFHQGFMLSDYRLRSMRFNISGTFKENGEEFVNLSVKEIGNFLNKVEISHMYYCGGILLCVTTDTRLVIWNPYLGQIRWIQLKTETMYSTFCLRYDNNKNHKILRFLDNKQGSYEIYDLKSYSWRAFDVIPKWDIDDDGQSASVKGNTYFRTIDETPNLLICFDFTAERFGKLLDPPFQHGWMSLSWVREEKLVALYQHLDTSMIEIWITTKIEPNALSWTSFLKCYIEQLIALDFWFDIDYNNFFIDEEKKLAVVIDKVESEDCKRSNSHINSYIIGDDGYLKKMNSLGNTARSYTAIMLSSCYVSSLVQIDDPIARRRRRERNSKRKEKKRKGTTNNKV

SEQ ID NO: 35649 - protein, 236 aa, Triticum aestivum
  misc_feature (151)..(151): Xaa can be any naturally occurring amino acid
  misc_feature (193)..(193): Xaa can be any naturally occurring amino acid
  unsure (1)..(236): unsure at all Xaa locations
MGRSPCCEKAHTNKGAWTREEDERLVAHVRAHGEGCWRSLPSAAGLLRCGKSCRLRWINYLRPDLKRGNFSRDEDELIVKLHSLLGNKWSLIAARLPGRTDNEIKNYWNTHIRRKLLGRGIDPVTHRPLTDATTVSFVHPAEAPKTQPADXERKPPRCPDLNLDLCISLPFQQEEERPPARACAKPVKMEQLXAGRRLCFRCSILRVRGAATECSCGSNFLGLRAGMLDFRGLRMK

SEQ ID NO: 35650 - protein, 309 aa, Thermus thermophilus HB27
MLEVVTAGEPLVALVPQEPGHLRGKRLLEVYVGGAEVNVAVALARLGVKVGFVGRVGEDELGAMVEERLRAEGVDLTHFRRAPGFTGLYLREYLPLGQGRVFYYRKGSAGSALAPGAFDPDYLEGVRFLHLSGITPALSPEARAFSLWAMEEAKRRGVRVSLDVNYRQTLWPPEEARGFLERALPGVDLLFLSEEEAELLFGRVEEALRALSAPEVVLKRGAKGAWAFVDGRRAEGSAFVVEAVDPVGAGDAFAAGYLAGAVWGLPVEERLRLANLLGASVAASRGDHEGAPYREDLEVLLKATQTFMR

SEQ ID NO: 35651 - protein, 96 aa, Buchnera sp. N27
MNIRPLHDRVLVKRNEAELKSAGGIVLTGSAAGKSTRGTITAVGNGRVLDNGQIKPLDVKVGDVVIFNEGYGAKTEKIDNEELLILTESDILAIVE

SEQ ID NO: 35652 - protein, 548 aa, Buchnera sp. N27
MAAKDVKFGNEARIKMLRGVNVLADAVKVTLGPKGRNVVLDKSFGAPSITKDGVSVAREIELEDKFENMGAQMVKEVASKANDAAGDGTTTATLLAQSIVNEGLKAVAAGMNPMDLKRGIDKAAISAVEELKNLSVPCSDSKAITQVGTISANADEKVGALIAEAMEKVGNDGVITVEEGTGLQNELEVVKGMQFDRGYLSPYFINKPETGVVELENPYILMADKKISNVREMLPILESVAKSGKPLLIISEDLEGEALATLVVNSMRGIVKVAAVKAPGFGDRRKAMLQDISVLTGGSVISEELAMDLEKSTLEDLGQAKRVVINKDTTTIIGGVGEKQAIQSRISQIRQEIQEATSDYDKEKLNERLAKLSGGVAVLKVGAATEVEMKEKKARVEDALHATRAAVEEGVVAGGGVALVRVAGKISNLRGHNEDQNVGIRVALRAMEAPLRQIVSNSGEEPSVVTNNVKDGKGNYGYNAATDEYGDMIDFGILDPTKVTRSALQYAASVAGLMITTECMVTDLPKEDKTSDASSSPAGGMGGMGGMM

SEQ ID NO: 35653 - protein, 350 aa, Xanthomonas axonopodis pv. citri str. 306
MDVAVPTLPLHCTFDAADWQRLAQHWHAVALSSEVSEAPFKATLLDEPLVLYRLGSELVAARDVCPHRGVPLSMGTADGGGVVCAYHGLRFGAGGRCNHIPASPSQNIPAKMRLHTYAVAERYGLIWVCLAKPAGVSDADIQIPPMPGWDEDGFQQIVCPAFDIGGSAARQLEGFIDVAHFAFVRTATFAQPDKREVPAYTTTETPTGFNADYLSTVANYSVDMPLPDVDPNFQWLRHFEVHLPFTATLTIHFPVPGKRLVIMNAASPVSKHTTRLLVPIARNFDTHLPVEDVHAFNLRVFEEDRAMVEAQRPEYLPLDPLLEVHIPADRSSIAYRRGLRSQGYSDFFLR

SEQ ID NO: 35654 - protein, 96 aa, Buchnera sp. 150
MKIRPLHDRVLVKRNEAELKSAGGIVLTGSAAGKSTRGTITAVGNGRVLDNGQIKPLDVKVGDVVIFNEGYGAKTEKIDNEELLILTESGILAIVE

SEQ ID NO: 35655 - protein, 574 aa, Methanococcus maripaludis S2
MDKYDKIIDLTKRRGFLWNSFEIYGGIAGFFDYGPLGAILKNNVINTWRKHYIVNEGFYEIDSPTVTPYEVLKASGHVENFTDPLVECKDCLESFRADHIIEENVDVDTEGKTLQELQEMIEKNNIRCPKCGGEFKEVSTFNLMFATSIGPGGKRAAFMRPETAQGIFIQFKRISQFFRNKLPFGAVQIGKAYRNEISPRQGVIRLREFTQAEGEFFIDSRKKENFEKFESVKDMVLPLLSGKNQEDESLSSEEKVVKMSLSDAVKNGIIAHEAIAYYIAVTKKFLMEIGIDETKLRFRQHLPNEMAHYAADCWDAELYTDRYGWIECVGVADRTNYDLLAHMKNSGDDLSVFVELDEEHEIEAYEIELNYKLVGRTFKGDAKVLEESLKELDDKKMEELVEALETEGKYVLKTCKRDFEILKEYLTAKKVKKIVKGEKIIPHVIEPSYGIDRITYCVMEHAFKEDEDRTVMGFSNAVSPIKVGVFPLVNKEGMPEIAMDLKNKLRENGLIAEYDDSGAIGRRYMRMDEVGTPFCITIDGETLKDRSVTIRERDSREQFRIPINEVVPYIKDKL

SEQ ID NO: 35656 - protein, 337 aa, Debaryomyces hansenii CBS767
MSTSYLLARDVCSSQNHFNGENLGARISAVFVILAVSAIGAFFPLVVQRCPYFKLPKWCFFITRYFGSGVIVATGFIHLLAEADQALSDECLGGVFNEYPWAEGIALMGVFVMFLLDIVAHKRLDDKLAKKDKLKAEKAALENENSLEIQAIKEKVDDTEDVKLTDDDTPTENVYQQILNSFVLEFGIIFHSVFVGLSLAIAGNEFKALYVAIAFHQMFEGLGLGTRFAMTPWPKDKQYIPWVLALAYSLTTPIAIAIGLGVRNSYPPGSRVALITTGCFDALCSGILIYNSLVELMAYDFIFSPEFKTDDGMKKMLWAYFCLAFGAAIMALIGKWA

SEQ ID NO: 35657 - protein, 331 aa, Thermobifida fusca YX
MAAQMYYDDDADLNIIQGRTVAVIGYGSQGHAHALSLRDSGVDVRVGLPESSKSRAKAEEDGLRVVTPAEAAQEADLIMILVPDHIHRDLYANEIAPHLNEGDALFFGHGFSIRYGLITPPEGVDVAMVAPKGPGHLVRRQFEAGRGVPVLVAVEKDASGSAWDLALSYAKAIGGTRAGALKTTFKEETETDLFGEQAVLCGGVSELIKAGFATLVEAGYQPEVAYFECLHEMKLIVDLMYEGGISKMYWSVSDNAEYGGYTRGPRVITESTREEMRKILQEVQDGTYAKELVEEFDKGRPNFLKRREAEQGEQIEKVGTELRSLMSWLKN

SEQ ID NO: 35658 - protein, 546 aa, Staphylococcus aureus subsp. aureus COL
MSKEIDWRKSVVYQIYPKSFNDTTGNGIGDINGIIEKLDYIKLLGVDYIWLTPVYESPMNDNGYDISNYLEINEDFGTMDDFEKLIKVAHQKDLKVMLDIVINHTSTEHEWFKEARKSKDNPYRDYYFFRSSEDGPPTNWHSKFGGNAWKYDSETDEYYLHLFDVSQADLNWDNPEVRQSLYRIVNHWIDFGVDGFRFDVINLISKGEFKDSDKIGKEFYTDGPRVHEFLHELNRQTFGNTDMMTIGEMSSTTIENCIKYTQPERQELNSVFNFHHLKVDYVDGEKWTNAKLDFHKLKEILMQWQRGIYDGGGWNAIFWCNHDQPRVVSRFGDDTSEEMRIQSAKMLAIALHMLQGTPYIYQGEEIGMTDPHFTSIAQYRDVESINAYHQLLSEGHAEADVLAILGQKSRDNSRTPMQWSDDVNAGFTAGKPWIDISENYHQVNVRQALQNKESIFYTYQKLIQLRHTHDIITYGDIVPRFMDHDHLFVYERHYKNQQWLVIANFSASAVDLPEGLAREGCVVIQTGTVENNTISGFGAIVIETNA

SEQ ID NO: 35659 - protein, 375 aa, Pseudomonas aeruginosa UCBPP-PA14
MAEAKVLSGAGLRGQVAGQTALSTVGQEGAGLTYRGYDVRDLAAAAIFEEVAYLLLYGELPNKQQLDAYLKKLQGQRDLPQALKEVLERIPKDAHPMDVMRTGASVLGTLEPELSFDQQRDVADRLLAAFPAIMTYWYRFTHEGQRIDCNSDEPTIGGHFLALLHGKKPSELHVKVMNVSLILYAEHEFNASTFTARVCASTLSDLYSCVTGAIGSLRGPLHGGANEAAMELIERFSSPQEATAELLKMLERKDKIMGFGHAIYKDSDPRNEVIKGWSKQLADEVGDKVLFAVSEAIDKTMWEQKKLFPNADFYHASAYHFMGIPTKLFTPIFVCSRTSGWTAHVFEQRANNRIIRPSAEYTGVEQRAFVPLEQR

SEQ ID NO: 35660 - protein, 548 aa, Listeria monocytogenes str. 4b H7858
MTKFAQKTIYQVYPKSFYDTTGDGTGDIPGITAKLDYLQKLGIEMIWLNPFYPSPQNDNGYDIADYTAVDPLFGTMDDVTTLIKEAKKRNIGIMIDLVLNHTSTEHPWFKKALAGDPFYRDFYYFRPAKADGSPPTNWVSKFGGNAWEKLPDSSEYYLHLYDVTQADLDWANPNVREALFDVVNFWIDKGVEGFRLDVLNVIAKPKFLEDDFEGDGRRFYTDGPGIHAYLKELHERTFGDKPIITVGEMSSTDIDNCIRYSNPDEKELSMVFHFHHLKVDYPDGEKWRLADVNFENLKSIFHTWQVAMSEENGWDALFWNNHDQPRALGRFASDKPEHYYHSATLLGATIHFMRGTPFVYMGEEIGMMNPKFPTIDDYVDVETLNHFDILQKNGLSEQEVMAIIKERSRDNSRTPMQWDDSQNAGFTTGTPWLKVADNASEINVQAALSNKTSIFYFYQKLIALRKEYPVIQTGDYTPYWTDEDLIIAYKRSNEITSLLSIHHFGSTTKKIQLPNEFLNAKVLLSNYERQTISSELELAPYETLTLIR

SEQ ID NO: 35661 - protein, 562 aa, Sinorhizobium meliloti
MPPPLPERRHLICACVGTYCGCGSNPPSGSSPFVPASFFVPAEGTAEPRCGGVSSPRSRAGFSPRIRALISSPVSVSYSSKPSARATNSLTAGPRGGIMLQDYQLIEKLAHQNRERIPERVVHAKGWGAFGSLKITGDISQYTRAKCLQPGAETPMLARFSTVAGEQGAADHERDVRGFALKFYTDEGNWDLVGNNTPVFFIRDPYKFPDFIHTQKRHPKTNLRSATAMWDYWSLSPESLHQVTILMSDRGLPQTPMHMNGYGSHTYSFWNDAGERYWVKFHFKTQQGHKFFTNEEGEAVIGKTREGYQESLFYAIENGEFPRWTVQVQIMPELDVEKTPYNPFDLTKVWPHADYPPVEIGVLELNRNPENYFAEIENAAFSPSNIVPGIGFSPDKVLQARIFSYADAHRYRLGTHYEHIPVNQPRCPVHHYHRDGQMNTYGGIRTGNPDAYYEPNSFNGPAEQPLAKEPPLRIDGDMSRYDHRVGNDDYVQVRALFGLFDEGQKSRLFSNIAAAMGGVPGEIIERQLIHFARVHPEYEAGVRQALKTAHGYEADTISTAAE

SEQ ID NO: 35662 - protein, 593 aa, Alkalilimnicola ehrlichei MLHE-1
MADLVEVKVPDIGDFDAVDVIEVLVSPGDEIEVEQSLITLESDKASMEVPSSHAGVVKEVKVKVGDKVSEGDVVCTLEAAEATAGGEAPATGGGRAEKPAEPEPPAAATRPAPAAAPQGDAPVDADCDVLVLGAGPGGYTAAFRAADLGLKTVLVERYPTLGGVCLNVGCIPSKALLHAAKVIDEAEQFADHGITFGKPKIDIRKLADWKSSVVKKLTGGLAGLAKQRKVEVVTGKGAFKDAYHLEVDGKEGKRTISFRHCIIAAGSRPVVPPPLAVDDPRVMDSTGALELEEVPERLLVVGGGIIGLEMACVYDALGSKVTVVELADRLMPGADADLVKVLRKRIDKRYDAIHLNTLVKELKPNKKSITVKFEGKDAPESDRFDRVLLSVGRRPNTDLIGLEATGLKPNDQGYIDVDEYMRTGVSHIHAIGDIVGQPMLAHKASHEGKVAAEVIAGEKSAWDARAIPSVAYTDPEVAWVGITEEEAKAQGIAYEKGAFPWAANGRSLSLNYQDGISKLLFDEQSGQLIGAGIVGPNAGDLIAEAALALEMGAEAADIGLTVHPHPTLSETVAMAAEAAEGTLTDLYIPKKKK

SEQ ID NO: 35663 - protein, 443 aa, Leuconostoc mesenteroides subsp. mesenteroides ATCC 8293
MTQQYDYDVLYLGSGHGTFDGAVPLAQSGVKVGIIEKDLIGGTCPNYGCNAKITLDAPVTLLRESERFSGVVAGNLKINWKESVAHKQEVIDELPGMIGGLIKSSGIDIIQGSGVFQDNHTILVDGQPKTADKIVISTGLRPHRLDIPGSELAHDSREFMDLTELPDKIVIIGSGYISMEFVTIANAAGSDVTVLMHGDKALKEFYQPYVNKVIDDLKERGVKFVKNAKVSSFEKSGDQVIVNYGDDQSLSVGWVLDATGRIPNTDNLGLSEIGVNYNEKGVIVNEYLQTNVDNIYASGDVIDKTQPKLTPTAIFESTYLFKRFSGQSREPITYPVIPSVVFTSPRIAKVGVAVEEAKENNYQIEENNLVGDWYRKVNKETISENTLIFDDEHRLLGATEVSEQAENVINTLLPAVEFKFNKEEIARLIHLFPSISASTWDLL

SEQ ID NO: 35664 - protein, 544 aa, Colwellia psychrerythraea 34H
MRLSSEVVVVKPFTNQWSEEDIILITYGDSIIKADQPPLQTLKHFLDTTIENTINSVHILPFFPYSSDDGFAVIDYSSVNESLGTWQDIEDISKDYHLMSDLVINHCSSRSAWFDNFVKGEGQGSDYFFTALPDDNLTDVVRPRTSPLLKEVETGNGKKFVWCTFSHDQVDFDFRNPEVLAAFTSIIRQYLDIGVKIFRLDAIAFLWKVTGTTCINLPETHEVVRLLRTLIESAEPQAIIITETNIPNTQNLTYFGNANEAHGIYNFSLPPLLLNTLLTGNCLYLKRWLMSMPPSQDGTLYFNFIASHDGIGLRPAEGLLSENELDTLVHTVENFGGKISWRTSDTGEQKAYEMNISLYDAMQGTVDGKDQWNFERFICAHAIMFALEGIPGIYIHSLLGTQNDYQKLANTHHNRSINRRRWQENALEEALANKSLHHARVLSTLKSLLNTRIKQPAFHPNATQFTLHLGLQLFGFWRQSQDRKQSIFCVSNVSDQPITLPLSELNLIITESWFELISKKEITELTQKILLTPYQTVWISNVIT

SEQ ID NO: 35665 - protein, 711 aa, Bacillus halodurans C-125
MDKDQQGTESSENKKNEQLEPFKVDHKNTKLTTNQGVRVSDTDDSLKAGDRGPTLMEDFHFREKMTHFDHERIPERVVHARGFGAHGYFQVYEPMTEYTKASFLQDPNVKTPVFVRFSTVVGSRGSADTVRDVRGFATKFYTEDGNYDLVANNIPIFFIQDAIKFPDVVHALKPEPHNEIPQASAAHDTFWDFVVSNTETAHMIMWLLSDRAIPRSFRMMEGFGVNTFRFVNEQGKARFVKFHWKPKLGVHSLVWDEAQKLAGKDPDFHRRDLWEAINMGEYPEYELGVQMIEEEDEFSFDFDILDPTKFWPEEMVPVKLIGKMTLNRNQDNFFAETEQVAFHAGNVVPGIDFSNDPLLQGRLFSYLDTQLLRLSGPNFHEIPINRPIAPVNNNQRDGFHRMTIDKGAVSYSPNTLRNNSPEPASDQEHGYVHYMEKVEGQKIRRRSESFNDHFSQATLFWNSLSTAEKQHLIKAFHFEVGSVKDKNLKQRVVEMFNQVDGKLAAEIAKGIGVNPPTTPGGTGVTASSPAVSQENTIKLARTRKVAVLIDHGFAFDEVSQVVTALQSAGLGVDLVSKQLGMISSAEGEQLEANKSFATTGAIMYDALYIGGGAQSISSLNLYSESKTFVDEAFKHAKTIGATNEGIELLIAAQVQGITFAGPDSNDHVVNDLGIITIQTDKDFKAFTDEMIHAIAQHRHWMREFKDGKLSG

SEQ ID NO: 35666 - protein, 548 aa, Buchnera sp. 150
MAAKDVKFGNEARIKMLRGVNVLADAVKVTLGPKGRNVVLDKSFGAPSITKDGVSVAREIELEDKFENMGAQMVKEVASKANDAAGDGTTTATLLAQSIVNEGLKAVAAGMNPMDLKRGIDKAVISAVEELKNLSVPCSDSKAITQVGTISANADEKVGALIAEAMEKVGNDGVITVEEGTGLQNELEVVKGMQFDRGYLSPYFINKPETGVVELENPYILMADKKISNVREMLPILESVAKSGKPLLIISEDLEGEALATLVVNSMRGIVKVAAVKAPGFGDRRKAMLQDISVLTGGSVISEELAMDLEKSTLEDLGQAKRVVINKDTTTIIGGVGEKQAIQSRISQIRQEIQEATSDYDKEKLNERLAKLSGGVAVLKVGAATEVEMKEKKARVEDALHATRAAVEEGVVAGGGVALVRVAGKISNLRGHNEDQNVGIRVALRAMEAPLRQIVSNSGEEPSVVTNNVKDGKGNYGYNAATDEYGDMIDFGILDPTKVTRSALQYAASVAGLMITTECMVTDLPKEDKTSDASSSPAGGMGGMGGMM

SEQ ID NO: 35667 - protein, 435 aa, Staphylococcus aureus subsp. aureus MSSA476
MQNDEMFERTVKPVLDVNEKPQPAQWAFLSLQHLFAMFGATVLVPFLTGLPISAALLASGIGTLLYILITKAQIPAYLGSSFAFITPIITGLSTHSLGDMLVALFMSGVMYVIIGILIKLSGTAWLMKLLPPVVVGPVIMVIGLSLAPTAVNMAMYENPGDMKGYNISFLIVAMITLLVTIVVQGFFKGFLSLIPVLVGIIVGYVVAIFMGIVKFDAIMSAKWIDFPHIYLPFKDYVPSFHLGLVLVMIPIVFVTVSEHIGHQMVLNKIVGRNFFEKPGLDKSIIGDGVSTMFASIIGGPPSTTYGENIGVLAITRIYSIYVIGGAAVIAIVLAFIGKFTALISSIPTPVMGGVSILLFGIIAASGLRMLVESKVDFANNRNLVIASVILVVGIGNLVFNLKEIGINLQIEGMALAALSGIILNLILPKEKKQNN

SEQ ID NO: 35668 - protein, 537 aa, Buchnera sp. 168
ARVKMLRGVNVLADAVKVTLGPKGRNVVLDKSFGAPSITKDGVSVAREIELEDKFENMGAQMVKEVASKANDAAGDGTTTATLLAQSIVNEGLKAVAAGMNPMDLKRGIDKAVISAVEELKNLSVPCSDSKAITQVGTISANADEKVGALIAEAMEKVGNDGVITVEEGTVLKNELEVVKGMQFDRGYLSPYFINKPETGVVELENPYILMADKKISNVREMLPILESVAKSGKPLLIISEDLEGEALATLVVNSMRGIVKVAAVKAPGFGDRRKAMLQDISVLTGGSVISEELAMDLEKSTLEDLGQAKRVVINKDTTTIIGGVGEKQAIQSRISQIRQEIQEATSDYDKEKLNERLAKLSGGVAVLKVGAATEVEMKEKKARVEDALHATRAAVEEGVVAGGGVALVRVAGKISNLRGHNEDQNVGIRVALRAMEAPLRQIVSNSGEEPSVVTNNVKDGKGNYGYNAATDEYGDMIDFGILDPTKVTRSALQYAASVAGLMITTECMVTDLPKEDKTSDASSSPAGGMGGMGGMM

SEQ ID NO: 35669 - protein, 228 aa, Carboxydothermus hydrogenoformans Z-2901
MKLSVIIPCYNERATIREIIKRVQEVPVKKEIIVVDDGSTDGTREILQEIKNEFDNIQVILQPQNYGKGYAFRTGLNVASGEVVIIQDADLEYDPNDYLKILELFKNPEVKVVYGSRILNPANEKSYLSFYLGGRLVTFITNILFGSNLTDEPTCYKAFRLDFIKSVPMVGTGFELEPEITAKILKRGVKIYEVPISYFPRKAEEGKKIKWKDGLLAIWTLLKYRIKD

SEQ ID NO: 35670 - protein, 262 aa, Gentiana triflora
MGRGRVQLRRIENKISRQVTFSKRRNGLLKKAHEISVLCDAEVALIVFSSKGKLFEYSTDSSMESILERYERYSYDEKRINGTESQAKDNWSMEYPKLVSRIELLQKNIRHYEGEDLNPLNMRELQSLEQQLDTALKKIRTRKSQLMHDSVSELQKKEKALQEQNNLLAKKLKENEKNITQQRMQSADQHRLVDVSNHPPPPSPPPLFPQSLSIQPPLQQPGIHFQTSETIGSDGGDGNQNGTEAAAGTNTHMPPWMVRHLN

SEQ ID NO: 35671 - protein, 222 aa, Solanum macrocarpon
MVRQKIQIKKIDNLTARQVTFSKRRRGLFKKAQELSTLCDADIGLIVFSATGKLFEYSSSSMMQLIEKHKTQSERDNMNGSEQLKSSNLQSEKKTYAMLSRELVEKNRELRQLHGEELQGLGLDELMKLEKLVEGGISRVLKIKSDKFTREISSLKKKEAQLQEENSQLKHQSQARLNEEGQNAIEQGHSADSITNNRSLVSSHQDYDDSDTSLKLGLGFPY

SEQ ID NO: 35672 - protein, 537 aa, Buchnera sp.
ARVKMLRGVNVLADAVKVTLGPKGRNVVLDKSFGAPSITKDGVSVAREIELEDKFENMGAQMVKEVASKANDAAGDGTTTATLLAQSIVNEGLKAVAAGMNPMDLKRGIDKAVISAVEELKNLSVPCSDSKAITQVGTISANADEKVGALIAEAMEKVGNDGVITVEEGTVFKNELEVVKGMQFDRGYLSPYFINKPETGVVELENPYILMADKKISNVREMLPILESVAKSGKPLLIISEDLEGEALATLVVNSMRGIVKVAAVKAPGFGDRRKAMLQDISVLTGGSVISEELAMDLEKSTLEDLGQAKRVVINKDTTTIIGGVGEKQAIQSRISQIRQEIQEATSDYDKEKLNERLAKLSGGVAVLKVGAATEVEMKEKKARVEDALHATRAAVEEGVVAGGGVALVRVAGKISNLRGHNEDQNVGIRVALRAMEAPLRQIVSNSGEEPSVVTNNVKDGKGNYGYNAATDEYGDMIDFGILDPTKVTRSALQYAASVAGLMITTECMVTDLPKEDKTSDASSSPAGGMGGMGGMM

SEQ ID NO: 35673 - protein, 463 aa, Haemophilus influenzae 86-028NP
MKKTRFVLNSIALGLSVLSTSFVAQATLPSFVSEQNSLAPMLEKVQPAVVTLSVEGKAKVDSRSPFLDDIPEEFKFFFGDRFAEQFGGRGESKRNFRGLGSGVIINASKGYVLTNNHVIDGADKITVQLQDGREFKAKLVGKDEQSDIALVQLEKPSNLTEIKFADSDKLRVGDFTVAIGNPFGLGQTVTSGIVSALGRSTGSDSGTYENYIQTDAAVNRGNSGGALVNLNGELIGINTAIISPSGGNAGIAFAIPSNQASNLVQQILEFGQVRRGLLGIKGGELNADLAKAFNVSAQQGAFVSEVLPKSAAEKAGLKAGDIITAMNGQKISSFAEIRAKIATTGAGKEISLTYLRDGKSHDVKMKLQADDGSQLSSKTELPALDGATLKDYDAKGVKGIKITKIQPNSLAAQRGLKSGDIIIGINRQMIENIRELNKVLETEPSAVALNILRGDSNFYLLVQ

SEQ ID NO: 35674 - protein, 429 aa, Bifidobacterium longum DJO10A
MSNIFQWQLHGDGKTLAPGEVVEPDERLTWVRTAGIGAQHVIAMFGATFLVPILTGFDPSTTLFFTAMSTALFLLINRNVLPSYLGSSFGFIAPITAVTTANKGIAVASFGIMVTGILLALVGVLVHYAGSKWIDIIMPPVVNGAIVAIIGFNLAPSVWTNFQAAPDTALVTLLAVLLVAVLFKGLLGRLNILVGVIIGYVYACIRGQVDFSAIGDAAWIGFPKFHLPQADFSILPMFIPVVLVLVAENVGHVKSVAQMTGRDYDNQIGTALMADGLGTTLAGFGGGSGTTTYGENIGVMAATKVYSTAAYWCAAAFALILSLCPKFGAVINTIPAGVLGGVTTLLYGMIGMIGIRIWVENKVNFDKPLNIMVAAITMIIAIGQFAFTVGGISFNGIAIGTIVILVAYHGLKAIGKATGTIAKDDPDIL

SEQ ID NO: 35675 - protein, 252 aa, Gentiana triflora
MDSQNQEIESSNSRKSGRGKIEIKRIENKTNRQVTFCKRRSGLLKKAYELSVLCDAEVALIVFSSSGRLYEYANNSAKGTIERYKKACGDSTSAGSVSEANIQFYQQEANQLRKNIRDIQSSNRHILGEGLDELSFKQIKNLEGRVEKGIARVRSRKNELLAAEIELMKKREIELQNANLYLRAKQITENDQQRVQAEQQQMNFMPASDYQTNNNNIASEPNYQEVHNFIPVNFLDHNQHYSSQDPTALQFV

SEQ ID NO: 35676 - protein, 409 aa, Paracoccus denitrificans
MDYSAALDQAIGKLHEEGRYRTFIDIERRKGAYPTAVWTRPDGTETRITVWCGNDYLGMGQHPVVLAAMHEALDATGAGSGGTRNISGTTVYHKRLEAELADLHGKEAALVFSSVYIANDATLSTLRKLFPGLIIYSDELNHASMIEGIKRSTAPKRIFRHNDVGHLRELLAADDPEAPKLIAFESIYSMDGDFAPIKEICDLADEFNALTYLDEVHAVGMYGPRGGGVAERDGLSHRIDIFNGTLAKAFGVFGGYIGFGARMVDAIRSYAPGFIFTTSLPPAVAAGVAASIAFLKTAEGQFVRDQQQLNGRLLKMRLRGAGMPVMDHGSHIVPVHVGNPVHCKALSDMLLADFSIYVQPINFPTVPRGTERLRFTASPVHDPKQIDHLVKAMDSLWSQCKLNRSTSAA

SEQ ID NO: 35677 - protein, 536 aa, Buchnera sp. 389
ARVKMLRGVNVLADAVKVTLGPKGRNVVLDKSFGAPSITKDGVSVAREIELEDKFENMGAQMVKEVASKANDAAGDGTTTATLLAQSIVNEGLKAVAAGMNPMDLKRGIDKAVISAVEELKNLSVPCSDSKAITQVGTISANADEKVGALIAEAMEKVGYDGVITVEEGTGLQNELEVVKGMQFDRGYLSPYFINKPETGVVELENPYILMADKKISNVREMLPILESVAKSGKPLLIISEDLEGEALATLVVNSMRGIVKVAAVKAPGFGDRRKAMLQDISVLTGGSVISEELAMDLEKSTLEDLGQAKRVVINKDTTTIIGGVGEKQAIQSRISQIRQEIQEATSDYDKEKLNERLAKLSGGVAVLKVGAATEVEMKEKKARVEDALHATRAAVEEGVVAGGGVALVRVAGKISNLRGHNEDQNVGIRVALRAMEAPLRQIVSNSGEEPSVVTNNVKDGKGNYGYNAATDEYGDMIDFGILDPTKVTRSALQYAASVAGLMITTECMVTDLPKEDKTSDASSSPAGGMGGMGGM

SEQ ID NO: 35678 - protein, 43 aa, Populus euphratica
VAEAEEKTAGGLLLTETTKEKPSIGTVIAVGPGSLDEEGKITP

SEQ ID NO: 35679 - protein, 249 aa, Gentiana triflora
MDYPPRQEFDSSSSRKSGRGKIEIKRIENATNQQVTFCKRRSGILKKAYELSVLCDAEVALIVFSTRGRLYEYASSSVRGTIERYKKACADTTNSGSISEANTQFYQQQSNKLRKDIKEIQKANRNMLGEGVESIQPKDLKKIEGNLERAIGKIRTRKNELLFAEIELMQKREMELQNANLYLRAKIAENERATTDPHMNLMPASASEYHHHQSMASHSFDDVRSFIPVNLLEPNQHYSRQDPTALQLV

SEQ ID NO: 35680 - protein, 383 aa, Crocosphaera watsonii WH 8501
MQDKHMLMIPGPTPVPESVLLAMAKHPIGHRSGDFSQIIGEITENLKWLHQTQNDVLMLTTSGTGAMEAGIINFLSAGDRVLVGNNGKFGERWGKISRAFGLEVEEITAEWGKPLDPEAFKTKLEADTDKSIKAVIITHSETSTGVLNDLQTINSYVKAHGEALIMVDAVTSLGAVNVPMDEWGLDMVASGSQKGYMIPPGLGFVAVGPKAWKAYETATLPKFYLDLGAYKKATDKSSSPFTPPVNLMYGLQVALEMMKAEGLEAMFTRHQRLTQATRAAVKGLGLSPFAADEVASYAVTAVMPSTVEAEAIRSTMKKEFDIALAGGQDHLKGKIFRIGHLGFVSERDVLTAIAALEATLQKLGHQGATSGAGIAAASQVFKS

SEQ ID NO: 35681 - protein, 318 aa, Glycine max
MGGDEEEEEVLGSGQSASTNNSLPPPVDKTILKLNHLDVHADDAGSHASLAGKKKKRGGQRAVGPDKSGRGLRQFSMKVCEKVESRGRTTYNEVADELVAEFSEPSNSELPPDQQQYDEKNIRRRVYDALNVLMAMDIISKDKKEIQWRGLPRTTVNDIEELKSERLGLRNRIEKKAAYLQELEEQYIGLQKLIQRNEQLYSSGNAPNGGVSLPFILVQTRPHATVEVEISEDMQLVHFDFNSTPFELHDDNYVLKAMKFCERSQNDNMTHNLTDGGEGSSMSGLCQPQAPTILNVSNRPPTSPPLPGILKARVKQEH

SEQ ID NO: 35682 - protein, 535 aa, Thermoplasma acidophilum DSM 1728
MVASYKGPKKSKLYGLEDLTAKLPAVKKAKGHIEFKYKMMWTALIVVLYFALSNIYIYGLNTAQTIDVFASFREIFAGASGSLMDLGIGPIVTASIVMQLFVGAKIFNLDLQNAEDKAIYQGVQKLLVIIMIFVEAIPQAFGYLVPDTKVVNSINAVFPGYGEFLAQTIIILQLFFGSYLVFLMDEVVSKYGIGSGISLFIAADVSEQLFIGAFNWQALNNALTYSLTNPPAGAFPKMFYIIMHSSSSYLLTNGVVQILFSPPNPMIAVLGTLLIFFLVAYFQSSKIELPISHERVRGARGRYPLQLLYASNIPVILATALLANVSMWTLLFWSSPVLSKVPILGHNPLLGSYPTTAQATALNISATTPTGGLAYYLFSPNGLSDWLFPILQPSGYQNILLGHTPLQEAIHIIVFTAFMVGFSVLFAIFWIETTNMGASAVAKQIQASGMQIPGFRRDPRVMERVLKKYIPAITIFSGAVVGLLAAGANLIGTVGDTSGTGLLLAVGIIIQFYEAMGREQLMEMHPVIRQFFVGG

SEQ ID NO: 35683 - protein, 681 aa, Anabaena variabilis ATCC 29413
MLQYLTSSIRPVALFMTVKTLPPNSRPIEGELQLKDTQALVVRSSGTVSPERPQVLVTNNLEPETIVYDPVAVAEHYRHRPLQVLRRIFAVLGPTFSFVFGLWWDTKRGVVVKNDRRRAIQLKELLTQLGPAYIKIGQALSTRPDLVPPIYLEELTRLQDQLPAFPNEIAYQFIQEELGQSPEEVYAELSAQPIAAASLGQVYKGKLKTGEEVAVKVQRPDLRERITIDLYILRGLAAWVQKKVKRVRSDLVGILDELGDRIFEEMDYIHEGENAERFFQLYGHIQDIYVPRIYWEYTNRRVLTMEWINGTKLTQTAEISAQGIDARYLIEVGVQCSLRQLLEHGFFHADPHPGNLLATPDGKLAYLDFGMMSEIKPPQRYGLIEAIVHVVNRDFEGLAKDYVKLDFLSPETDLTPIIPAFGKVFANAQGASVAEFNIKSITDELSELMYEYPFRVPPYYALIIRSLVTLEGIAIYIDPNFKVLSEAYPYVAKRLLTDPAPELRISLRDLLFKDGRFRWNRLENLLRNARKNQDYDLNLVVNQGVDFLSSERGSFIRDKLVDEFLNGINALSKNVLHNFTYLLRERVGITAINETPAATVEQQQTLEHIKNILNILRETRGFDPSQLAPQVAQLAFNPGVQRLGQQVANQLVQKATVRLIRELLTAEEVKSSEIEYPGRRL

SEQ ID NO: 35684 - protein, 427 aa, Methanococcus maripaludis S2
MELNIKMDRSKELFEESKKYLVGGVNSPVRLFKPFPFFVKSAKDCFLYDEDGNEFIDYCLAYGPMVLGHANENILNAVKSQMDLGTAYGVPSEKEITLAKEVINRIPCAEMVRFVNSGTEATMGAIRLARGVTKRNKIIKFEGAFHGAHDYVLVKTGSGALTHGAPNSPGIPEDTTKNTLLIPFNDEEAVRKVISENKEEIACIILEPVMGNVGCIPPKDGYLQFLREITEENGILLIFDEVITGFRLSKGGAQEYYGIKSDLATVGKILGGGFPIGAITGKKEYMEQFSPNGQIYQAGTFNGNPISVTAGIETLKNLDDKFYKETTKKAGILSNCLRETAEKYNIPAKVYNVASIFQVYFNDKEIVTYEDAKSSDTEKFMKYFYTLLENGVFVAPSQFECCFTSIKHNDEVLEKTMNAIDIAMKKL

SEQ ID NO: 35685 - protein, 149 aa, Thermoplasma acidophilum DSM 1728
MRSDSVKRIVADIKGVGTSRVYIDTNKVDRVMEAATRQDVIALMKQDVIKIKQKKGISNGRLKKRIKQLSKDRRRGPGSLRGTKYARYPRKDRWIDTIRALRDELRTLKSEGKITKETYRKYYRFIKSGSIRSRSQLLSHLKSAGLVGE

SEQ ID NO: 35686 - protein, 466 aa, Glycine max
  misc_feature (411)..(411): Xaa can be any naturally occurring amino acid
  unsure (1)..(466): unsure at all Xaa locations
MTSRSGQGSSGGGSSRTRVGKYELGRTLGEGNFAKVKFARHVETRENVAIKILDKEKLLKHKMIAQIKREISTMKLIRHPNVIRMYEVMASKTKIYIVLEFVTGGELFDKIARSGRLKEDEARKYFQQLICAVDYCHSRGVFHRDLKPENLLLDANGVLKVSDFGLSALPQQVREDGLLHTTCGTPNYVAPEVINNKGYDGAKADLWSCGVILFVLMAGYLPFEETNLSALYKKIFKAEFTCPPWFSSSAKKLINKILDPNPATRITFAEVIENDWFKKGYKPPVFEQANVSLDDLDSIFSDSTDSQNLVVERREEGPMAPVAPVTMNAFELISKSQGLNLSSLFEKQMGLVKRETRFTSKCSADEIISKIEKAAGPLGFDVKKNNCKLKIQGEKTGRKGHLSVATECCFXILEVAPSLYMVELRKSEGDTLEFHKFYKNLATGLKDIVWKAEPIDEEKDGANPSK

SEQ ID NO: 35687 - protein, 968 aa, Arabidopsis thaliana
MAGRNIEKMASIDAQLRQLVPAKVSEDDKLVEYDALLLDRFLDILQDLHGEDLRETVQELYELSAEYEGKREPSKLEELGSVLTSLDPGDSIVISKAFSHMLNLANLAEEVQIAHRRRIKKLKKGDFVDESSATTESDIEETFKRLVSDLGKSPEEIFDALKNQTVDLVLTAHPTQSVRRSLLQKHGRIRDCLAQLYAKDITPDDKQELDESLQREIQAAFRTDEIRRTPPTPQDEMRAGMSYFRETIWKGVPKFLRRVDTALKNIGIDERVPYNAPLIQFSSWMGGDRDGNPRVTPEVTRDVCLLARMMAANLYYNQIENLMFELSMWRCTDEFRVRADELHRNSRKDAAKHYIEFWKTIPPTEPYRVILGDVRDKLYHTRERSRQLLSNGISDIPEEATFTNVEQFLEPLELCYRSLCSCGDSPIADGSLLDFLRQVSTFGLSLVRLDIRQESERHTDVLDAITKHLDIGSSYRDWSEEGRQEWLLAELSGKRPLFGPDLPKTEEISDVLDTFKVISELPSDCFGAYIISMATSPSDVLAVELLQRECHVKNPLRVVPLFEKLADLEAAPAAVARLFSIDWYKNRINGKQEVMIGYSDSGKDAGRLSAAWELYKAQEELVKVAKKYGVKLTMFHGRGGTVGRGGGPTHLAILSQPPDTVNGSLRVTVQGEVIEQSFGEAHLCFRTLQRFTAATLEHGMNPPISPKPEWRALLDEMAVVATEEYRSVVFQEPRFVEYFRLATPELEYGRMNIGSRPSKRKPSGGIESLRAIPWIFAWTQTRFHLPVWLGFGAAFRYAIKKDVRNLHMLQDMYKQWPFFRVTIDLIEMVFAKGDPGIAALYDKLLVSEDLWAFGEKLRANFDETKNLVLQTAGHKDLLEGDPYLKQRLRLRDSYITTLNVCQAYTLKRIRDANYNVTLRPHISKEIMQSSKSAQELVKLNPTSEYAPGLEDTLILTMKGIAAGLQNTG

SEQ ID NO: 35688 - protein, 345 aa, Arabidopsis thaliana
MKEEQTRSLFGISLSDKPTWQQFLICTSGFFFGYLVNGVCEEYVYNRLQFSFGWYFTFIQGFVYLFLIYLQGFTTKHIVNPMRTYVKLSAVLMGSHGLTKGSLAYLNYPAQIMFKSTKVLPVMIMGAFIPGLRRKYPVHEYISAFLLVLGLILFTLADAQMSPNFSMIGIMMITGALIMDAFLGNLQEAIFTINPETTQMEMLFCSTVVGLPFLFVPMVLTGEVFRAWTACAQHPYVYGVLVFEAMATFIGQVSVLSLIALFGAATTALITTARKGVTLLLSYLIFTKPLTEQHGSGLLLIAMGIVLKMVPMDSKAPAKIPARPAVRIAGGDGDREEDEERKSLV

SEQ ID NO: 35689 - protein, 396 aa, Helianthus annuus
  misc_feature (3)..(3): Xaa can be any naturally occurring amino acid
  misc_feature (6)..(7): Xaa can be any naturally occurring amino acid
  misc_feature (315)..(315): Xaa can be any naturally occurring amino acid
  misc_feature (368)..(368): Xaa can be any naturally occurring amino acid
  misc_feature (389)..(389): Xaa can be any naturally occurring amino acid
  unsure (1)..(396): unsure at all Xaa locations
MAXRIXXATFQSDLYRSFAFPQPKPLRSPKFAMASTIGSATTKVESTKKPFTPPREVHQQVLHSMPPQKIEIFKSMEGWAEDNILVHLKPVEKCWQAQDFLPDPASDGFMEQVEELRARAKEIPDDYFVVLVGDMITEEALPTYQTMLNTLDGVRDETGASPTSWAIWTRAWTAEENRHGDLLHQYLYLSGRVDMRQIQKTIQYLIGSGMDPRTENSPYLGFIYTSFQERATFISHGNTARHAKEHGDVKLAQMCGIIAADEKRHETAYTKIVEKLFEIDPDGTVLAFADMMRKKISMPAHLMYDGRDDNLFENXSAVAQRLGVYTAKDYADILEFLVGRWKVADLTGLSGEGRKAQDYVCGLAPRIXRLEERNSARAKERVNVPFSWXLNREVKL

SEQ ID NO: 35690 - protein, 684 aa, Botryotinia fuckeliana
MMEKGGDMAGPSANNSSDFVSIHTQHTCTFSRRDGANIEISSLTDVSFTGPKIIQVRKYLVRMLEDPTYESIVRWGEAGESFVVLENEKFTKQILPKHFKHSNFASFVRQLNKYDFHKVRQNNEDNTQSPYGQNAWEFKHPEFQANKKDSLDNIRRKAPAPRKVAQSNEETYPAHAQQQMDLLGNQLAATQQQLQGLSRSYQDLAQLNIMLLQQVVDAQKFIKNHEGVMHGLVGHLFSQDAQRRNGRAPGLSNGAGPNMLGRPTEDGHPSTPLLQARSLLGQLSAENFPSKELEQMSHDYHLRQDYSTPPNDPGGLVSMPPISESVTAPSAGYSMDKSELDNLVYPVGAIVGIDPIDQQHVNNIPYALPPQGLMPRDSMPPAELMPQPPRAPGPRKKGMVSIWGERKPRILLVEDDQVCARIGTKFLESFECGVDIARDGLEAVSKINLGAENHFDLILMDIIMPHLDGVSATVCIREIRANIPIIAMTSNIRTDDIEMYFRYGMNDVLPKPFTKEGMMKALEKHLAHFRKDAPSIGFSSPGPMSHPGGFVTPTQSQSHPPLGLNMGQLTATQSIVDDTASGKSPQTATSWQSPIQLPGGSPVVTSAPGSYMQPTNGMRDPSYSVTPTHPHSQSGFAPPLSGLGNQRPPHRRGISDISGASTPDGNSDQKRQRMYAPPGNYQQG

SEQ ID NO: 35691 - protein, 396 aa, Helianthus annuus
  misc_feature (3)..(3): Xaa can be any naturally occurring amino acid
  misc_feature (315)..(315): Xaa can be any naturally occurring amino acid
  misc_feature (337)..(337): Xaa can be any naturally occurring amino acid
  misc_feature (389)..(389): Xaa can be any naturally occurring amino acid
  unsure (1)..(396): unsure at all Xaa locations
MAXRINPATFQSDMYRSFAFPQPKPLRSPKFAMASTIGSATTKVESTKKPFTPPREVHQQVLHSMPPQKIEIFKSMEGWAEDNILVHLKPVEKCWQAQDFLPDPASDGFMEQVEELRARAKEIPDDYFVVLVGDMITEEALPTYQTMLNTLDGVRDETGASPTSWAIWTRAWTAEENRHGDLLHQYLYLSGRVDMRQIQKTIQYLIGSGMDPRTENSPYLGFIYTSFQERATFISHGNTARHAKEHGDVKLAQMCGIIAADEKRHETAYTKIVEKLFEIDPDGTVLAFADMMRKKISMPAHLMYDGRDDNLFENXSAVAQRLGVYTAKDYADILEFXVGRWKVADLTGLSGEGRKAQDYVCGLAPRIKRLEERNSARAKERVNVPFSWXLDREVKL

SEQ ID NO: 35692 - protein, 103 aa, Prochlorococcus marinus subsp. marinus str. CCMP1375
MAAVSLSVSTVKPLGDRVFIKVSESEEKTAGGILLPDTAKEKPQVGEVAQVGPGKRNDDGSRQAPEVGVGDKVLYSKYAGTDIKLGSDEYVLLSEKDILAVVN

SEQ ID NO: 35693 - protein, 265 aa, Erwinia carotovora subsp. atroseptica SCRI1043
MKVALGQFAVDRKWQQNATTIAEFMSAAQQNGADLLVLPEGVLARDITNPNMVLTAAQPLDGPFISHLLEASKGSNLTTMLCVHIPNGEGKVWNTLLALRNGEIIAQYRKLHLYDAFSVQESENVLAGEAIPPLLTIAGLNVGLMTCYDIRFPELARRLVLDGADVLVLPSAWIKGPLKEAHWELLVRARALENTTYLVAVGECGVKNIGNSMVVDPLGVVVVQAPETPALIYADIEPERLAYARQALPVLANRRFQKPTLEGEN

SEQ ID NO: 35694 - protein, 583 aa, Aeropyrum pernix K1
MAEDLFEKLVEIGKRRGFFWPSYEIYGGVAGFYDWGPLGHLLKRRIIEKWRRYFVLMHQDHVVEIETPVIGPEKVYIASGHVEHFTDPIVRCTSCGRTFRADHLVEEALGINAEGLSVSELDRIIRERGLRCPVCQGELGRVETFNLLFRTQIGPYEGSVGYLRPELAQGIFVAFKRVYEAMRSRIPLGIAQVGRVGRNEISPRQALVRLREFTIMEMEYFIDPEDQWGSCPFFHRMADSKLPILTYEAKRRGEEKPESFKLEEAVNEGVVISPCLGYWMAVGMRFVEDLGVPSDSIMFEEKGPEERAHYSSQTFDQLVKVSRWGWIEVAGHSYRGDYDLSRHMKYSGQDLTAFKPYPKPIVVKKRRVVVDKAAIGRALKSRAKTVLEELGRMGEGELERLAASNRAVVAGVELPPGSLRIVEVEEKVSGRRFVPHVVEPSFGTDRNVYVALEYAYREVEGRVVLAFPRDIAPVQAVVLPLVENDEKLVERARMVYETLVEAGFTVYYDDSGSIGRRYARADEIGVPAAVTIDYQTLEDGTVTLRDRDTWRQVRIGADEVVDKLRRFIYDGARLEDLGTPVKP

SEQ ID NO: 35695 - protein, 183 aa, Hevea brasiliensis
MASSMLSTAAVACINRASPAQASMVAPFTGLKSTSAFPTTRKTTTDITSIASNGGRVQCMQVWPPRGKKFYETLSYLPPLTREQLAKEVEYLLRKGWVPCLEFELEHGTVYREYHRSPGYYDGRYWTMWKLPMFGCTDAVQVLQELDEMIKAYPDCYGRIIGFDNVRQVQCISFLAYKPKGAE

SEQ ID NO: 35696 - protein, 279 aa, Bacillus cereus ATCC 14579
MKNLQSKAVLNNGVEMPWFGLGVFKVEEGPELVEAVKSAIKAGYRSIDTAAIYGNEKAVGEGIRAGIEATGIAREELFITSKVWNADQGYETTIAAYEESLKKLGLDYLDLYLVHWPSEGKYKDTWRALETLYKEKRVRAIGVSNFQIHHLQDVMKDAEIKPMINQVEYHPRLTQKELQAFCKEQGIQMEAWSPLMQGQLLDNETLQEIAEKHGKTTAQVILRWDLQNGVITIPKSTKEHRIIANADVFNFELTKEDMEKIDALNQNHRVGPDPDNFDF

SEQ ID NO: 35697 - protein, 586 aa, Mesorhizobium loti MAFF303099
MSSHFRAFAPTRHSHRRPLDSAAALRKIGCGEGIRCDHNLPISTPMPSPAGLPHEPRTMTRLADRLLAVLLMALAAACLVHLYLLPGGKDFGLTAMREPWATQLVAFSLLAFACLAGAVLFWAGLLPGRPAHLTGAPLFGRAAEVQETGRPGLRKIFLALPLIVLAALAVDRFGPWGGGEVTARPNEPKMAEPKPSEPKPDEPKLTEPKPAEPKGQDVASAPPAPVPAPAPQPAPPPIAANPPPVAVPAAPPVAMPPAPVAPPEVAVIPPPTVAPLPPPPPAAPTQPDGHRDAVVWLAVAPDGRSIMSASTDRVIKLWDIGGKQLIRNLGVHKDMARTALYMPDGVSALTGGDDGEIVLRKLADGAVLHVFQAGQNGGVNKLAISPDGKRAVSGHDTGNVIVWDLVNNSVLHVLTGHDWSISAVAVSPDGKQALSGSIDGTLKLWDIESGKQLRSWHGHEQGTYGAVFTADAHRLITGSGDLTIKVWDLDSGREVKRFEGHEGTVYALALSADGKRLLSGSLDGTARLWDMETGNQIALFDSQTGPIYAVAFAPDGTVLTGGYDRTIRDWPAAGGDGVVLFAGAPG

SEQ ID NO: 35698 - protein, 603 aa, Neurospora crassa
MAFNNYRVRQEAHRVSRDSNSIMNPWRNKRSSTWDVPESQRYSQPPMAHEGLDDALPIKHSVTAPSRTSNGYDSANGEPSYNPKNIEMQDMEPASQMTGLTGDTNVESAQASAGSAHQRDGSLGLVRKRTVGVNDSRTELNGAGQKVAEEEKKKKQRTFFKHLQPKEPFTVGNQIRRTLLNSWLNVLLVAAPIGIAINYVEAVPRVAVFVVNFIAIIPLAAMLGFATEEIALRTGEVMGGLLNASFGNAVELIVAVIALTHDEIVVVQTSLIGSILSNLLLVMGMCFFCGGLNRQEQYFNTTVAQTAASLLALAVASVIVPTVFDMAADTPPEKVAQISRGVSIILLFVYGGYLLFQLKTHSSVFAEESQKVAAKPFNFRGGHDLKDGAIAQGLVGPAGMVGGHAVPTQDNNENIRHHLDTAPHQEEEDEEEEGEEPQLHFIVAVATLVICTVIIAFCAEYMVDGISAITDGDKVSKEFVGLILLPIVGNAAEHATAVTVAIKDKMDLAIGVAVGSSMQVALFVIPLLVIIGWGMGIEDMSLSFDTFQVAVMFVSVLLVNYLIADGKSHWLEGMLLICLYLIVAVCAWSQNNLMKMETMPDFD

SEQ ID NO: 35699 - protein, 1274 aa, Anabaena variabilis ATCC 29413
MFNCTTSLTQSELKSAIIRDPLIIKPETTVMDAIAQMSAVRAICDTDKLDEVHLEARSSCVLIVEAGRLLGIFTERDVVRLCSQRRCLENLAIREVMIHPVVSLHESEFTDLFFAVNLLQQYRIRHIPILDEEERVVGLLTNESLRQTSRSVDLLRLRLVSEVMTCEVICAAPDSSMLAIAQLLTENRVSSVMIVQLCECPANPQKIPVGIVTERDIVQFQALGLNLETCQVQTVMSTPIFAVRPDYSLRFVQQIMEQRLIRRLAVTGEQGELLGIVTQSSLLQALNPLEVYKLAQMLEERVVRLETEKVQLLENRTVELEQQVADRTASLKAKAGREQILSDISRQIRSSLSLQTILDTTVEQVRQLLGCDRVNIWHFEAEWESIVMAESTTSSRSLLGKRIQEICFQQRCAELYRYGRIRIVPDIYTTEMTDCHRELLIRLQTRAKILVPLLCGDELWGLLNVTESQHAREWQTEEIELLQGLSVHLAIAIQQATTHQKLQEQLIALQEGSDRLQESEQRYIALNQNLEAKVEERTAELQAREAQLQKISERLALSLKSAAIGCWDWDIGENTIFWDERMYELYGVTKTTDSRLVYDTWANGLHPDDRTNTEILVQQAVLGQAEYDTEFRVIHPDGSIHFIKAYGVVVRDAEGNPQKMIGVHFDISDRKKAEEIIRQQAEREKLLREITQRIRQSLDLQTIFDIACQDIRQVIQADRVGIFKFYPESNFNDGEFVAESVVDEFPSVIAIRVHDQCFGENYSSLYALGRSYVVDDIYNSDMTTCHTDILAQFHVRANVIMPLLCGAELWGLLCIHQCATTRHWEQSEIDFTQQLATQLAIAIQQASLVEQLQQELAERQQAELKLTQSNQQLAISNQELARATRLKDEFLANMSHELRTPLNAILGMTEGLQEGVFGMINDKQFKALETIERSSSHLLDLINDILDVAKIEAGQIKLDCTAISVAALCQSSLVFIKQQALQKRIQVEIKIPLNLPDLFVDERRIRQVLINLLNNAVKFTPETGRISLEVTQVSPDISTVQNFLQIAVIDTGIGIMQENINKLFQPFIQIDSALNRQYEGTGLGLALVKKIVELHGGRVGLTSELGVGSCFTIELPCTPSTPSSPELIRDLLTTPNSELDFANAEEAASLAPVILLAEDNEANIKTFSSYLSAKGYGILLATNGEQALELATIHQPDLILMDIQMPGIDGLEAIRQIRLDPELVNIPIVALTALAMTGDRDRCLQAGANDYLTKPVKLKQLATTIQQLLMETKK

SEQ ID NO: 35700 - protein, 185 aa, Triticum aestivum
  misc_feature (61)..(61): Xaa can be any naturally occurring amino acid
  unsure (1)..(185): unsure at all Xaa locations
SDIGPALAPPRDGLSRHPPSVLFRGFKSTRGLPPQAAAPSGVKPRAASGTGGRISAMQVWXPIEGIKKFETLSYLPPLSTEALLKQVDYLIRSKWVPCLEFSKVGFIFREHNASPGYYDGRYWTMWKLPMFGCTDATQVINEVEEVKKEYPDAYVRIIGFDNMRQVQCVSFIAFKPPGCEESGKA

SEQ ID NO: 35701 - protein, 222 aa, Candida albicans SC5314
MADNSDDYSYDYEYLYKIVLIGDSGVGKSNLLSRFTRDEFNLESRSTIGVEFATRTLEIDGKRVKAQIWDTAGQERYRAITSAYYRGAVGALIVYDIAKTESYESVSRWLKELKEHADANIIIELVGNKSDLDHLRAVPTEEAKNFAMENNLLFTEASALSSDNVDLSFHQLLKNIYEMISKHQLENNDSKQTNTAGGPTISLTPAPQEKKNKNNGWLLLRH

SEQ ID NO: 35702 - protein, 443 aa, Zea mays
MEDAMAADGKSVLQGRYELGRVLGHGNFGRVHAARDLRTGRSVAVKVVAKDKLERAGMAEQIKREIAVMKMVSHPNIVELHEVMATRSKIYLALELVRGGELFSRIARAGRVREDVARCYFRQLVAAVDFCHGRGVFHRDLKLENLLLDEVGNLKVADFGLSALAGHARSDGLLHTACGTPSYVAPEVLGGKGYDGAKADLWSCGVILYVLLVGSLPFHEDNLMVMYRKMQRGEFLCPPWVSADARKLIGELLDPDPSTRITVARLVETPWYRKPLPVLPPLNLKEPTPDARRATSDKEEPEVLNAFHLISFSEGFDLSPLFDQGRGGGVGRSSAGGIRFVTREAASSVVSRLESLVTGRGANMRVTKSGSRGVRLEAVSRGRSGARLAVAAEIFSVAPSVLLVDVKKDGGDTMEYRSFCSEELRPALKDIVWASSQDTPGAA

SEQ ID NO: 35703 - protein, 222 aa, Physalis peruviana
MVRQKIQIKKIDNLTARQVTFSKRRRGLFKKAQELSTLCDADIGLIVFSATGKLFEYSSSSMMQLIEKHKMQSERDNMDSVEQLQSSNLQSEKKTHAMLSREFVDKNRELRQLHGEELQGLGLEELMKLEKLVEGGISRVLKIKGDKYMREISSLKKKEAQLQEENSQLIHQSQARLNEGGQNVIEQGHSADSIANNLSLVNSHQDYDDSDTSLKLGLAYPY

SEQ ID NO: 35704 - protein, 451 aa, Alkalilimnicola ehrlichei MLHE-1
MEPHYDLLVIGGGSGGMATARRAASYGAKVALVERSRLGGTCVNVGCVPKKVMWSAAHTADALHRAADYGFRVGPATLDWAELKRRRDAYIRRLNGIYERNIDKSGITLLTGEARLADARTVEVNGERYTASHILLATGGRPSRPDIPGQELGIDSDGFFELAQQPRRVAVVGAGYIAVELAGVLHHLGTQTDLVVRREAALRSFDPLVRDSLLEAMDQDGITLQTHSVPKALERADDGTLTLALEDGRHIGGYDQVIWAIGRDLCTDGLGLEAAGVARNADGSIPVNAYQETNVQGVYAVGDIIGHHPLTPVAIAAGRRLADRLFGGQADRHLDYRYVPTVVFTHPPIGTVGLTEPEARAEYGDDEVEVFTTRFVAMDYALGEDKRRSAMKLVTVGDNRRVVGAHLFGVGSDEMLQGFAVAIRMGATKQDLDDTVAIHPTAAEELVTLPG

SEQ ID NO: 35705 - protein, 222 aa, Physalis peruviana
MVRQKIQIKKIDNLTARQVTFSKRRRGLFKKAQELSTLCDADIGLIVFSATGKLFEYSSSSMMQLIEKHKMQSERANMDSLEQLQSSNLQSEKKTHAMLSREFVDKNRELRQLHGEELQGLGLEELMKLEKLVEGGISRVLKIKGDKYMREISSLKKKEAQLQEENSQLIQQSQARLNEEGQNVIEQGHSADSIANNLSLVNSHQDYNDSDTSLKLGLAYPY

SEQ ID NO: 35706 - protein, 584 aa, Zea mays
  misc_feature (7)..(7): Xaa can be any naturally occurring amino acid
  unsure (1)..(584): unsure at all Xaa locations
ERSRHLXTSGISEIPEEATFTNVEQFLEPLELCYRSLCACGDKPIADGSLLDFLRQVSTFGLALVKLDIRQESDRHTDVLDSITTHLGIGSYAEWSEEKRQDWLLSELRGKRPLFGSDLPQTEETADVLGTFHVLAELPADCFGAYIISMATAPSDVLAVELLQRECHVKQPLRVVPLFEKLADLEAAPAAVARLFSIDWYMNRINGKQEVMIGYSDSGKDAGRLSAAWQMYKAQEELIKVAKHYGVKLTMFHGRGGTVGRGGGPTHLAILSQPPDTIHGSLRVTVQGEVIEHSFGEEHLCFRTLQRYTAATLEHGMHPPISPKPEWRALMDEMAVVATKEYRSIVFQEPRFVEYFRSATPETEYGRMNIGSRPSKRKPSGGIESLRAIPWIFAWTQTRFHLPVWLGFGAAIKHIMQKDIRNIHILKEMYNEWPFFRVTLDLLEMVFAKGDPGIAAVYDKLLVADDLQSFGEQLRKNYEETKELLLQVAGHKDVLEGDPYLKQRLRLRESYITTLNVCQAYTLKRIRDPSFQVSPQPPLSKEFTDESQPAELVQLNEQSEYAPGLEDTLILTMKGIAAGMQNTG

SEQ ID NO: 35707 - protein, 286 aa, Triticum aestivum
  misc_feature (40)..(40): Xaa can be any naturally occurring amino acid
  misc_feature (52)..(52): Xaa can be any naturally occurring amino acid
  misc_feature (118)..(118): Xaa can be any naturally occurring amino acid
  misc_feature (139)..(139): Xaa can be any naturally occurring amino acid
  unsure (1)..(286): unsure at all Xaa locations
SVVSFSSRKTFRCTDRSRSCEDERGTPSYPGGEAPQQGGXVRNRGLLGNLLXRKSAGGQEKKGGAFSPLGKVSLEDPGLKGEALCCEKKETLFSQSARIQLQSRWSINEEEEEVIDDXGEVIKRKKKKGLKEKLQEKLXPGHKDTEGEHVTGLPAPAAPASVQTHHDTDVVVEKIDGDVKTEATPAVPEEEKKGFLEKIKEKLPGGHKKPEDAAAVPVTHAAPAPVTHAAPAPVHAPAPAAEEVSSPDAKEKKGLLGKIMDKLPGYHKTGEEDKAAAATGEHKPSA

SEQ ID NO: 35708 - protein, 239 aa, Solanum macrocarpon
MAREKIKIKKIDNITARQVTFSKRRRGLFKKAEELSVLCDADVALIIFSATGKLFDFASTSMKDILGKYKLQSASLEKVEQPSLDLQLENSLNMRLNKEIADKTRELRQMRGEELEGLSLEELQQIEKKLEAGFNRVLEIKSTRIMGEITNLQRKGAELMEENKQLKQKMEIMKKGKLPLVTEMVMEDGQSSESIITSNNVCSSNSGPPPDQDDSSKIGGNAVEDDCSITSLKLGLPFS

SEQ ID NO: 35709 - protein, 420 aa, Thermus thermophilus HB27
MGPLLVWHRGDLRLHDHPALLEALARGPVVGLVVLDPNNLKTTPRRRAWFLENVRALREAYRARGGALWVLEGLPWEKVPEAARRLKAKAVYALTSYTPYGRYRDAKVQEALPVPLHLLPAPHLLPPDLPRAYRVYTPFARRFLGVEAPLPAPEALPKGPEEGEIPREDPGLPLPEPGEEAALAGLRAFLEAKLPRYAEERDRLDGEGGSRLSPYFALGVLSPRLAAWEAERRGGEGARKWVAELLWRDFSYHLLYHFPWMAERPLDPRFQALPWQEDEALFRAWYEGRTGVPLVDAAMRELHATGFLSNRARMNAAQFAVKHLLLPWKRCEEAFRHLLLDGDRAVNLQGWQWAGGLGVDAAPYFRVFNPVLQGERHDPEGRWLKRWAPEYPSYAPKDPVVDLEEARRRYLRLARDLARG

SEQ ID NO: 35710 - protein, 359 aa, Crocosphaera watsonii WH 8501
MVMVKTPVKPDQLKPGKKAPDKETLLTPRFYITDFEAAANLSLTEQETELNAMLTEMRNDYNRHHFMRDEEFKTGNWDHLDETTREGFIEYLERSCISEFSGFLLFKELSRKLKGRNPILSEMFQLMARDEARHAGFLNKAMADFNLSLDLGRVTKTRTYTFFPLEWVIYTVYLSEKIGYWRYIIIFHHLEKHPEKQFYPIFKKFENWCQDENRHGDIFTALLRSQPKLWDTWKARLWSRFFLLSVFATHTLTVHERASFYESLGLNATEFDKEVIKKTNETSARTFPSVLDVDHPDFYPGLQRCSQRNLKMKEIGETKAPKFWKTLRKIPLIAGIVVELFRIYLIKPIDAEALRGMVK

SEQ ID NO: 35711 - protein, 109 aa, Thermoplasma acidophilum DSM 1728
MYTRNIGLDVKLPESECNDPHCPYHGKLSVRGQVLTGKVVSANMTKSAVVAREYQQYIPKYERKATKIKKYHVHVPDCIKIKPGDTVRFAECRKLAKTISFVIVEKVNQ

SEQ ID NO: 35712 - protein, 226 aa, Zea mays
MDHEKVAPIDEKAPHGVSQPTVSSQEEYTGDWREQEDFMTRNGLNLKSFQRRPKGGELVVLDKSMKTRHLHMIAIGGSIGAGFFVGSGAALAKGGPASLLLDFSIMGVMIFNVVYALGELAVMYPVSGGFYTYSTRFIDPSWGFAMGWNYVFQWAIVLPLEINVAAITLEYWPGARNVHVAVWMLIFWLFIVIINVFGTLGYAEEKFWSSLLKLSATVIFMIIALV

SEQ ID NO: 35713 - protein, 495 aa, Staphylococcus xylosus
MSNNKKLTSLFGAPVSDRENSMTAGPRGPLVMQDWYFLEQMAHFDREVIPERRMHAKGSGAFGTFTVTNDITQYTSASIFSEVGKQTEMFARFSTVAGERGAADAERDIRGFALKFYTDEGNWDLVGNNTPVFFFRDPKLFASLNHAVKRDPRTNMRSAQNNWDFWTSLPEALHQVTILMSDRGIPKGYRNMHGFGSHTYSMYNDKGERVWVKFHHRTQQGIENLQPDEAAKIIADDRESSQRDLFEAIENKDYPKWKTYIQVMTEEQARNHKDNPFDLTKVWYKGDYPLIEVGEWELNRNPDNYFQDVEQAAFAPTNIVPGIDFSPDKMLQGRLFSYGDAQRYRLGVNHWQIPVNQPKGVGVENICPFSRDGQMRILDNNQGGGTHYYPNSDGSFEDQPEFKKPGLKVEGEAYEYDFRQDDDNYFEQPGRLFRLQSKEQQERIFENTANEMQGTTLEVQHRHIRHCYKADSEYGKGVARALGVDINDVDLEIKD

SEQ ID NO: 35714 - protein, 417 aa, Haemophilus influenzae 86-028NP
MLEQMGKQAKDAAFILAQLTTAEKNCALSIIAEQLQQQAPLILAENAKDIELAKQNGLSDALIDRLLLTQERLQSIANDVRHVISLADPVGKIIDGGTLDSGLKIERVRTPLGVIGTIYEARPNVTIDVASLCLKTGNAVILRGGKETQFSNKILIEVVQNALEQAGLPKFAVQAITDPNRELVMQLLKLDRYVDMIIPRGGSGLHELCKQHSTIPVIVGGVGVCHTFVEKSADQNKAIFVIDNAKTQRPSTCNTLETLLVQHSIAEEFLPKLVSHLATKNVKYHAKSTALNILKQAGANVCEVTEKELRKEWGSLDLNVVVVEDIHAAIEHIRQYGTQHSESILTSSQNLARQFINQVDAAAVYVNASTRFTDGGQFGLGAEVAVSTQKLHARGPMGLEALTSYKWVCEGEYTVRK

SEQ ID NO: 35715 - protein, 2362 aa, Gibberella moniliformis
MDGASLVTDDLLDPPPRIYERLRQIAGYTWDESQLPFHSSYDFWHVFGTRWVSSVPSPSSSHNASSPGSALRLHSGRPSPLEPYAQISNIDGYDTQAITPPASSSSNIPSDAAYIEEPVVARLSYHALREERAFHIAKSLIATSDPTGEHIVKPIDLIRLQPLPGDRAQVVVSIYQHPGPNYLLEVLDMGPAFYRARIHGETFSSLRKNEPELHPPISLQYFLDFAIGATQCLELLHHNLGMIHGEIRGDAFHFNIETGQVKVMSFGSGIRSFEHGLTSTGWSTLSKELGAQNKLLYISPEQTGRMPAEPDSRTDIYSLGVLFWTLLTQRPVFEGDSPLDIVQGVLGRRIPNVSTVRLDIPDVVGRIIQRCTARNVQDRYHSASGLRHDLIKVQEFLGDGDWLALKEWRIGTKDVSSFFMLPAIMIGRQQEQAELAKVIDRVAKSHAMNLKGNTNRFSDGSTLSNDMAAFDDISSEGASSVDGTNYRSGSFTHTASSDPKLPKTNFNPLFSDTQTVSGDTISSSPSGTLPRIARPWERHQSISIETRSLVDSSGPDSQNRHSVVESTASSLSRQLGSAKFRRRDHCEVVTIEGAGGLGKSCLVQSVLADARRRGYCATAKFDTARRTAFGPLLKLLSALFKQVWGERNTETPFHQGLKQFVRPVWPMLHRLLGLPEFLLGPPEASIGRSISSSLQFASIRGNGKSGLKRRGSSPGSSPKPVARNPSVASQSSSDFLRTGTSTKTMRLMNIFLDVLRVFTAHKFICFCLDDLHFADDESMELISQIIASRMKMIIIMTYRTEEITWDKIQSMIHPPEGEEYPRSGGPLVTRITLSPLAEDDIVQYVSTTLCRPKEEVLPLALVLQSKTAGNPFYMREMLSACHRKKCIWYDYRDSQWHYDLDRLFEQFQGEKDYDILDTGFITHRLSELPAAARTLLAWAALIGNSFSFELICHLMGGEFDYHEDDKGSCCATFTHKTYSQGEAIAGLQAAIQAYIIVPSETDDRFRFAHDRYIHASADLQECNSRKMHFIIAQTLQKYYGGENQQLDNTASHICAAVDIIKRRILNRYQYRKLLTSCAQAAAESGAKPTAAKYYNTALTLLQDDPWTDGKEDVSYDETMQLHLRAAECYLYMGQYTAANEILNTIFENGKSPFDNAPAYVLQSRIYAQSGDSASALVSLKDCLVGLGVTVDDEPSFKKCDEKFERLSIQIQTMGRGELLNYKQAEDPSVAPVGAVLAETISAAWWSDGLRYYHLTLMMVEMHLERGAYPQSGMAFLYLAMIALSRFNMTQFAVELGNTSQELLYQSRDPFFLARGLMLYSICIGHVHMTMPMIMAQMEDAVEYASVAGDRISTIMSYGVSSVFKFFSGETCSDLEGFCQYGCEEIPNWYADSRGGSILIAVRQLCRALQGKTRTSNALEVMNDETHNAENYKKWLISCSRKSNRSVTFYQSFEIIPLFLYGHYERAVEIGSHAVDQLSMLWSAHNSRLILLFHGLARAGYLLQKLQLPCSPTEDFSSQAEEVIKELRHYVKMMDEWCTVSDINYLSWMKFLQAQVEELSLNHGNAIQHYEQALDHAAEHNSVFDEALGNYLMAGMFIRRSARRSARAALLEAVGLFRQMGALGVSKAIEEEHSLLLHGPTRNYRTCDTGVQTDFVADASSVQYRTGEAEDGGDLARIPSNTMNMADLNKGERIGAWRGSMNIQAEPGVGLPALDMIDLHAILVSSQVISSMLQVDELLKTMCDVILQTCGGSATLAAIVVQENDMDAWCVAASGDPEKGASAHIPGIPISGTSLIAENVVLYSTRFLESVFVPDLISDERFGNVNESWLQRNPVGKSIIAIPICHGNKPLLGVLYLEGEPGAFTDRNVTVLQLLVNQIGISYSNALAMKNVEKISAENRSMVAVQKRALAKALEAETKAKNAEAEAKRNVKLAEEAAKAKSIFLANVSHELRTPLNGVIGNSELLRDSDLNKDQLEMADSIRVSADLLLTVINDILDFSKMEADKMKLYIIAFNPEDMVREVVRAVSYSNREKTSKKNVKIVQNINLPPMLIYGDPIRLHQVLGNLIGNSLKFTEDGSITIGARLDKETKEHATLTFWVRDTGIGIPPQQLAKLFQPFSQADASTARKYGGSGLGLSICKSLIETMMKGKIRLESEENVGTTAWFTVTFEKAKPDVAAGDAQTKATPSVDRYYVVTSPVERAESPNPYLDLSKVPKDEIRICVAEDNPINQKIAIQYVQRLGYKGVVAYDNGLKAVEGLRQKAKEGKPYHVVLMDVQMPVLDGYEATKLIRKDSLDAVRTILVIAMTASAIQGDREKCLAAGMNDYLAKPVRSEILKKKLDAYLSVEVRESGVTDGIFTNMT

SEQ ID NO: 35716 - protein, 422 aa, Boletellus projectellus
IGHVDSGKSTTTGHLIYKCGGIDKRTIEKFEKEAAELGKGSFKYAWVLDKLKAERERGITIDIALWKFETPKYMVTVIDAPGHRDFIKNMITGTSQADCAILIIAGGTGEFEAGISKDGQTREHALLAFTLGVRQLIVAVNKMDTTKWSEDRFNEIIKETSTFIKKVGYNPKAVAFVPISGWHGDNMLEESPNMPWYKGWTKETKGGVTKGKTLLDAIDAIEPPVRPSDKPLRLPLQDVYKIGGIGTVPVGRVETGIIKAGMVVTFAPTNVTTEVKSVEMHHEQLVEGVPGDNVGFNVKNVSVKDIRRGNVASDSKNDPAKEAASFNAQVIVLNHPGQIGAGYAPVLDCHTAHIACKFAELIEKIDRRSGKSLEAAPKFVKSGDACIVKLVPSKPMCVESYNEYPPLGRFAVRDMRQTVAVG

SEQ ID NO: 35717 - protein, 888 aa, Glycine max; identical to SEQ ID NO: 897

SEQ ID NO: 35718 - protein, 334 aa, Phytophthora infestans
MAASPNKKLREASQLDQLKQFTTVVADTGDFEQINKYKPQDATTNPSLLFKAAQMEQYSALVDDAVSYGKGLSADLSEKERLGYVIDKLSVNFGLEILKVVPGYVSTEVDARLSFDTESTIARAHRIIDLYEKAGIKKDRILIKIASTWEGIQACKHLQKEGISCNMTLLFGFAQAVGCAEAGATLISPFVGRILDWHKAKTGKSSYESHEDPGVVSVTKIYQYYKKYDYKTIVMGASFRNTGEITELAGCDRLTISPALLEELTKSTATLAKKLDAETAGKAYTGEKLSYDEKDFRLSMNEDAMATEKLAEGIRGFSADIVKLEQILKTKLGA

SEQ ID NO: 35719 - protein, 233 aa, Zea mays
  misc_feature (111)..(111): Xaa can be any naturally occurring amino acid
  unsure (1)..(233): unsure at all Xaa locations
PGEWFTARVSSCGLFHIAYPSASDQLKTELRTIYGQLCQDDMPMVRRAAASNLGKFAATVEQNHLKTEIMSIFDDLTQDDQDSVRLLAVEGCAALGKLLEPQDCVAHILPXVIVNFSQDKSWRVRYMVANQLYELCEAVGPEPTRANLVPAYVRLLRDNEAEVRIAAAGKVTKFCRILNPQLSVQHILPCVKELSSDSSQHVRSALASVIMGMAPVLGKVISVMQTCVSRIWC

SEQ ID NO: 35720 - protein, 739 aa, Glycine max
MESCNCIDPQVPADDLLMKYQYISDFFIALAYFSIPLELIYFVKKSAVFPYRWVLVQFGAFIVLCGATHLINLWTFRIHSRTVAVVMTTAKVLTAVVSCATALMLVHIIPDLLSVKTRELFLKNKAAELDREMGLIRTQEETGRHVRMLTHEIRSTLDRHTILKTTLVELGRTLALEECALWMPTRTGLELQLSYTLRQQNPVGYTVPIHLPVINQVFSSNRAVKISPNCPVARLRPYAGKYMPGAVVAVRVPLLHLSNFQIYDWPEVSTRSYALMVLMLPSDSARQWHVHELELVEVVADQVAVALSHAAILEESMRARDQLIEQNVALDLARREAETAIRARNDFLAVMNHEMRTPMHAVIALSSLLQETDLTAEQRLMVETILKSSNLLATLINDVLDLSRLEDGSLQLEAATFNLHSLFREVLNLIKPVASVKKLSLTSHVASDLPMYAIGDEKRLMQTILNVVGNAVKFSKEGCISITAFVAKPESFRDARIPDFLPVPSDNHFYLRVQVKDSGSGINPQDIPKLFTKFAQNQSLTRNPAGSGLGLAICRRFVNLMEGHIWVESEGIGKGCTVTFIVKLGIPDRSNEFKLPFVPKVPGNHGSTNFAGLKVLVMDDNGVSRTVTKGLLMHLGCDVTTASSSEECLRVVSLEHEVVFMDVCTGLDGYELAVRIHEKFTKHQDRPLIVALTGNTKKVTKENCMRVGMDGLILKPVSVDKMRGVLSELLERRVLFESV

SEQ ID NO: 35721 - protein, 681 aa, Arabidopsis thaliana
MSGSVSGCGSGGCSIVWFRRDLRVEDNPALAAAVRAGPVIALFVWAPEEEGHYHPGRVSRWWLKNSLAQLDSSLRSLGTCLITKRSTDSVASLLDVVKSTGASQIFFNHLYDPLSLVRDHRAKDVLTAQGIAVRSFNADLLYEPWEVTDELGRPFSMFAAFWERCLSMPYDPESPLLPPKKIISGDVSKCVADPLVFEDDSEKGSNALLARAWSPGWSNGDKALTTFINGPLLEYSKNRRKADSATTSFLSPHLHFGEVSVRKVFHLVRIKQVAWANEGNEAGEESVNLFLKSIGLREYSRYISFNHPYSHERPLLGHLKFFPWAVDENYFKAWRQGRTGYPLVDAGMRELWATGWLHDRIRVVVSSFFVKVLQLPWRWGMKYFWDTLLDADLESDALGWQYITGTLPDSREFDRIDNPQFEGYKFDPNGEYVRRWLPELSRLPTDWIHHPWNAPESVLQAAGIELGSNYPLPIVGLDEAKARLHEALSQMWQLEAASRAAIENGSEEGLGDSAEVEEAPIEFPRDITMEETEPTRLNPNRRYEDQMVPSITSSLIRPEEDEESSLNLRNSVGDSRAEVPRNMVNTNQAQQRRAEPASNQVTAMIPEFNIRIVAESTEDSTAESSSSGRRERSGGIVPEWSPGYSEQFPSEENRIGGGSTTSSYLQNHHEILNWRRLSQTG

SEQ ID NO: 35722 - protein, 274 aa, Oryza sativa
MTKKVIPAMAAARQDSCKTKLDERGGSHQAPSSARWISSEQEHSIIVAALRYVVSGCTTPPPEIVTVACGEACALCGIDGCLGCDFFGAEAAGNEEAVMATDYAAAAAAAAVAGGSGGKRVRRRRKKNVYRGVRHRPWGKWAAEIRDPRRAVRKWLGTFDTAEEAARAYDRAALEFRGARAKLNFPCSEPLPMPSQRNGNGGDAVTAATTTAEQMTPTLSPCSADAEETTTPVDWQMGADEAGSNQLWDGLQDLMKLDEADTWFPPFSGAASSF

SEQ ID NO: 35723 - protein, 117 aa, Methanocaldococcus jannaschii DSM 2661
MAARNIGIQVKAPEVECDDKNCPFHGNLPVRGQSFVGVVVSDKPHKTVIIKREVVKYIKKYERYERRTTKLAAHNPPCIHARVGDIVRVMECRPISKTKAFVVVEKLGRIDEVKGEE

SEQ ID NO: 35724 - protein, 249 aa, Physalis peruviana
MAREKIKIKKIDNITARQVTFSKRRRGLFKKAEELSILCDADVALIIFSSTGKLFDFSSSSMKDILGKYKLQSANLDKVDQPFLDLQLENSLNVRLRKQVADKTRELRQMKGEELEGLSLEELQQIEKRLEAGFNRVLEIKGTRIMDEIANLQRKGAELMEENKKLKQKMEMMKLGKLPLLTDMDCMVMEEGQSSDSIITTNNVCSSNTGPPPEDDSSNASLKLGCNNGLAPVDDDCSITSLKLGLPLS

SEQ ID NO: 35725 - protein, 467 aa, Aeropyrum pernix K1
MAGLERFDLVVVGGGPGGYPAAVRAAQEGLNVALVEMDSLGGECTNYGCIPTKALLHPAGLVASLARLKFVKGSVDVDFKGLMEWVDSVVKGVSNGVSTLLKGYGVEVVKGRAKIRPGVVEVDGSGSIGYSKLVLALGTSPASIPGLEPDGEVVHNNRTILGLRRKPGRMLIVGGGYIGVEYATAMARLGVEVTIVELLDRLLPNMQRDFSRVVERRLRAEGVKIHTKSKVEAVERRERYAVVEVSGVGKMEYDAILVAVGRRPNTGDVGLEKLGVKLDKAGYIQVDGATLETGVPGVYASGDVTGPPLLAHRAFLQAVVAAERAAGDSSAAFDAKAVPAVVYTDPELATVGLTLEEARAAGVDAAETRLPLASLPRVGAIEGCRECFAKVVYDRSSRAILGFHVAAPHASEIIAEAALAIEMGATLEDLALTIHPHPSVSEALKEVAELALERPIHYILRRGGARR

SEQ ID NO: 35726 - protein, 531 aa, Shewanella sp. MR-7
MSADQQTVTPLENFSPKVAQRAVHRVQPELNFWQIFNMCFGFLGIQFGFALQNANVSRIFQTLGASIDDIPILWIAAPLTGLLVQPIIGYLSDNTWGRLGRRRPYFLIGAICTTLAIFVMPHSPTLWIAAGMLWIMDASINIAMEPFRAFVGDNLPPKQRTQGYAMQSFFIGIGAVVASALPYILSNFFAVANTAPAGEIADSVRYAFYFGGAVLFLSVAWTVVSTKEYSPDELAAFHGNADAGIDEQQNRTRTHKNYQFAAIVWMAVGALLTLAVWTQDLDKQLYILTLGIFAFGPLQLYCALRLGKSTPSQRAQLGIVFNVVDDLFHMPKAMHQLAIVQFFSWFALFAMWIYTTSAVTSYHFGSSDVLSKAYNDGADWVGVLFASYNGFSAIAALFIPLLAKRIGIKLTHTFNMLCGGFGLISFYFIKDPSLLWLPMIGVGIAWASILSVPYAMLSGALPPKKMGVYMGIFNFFIVIPQLLAASVLGLILNGLFDGQPIYALITGGVLMLCAGIAVLFVEQPNTQHTQA

SEQ ID NO: 35727 - protein, 247 aa, Physalis peruviana
MAREKIKIKKIDNITARQVTFSKRRRGLFKKAEELSILCDADVALIIFSSTGKLFDFSSSSMKDILGKYKLQSANLDKVDQPFLDLQLENSLNVRLRKQVADKTRELRQMKGEELEGLSLEELQQIEKRLEAGFNRVLEIKGTRIMDEIANLQRKGAELMEENKKLKQKMEMMKLGKLPLITEMECMVMEEGQSSDSIITTNNVCSSNTGPPPEDDSSNASLKLSCNNGLAPVDDDCSITSLKLGLS

SEQ ID NO: 35728 - protein, 199 aa, Triticum aestivum
TRPIRPPVVKNMEKALWFQFTVGSLPLYAVTFMGYWAYGSSTSSYLLNSVHGPAWIKVVANLSAFLQTVIALHIFASPMYEYLDTRFGSGHGGPFAIHNVVFRVGVRGGYLAVNTLVAAMLPFLGDFMSLTGALSTFPLTFVLANHMYLMVKGPKLSAFQKGWHWLNVVGFSLLSVTAAAAALRLIILDSSTYHLFADM

SEQ ID NO: 35729 - protein, 675 aa, Prochlorococcus marinus subsp. marinus str. CCMP1375
MGNKFSMSKIWRKSVDFDKRVKHFRKRSNLDLAESTWIPAKEEKQALEAHISVKGINRVDQIWPWLKENHGNVLAVNSPHYIFPERYNYEELADKIAVAAAAFESLGVVSGDVVALFSENSPRWLIADQGLMRLGASNAVRGSSAPVEELRYILADSRSVGLVVQSSELWKALALSEDDKKQFKFVLQIEGQPENNLLGWEEFLLKGANKSPINAFKEATGITANSSIATILYTSGTTGKPKGVPLTHDNLLHQMRSLACIASPPPGTPLLSVLPIWHSYERSAEYYFFSCACSQHYTTIKHFKQDLQTVRPVVMATVPRLWEAVKTGFDEALKKMPRSRQMVLKAALNNSRLFKAALRKSRNLLLLEINKTNRAIAFSEVVFRWPIHALASKLLWPKVLQQLSGGRLRFPINGGGAIAPHVDTFFEALGVELLVGYGLTETSPVLSCRRTWRNIRGSSGLPLPETEFRIVDPLNGGPLKFSQQGRVLVRGPQVMNGYLRKPEETSKVLDQKGWFDTGDLGMLLADGSIVLTGRAKDTIVLSNGENVEPGPLEEFLLGSPLIEQIIMIGQDERQLGALIVPDIDQILKWAHQRNLFLKEDLGGGMGDLKLRRLLQREVNDILSKRPGSRSDERVAGIALVKPFSIENGLLTQTLKQRRNKIVERDQKAIEDIFNR

SEQ ID NO: 35730 - protein, 314 aa, Polaromonas sp. JS666
MTSALDVITFGEAMMLLVADRPGPLEHAEAFHKRTAGAETNVAIGLARLGLKVGWASRLGTDSMGRYLLAAMAAEGIDCSHVVCDATQKTGFQFKGKVTDGSDPPVEYHRKGSAASHMGVADIDEAWLLSARHLHATGVFPAISATTLPAARKTMDLMRAAGRSVSFDPNLRPTLWATPELMRDAINDLATRADWVLPGMEEGRFLTGETTPEGVARFYRQLGAKLVVVKLGAEGAYFDGEAGSGRVAGFPVAEVVDTVGAGDGFAVGVISALLDGLGVPEAVKRGAWIGARAVQVLGDSEGLPTRAELNAAKL

SEQ ID NO: 35731 - protein, 335 aa, Polaromonas sp. JS666
MGAPASPPVRKKILVFRELPPDQLARLQAMHEVTVANPRLPGQLAAFHAALASADGMIGSSYAITASLLASAPQLKVISSVSVGVDNYDLPALAARGIMLCHTPGVLTETTADTIFSLIMASSRRLVELASHVREGRWTRNIGEDLFGWDVHGKTLGILGFGRIGQAVARRAALGFNMPVLYHSRRPVDVAHELPELAGKATHTPFDELLQRADIVAAVLPLSKETRGLMGAREFDLMKPGAIFVNGARGAIVQEDALLNALDHGTLRAAGLDVFATEPLPMDSPLRTHPKVTALPHIGSATFETRHAMAVLATSNLLQALAGERPGAVFATGTS

SEQ ID NO: 35732 - protein, 225 aa, Brassica napus
  misc_feature (152)..(152): Xaa can be any naturally occurring amino acid
  misc_feature (207)..(207): Xaa can be any naturally occurring amino acid
  unsure (1)..(225): unsure at all Xaa locations
MEDDMWAVSSSGSSRSYRSATTAAKYQSGSYRDSGDFDEDYDDDDDDDDVEVDYPCPFCSDDYDLVELCHHIDEEHQLEATHGVCPVCSKRVKMHMVDHITTYHRDVLKSEQKQTSYMDDPYSSDKYLQSFHDDMPPSINHRTSKAVVADQXLSFLNSPLPKPSKTVQVDSSVEDKALIEDSSTVKDRASSTALSDTEQLEKAKKCXFVQGLLSSAMFDDDVCDF

SEQ ID NO: 35733 - protein, 158 aa, Triticum aestivum
RAAGSKNLGLYSERIGAINVVCSAPDIADRVKSQLKRLARPMYSNPPIHGARIVANVVGDPTMFGEWKQEMEEMAGRIKNVRQKLYDSLSAKDQSGKDWSFILRQIGMFSYTGLNKAQSDNMTDKWHVYMTKDGRISLAGLSLAKCDYLADAIIDSFP

SEQ ID NO: 35734 - protein, 280 aa, Glycine max
  misc_feature (59)..(59): Xaa can be any naturally occurring amino acid
  misc_feature (107)..(107): Xaa can be any naturally occurring amino acid
  unsure (1)..(280): unsure at all Xaa locations
QCLLCSSLSDMMADPASFIASWLTPSYLFILVNLVIGTIAITSRFSSTPKNQQAHHPQXTQLLQYPSSPTQLHSAPTPSNTLTVAASHVLQPLPPQTPTHTSRNTTXHPEPQPQPEKPPELLRTPSLLERLRSFHNLSLHKHVQPEPEPEPEPEPEKPELVRSPSLLQRIQSINFSHLYRSDFSHRDDEDPDSGSDPGRGSGKAAEMRKSASVRGGLTDSEWEEVEKRRPQTARPVETTTSWREDEEVDAKADDFINRFKKQLRLQRIDSLLRYRGGNSS

SEQ ID NO: 35735 - protein, 251 aa, Bradyrhizobium sp. BTAi1
MAAGRASCSASWQRRNTRLGRLEQLIINVEIVMSEFVVHSVPGSPFGRSVLIALEEKGARYRLAALAPGDSNTPAHLARHPFGRVPTLDHDGFVLYETQAILRYLDRVCPEPVLTPADLRQAARMDQVMNISDWYLFQGVCSVTAFQRIVGPQLFGTTPDEAVIERAMPQARTVFAELSRLLGDQPFMAGGQLSLADLQVAPQASFLSLTPEWTSLTAAYSNLVAWIERLEARPSFQATTMARLMAGAGAA

SEQ ID NO: 35736 - protein, 403 aa, Arabidopsis thaliana
MNSILSSVLPAPEDPVLSVIFACRDDPSPVKLNLSAGTYRTEEGKPLVLDVVRRAEQQLANDLDKEYLPLNGLPEFNKLSTKLILGDDSPALKENRVVTTQCLSGTGSLRVGAEFLATHNKESVIFVPNPTWGNHPRIFTLAGLSVQYFRYYDPKSRGLDFKGMLEDLGAAPPGAIVVLQACAHNPTGVDPTFEQWEKIRRLVRSKSLLPFFDSAYQGFASGSLDADAQAVRMFVADGGECLIAQSYAKNMGLYGERIGSLTIVCTSEDVAKKVENQVLLVVRPMYLTPPIHGASIVATILKNSDMYNDWTIELKGMADRIISMRQQLYAALEARGTPGDWSHIIKHIGMFTFTGLSEEQVRLMAKEYHIYMTYDGRISMASLSSKTVPQLADAIHAVVTRIA

SEQ ID NO: 35737 - protein, 479 aa, Wolbachia endosymbiont strain TRS of Brugia malayi
MITRIPSVIYSLLNMRKLVSEYDIVVIGSGPGGYIAAIRAAQLGFKTAIIEKEKSLGGICLNWGCIPTKSLLRASKVYELIKRSEEFGIKVKDASFDIQSIVKSSRNVVGKLSSGVAYLMKKNGIKVYQGFGKLAGNHTIKVSSGREEQEISSRHIILATGVRMRNLHGIEADGDLLWNAQHAMTPDRLPKSLLIIGSGAIGIEFASFYSTLGVDVTIIEVKNAILPLEDKDISNLAQEIFTRKGIRIYTNNSVKAFTKGKNSIKVQLSSGESKEFDRVIVAVGIQASTESIGLENTKVKLSASGFVETNEWYETDESSVYAIGDIAGPPCLAHKASHEAVICIERIAGKNVRALRKECIPNCTYSHPQIASVGLTEEQAIKDGYDIKIGKFHSNFNGKSITLGETEGLVKVIIDKKTGELLGAHMIGVGVTELISNFVLVKQLEGTDCDIKSVVFPHPTISEMIHESVLAAYDESLNS

SEQ ID NO: 35738 - protein, 359 aa, Arabidopsis thaliana
MAEICYEVVTDACPSSVYESTPAHSRRRPRFQTVMHEDWEKNCKRSKQEALATRYSSIPRSSREDFSDQNVDVSSPRYGVSSVCGRRREMEDAVAIHPSFSSPKNSEFPQHYFGVYDGHGCSHVAARCRERLHKLVQEELSSDMEDEEEWKTTMERSFTRMDKEVVSWGDSVVTANCKCDLQTPACDSVGSTAVVSVITPDKIVVANCGDSRAVLCRNGKPVPLSTDHKVNELDRIEGAGGRVIYWDCPRVLGVLAMSRAIGDNYLKPYVSCEPEVTITDRRDDDCLILASDGLWDVVSNETACSVARMCLRGGGRRQDNEDPAISDKACTEASVLLTKLALARNSSDNVSVVVIDLRR

SEQ ID NO: 35739 - protein, 474 aa, Haemophilus influenzae 86-028NP
MSKEIKTQVVVLGAGPAGYSAAFRCADLGLETVIVERYSTLGGVCLNVGCIPSKALLHVAKVIEEAKHANKNGIYFSEPRIELDEVRAGKEAVVAKLTGGLAGMAKARKVTVVEGLATFTDSHTLVARDRDGNPTTVKFDNAIIAAGSRPVQLPFIPHEDPRIWDSTDALKLKEVPKKLLIMGGGIIGLEMGTVYNALGSEVEVVEMFDQVIPAADKDVVGIYTKQVEKKFKLMLETKVTAVEAKDDGIYVSMEGKACNDTKRYDAVLVAIGRVPNGKLIDAGKAGVEVDDRGFIHVDKQMRTNVPHIYAIGDIVGQPMLAHKGVHEGHVAAEVIAGQKHYFDPKVIPSIAYTEPEVAWVGKTEKECKQEGLNYEVAKFPWAASGRAIASECSEGMTKLIFDKDTHRILGGAIVGSNGGELLGEIGLAIEMGCDAEDIALTIHAHPTLHESVGLAAEVFEGSITDLPNAKAKKK

SEQ ID NO: 35740 - protein, 462 aa, Wolbachia endosymbiont strain TRS of Brugia malayi
MNNYDLIVIGGGPSGYKCAIAAAKLGLKVACIDKNSIFGGTCLRVGCIPSKALLHSSYQYVYTKNNLPKLGIKTKDVNFNLKEMLGYKDARVQELGKGIDYLFNLYKITKINGLGKITSFDQDSLKVSVEDKVLKTKNIVIATGSNVSSLPGINIDEKNIISSTGALSLTEVPKKLVVIGAGAIGLEISSVWSRLGSEVIVVEFLDRIAATMDGELSKSLLSSLQKQGIKFMLSTKVEKIKQNSNSLSVKVSSIKDNQTNTIETDKVLIAVGRKPCTEDLGIDEKIEEDNRGFIQVNNRYETNVKGIFAIGDVIGGAMLAHKAEEEGVAVAEIIAGQSPHVDYEIIPSVIYTHPAVSSIGKIEEELKSAGRKYKVGKCQFAANGRAKITDDAEGFVKVLTCSTTDTILGVHIIGAYADTLINEAAVAMAYGAAAEDIYRICHSHPDINEAFRDACIDAFFKK

SEQ ID NO: 35741 - protein, 1369 aa, Gibberella moniliformis
MSPPDPEQTRESSQTRAIRPAAAVHDTGFPLACSESHQNQIQAPVPTSLDNARQRATFDLVNDIKGHDATPRPFAGGRFLRDLGDASRSPSQSPFRLAMPSISPAQLAFSAMQYLPVPTLVLNNLKTVVLANEAMGRMLGLITEDSDEEDTLPTIESLRGQTLSQVGVDILQDGQPVWATWEAFLDSQVDEMGVRFAARDPRQPSQSAGDETPTASTMPFPERAPSPPARKTQDSIVEVVITRKNGNKAAFDGRYNPKESDCQVYAKMIITIWELEDRQTFFTLTFTSTESPSSTLHSTKRPIARPSILEAAERKSIAHSNPSSVASSRDSNSPSFHSPGIVTMSSSPFPPMGPPSFATHSSTPSLLQKMLLMKDALLNNTQMPILAMWKDGSVTFPNTAARKLFEKEAPLDTSLNGFDLLRYWHIYTEDFSERFAVEDMPICKLLKTEKPFSGFRVGMYDENRNKRIYDVLGEAIRDDSTGEFLAGVVTGRDVTVMTEEITQIKERDEERFKLICDTMPQLVWTAMPDGMVDFWNTRFYTYTGLTPENSLGKSWVNAFHPDDLPEAHRRWQHSLDTGDSYVTEYRCQSKDGNWRWYLGRALPQRNKETGKVEKWFGTCTDVHESIQTKMSAKRTRQQLLSVIAHSHVTIFTVDPNRRVTMLEGALIWNNTHEENHDGTRWFIGENMYTVFNRLTAQLADGERPEFLEPIELLLDGKATEDLKEHGIDDRWYRTRFLPMFGKRPQEGDATSDTYIEGVIGVIMDVTELKVREEALEKQSKEKRRAMANEAAAKEANRLKSQFLANMSHEIRTPITGVLGMAELLSGMQLDAEQQEYVENIQSSATSLLTVINDILDFSKVESGRLDIEEVQFSLSHIVKEVGRMLQFAVERKNLDFQSDIGDGIENDLVVIGDPGRVRQILTNLLTNSIKFTNQGYVRFSVTAEKETSESIEVRFTVEDSGIGIQDDVRKKLFQPFSQGDASTARRFGGTGLGLTICKNLLDLMHGRISLESNVGVGTRATFWIPFNKPSGPAEAGLANAGAIPDRLQSELSLSCNSSEYDQIVGTPPPFDGIQANNTGSRRTRFGISSTSSPDQELPASERAKIHVLVVEDNPINQKIATKTIGKLGFQVTAAWNGKEALEYLAGVHKGIKQKPDIILMDVQMPIIDGYKCTHLLRHHMPYKPLVEDVPIVAMTASAIQGDREKCTKAGMDDYLAKPVRGVILEKMLLRWCHARRRTSATPDPTASDCSEMSEHCDNADIPNIGIDDNDIPQTSEDINGSPITPRPLTTNGYQNEPSPFDSTGLAVQVRRPEGETEWSNRLQETKLIDAAGGSSSYRRNSYHELQTGDSLTEENVNKLKSENQSTTRR

SEQ ID NO: 35742 - protein, 318 aa, Photobacterium profundum SS9
MEKLVNTQSLAAWKHKHDFVSLNHSGERRTYYVLCLTFVMMVAEIVAGTVFGSMALLADGWHMGTHAAAFMITIFAYRYARKHANSDGFSFGTGKVSVLGGFTSAVALGLVALVMMVESLQRLWSPEAIQFNEAIAVAVLGLIINIVSVFLLKDDHHHDHSHHHHGHASDHQGEHHHDHNLKAAYFHVMADALTSLLAIVALIFGKYLGWNWLDALMGIVGAVIITRWAYGLMKQTGPILLDQSIDDDYRQKIISQLEIDNDDRVSDIHIWKVSADHYAAMISVVSAKPKLAEEYKQLLANFAKISHLTIEVNECRST

SEQ ID NO: 35743 - protein, 310 aa, Chara vulgaris
FGRIGRLVLRAALLNHPEIEVVAVNDPFIDTKYMVYMFKYDSVHGQFKGKISAKDEKTLIINGKEVAVYGSRDPAAIPWSDTGVEVVVESTGVFTDKDKAAAHIKGGAKKVIISAPSKDAPMFVVGVNEDKYTPDLTIVSNASCTTNCLAPLAKVINDNFGIVEGLMTTVHSLTATQKTVDGPSGKDWRGGRGAGFNIIPSSTGAAKAVGKVLPELNGKLTGMAFRVPTADVSVVDLTVRLAKPASYDTIKQCIKAASEGPLKGILGYTDEDIVSTDVIGDAHSSVFDAKAGIALNDNFVKLVSWYDNEW

SEQ ID NO: 35744 - protein, 1282 aa, Gibberella moniliformis
MVDDAALAAAASIVASIAPDPRLPNSIPVGVASQVQLPGPDTPAKRKLELELQNLALRVGKLESQASATSPFPETPNEVIDTLFGEEAQAVAVRPKPKVFHAQGSLHSPHLPSYQLTEEALEGLREHVDDQSKLLDSQRQELAGVNAQLLEQKQLQERALEILEQERIATLERELWKHQKANEAFQKALREIGEIVTAVARGDLTMKVRMNTVEMDPEITTFKRTINAMMDQLQIFASEVSRVAREVGTEGLLGGQARIGGVDGTWKELTDNVREIASVTTAVAHGDLTKKIERPARGEILQLQQTINTMVDQLRTFASEVTRVARDVGTEGMLGGQADVGGVQGMWNDLTVNVNAMANNLTTQVRDIIKVTTAVAKGDLTQKVQADCRGEIFELKSTINSMVDQLQQFAREVTKIAREVGTEGRLGGQATVHDVEGTWRDLTENVNGMAMNLTTQVREIAKVTTAVAKGDLTKKIGVEVKGEIAELKNTINQMVDRLGTFAVEVSKVAREVGTDGTLGGQAQVANVEGKWKDLTENVNTMASNLTVQVRSISTVTQAIANGDMSQKIKVEANGEIQVLKETINNMVDRLSSFCYEVQRVAKDVGVDGKMGAQADVGGLDGRWKEITTDVNTMASNLTTQVRAFSDITNLATDGDFTKLVDVEASGEMDELKRKINQMISNLRDSIQRNTQAREAAELANKTKSEFLANMSHEIRTPMNGIIGMTQLTLDTDLTQYQREMLNIVNNLANSLLTIIDDILDLSKIEARRMVIEEIPYTLRGTVFNALKTLAVKANEKFLDLTYKVDSSVPDYVIGDSFRLRQIILNLVGNAIKFTEHGEVSLTIKESMGQNNVRPGEYAVEFVVEDTGIGIAQDKLDLIFDTFQQADGSMTRKFGGTGLGLSISKRLVNLMGGDLWVNSEHGKGSEFHFTCLVKLAPDDAALIEQQIRPYRGHQVLFVDKAQSQNATSIKPMLEKIGLKPVVVDSEKSPALTRLQSGGSLPYDAILVDSIDTARRLRAVDDFKYLPIVLLAPVVHVSLKSCLDLGITSYMTTPCKLIDLGNGMIPALENRATPSLADNTKSFEILLAEDNTVNQRLAVKILEKYHHVVTVVGNGWEAVKAVQSKKFDVILMDVQMPIMGGFEATGKIREYERGIGSHRTPIIALTAHAMMGDREKCIQAQMDEYLSKPLQQNHLIQTILKCATLGGPLLEKNRERELALHAETKSKHKEGGQGLLRPTLESRSFTSREPLLGNGKESPAILTTDEDPLARARLDLSDMRSLTN

SEQ ID NO: 35745 - protein, 312 aa, Chara vulgaris
KVGINGFGRIGRLVLRASLNHPNVQVVAVNDPFLDPEYIVYLFKYDTVHGKYKGEVGLSADKKLVVDGKEIAIFALRDPAAIPWGEAGADYVVESTGVFTAKDKAAAHLKGGAKKVVISAPSGDAPMFVMGVNEDKYTADLDVISNASCTTNCLAPLAKVMNDNFGIVEGLMTTVHAVTATQKTVDGPSGKDWRGGHGAGFNIIPSGTGAAKAVGKVLPELNGKLTGMAFRIPTADVSVVDLTVRLAKSTTYDEIKAVIKKASESDLKGILGYTDDDVVSSDFIGDVRSSIFDAKAGIALNGNFVKLVSWYD

SEQ ID NO: 35746 - protein, 238 aa, Hydrogenobacter thermophilus
MLSAFVITGFLGSGKTTLLMNSVREHLKNRRIAIIVNEFGEVGVDGKILKNAYSQVLELPEGCICCTLHAEFEKALWEIRQKYDPEVLLVETSGAAEPFPVMLSLQSLGCTVEGVMCLIDAYNFEKYSHEPTTRHQIGSSNMLVLNKTDLVDEEKLKSVEQEVVRIWHSYRLKNLFTGEPVFRDFKLYKTSYGKLPVEVFEGIFALKAKLEAPEEDYHQHHLEHQVLYFDQPLEYEKL

SEQ ID NO: 35747 - protein, 404 aa, Ralstonia solanacearum
MVTGMGIVSCLGNTLDAVAAALREGRSGLSAVSAWHALGLASQVAGVACVADEAPFPRKFERFMGDTARLACHAARKAVEDAALDPALLQSPRVGAVVGSGSGALSAYDAALAISRSRGVDRVPPYVVPQAMSSTVSANLAQVFGIGGISYSPSSACTTSALAIGQAAHWIRSGQQDIVLAGGAEELHDNYALLFDAMGALSRASADTPHLASRPYDTARDGFVLASGAGVLVLESLTHARARGARIYAEVIGFGQSTDSSSMVSPQAASIARAIRDTLRHTEAPPDYINTHGPSTPSGDLEELRALKAVFGPNTPAFSSTKGLTGHPPGAAGAHEAIYTLLMMRDGFIAGCPNIVTLESEATAMPLVRRSRPADLRTTMSISFGFGGSCAGLMFGADPGDFYS

SEQ ID NO: 35748 - protein, 210 aa, Phytophthora infestans
MSCWQFLCVALLAFLGALQLAAADDAASNVIVLSNDDFEHKTQAGSGATTGDWLVEFYAPWCGHCKKLVPIYEKVASELKGQVNVAKVDVTANAELGKRFGIRGFPTLLHFSHGKSYKYSGKRTLEDLAEFARGGFKKVEGEVVNAAPSFLDFAVQQAEDVKRDFITLLATKKNVLLVTFSGGLLLGLLLGCMCGCCTSRGNKAPKTKKE

SEQ ID NO: 35749 - protein, 408 aa, Ralstonia solanacearum
MKRVVVTGMGGVTALGSQWGDIQQALQRGRNAVRRMPEWDVFSALHSRLACPLPAFEVPATYPRKKTRSMGPVSMYAVRATELALADAGLADDPSISDGRMGVAYGSSSGSVQPIRAFGTMLDTGSMQGITSNSYIQMMPHTTAVNVALFWDLKGRIVPTSCACASGSQAIGYAYEAIAGGKQTLMLAGGAEELSGPAVAVFDTLYATSTRNDAPHLTPRPFDAARDGLVVGEGAATLVLEEYEHARARGAVIHAEIVGFGCNSDGAHMTQPTAATMSHAMRLALQDAGLPQDAIGYVNAHGTSTDLGDVAESRATAEVFRPTLPISSLKSYIGHTLGACGAIEAWWTIEMMKRNWYAPTLNLETVDPACAPLDYIAGNARAIDTEYVMTNNFAFGGINTSLVLKRAP

SEQ ID NO: 35750 - protein, 431 aa, Aeropyrum pernix K1
METSGIGWPKCVAVFIRLYLGWINRLLAITIKAGLNMSKTGLIDTPFKPVEKNVVEEYKTLLEDALGFKRAVDEEGRVVDEELLPKVSEGEIVEIYTYMVRARVIDSWLLKLQRMGKVALHAPNKGQEAVAVGAAKPLRRDDWVFPSYRELGAYLVRGMSEEEILDRALANADDPLKGSDFAIFGNRKYNLVPAPVPVGNQIPISVGAAYAMKYLGRDTVTLTFFGDGATSRGDFHAGLNFAGVFKVPAVLVIQNNQWAISVPRARQTAAPSLAVKGLAYGVPGVRIDGNDVMVVYKIVSDAAEKARRGGGPTLIEAVTYRLGPHTTADDPSRYRTSEEERIMERYEPLRRMRKFMESMGILTEKEALSIEEEWNSKVEEIVRKVLAKPPLPENVFFQNVYGEKPWFIQEEERDLEETLKTMEELGLSYKE

SEQ ID NO: 35751 - protein, 724 aa, Neurospora crassa
MSSYQAIPPKKRSGAGLDFASSFRSASPLAQEVLARDLAEFSDDAVDEVDNEALSVSDNEDETSGPTLYRRPSGVAFGAIRPALAGPGGLEEAPILTRAERTRSRDEERSLLRDNHILPPKHDRPPQKPTLFRALYTRIFSTKVPRRISDEEVAASPIQIVIAPPTPTVTETEPLLGERSLRHRGAIGHGDEPSSHDHDHEHEHLNEQWEAAVAAGQIKTTWQREAKTIAVYSRSLIVTFLLQYSLNVTSIFAVGRLGTLELGAVSLATMTASITCYAPIQGLATSLDTLCAQAYGSGHKTLVGLQLQRMVYFLLLLLIPVAAIWLNAESILAAMIEKDSAKLAAQYLRVILLGTPAYAMFESGKRFVQAQGLFHATTYVLLIAAPANVLLNWLFVWKLGWGFIGAPLAVAVTQNMLPLLLLLYVWKVDGRQAWGGFRKAALKNWGPMVQLALPGMVMVVAEWFAFEILTLASGRIGVAHLAAQSVLVTVTSTTFQIPFPLSIAGSTRVANLIGAKLVDAAKTSAKVTIVGGVIVGLFNVTLLSVFRNQIALLFTQDPEVIELVAQTLPVCAIMQLFDGMAAVSHGLLRGIGRQEIGGYVNLIAYYVVALPLSFGLGFSLGWGLVGLWMGVTFGLLLFVYPSSFPPRRPPPFEQNTDLELIPYAGCLWLSIGSSGTPIGNWLPGRQKTEMPLVSSTRVSFNIQAFRAVPHAAIRTGAYHCVPRQ

SEQ ID NO: 35752 - protein, 329 aa, Psychrobacter arcticus 273-4
MSMKQPVRVAVTGAAGNISYAMLFRIASGEMLGKDQPVILQLLEIAPALDALKGVVMELEDCAFPLLAGIVQTDDATVAFKDVDYALLVGSRPRGPGMERKDLLEANAAIFSAQGKALNDVASRDVKVLVVGNPANTNALIAQRNAPDLDPRNFTAMTRLDHNRAMAQLAGKTDSTVNDVKKMIIWGNHSSTQYPDLTASTVNGKLALDLVDRTWYEGTYIPEVQQRGAAIIKARGASSAASAANAAIAHMRTWVLGTDENDWVSMGVYSNGEYGIAKGLIYSFPCTCTNGDWSIVDGVDVSSAFSKEKMAATEQELSEERDAVAHLLP

SEQ ID NO: 35753 - protein, 151 aa, Methanocaldococcus jannaschii DSM 2661
MIIMDVSVQRRMAAEILKCGIERVWIDPTQLDRVKMAMSKDDIRALIKEGVIKKKQKKGISSARVKKLKEQRKKGRRRGPGSRRGAAGARTPPKERWMATIRALRKTLKQLRDSGKIDRKVYRKLYRMAKGGAFRSRSHLFLYMREHELLK

SEQ ID NO: 35754 - protein, 436 aa, Methanocaldococcus jannaschii DSM 2661
MKKLIPILEKIPEVELPVKEITFKEKLKWTGIVLVLYFIMGCIDVYTAGAQIPAIFEFWQTITASRIGTLITLGIGPIVTAGIIMQLLVGSGIIQMDLSIPENRALFQGCQKLLSIIMCFVEAVLFVGAGAFGILTPLLAFLVIIQIAFGSIILIYLDEIVSKYGIGSGIGLFIAAGVSQTIFVGALGPEGYLWKFLNSLIQGVPNIEYIAPIIGTIIVFLMVVYAECMRVEIPLAHGRIKGAVGKYPIKFVYVSNIPVILAAALFANIQLWGLALYRMGIPILGHYEGGRAVDGIAYYLSTPYGLSSVISDPIHAIVYMIAMIITCVMFGIFWVETTGLDPKSMAKRIGSLGMAIKGFRKSEKAIEHRLKRYIPPLTVMSSAFVGFLATIANFIGALGGGTGVLLTVSIVYRMYEQLLREKVSELHPAIAKLLNK

SEQ ID NO: 35755 - protein, 140 aa, Brucella melitensis 16M
MAIERTFSMIKPDATRRNLTGAIIAKLEEAGLRVVASKRVWMSRREAEGFYAVHKDRPFFGELVEFMSSGPTVVQVLEGENAIAKNREVMGATNPANADEGTIRKAFALSIGENSVHGSDAPETAAEEIAYWFSGTEIVG

SEQ ID NO: 35756 - protein, 497 aa, Zea mays
MFSHGADSAHDAGTVGVSSGVGATVPARFVWPYGGKRVFVSGSFTRWSEHLPMSPVEGCPTVFQAICSLSPGIHEYKFYVDGEWRHDERQPTISGEFGIVNTLYLTREFNQINALLNPSTPGSRMNMDVDNENFQHTVTLSDGTIPEGTVRVSEAAIQISRCRVSEYLNLHTCYDLLPDSGKVIALDINLPVKQSFHILHEQGIPVAPLWDSFRGQFVGLLSPLDFILILRELETHGSNLTEDQLETHTISAWKEAKRQTCGRNDGQWRAHQHLVHATPYESLRDIAVKLLLNDISTVPVIYSSSSDGSFPQLLHLASLSGILKCIFRYFKNSTGNLPILNQPVCSIPLGSWVPKIGDPNSRPLAMLRPNASLSSALNMLVQAGVSSIPIVDENDSLLDTYSRSDITALAKAKVYTHVRLDEMAIHQALQLGQDANTPFGFFNGQRCQMCLRSDPLLKVMERLANPGVRRVFIVEAGSKRVEGIISLSDIFKFLLSL

SEQ ID NO: 35757 - protein, 361 aa, Streptococcus pneumoniae TIGR4
MMDSPKKLGYHMPAEYEPHHGTLMIWPTRPGSWPFQGKAAKRAFTQIIETIAEGERVYLLVEQAYLSEAQSYLGDKVVYLDIPTNDAWARDTGPTILVNDKGKKLAVDWAFNAWGGTYDGLYQDYEEDDQVASRFAEALERPVYDAKPFVLEGGAIHSDGQGTILVTESCLLSPGRNPNLTKEEIENTLLESLGAEKVIWLPYGIYQDETNEHVDNVAAFVGPAELVLAWTDDENDPQYAMSKADLELLEQETDAKGCHFTIHKLPIPAVRQVVTEEDLPGYIYEEGEEKRYAGERLAASYVNFYIANKAVLVPQFEDVNDQVALDILSKCFPDRKVVGIPARDILLGGGNIHCITQQIPE

SEQ ID NO: 35758 - protein, 348 aa, Prochlorococcus marinus str. MIT 9313
MAELLITGGAGFIGSHTCLVLLEAGHRLVILDNFSNSSAIASKRVAELAGVAAQERMLVLEGDIRNSNDLDRAFNSMENGIAAVVHFAGLKAVHESVQLPLKYWDVNVAGSRCLLEAMQRHNCRTIVFSSSATLYGYPEQIPIPETTRVQPINPYGQSKAAVEQLLDDLACSEPGWRIARLRYFNPVGAHSSGCIGEDPKGIPNNLFPFVSQVAVGRRAELQVFGADWPTPDGSGVRDYIHVMDLAEGHRAALEVLQREEPQLLTLNLGSGKGHSVLEVVQAFEKASGQPVPYSINQRRAGDAACSVADPRLAAERLGWYTQRSLSDMCRDSWNWQKANPQGYSQKQQ

SEQ ID NO: 35759 - protein, 162 aa, Arabidopsis thaliana
  misc_feature (87)..(87): Xaa can be any naturally occurring amino acid
  misc_feature (112)..(112): Xaa can be any naturally occurring amino acid
  unsure (1)..(162): unsure at all Xaa locations
TPIAAVPDGSIILDQLASHSTAFAVEQFSDDVGYSWIDGLKDHAAQNVNDKMMSNAGHIFPHNTPNTKEAYYYRMIFERFFPQNSAXRLTVPGGATVACSTAKAVDQLASHXWSTNMDPSGRAAIGVPLSAYDGKNVALTIPPLKAIDNMPMMMGQGVVIQS

SEQ ID NO: 35760 - protein, 409 aa, Triticum aestivum
  misc_feature (342)..(342): Xaa can be any naturally occurring amino acid
  unsure (1)..(409): unsure at all Xaa locations
MSEIRRDVPEGAGAGAGAEGKGAESHVGSRAARRRRMEIRRHRLVAERGAEETSRKRRKLEEESSSTDEEEIEPARYGVTSVCGRRRDMEDAVSIRPEFLPGHHFFGVFDGHGCSHVATSCGERMHEIVAEEAGGARSSGSDDAERWMGVMERSFARMDAEAVSSRSRASGAPTCRCELQLPKCDHVGSTAVVAVVGPRHLVVANCGDSRAVIGRGGAAIPLSSDHKPDRPDELERIQAAGGRVIFWDGARVFGVLAMSRAIGDSYLKPFVISDPEVRVLDRSAGEDEFLILASDGLWDVVSNEVACHVVRSCVRSKAKRRGGRSSPTSNLSPRQSKRQRQXSSSGDEAQNDGGGCADARSESDEESGEEVDEACAEAAILLTKLAIARQSPDNVSVVVVNLRRRRPRF

SEQ ID NO: 35761 - protein, 315 aa, Coleochaete scutata
  misc_feature (289)..(289): Xaa can be any naturally occurring amino acid
  unsure (1)..(315): unsure at all Xaa locations
KVGINGFGRIGRLVARVALGRDDVELVAINDPFISTEYMVYMFKYDSVHGRWGGNVELKDAKTLLFNGKPVNVYDKRDAAEIPWSEMGAEYVVESTGVYTDMDKAAAHLKGGAKRVVISAPSKDAPMFVMGVNHEKYKGEAIVSNASCTTNCLAPLAKVVNDRFGILEGLMTTVHSITATQKTVDGPSSKDWRGGRGAGFNIIPSSTGAAKAVGKVLPELNGKLTGMAFRVPTADVSVVDLTVRLEKAATYDEIKAALKEASEGAMKGILGYTEDDVVSTDFITDERSXVFDAKAGIALNNKFVKLVSWYDNELG

SEQ ID NO: 35762 - protein, 188 aa, Arabidopsis thaliana
MLVYGILNDAFHGGWEPSSSSSDEDRSSFPSVKIETPESFAAVDSVPVKKEKTSPVSAAVTAAKGKHYRGVRQRPWGKFAAEIRDPAKNGARVWLGTFETAEDAALAYDRAAFRMRGSRALLNFPLRVNSGEPDPVRIKSKRSSFSSSNENGAPKKRRTVAAGGGMDKGLTVKCEVVEVARGDRLLVL

SEQ ID NO: 35763 - protein, 165 aa, Brassica napus
  misc_feature (4)..(4): Xaa can be any naturally occurring amino acid
  misc_feature (17)..(17): Xaa can be any naturally occurring amino acid
  misc_feature (27)..(27): Xaa can be any naturally occurring amino acid
  misc_feature (34)..(34): Xaa can be any naturally occurring amino acid
  misc_feature (66)..(67): Xaa can be any naturally occurring amino acid
  misc_feature (73)..(73): Xaa can be any naturally occurring amino acid
  misc_feature (84)..(84): Xaa can be any naturally occurring amino acid
  misc_feature (88)..(88): Xaa can be any naturally occurring amino acid
  misc_feature (94)..(94): Xaa can be any naturally occurring amino acid
  misc_feature (102)..(102): Xaa can be any naturally occurring amino acid
  misc_feature (105)..(105): Xaa can be any naturally occurring amino acid
  misc_feature (114)..(115): Xaa can be any naturally occurring amino acid
  misc_feature (126)..(127): Xaa can be any naturally occurring amino acid
  misc_feature (142)..(142): Xaa can be any naturally occurring amino acid
  misc_feature (148)..(148): Xaa can be any naturally occurring amino acid
  misc_feature (151)..(151): Xaa can be any naturally occurring amino acid
  misc_feature (154)..(154): Xaa can be any naturally occurring amino acid
  misc_feature (160)..(160): Xaa can be any naturally occurring amino acid
  misc_feature (163)..(163): Xaa can be any naturally occurring amino acid
  unsure (1)..(165): unsure at all Xaa locations
IGKXLGLLFCKEEDGEXLFNKMKVMDXGMRKEGXKVVVFVFSKVFKLKVNGVGFRLIPESTKVKNXXKERKTXGLTDEDFNGVXVFKXKSLILXSDKKSYGXVFXRKEDLEKYXXGVSGQQNGFNXXLKPGEIQVVVFEEIXKGMKEXETXNWXDIVFIXLGXEV

SEQ ID NO: 35764 - protein, 312 aa, Klebsormidium flaccidum
GINGFGRIGRLVMRAALERSDVEVVAVNDPFIDADYAIYMFTYDSVHGEVQREDREEDAHTISFDGHDVAFYAARDPSEIPWGKHGADYVVESTGVFTDMDKAAAHLKGGAKKVIISAPSKDAPMYVMGVNHEKYKTSDDVISNASCTTNCLAPLAMVVNNKFGILEGLMTTVHATTATQKTVDGPSNKDWRGGRGASTNIIPSSTGAAKAVGKVLPELNGKLTGMAFRVSTADVSVVDLTVRLEKPAKYDDIVAAIKEAADGPLKGILGYTSDDVVSQDFVHDSRSSIFDIKAGIALNDSFVKLVSWYDNE

SEQ ID NO: 35765 - protein, 399 aa, Burkholderia sp. 383
MSKQLQDAYIVAASRTPIGKAPRGVFKNTRPDELLVHALKSAVAQVPGFDTKLIEDAIIGCAIPEAEQGLNVARMGALLAGLPQTVGGVTVNRFCASGITALAMAADRIRVGESDAIFAGGCESMSMVPMMGNKPSMSPHIFDRNEDFGIAYGMGLTAERVAEQWKVSREDQDAFSVESHRKALAAQQAGEFNDEIAAYTITERFPNLATGEVDVKTREIALDEGPRADTSIEGLAKLRTVFANKGSVTAGNSSQTSDGAGALLVVSEKVLKEFNLTPLARFVSFAVRGVPPEIMGIGPKEAIPAALKAAGLKQDDLDWIELNEAFAAQSLAVMRDLGLDPSKVNPMGGAIALGHPLGATGAIRAATVVHGLRRRNLKYGMVTMCVGTGMGAAGIIERL

SEQ ID NO: 35766 - protein, 575 aa, Debaryomyces hansenii CBS767
MSNERMDKYILSNTDGQSSYGSSVNNGLSIPSDIDRFDSSNQGDFSGDERGIRCSSVNDTSPLLKASYDSHSKSVAQELIEQERGFLKYHNRIPNKGNENQAIKRFEETISSKKITDTTALIELKSLFVASVPLSMTFLLQCSFSTVSVFTAGHLGSVELASVSIGSMTASISGYAIIQGISSALDTLCPQAFGAKEYYLVGTYLQKCVAMNFTIMVPILFIWTFFGYEVITGFLPDNDTAKYAAVYLRYTAPGIPAYILFECGKKFLEAQGIYHISTIVLLFAAPSNLVMNLLFVKTFGYIGIPMAISINYWLMTFGLFVSIVYFIKPHSTPSGKHPLTCWNGLHIKQAFQSWNEIVYLAVPGLVMLEAKFFALETLTLIASYLGTLSLAAQSVGTAIASLSYQVLIAIGIASSTRIANFLGAGSNSAAKKTTQVSLCFVLVFSIINVLFLYCFQTRIAPLFTKDEKVIKIVESIMWLIALLQICDAINAGSAGCLRGQGQTKIGGIVSLLSYYLIGIPLSIYITVYSKFKGTIDGLWIGNCAALIIIGVVQSYYALFADFIRLCTDAQKRASN

SEQ ID NO: 35767 - protein, 275 aa, Gibberella moniliformis
MLEDPAHQDVARWGKDGDTFVVVENEKFTRSILPKHFKHSNMASFVRQLNKYDFHKVRQTNDSGSAANGANTLEFKHPNFRVGSKDDLDNIRRKAPAPRRTQATEDFTTSHHISVMTEQLTATQQQVQQLQELFTEVSQTNRLLVNEVLTLQKMLNAQKQSQHEMLNYLSPSNNRHQQSMHLNVGTSPLDGSDDSAPELRRARELLSSVTPDQIADRELERLQGVYGSPADSAVVIPQASMPMMHDPMNDINRYPVYPVGQTVGIDPFHSDHIHK

SEQ ID NO: 35768 - protein, 427 aa, Debaryomyces hansenii CBS767
MEKNTALVDFVSNFIDSNSQEFFREINEFLYNNPETNYEEFKAHNQLTTYLETKPGWEVTRSAFGIETSFVATFQHKSNTSSKVISFNAEYDALPEMGHACGHNLIATGAIAAAIASSEAMRKFNFAGTIKLFGTPAEEGGDGKGKMLKAGAYNDVDVSLMHHGNSESPGQAFVRTAASFRFNIEYFGKSAHAGACPWQGVNALDAASIFMHSSSLLRQQFEATDRIHFVVTDGGAAANIIPDYTRIKGIIRAINRGKMAELKEKLVGCIKAGALGSGCAYKINYENEYNDMVSNIPLTDSFREFFNGFCDNDNEPKLKDLDHERILVSSASTDQGNVSWEIPSLHSFFCIKADKEPHTIEFCEAAGKKSSHDSCLKSAKCMSLTGLKVLYDEEFYTKIYSSWKADVESLKPKSVDLNALDNEFTYS

SEQ ID NO: 35769 - protein, 363 aa, Neurospora crassa
MASSASKTNIGVFTNPQHDLWISEASPSLESVQKGEELKEGEVTVAVRSTGICGSDVHFWKHGCIGPMIVECDHVLGHESAGEVIAVHPSVKSIKVGDRVAIEPQVICNACEPCLTGRYNGCERVDFLSTPPVPGLLRRYVNHPAVWCHKIGNMSYENGAMLEPLSVALAGLQRAGVRLGDPVLICGAGPIGLITMLCAKAAGACPLVITDIDEGRLKFAKEICPEVVTHKVERLSAEESAKKIVESFGGIEPAVALECTGVESSIAAAIWAVKFGGKVFVIGVGKNEIQIPFMRASVREVDLQFQYRYCNTWPRAIRLVENGLVDLTRLVTHRFPLEDALKAFETASDPKTGAIKVQIQSLE

SEQ ID NO: 35770 - protein, 702 aa, Mesorhizobium loti MAFF303099
MAKQASKLAGTAATIHDQKLQRGEGGELHQTASGSTAVLTTAQGGPVSDDQNSLRIGARGPTVLEDFHFREKIFHFDHERIPERVVHARGYGAHGYFETYESLAKYTRADIFQRAGEKTPAFVRFSTVAGNKGSADLARDVRGFAVKLYTQEGNWDIVGNNMPVFFIQDAIKFPDLIHAAKAEPNSDFPQAQTAHDNFWDFISLTPESMHMIMWAMSDRAIPRSLRFMEGFGVHTFRLLNAKDESTFVKFLWKPKLGLQSVAWNEAVKINGADPDFHRRDLWDAIHAGNFPEWELQLQLFDQAFADSFDFDILDPTKLIPEEVLPPIAVGRLVLDRMPDNFFAETEQVAFMTQNVPPGVDFSNDPLLQGRNFSYLDTQIKRLGSTNFTHLPINAPKCPFHTFQQDGHMAMRNPVGRANYQPNSWDEGPRESPQKGFRSFAEAEAGPKARLRAESFADHYSQARQFYISQHPVEQGHIASALTFELSKVHTPVIRERIVSHLLNIDDALARKVADALGLKAMPKPADAGAPTRTDLPASDALSILKNGPGRFEGRKLGILVTDGTDAALLNALKQALTKAGAKFEIIAPKVGGAKASDGSWMDAQQMIAGAPSVLYDAIALLAAKPAMAGLLRESTARDFVADAFAHCKFIGFVEAAAPLLDKAGVVEDEAVIPLASAKDVAGFITRLGDLRLWAREPKVKLG

SEQ ID NO: 35771 - protein, 138 aa, Brassica napus
MVETGHHHQHPPAPAAAGPPPVSSMAISTKPTWTPAEQLHHLQYCIHSNPSWHETVVLAFQHYIVMLGTTVLIANTLVTPMGGDAEDKARVIQTILFMSGINTLLQTLIGTRLPTVMGVSFAYVLPVLSIIRDYNDGQ

SEQ ID NO: 35772 - protein, 201 aa, Shewanella sp. MR-7
MKLLKPLFDNNRRWAGRISQEHPDFFEQLAKQQNPEYLWIGCSDSRVPSNQIIDLMPGEVFVHRNIANMVIHTDLNCLSVLQYAIDVLKVKHIMVVGHYGCGGVRAAMGNQRLGLIDNWLGHLRDVYRLHQDELMQMDEAKRFDRLCELNVIEQVSNVTSSTIVQEAWARGQELAIHGWIYGIDNGLLTDLDVTVDRAQKI

SEQ ID NO: 35773 - protein, 399 aa, Pseudomonas aeruginosa UCBPP-PA14
MSHFAKVARVPGDPILGLLDAYRNDPRADKLDLGVGVYKDAQGLTPILRSVKLAEQRLVEQETTKSYVGGHGDALFAARLAELALGAASPLLLEQRADATQTPGGTGALRLAGDFIAHCLPGRGIWLSDPTWPIHETLFAAAGLKVSHYPYVSADNRLDVEAMLAGLERIPQGDVVLLHACCHNPTGFDLSHDDWRRVLDVVRRRELLPLIDFAYQGFGDGLEEDAWAVRLFAGELPEVLVTSSCSKNFGLYRDRVGALIVCAQNAEKLTDVRSQLAFLARNLWSTPPAHGAEVVAAILGDSELKGLWQEEVEGMRSRIASLRIGLVEALAPHGLAERFAHVGAQRGMFSYTGLSPQQVARLRDEHAVYLVSSGRANVAGLDARRLDRLAQAIAQVCAD

SEQ ID NO: 35774 - protein, 528 aa, Colwellia maris
MSNYQSAIEAVKAIKEKAGNSWDAINPESVARMRAQNKFKTGLDIAQYTADIMRADMAAFDADKTKYTQSLGCWHGFIGQQKMISIKKHFDGKTDRRYLYLSGWMVAALRSEFGPLPDQSMHEKTSVASLVAELYTFLRQADARELGGLFRDLDAASDGDKAAIQDKIDNHVTHVVPIIADIDAGFGNAEATYIMAKQMIEAGACALQIENQVADEKQCGHQDGKVTVPHADFHSKIRALRHAFLELGIDNGIIVSRTDSEGAGLTKEIAVVKEPGDQGDIYNSFLDVEEIDVSDMAEGDVCFNRDGKLVRPKRLPSGLYQFRQGTGEERCVFDSIEAIKAGADLLWIETATPNVADITAMMNEVRKEIPDAKLVYNNSPSFNWTLNFRQQAFDTMVAEGKDVSSYVRADLMNVDYDTTELAAAADDKIRSFQADTAREAGIFHHLITLPTYHTAALSTDNLAKEYFGDAGMLGYVEGVQRKEIRQGIACVKHQNMSGSDMGDDHKEYFAGENALKAGGANNTSNQFS

SEQ ID NO: 35775 - protein, 225 aa, Glycine max
MSSNQASLNLNQAKFVLPTNNDLEQQQQQQQATTTLEIEADHEDIFDYSKRSQWLRAAVLGANDGLVSTASIMMGVGAVKHDIKAMILSGFAGLVAGACSMAIGEFVSVYSQLDIEVAQRKREKERGQRRKESLPNPLQAAAASALAFSVGAMVPLLAASFIREYKVRLGVIVAAVTFALVVFGWLGAVWGKAPVLRSALRVLFGGWMAMAITFGLTKLIGSSAL

SEQ ID NO: 35776 - protein, 592 aa, Neocallimastix frontalis
MLAPIQTIARPVSSILPATGALAAKRTFFAPSEVYNKKQVIVTKKTGLDILNDPKLNKGSAFTADEKDRLGIRGLVPPRPQSLEAQYKRCKTNLDKISDPLEKFIYLNHLQNRNETLYYKMILENFVELAPIIYTPVVGEACQKFHKIFTQTRGMYFSTADRGQMSAVAANWPYDDVDVIVVTDGSRILGLGDLGAGGMQIPIGKLTLYVCGGGINPRNVLPIVLDVGTNNKELLNDPLYLGMQHPRLQGEEFHAFVDEWVSAITDRFPKAVIQFEDFMMPNALDLLLKYKDQICMFNDDIQSTGAITLASVLATMRARGGTFADIKKETFLCLGAGSSGVGVCETIVDCIVAEGATREEAYAQFYMFDHKGLLGKGRDDLLPSQQVFMRKEIEGGKTPAELLKKIKPTCLLGLSTCPKLFNKEMLSYVASYCEKPGIFPLSNPTSRSECTAEEAVEFTDGNLIFASGSPFDPVEWKGKTIQTNQCNNSYSFPGIGLGLVSSRATRVPFETFQVCARVIASLGTPEMLATGKIFPDLDNLRAVSLEVGIEVAKMAERMNIATQFPPKGMDWREWLKHNMWQPEYPHIVVKNL

SEQ ID NO: 35777 - protein, 519 aa, Methanothermobacter thermautotrophicus str. Delta H
MMRCGEGYPGLILAKEDFIMKPVDMAAADINAEYLGVPRLSLMENAGRAVAEEIGNAVDSGRVAIFCGPGGNGGDGFVAARHLLNMGFEVEVHLLGHPERIGSEEALVNWGVLGAMQPHPGGFSVDFVRDSSEIKPTDADVVVDAILGTGVRGSIREPSRSAIEIINRSEAFRVSVDIPSGLNPETGAVEDIAVSADLTVTFHRMKDGLKLADPAVTGEIVVRDIGIPPAAEIFMGPGDLLRIPSRRPGSHKGENGRVLIIGGSRQYSGAPAIAAKAALRAGADIVMVAAPGSAARAIRSLSPDLIVRELEGGYIGMESLDEILELAEKADSVLMGCGAGRETSTARTFMRAIEDLHEMEKPIVLDADALRLMDYSDVSEYRELTVTPHMAEFSSFFKLKSMIFNDFRESVSAFQSISSRIRGTVLLKGRIDMIFQGDRLRLNKTGCPGMTVGGTGDALAGLTAGLRALGLSSFDSASLAAFINGMAGELAMERHGNGFTASDMVDMIPSVMDPGFYGF

SEQ ID NO: 35778 - protein, 367 aa, Pirellula sp. 1
MNVPDSLSSAGASSFRSYRFPAEWEPCEAVWLAWPHNRDTWPGHFEPVPAAFAQFVRAIHESTPVRILATGLVAEDCRKHLQQIGLVESDSLRIVDVPTNDCWIRDYGPTFVFGPDSEKIAVDWRFNAWGGKYEPFDSDAAAGAEIAKIAGLKRLDGGLTMEGGALETDGAGRLLVNPGCLVDPARNPGVSKEQVSQRLNQCLGVEEIVWVDGGAPAGDDTDGHIDQIARFLNRENVVCAVASSEVDENYPGLEANYRKLRLWSRQTEPAVTIHRLPTPPPREVDGAAVPQSYCNFLRLGMDRMLVPTFRSTASDQHALALLRELCPGVEVVGVDCFDIAWGLGALHCASCHEPAIARSPAAESSGG

SEQ ID NO: 35779 - protein, 304 aa, Triticum aestivum
MANFQITPRAAFVESNELNFRSLYLFHTPLGSNQNQSGIIDSNVTTGLGATVVNNWPICDGPSPGATVIARAQGLHIYAGNWQNTFSITFEVERFKGSTLQVMGISVEEGEWAIVGGTGQFAMAIGVIYKKFHEQRSDGNIIELTVHGFCPMLKGSQSLRTKVGPWGGNGGSDKDIVEAPRRLESITVSSGTIIDSIKFSYVDQAGQKRTVGPWGGSGGKQNTFVLGTSEFVKEVSGTFGLYGRDNHNIITSLKFVTNVKTYGPFGQAKGTTFTIPVQKNSSIVGFFGRSGIYLDALGVYVHPL

SEQ ID NO: 35780 - protein, 169 aa, Triticum aestivum
MAPIVMASSATSVDPFQGLKSTGGLPVSRRSNGASLGSVSNGGRIRCMQVWPIEGIKKFEILSYLTPLSTEALLKQVDYLIRSKWVPCLEFSKVGFIFREHNASPGYYDGRYWTMWKLPMFGCTDATQVINEVEEVKKEYPDAYVRIIGFDNMRQVQCVSFIAFKPPGC

SEQ ID NO: 35781 - protein, 340 aa, Bradyrhizobium sp. BTAi1
MLFPSTIAGSLPKPEWLAEPNVLWAPWKAKGEELARAKRDATILALKLQEDSGIDILTEGEQSRQHFVHGFLERVNGIDFAHKVEMGIRKDRYKAMVPQVVAPLALKGRVHGDEARIARTHTTRALKFTLPGPMTIIDTIADNYYGDRVKMAFAFAELLNQEAKALHDDGIDMIQFDEPAFNVYMDEVRDWGIKALERAAEGLTCPTAVHICYGYGIKANTDWKETLGSEWRQYEETFPVIDASSIQQVAVECRNSKVPIELLGLLKNKIVQAGVIDVASDEIETAEDVCKTIEDVMKVVPKENIIATTNCGMAPMRREVAEAKLSALGTGAKLARQRFA

SEQ ID NO: 35782 - protein, 977 aa, Arabidopsis thaliana
MYVWHYGTLKRYEFDVQNKVSINWLLTLFGSSNLGIVRVHGIGVINTELVSGIPAIFSHFITNPPAFHQVVVFLCVKSVPPPHVKPEERFLVGRVGPKEYPLYRCIARYGYRDVHKDDVEFENDLICSIAEFIRSDKPLNYSPDPENESGINERLTVVAASSSNLEGVQIYEDDGSDKQEPSSSSEVIMVAPSPRFKKRVRFVLPESARIDRSAEEELTELTEAREAGMAFIMGHSYVRAKSGSSVMKKIAINFGYDFLRRNSRGPCYGLSTPHASTLEVVSAKPPPVKIVSGLVTNVASILWKWLWSLQTSTTTTTTTKSGVSSRSMVKYESGYNMETVFDGSKLGIEPYAIEVSPNGGELIVLDSENSNIHKISMPLSRYGKPKLLSGSQEGYTGHVDGKLKEARMNRPRGLAMDDRGNIYVADTINMAIRKISDDGVSTIAAGGRWSGGSKEESMRFSDDFDLIYVSSSCSLLVIDRGNQLIKEIQLHDHDCSQPEPDTDSLHLGTALLVAAVFFGYMLALLVRRVRSLFSSSSHDTKSKRHVATPSMTMAPYQRYPRPVRQPLIPPQHESEKEEGFLGSLGKLVVKTGSSVSEMMSGSRNVIPPNFHQYHHQQEPNQWPVQESFAIPEEDGPPALEPRSGTNPDKPYLRAQGTNQNRSYYQDYDQYQNQQKRNVNDTASFEDNREKNEIVFGAVQEQDGRREAMVIKAVDFNEAINDQRNLRPRINYMGYSSQQNRWPEYEREIEDEEEEGDFLQEKEKIRVRVAEKQRGRRIRRIQIQALYSSLSLSLNLYDLSQNQSHCFMGLESFPISEMDATDEMHEAMFAKRGCCFILPCLGSSQPSGPNGSVWWQRIRTVDKLEPDERWWVSGWMKMREWSEIVAGPKWKTFIRRFGRNHCCNGGIDGGCNRPEHVSFRYDSWSYSLNFDDGKQTGHFEDEFPYRDYSMRFAAPSLPVSTKCSIDFDNDNHAPSLFK

SEQ ID NO: 35783 - protein, 54 aa, Hordeum vulgare subsp. vulgare
MASATFIEVILAIILPPVGVFLRYGLAVEFWICLLLTLLGYIPGIIYAVYVLVA

SEQ ID NO: 35784 - protein, 369 aa, Streptococcus pneumoniae TIGR4
MKYKRIVFKVGTSSLTNEDGSLSRSKVKDITQQLAMLHEAGHELILVSSGAIAAGFGALGFKKRPTKIADKQASAAVGQGLLLEEYTTNLLLRQIVSAQILLTQDDFVDKRRYKNAHQALSVLLNRGAIPIINENDSVVIDELKVGDNDTLSAQVAAMVQADLLVFLTDVDGLYTGNPNSDPRAKRLERIETINREIIDMAGGAGSSNGTGGMLTKIKAATIATESGVPVYICSSLKSDSMIEAAEETEDGSYFVAQEKGLRTQKQWLAFYAQSQGSIWVDKGAAEALSQYGKSLLLSGIVEAEGVFSYGDIVTVFDKESGKSLGKGRVQFGASALEDMLRSQKAKGVLIYRDDWISITPEIQLLFTEF

SEQ ID NO: 35785 - protein, 439 aa, Thermobifida fusca YX
MLDTGTTAWLLMSAALVMLMTPGLAFFYGGMARAKSVLNMMLMSFTSIAIVSVLWVLVGYSLTYSPGYGPLTHLIGGLGDFGSSGFVNAVDEEGGYPLLVDVGFQMMFAIITVALISGAIADRAKFGAWLLFVPLWSLFVYFPVARWVWGGGWFDQLADWFGASVVDFAGGTAVHINAGAAALALTFVLGRRKGFGSESMRPHNLPFVLLGAALLWFGWFGFNAGSAYGANETASLALVNTQVCTAAATAAWMLVERVRYGKVTALGFASGAVAGLVAITPAAANLTPVWAVVLGLVAGAVCAYAISWKFKFKYDDALDVVGIHMVGGIIGSLALGVFASATVGEGAPDGILFGGSPMFLLVQFIAVAATTLYSFAVTWLIAKAIDMAMGFRLPEHVETNGLDTELHAQSAYAFDELDTVELSSSLPPGEEKPSAQVRV

SEQ ID NO: 35786 - protein, 103 aa, Spinacia oleracea
MSSLPFVFGAAASSRVVTAAAAKGTAETKQEKSFVDWLLGKITKEDQFYETDPILRGGDVKSSGSTSGKKGGTTSGKKGTVSIPSKKKNGNGGVFGGLFAKKD

SEQ ID NO: 35787 - protein, 685 aa, Gibberella moniliformis
MSTMDPAKELDVTVPTMNMNMEDILDLLPVPTLVVSPSYRIQRASLGLLEAWGRKREVLVGQDLFTALYHGSPTERFDRIPFVYAIETALEARALRLCHAAYIANGISWTARIMPVHKGDELLCLVIEWEQAKPHTTTVNGEITQSWLPIDDAFRILVQAVKDYAIFLLDTRGNVMTWNTGAELNKGYKKEEIIGKHFTKFYGQEDIQSRKPERELEICLREGRVEDEGWRYRKDGSRFWANVVITAIYKNDIHVGFGKVTRNLTERKEAELRLTAAYEESTKLKNDFLANMSHEIRTPMHGVLSACSLLLDSRLTEEQRETANMIQESGHVLLRIINDILDYSKIAAGTFPIRNERLDIANVITSAVRRAQTTVQPGVSLKLELSSNLPKWAEGDALRYRQIFENILGNAVKFTEKGYISVHASLLAEDETSHTIQTEVWDTGHGITEVDAKELFKPFTQLDTPDQKRRPGTGLGLSIAKSLVELMGGNIGYKPNPQRQGSIFWFSFKVKKLSSLRQAEPITAPPGLGAELSQHQVQQGEDLATQLEQLLKISPTKRILAAEDNIINQKVLVGMLHGFGFKEITVVSDGAQAVSSLSAAADTFDLILMDISMPVMNGYEATLRIRRSSIRLPIIAMTAYALKGDMERCLEKGMDDYIPKPMDRQVLMRKLLKWLRKPDLSMRLD

SEQ ID NO: 35788 - protein, 555 aa, Photobacterium profundum SS9
MCSVFGILDIKSDPSALRATALEMSKKMRHRGPDWSGIYSSDKAILVHERLAIVDLNSGEQPLYNQDKTHILAVNGEIYNHKELSAEFAPDYPFQTESDCEIILALYKEKGPELLDYLNGIFGFILYDAVEDAYLIGRDHIGIIPLYQGYDEHGNYYIASEMKALVPICKTISEFPPGSFLWSKKGEPTRYYKRDWMEFETVADAPTDKVALKEALESAVKRQLMTDVPYGVLLSGGLDSSIISAITKKFAARRIEDDEKSQAWWPTLHSFAVGLEDAPDLKAAKIVADSIGTVHHELTYTIQEGIDAIRDVIYHIETYDVTTIRASTPMYLMSRKIRAMGIKMVLSGEGADEVFGGYLYFHKAPNKREFHEETVRKLLALNMFDCARANKSMAAWGIEARVPFLDKEFLEVAMRINPEDKMCGNGKMEKHILRECFEDHLPESVAWRQKEQFSDGVGYSWIDSLKEVAEAKVTEQQLETASFRFPYNTPTTKEGYMYREIFDELFPLESAAKCVPGGPSIACSSAKAIEWDESFKNSADPSGRAIAAVHNEAYK

SEQ ID NO: 35789 - protein, 381 aa, Prochlorococcus marinus subsp. marinus str. CCMP1375
MKKIPKTRIRKIRTWIPKAKAGRLLENINDKQFSSLLDLASNDYLGLSQHPNLIEAAKETMIAEGLGAGGSRLVTGSRPIHQALEKELSQWLNFESVLLFPSGFQANLAAVTTLANRKTPVIADKLIHHSLLVGIKASGAKLKRFSHNDINDLEKLIKISLKESPTQTPLVITESVFSMEGSSPDLEKIGELCNNYHAMLLVDEAHSLGVMGDQGRGLCYGLKNPVTMISGTFGKAFGGGGAFLATSDFYGEHIVQTSGAFRYTTALAPPLAAAALEALKLIKDNPGWGLALQKKSSLWRSTLIEHGWNVRIGNSPIIPLVLGSDEESLKKQTELEANGILTVAIRPPTVPEGTSRLRIVVRNNLPGEVLEQLLFYLGKKV

SEQ ID NO: 35790 - protein, 525 aa, Burkholderia sp. 383
MRIFRFIKIVYTVIRFGLDEVMLSRIDDRRVKLLLRITTIGRRYSDPPAVRLRHALESLGPIFVKFGQVLSTRRDLLSVDFANELAKLQDQVPPFDSAVAIGIIEKSLGAPVDELFDEFEREPIASASIAQVHFAKLKQGQHAGKAVAVKVLRPNMLSVIDSDLALMRDIAIWTERMWADGRRLKPREVVAEFDKYLHDELDLMREAANGSQLRRNFAGLDLLLVPEMFWDFSTSQVLVMERMTGVPISQVETLRSAGVDIKKLAREGVEIFFTQVFRDGFFHADMHPGNIQVSLDPNTFGRYVALDFGIVGALSDFDKNYLAQNFLAFFKRDYHRVATLHLESGWVPPETRVEELESAIRAVCEPYFDRALKDISLGQVLMRLFSTSRRFNVEIQPQLVLLQKTMLNVEGLGRSLDPELDLWKTAKPYLERWMTEQIGLRGWYERFKVEAPQWSKTLPQLPRLIHHAMAARHDAPRAASEDLMRQILVEQKRTNRLLQALLIFGLAVGVGALVARVLILLAYGA

SEQ ID NO: 35791 - protein, 395 aa, Dichomitus squalens
MAFKWSSILALVTLATLASAAPTQSTVTCSDGTVVPDSVCCEFIPLREALNDQVIQSDCGEDAHELLRLTFHDAIAISQSLGPSAGGGADGSMLLFPTVEPAFFANLGIADSVNNLIPFMSQFPNISPGDLVQFAGAVAITNCPGAPQLEFLAGRPNGTAPAIDGLIPEPQDSIDDILARFDDAGGFTPFEVVSLLASHTVARADHVDPTLDAAPFDSTPFTFDTQIFLEVLLKGTGFPGTDNNTGEVASPIPVTNGTDVGELRLQSDFGLAHDSRTACFWQGFVNQQDFMAQSFKAAMAKLAVLGHNAADLVNCSAVIPTPLPATGKPATFPATLGPDDLELSCTTEPFPSLTTDPGAQETLIPHCSDGSMDCESVQFDGPATNFGGDDDDDDS

SEQ ID NO: 35792 - protein, 329 aa, Saccharophagus degradans 2-40
MKIGLFSSKKYDKVVFHQINSGQHEITYHPVRLNKDTVKLASGFEAICCFVNDEIDASVIASLSNMNVKLLALRCAGFNNVDLPAAKANNLPICRVPEYSPHAVAEHTCALILDLNRNIHRAHNRIRENDYSLDGLLGFDLHGKTVGVIGAGKIGRAFIKIMLGFGCNIQVCDPDYAQPDNPKIKKGDLDDVLQNSNIISLHCPLVPSTHHMINQAAIDKMKPGVMLINTSRGGLVDTSAVIRALKNKKIGHLGLDVYEEESEMFFEDFSDTFIQDDVFARLQTFPNVTITGHQAFFTKEALEKIARTTLTNIEHFQRGEFDKVHFVST

SEQ ID NO: 35793 - protein, 2072 aa, Gibberella moniliformis
MQRATSPVGDDIISIPSPSRQQDLTTLASPTPILPSFSLAEKLPVSAIRNGSVMPESTSNSTINATATPTARDAMTTDRHPSHPPSSPLDAQSKEPRVHNNMIGDPTDEGTVSVTKGSGNTVEPLAALAGTDALSPRRVGFGGAPFPTQASSQKQLNEYREKLARDLERREMSARGLMASPNEKNRVSPIPEEGLSSSPLQTSALTTTSTESNATVRGAPTPGPIAGTPSYPFPRMAPAGFVPSYLHRPFTTLSPTGAPRSFSYGSFDALGMAAQDKVLSSTSTPASNFTFNPSAMSPQPENLDFPNPNLYDLSLMLAAEPGLDAWWSNVVQIMRDVYKAERVTLAIPADTTDIENVPWGQKATFNLHKEDDLSLGYIAAKQSSSVVMSTGDYDRSWPGSSTTPPISDDNLHAKSASRPNLFSRHSFTTYEDKRERTRTPPNSQARRPAFLARSQSNYPAGPASKESYLDYAKLNKMTLDEHDAIEQQIPSWEAPLMGEKESQGRVLPVLQALDYEADPLIDHSGIMRVLERGRAIALTRSYPYLADEAPAESSKKPKPAAPEPSSTTPRNFAKPRSDSFSKLSSMFNSASSSRVPTRSKTHSAADRAKSIASRLEGRLEDDMPRPPTPKYEEFEQAPPSPWSQSPAPSPAVRADPKENPFFTDAMVDEDSFNPDTGTEDYTGMRPPEAIGVDNSWTVLHIPLSHVLLSKPTRTFKLDSTLMEQRSHARTKSENVPAPSEEGGRNTPDSLKRDKPAPIAILSILSPIIPYPSNLKHSLEHLAPHMATTFSLCRHYSNLETELAGLQRKRPQTTGFGAVAHDGRPLESMAYLTADDVVPHQSLAGSMTSPSDYSGVSKSATGSPLGTPGWDQGSGGFHADKRPPPTSSPAATPQGEGYFSSRQRPVPARHETFGGIGTSRARTSSKDTSPAEKRSIRVSGSFLTQESPEQNSAADNKATRTSSDESTGGLTKKSSQVDAPDVSIDTLDPTNNDDTAEDMADSTKTGRGTRQGHSMLHSYGADFASTFQSLPPSSTLSARPTPVSAPSRSGSLTTTAVDMPPPSDRLKGLILDSLPAHVFVALPQTGEIVWVNSRYLSYRGQTATDLAADPWGSLHPDDRDDYLKAWGHSIRTGEQFSRTVRIKRFDGAYRWFYARAVASKDKRGVIMQFLGSYMDIHDQHIAELKAARQEEIEASEAKHRLLANLIPQIIFTATEDEGITFANEQWLSYTGQSFSDSLGLGFMDFVHPDDLAKCRIPSTQPSTPGGIRREGHSKIYRQGSAQSEAASTATIQPPKSQTPQDSPLRNVQQALSRNNSSSSSSAYDWPAADLTELARKGIIKVATDSAGRVSYTTEVRLLSKTGEYRWHLIRCVEIDTIDFGSGASSYFGSATDINDHKLLETKLKEAMETKGRFLSNMSHEIRTPLIGISGMVSFLQDTTLNEEQLDYTNTIQTSANSLIMIINDILDLSKVDAGMMKLKYEWFHTRSIIEDVNELVSTMAIAKRLELNYLVEADVPAWVKGDKVRIRQVLLNVTGNAIKFTSEGEVFSRCRVYVAEGSHVDENEIMLEFSVTDTGRGFSKEEAELIFKPFSQIDGSSTRQHGGSGLGLVISRQLAELHGGSMTGRATLGKGSTFTFTARFGLPTADDHPNLPDSPPATGAFTPRPEMVDNVPSTIKPLPPPKHLRNAEGASPGGTTSEFTSPGGLSVGSSNPSVRSAKSQVTDRSSATSVTGGLARFSEAAKASGQDLSQMKLEMPSGRSSPGTHLLPGSGSPEDFRPPMYSILIICPQFHSREATTQHIEMTLPKDVPHQITALASVNEAQTLIGGEDPIKFTHIVINLPSAEAIIGLMDDITKSQTIDKTTILVLSDSVQRQAVIKLAANTKYEQLLSDNMVTFIYKPVKPSRFAVIFDPNKMRDLSIDRNRSTAQQMVENQKASYQEIERRMGNKGYKVLLVEDNPVNQKVLMKYLKKIGVDVEIAVDGAECTNMVLSKPHKHYSLILCDLHMPRKDGYQACREIRQWEIANNFPPMPIIALSANVMSDVQDKCVAAGFSDYVTKPVDFIDLSRAMSKFF

SEQ ID NO: 35794 - protein, 749 aa, Legionella pneumophila str. Paris
MFKRTIPLFAAFTLAISPSVFPNYAYAQEDKPKTNQYWWPKMLDLSPLRQPNATSNPMGEQFNYAEEFNSLDLNAVIEDLKKLMTTSQDWWPADYGNYGPLFIRMSWHAAGTYRIYDGRGGANGGFQRFAPQNSWPDNANLDKARRLLWPIKQKYGRKISWADLLVLAGNVAMESMGFKTIGFAGGREDAWEAININWGPEGKWLESKRQDKDGKLEKPLAATVMGLIYVNPEGPNGVPDPLAAAEKIRETFGRMAMNDEETVALIAGGHAFGKTHGAASGKYLGPAPEAAGIEEQGFGWKNSYGSGKGKDTITSGLEGAWTVTPTHWSHNYLQNLFNFNWVKTKSPGGAIQWVPENSNASSMVPDAFDPSKRHAPVMLTTDLALKFDPVYSKIAKRFLDNPKEFDDAFARAWFKLIHRDMGPRSRYLGSLVPKEIMIWQDPVPPVDYKLVDANDIANLKGKILNSGLSTSELVKTAWASASTFRGTDMRGGANGARIRLSPQKDWPANDPQELAKVLKTLESIQNNFNNAQADGKKISLADLIVLGGNAAIEQAAKQAGYDIIVPFMPGRTDATQGMTDVKSFEVLEPKADGFRNYFDKSNNMSPPEMLVEKASLLKLSVPQMTVLVGGMRVLNANTGQNQYGVFTDKPGTLNNDFFVNLLSMSTEWKKSSETEGIYEGYDRKTGKLKWKATSVDLIFGANSELRAVAEAYATDDAKEKFIQDFVNAWVKVMTADRFDIKAANTNINS

SEQ ID NO: 35795 - protein, 163 aa, Arabidopsis thaliana
MAESGGRRIGVAVDFSDCSKKALSWAIDNVVRDGDHLILITIAHDMNYEEGEMQLWETVGSPFIPMSEFSDAAVMKKYALKPDAETLDIVNTAARKKTITVVMKIYWGDPREKICAAAEQIPLSSLVMGNRGLGGLKRMIMGSVSNHVVNNVACPVTVVKAHI

SEQ ID NO: 35796 - protein, 390 aa, Dichomitus squalens
MAFKLWSMLPLVALATVAVAAPSRQTVCSDGTVVPDSVCCEFVPLAQALQKEVLMGDCGEDAHELLRLTFHDAIAISRSKGPSAGGGADGSMLIFPTVEPAFFANLGIADSVNNLIPFLSQFPKISAGDLVQFAGAVAVGNCPGAPQLEFRAGRPNATAPAIEGLIPEPQNNITEILERFDDAGGFSPFEVVSLLASHTVARADHVDPTLDAAPFDSTPFTFDTQIFLEVLLKGVGFPGTGNNTGEVSSPLPVSSGTDVGELRLQSDFGLAHDERTACFWQGFVNEQEFMAQSFKAAMAKLAVLGHNADDLVDCSAVVPKPKPATGKPASFPATKGPKDLELSCTSKKFPTLTTDHGAQETLIPHCSNGSMNCTTVQFDGPATNFDGDDS

SEQ ID NO: 35797 - protein, 464 aa, Bacillus cereus ATCC 14579
MDKNLKKDLKIRHITMISIGGVIGAGLFVGSGAVVHSAGPGSIVSYALAGLLVIFVMRMLGEMAAVNPTSGSFATYAREAIGPWAGYTIGWLYWFFWVIVIAIEATAGAGIIQYWIPQIPLWLLSLILTILLTLTNVFSVKSFGEFEYWFSFIKVISIVLFLCLGLAVILGFVPGTEAPGTSNLIGQGGFMPNGISSVLLGITVVIFSFMGSEIVAVAAGESAEPVKAVKTATNSVIWRILVFFIGSIAVVVTLLPWNSANILKSPFVAVLEHIGIPAAAQIMNFIVLTAVLSCLNSGLYTNSRMLFSMAERGDAPKSFLKLNSSGVPVRAVLFGTFFAYIGVVFSYISPDKVFLFLVNASGGIALLVYLVIAVSHLKMRKKMGKVEQQNLKVKMWLFPYVTYVTIAAIIAVLVAMFAIDTLRSQALLTMFVTVLIILSYFIFNRNKNSTVLNPKSKNEESVRF

SEQ ID NO: 35798 - protein, 270 aa, Methanococcoides burtonii DSM 6242
MKRGYKVETIKIAAIQMDICHCNKQKNIKKALHFSEEAISKGADIIVLPEVFSTGFCYEELENIAESGSYPTIKELEVFSKKNKCIIVGSIIEKHSSKNRETYTNLGFCLEDGELVGTYTKTHPFGKEKEYFTSGDVIEPIHLKERDLTVGLQICYEMRFPEIARKLCLSGADILMTIAEFPNPREHQWRTLATARAIENQVFHIACNRSGSDPTSTFFGGSMIIDPLGNVIADAKDGECVIIEEIDTSIMKKTRKEIPVFDDRRPDIYK

SEQ ID NO: 35799 - protein, 658 aa, Xanthomonas campestris pv. campestris str. ATCC 33913
MGSESGIGNGESQQQFAGNEMREETAFAIPDSPLPNPSAISTYLQQHESKPLLRFITCGSVDDGKSTLIGRLLYDSKRLFDDQLAALESDSKRHGTQGEGIDYALLVDGLAAEREQGITIDVAYRYFDTDQRKFIVADCPGHEQYTRNMATGASTADVAVVLVDARKGVLVQTRRHSYIVSLLGIRHVVLAVNKMDLVDYDAQVFATIVDSYRALAAQLGIADVQCIPLSALAGDNLSSASTRMPWYQGPHLLQHLDSVQLETPDAVSGLRLPVQWVNRPNAQFRGYAGTIAAGQVRSGDVVVVVPSGRRAHVASVLDANGVVDSARAGQAVTLTLREEIDISRGDIIAAVDDPPEVADQFAAHVLWMDDAALLPGRPYWLKIGTRTVAASISEIKHKVDVNTQERLAAKRLELNEVGYCNLSLDEPIAFAPYARNRVLGGFILIDRQTNATVAAGALEFALRRAGNVHWQHLDVDRAARARIKGQAPRVLWFTGLSGAGKSTVANLVDKRLHALGYHTFILDGDNVRHGLNRDLGFTDEDRVENIRRVAEVARLMADAGLIVLVSFISPFRAERQLARERFDSGEFVEVFVDVPLAVAEARDVKGLYRKARAGQIPNFTGIDSPYEAPERPEIHLHADGENVEALARHVLEYLGLER

SEQ ID NO: 35800 - protein, 694 aa, Sinorhizobium meliloti 1021
MNVSQQIGPRAAASERSMADAIRFLSMDAVEKANSGHPGMPMGMADAVTVLFNRFIRIDPSHPDWPDRDRFVLSAGHGSMLLYSLHHLIGFADMPMAELSSFRQLGSKTAGHPEYGHALGIETTTGPLGQGISTAVGMAIAEQMMAARFGSALCNHFTYVVAGDGCLQEGISHEAIDLAGHLKLRKLVVLWDDNRISIDGSTDLSTSMNQLARFRAAGWDAQAVDGHDPDAVAKAIERARRTRKPSLIACRTRIGKGAASMEGSHKTHGAALGEKEIAATREKLGWPHPPFFVPPEIKAAWEKVATRGRTAREAWEIRLDASRSKKRYEQTVERKLDGEVGDLLARFRGAHRTRATKVATRQASQMALEVINGATALTIGGSADLTGSNLTLTSQTQPISPGNFKGRYLHYGIREHGMAAAMNGIALHGGFIPYGGTFLVFSDYARGAMRLSALMGLPVIYVLTHDSIGLGEDGPTHQPVEHLAMLRATPNLNVFRPADIIETAECWEIAIGEKNTPSVFALSRQALPMLRRTDGNENLSALGAYVLREARGDRDITLLATGSEVEIAVAAAERLQAEERIAAAVVSMPCWEKFEAQDAAYHRQVLGDAPRIAIEAAGRLGWDRWMGPDSAFVGMTGFGASAPAGDLYRHFGITADHVVAEALELLRRACPETPPIGARTGKPVAHIVRSSEEA

SEQ ID NO: 35801 - protein, 425 aa, Arabidopsis thaliana
  misc_feature (29)..(29): Xaa can be any naturally occurring amino acid
  misc_feature (53)..(53): Xaa can be any naturally occurring amino acid
  misc_feature (111)..(111): Xaa can be any naturally occurring amino acid
  misc_feature (115)..(115): Xaa can be any naturally occurring amino acid
  unsure (1)..(425): unsure at all Xaa locations
NTFVRLWVILRQTKSLKLMGFPIIYDSDXCDYSLSGEKSFGGCAIGDADQITXIQEQQSYLYDRCVDSSNSHSLINEIGRDNSIDCLIRCSRSDYGSIASLNRNFRSLVSXNEFXGLRLQHGFVEHWWVYFSWQLLEWVAFDPVERRWMQLPTMPSSVTFMCADKESLAVGTDLLVLGKDDFSSHVIYRYSLLTNSWSSGMKMNSPRCLFGSASLGEIAIFAGGCDSQGKILDFAEMYNSELQTWITLPRMNKPRKMCSGVFMDGKFYVIGGIGGADSKGLTCGEEYDLETKKWTQIPDLSPPRSRADQADMSPAAEAPPLVAVVNNQLYAADHADMEVRKYDKENKKWLTVGRLPERAGSVNGWGLAFRACGERLIVIGGPKCSGGGFIELNSWIPSDGGPPQWTLLDRKHSPTFVYNCAVMGC

SEQ ID NO: 35802 - protein, 607 aa, Bacillus thuringiensis serovar konkukian str. 97-27
MCGITGWVDWKEDLSNQHVILKKMANRIQHRGPDAEGFWFSPRAAFAHRRLIVIDPEGGTQPKTFRAGDYTYALTYNGEIYNFRELREQLRKCGHLFETHSDTEVLLHAYLEWKEDCVQHLNGIFAFALWDDQKQRLFLARDHLGVKPLFYTERNNSIIFGSEIKALLAHPSVPAEIDADGINEIFGLGLFRTPGCGVFKHIQEVRAGHSITFTRDKKVVTKYWNLESKIHTDSIEDTSSRILSILQDTVKRQLIADVPLVCMLSGGLDSSGITALAGKEFAAENKTLHTYSVDFVNSAKDFELTFARTGLDAPWVKRVSEHVGTSHHDIIVNAEELANHLFVPLRAKDLPSAGEMETSLYLLFCEMKKDATVALSGESADEVFGGYPWFHQEELLYVDKFPWLTNWKTTSPLLLHEVSNQCNLENYIDTRFQEAILEVPTLEGESKKSAKQRQMFYLFLTRFLPFLLDRKDRMSMAVGFEVRVPFCDYRLVEYLWNVPFNIKSIDNIEKGILRRALKPALPDDVRNRRKSAYPTSQDPHYLQTIRNLTLEMCSNKNSPIFSLINHSTLLAIADGSNKEINNFEARSAMEYMLQVNEWLKTYHIHIA

SEQ ID NO: 35803 - protein, 422 aa, Oryza sativa
MLAVSPAMCPDIEDRAAVAGDAGMEVVGMSSDDMDQFDFSVDDIDFGDFFLRLEDGDVLPDLEVDPAEIFTDFEAIATSGGEGVQDQEVPTVELLAPADDVGVLDPCGDGAAAVEAKSSSPSSTTSSSQEAESRHKSSSKSSHGKKKAKVDWTPELHRRFVQAVEQLGIDKAVPSRILEIMGIDSLTRHNIASHLQKYRSHRKHMIAREAEAASWTQRRQIYAAGGGAVAKRPESNAWTVPTIGFPPPPPPPPSPAPIQHFARPLHVWGHPTMDPSRVPVWPPRHLVPRGPAPPWVPPPPPSDPAFWHHPYMRGPAHVPTQGTPCMAMPMPAARFPAPPVPGVVPCPMYRPLTPPALASKNQQDAQLQLQVQPSSESIDAAIGDVLSKPWLPLPLGLKPPSVDSVMGELQRQGVANVPPACG

SEQ ID NO: 35804 - protein, 562 aa, Colwellia psychrerythraea 34H
MPQSQRPLYIPYAGPSLLETPLLNKGSAFSKEERGSFNLTGLLPPRFESIDEQAERAFRQYSCFQTNINKHIYLRAIHDNNETLFFKLVQNNLAEMMPIIYTPTVGDACEQFSDIYRSSRGLFISYEDRFNIDDMLRNATKNKVKVIVVTDGERILGLGDQGIGGMGIPIGKLSLYTACGGISPAHTLPVMLDVGTNNQKLLDDPMYMGARHKRIDQDSYDEFLELFISAVKRRWPNVLLQFEDFAQPNAMPLLQRYKDRICCFNDDIQGTASVTVGTLLAACRSKGSKLSELNVAFVGAGSAGCGIAEQIISQMMNEGLGAEQARSQVFMVDRFGLLTQGMGELRDFQQKLVQSNEAIAEWDIAGEFASLVEVMHGAKPDILIGVSGQAGLFTEKVITAMKSHCEMPIIFPLSNPSRQVEATPSQVINWTQGQVIIATGSPFDPIEYQGKTFPIAQCNNSYIFPGVGLAVVAANISRITDGMLQVASETLAAASPLANGESDELLPPLTSIAQLSRDIAFAIAKVAYKQGLALELTDDELLAKIEHNFWKPEYRQYRRTSL

SEQ ID NO: 35805 - protein, 252 aa, Glycine max
MMAASSSSATVAVEKATSDLLMGPDWTMNIEICDSINSNHWQPKDVVKAVKKRLQHRSSRVQLLALTLLETMVKNCGDYVHFQIAERNILEEMIKIVRQKADMQVRDKILILLDSWQDAFGGPGGKHPQYYWAYEELKRSGVVFPKRSPDAAPIFTPPPTHPNLRNMQAGYGMPSNSSKTLDETMATEIESLSLSSLESMRHVLDLMSDMLQAVNPGDHAAVKDEVIIDLVDRCRTNQKKMMHMLTTTGDEE

SEQ ID NO: 35806 - protein, 394 aa, Aeropyrum pernix K1
MSQQPECRVEGNYIIVPKGLVNVIVDETRISGVDPKGEATIYRGYTIEDIGEHASFYEAAHLILFGRLPCDEELKEIKSKIDKYRGQIPEKLFDAMKHVPVTHPMYYGIYGTALLGQYYAPEWRFDEDFLYDHALRLTAQLPVIFTTGWNLAHHGTFLRPDPSKDHAWDVLRMIVMREPSDIEARAFESTLVLYMDHGFNASTFTTRVIGSTLSDLYSAVAGGIAALKGPLHGGANEKAMEMFLDAMKKAEEKGVPLYDYIEEYIKEKLARKEKIMGFGHRIYKLHDPRTDVAAKFVAKLKDGEFWMKVLKKAEEVMWREKKIPANIDLYTAVLYYQLGIPIPMYTPIFAMGRVVGWSAHYIEQVLNNKLIRPTEKYVGPTGLKYQPIEERCRK

SEQ ID NO: 35807 - protein, 859 aa, Picea abies
MALLSSSLSSQIPTGAHHLTLNAYANTQCIPHFFSTLNAGTSAGKRSSLYLRWGKGSNKIIACVGEDSLSAPTLVKREFPPGFWKDHVIDSLTSSHKVAASDEKRIETLISEIKNMFRSMGYGDTNPSAYDTAWVARIPAVDGSEQPEFPETLEWILQNQLKDGSWGEGFYFLAYDRILATLACIITLTLWRTGEIQVQKGIEFFKTQAGKIEDEADSHRPSGFEIVFPAMLKEAKVLGLDLPYELPFIKQIIEKREAKLERLPTNILYALPTTLLYSLEGLQEIVDWQKIIKLQSKDGSFLSSPASTAAVFMRTGNKKCLEFLNFVLKKFGNHVPCHYPLDLFERLWAVDTIERLGIDRHFKEEIKDALDYVYSHWDERGIGWARENPVPDIDDTAMGLRILRLHGYNVSSDVLKTFRDENGEFFCFLGQTQRGVTDMLNVNRCSHVAFPGETIMEEAKTCTERYLRNALEDVGAFDKWALKKNIRGEVEYALKYPWHRSMPRLEARSYIEHYGPNDVWLGKTMYMMPYISNEKYLELAKLDFNHVQSLHQKELRDLRRWWTSSGFTELKFTRERVTEIYFSPASFMFEPEFATCRAVYTKTSNFTVILDDLYDAHGTLDDLKLFSDSVKKWDLSLVDRMPQDMKICFMGFYNTFNEIAEEGRKRQGRDVLGYIRNVWEIQLEAYTKEAEWSAARYVPSFDEYIDNASVSIALGTVVLISALFTGEILTDDVLSKIGRGSRFLQLMGLTGRLVNDTKTYEAERGQGEVASAVQCYMKDHPEISEEEALKHVYTVMENALDELNREFVNNREVPDSCRRLVFETARIMQLFYMDGDGLTLSHETEIKEHVKNCLFQPVA

SEQ ID NO: 35808 - protein, 345 aa, Candida albicans SC5314
MSGETVFVTGATGYIAQHIIKQLLSKGYSVIGSVRSQSKGEQLKELITAHHQDTTGDAKFDYVIVESLIEPGAFDSILQNHKEVGVFIHSASPIPFATDSVEKDILQPAIDGTKNVLTSIKKYGNENIKKLVITSSIAAVEPLGTGQTEPKTISEKDWNPITFEQGLANPAVAYYASKTLAEREVWKFVDENKNQLNFDVAVINPSFVFGPQAFGIKDKSAALRSTGEIINSVLKLKSNDPIPSLVASFIDVRDVARAHIIAFEDDDAIGQRLILDNEIFTKELIAHLIKKNFPSLDIPEGDIVKSEEEIANYPWRVDSTKTEKILGFKYISLDKSVVDTVNQLI

SEQ ID NO: 35809 - protein, 328 aa, Brucella melitensis
MTILVTGGAGYIGSHTCVQLIEAGHEVVVVDNFDNSHPEALHRIEKITGPGDIAIVALMEQMIKRHKCTAVIHFAGLKAVGESSEKPLLYYDCNVLGTLRLLQAMEVTGVKKLVFSSSATVYGVPGKLPITEDQPLSATNPYGRTKLVIEDMLRDLYNSDNSWAVAILRYFNPVGAHESGLIGEDPNDSQQSDAIIAQVATGQTVKLNIWGNDYPTPDGTGVRDYIHVNDLAAGHLKALKKLDKPSASSVNLGTGQGYSVLDVIKAFEHVSNREIKYEIAPRRPGMLPECYADPGFAKKFLGWSAEKNLREMCQDMWNWQSKNPTAYE

SEQ ID NO: 35810 - protein, 388 aa, Candida albicans SC5314
MTDKTNFPTTVFVSGASGFIAQELIKQLIIKGYNVIGSVRSTTKGESIKSNLTSSSTTQSLNSDLFNYTIIKDISSPGAFDNVLKQYPEIEIFLHTASPFHFKAGNIEQELLIPAINGTKNALLAIKQFGHKIKHVVITSSVVAVGKFGKFPRTSTGSTSLSSSVVVADENSWNPITWEMSLKNPFYGYFGSKTFAEKEVWIFLQIENPKFNITTINPGMVLGPQAFPINNHNGGGAGAGGTNNLELNTSSQEIVRLLNLSTVDDVNKVKISTKVENTFIDVRDVAKAHIIAFEKPQLTKNKRLLLIEDIYNEQTLLNIINNNFPQLNLPKGEPITGQIDESKLNNTWNTTQTKTIFGDKYIGIEKSVIDSVNQILEAKNEGNPQCKL

SEQ ID NO: 35811 - protein, 389 aa, Trichodesmium erythraeum IMS101
MAKNLLEQLRKVTIVVADTGDIQAIEKFQPRDATTNPSLITAAAQMPQYQEIVDETLKTARQELGTDATASDVANLAFKRLAVAFGLKILQIVPGRVSTEVDARLSYDTEATIAQGRDLIAQYEEAGVSRDRILIKIASTWEGIKAAEVLEKEGIHCNLTLLFGLHQAIACAEAGATLISPFVGRILDWYKKETGRDSYPPAEDPGVLSVTKVYNYYKKFGYKTEVMGASFRNTGEITELAGCDLLTISPGLLGELESTIGELPTKLSDEKAAQSDAEKILMDKETFDQMHAEDRMASQKLDEGIKGFSKALESLEKLLAERLTRLEGVTHAAEDIFYIYDLDGDGFITREEWAGSDAVFDALDINKDGKISPAEMASGLGAVFELAKV

SEQ ID NO: 35812 - protein, 644 aa, Xanthomonas axonopodis pv. glycines
MSTCPIDPPALRAAFAGPLDPQHAEVLLSRYDQHASRLLDALHALYGQRADYASWLAQWLGEVGDIARQRPQALQTLDSTRHAGWFGQPHMLGYSAYADRFAGTLQGVAERVPYLQELGVRYLHLLPFLRARAGDNDGGFAVSDYGQVEPSLGSNDDLVALTSRLREAGISLCADFVLNHTADDHAWAQAARAGDARYLDYYHHFADRTVPDRYEATLGQVFPHTAPGNFTWVDDTAQWMWTTFYPYQWDLNWSNPAVFGDMALAMLRLANLGVEAFRLDSTAYLWKRIGTDCMNQSEAHTLLVALRAVTDIVAPAVVMKAEAIVPMTQLPPYFGSGVDEGHECHLAYHSTLMAAGWSALALQRGDILHNVIAHSPPLPRHCAWLSYVRCHDDIGWNVLQHEACGNAAQPPFSLRDVARFYANAVPGSYARGESFQSSGDGVHGTNGMAAALAGIQAAQEAGDAAALAVAVDRLVLLYAIALAMPGVPLIYMGDELAMVNDPGYRDDPHRQHEGRWLHRPAMDWQLAAQRHDAKSLSGTVYRRLRGLIRQRAALGALAADQALASIALNDPRVFALTRGDSFIALHNFSDQLLDVELAAIGVDGWTLLAIDDAIGGAAARGDGSIVLPPYGVRWLQRGTEHAPE

SEQ ID NO: 35813 - protein, 361 aa, Glycine max
MGIYLSSPKTEKFSEDGENDCLRYGLSSMQGWRATMEDAHAAYTDLDESTSFFGVYDGHGGKVVAKFCAKFLHQQVLKSETYLTGDIGTSLQKAFLRMDEMMRGQKGWRELSILGDKINKFTGMIEGLIWSPRSSDGNCQVDDWGLEEGPHSDFAGPTSGSTACVAVIRNNQLVVANAGDSRCVISRKGQAYNLSRDHKPDLEIEKDRILKAGGFIHAGRVNGSLNLARAIGDMEFKQNKFLPAEKQIVTANPDINTVELCDEDEFVVLACDGIWDCMSSQQLVDFVREQLHLKTKLSAVCESVLDRCLAPSTAGGEGCDNMTMIVVQFKRPAQSSAPAEEQSSSSNGQAEPETKLERSES

SEQ ID NO: 35814 - protein, 176 aa, Thermus thermophilus HB27
MPEEIATLAGGCFWCTEAAFKLLRGVLEVVPGYAGGHVPHPTYEEVCTGTTGHREAVQVRFDPGVLPYADLLRYFFAVHDPTSEDRQGPDVGPQYSPAIFYHSEEQKRVAEAVMRELAPLYPKPIATKLLPFTTFYPAEAYHRDYFARHPEAPYCRLVIAPKLEKARKAFKSLLRP

SEQ ID NO: 35815 - protein, 697 aa, Schizosaccharomyces pombe
MTEQIKKTFLKAKEENKNVLVTFVTCGFPNVDETIKIMQGLQNGGAGIIELGIPFSDAVADGPTICKGNEIALKNNITLEKVFETVKLARDAGVTIPIILMGYYNPIFSYGDAKTIQKAKEVGANGFIIVDLPPEEAVGFREECKKQGVSFVPLVAPSTTDRRMELLASVADSFIYVVSRMGSTGSSATGVINTALPQLCQRVRKFAGDTPLAVGFGVNTSEHFHQVGSVSDGVVVGSKIIDLILKAEPGTAATVVEEYCKYLTKEDPSAPVPKQFQSGGSVATAPPAAVVEPINEMYLPQKYGMFGGMYVPEALTQCLVELESVFYKALHDEKFWEEFRSYYEYMGRPSALDYAKRLTEYCGGAHIWLKREDLNHGGSHKINNCIGQILLAKRLGKNRIIAETGAGQHGVATAICAAKFGMKCTIYMGAEDCRRQALNVFRIRLLGAEVVPVTSGTQTLRDAVNEALKAWVEQIDTTHYLIGSAIGPHPFPTIVKTFQSVIGEETKAQMQEKRKKLPDAVVACVGGGSNSIGMFSPFKADKSVMMLGCEAGGDGVDTPKHSATLTMGKVGVFHGVRTYVLQREDGQIQDTHSISAGLDYPGVGPELSELKYTNRAEFIAVTDAQCLEGFRALCHLEGIIPALESSHAVYGGMELAKKLPKDKDIVITISGRGDKDVQSVAEQLPILGPKIGWDLRF

SEQ ID NO: 35816 - protein, 703 aa, Debaryomyces hansenii CBS767
MNQIEDLSLKTIRCLVSDLVQQYNGGHPGGAMGMAAIGIALWKYILKYNPKNANWFNRDRFVLSNGHTCLFQYVFLHLVGYESFTMNQLKKYHAPEVSQCAGHPEIEFEGIEVTTGPLGQGIANAVGLAIASKNLAANYNKPDLDLVDNKIYCMVGDACIQEGVGLEAISLAGHLGLDNLIVIYDNNQITCDGSVDLANSEDINAKFMAQKWHVLTVDDGSFDLRSILAAIEQAKSVKGLPILINIRTIIGVDTNVANNAKAHGAAYGVEEGRRLKALYGFDPDQFIEVPKLVYDFFREGNEGAISKGVFHQEQWEKKLEAYSKKYPQLYEEVVSRINGKLPTDWKESLPHSLPTDATASRKASGLVFTPLAAKYPQFLVGTADLSPSVNLLWPHKKDFQNPEIKTDCGINGDYSGRYLHYGIREHAMCAISNGISAYSKGAFIPITSSFFMFYLYSAPAVRMGALQNLQVIHVATHDSIGTGEDGPTHQPIALASFYRSLPNCLYVRPADNEEVAGAWELAIETTNKPTIISLSRQNLKQYPGITDRNKVKFGAYVLKEFDSSSDSQKLQIISVGAESQFAIDAAEILIESNINVKIISFPCQRLFECQSTEYKRSVLDPQIVTVAIEAYASNGWERYANAGFHLNEFGISLPGKNAYEHFGFNGAYIASKIQKYLDDLQKDDIMKFEYQELNITKNHHSSS

SEQ ID NO: 35817 - protein, 327 aa, Lycopersicon esculentum
MCGGSIISDYIDPSRTSRRLTAEFLWGRFDLGKKQKNPNNYHSKAKHLRSEVVDDFEADFQDFKELSDDEDVQVDVKPFAFSASKHSTGSKSLKTVDSDKDAAADKSSKRKRKNQYRGIRQRPWGKWAAEIRDPRKGVRVWLGTFNTAEEAAKAYDIEARRIRGKKAKVNFPDEAPAPASRHTVKVNPQKVLPEESLYSLQSDSAIMNSVEDDHYDSFGFFEEKPMTKQYGYENGSSASADTGFGSFVPSAGGDIYFNSDVGSNSFECSDFGWGEPCSRTPEISSVLSAAIECNEAQFVEDANSQKKLKSCTNNPVADDGNPRYYGT

SEQ ID NO: 35818 - protein, 456 aa, Photobacterium profundum SS9
MTFGLTKGTTKGGPYWIRIIIIAKEIVMADKKATLHIEGKAPIELPILGGSQGPDVIDVRKLGASGYFTFDPGFLATASCESQITYIDGDKGILLHRGYPIDQLANNADYLEVCYVLLYGEVPTRAQYEFFRTTVTRHTMVHEQIASFFHGFRRDAHPMAVMCGVVGALAAFYHDSLDINNDSHREITAFRLLSKMPTLASMCYKYSIGQPFIFPRNDLDYAENFLHMMFATPCEEYDVSPVIARAMDKIFTLHADHEQNASTSTVRLAGSSGANPFACIAAGIASLWGPAHGGANEACLKMLEEIGSVDKIAEYIERAKDKDDPFRLMGFGHRVYKNYDPRATVMREACHEVLEELNIQDPLLDIAMELERIALSDPYFIDKKLYPNVDFYSGLILKAIGIPISMFTVIFAMSRTVGWIAHWSEMHGDPDNRIGRPRQLYTGKLQREFKPLHERE

SEQ ID NO: 35819 - protein, 362 aa, Debaryomyces hansenii CBS767
MKGLILVGGYGTRLRPLTLTLPKPLVEFGNRPMILHQIEALAKAGVTDIVLAVNYRPEVMVSTLKKYEAEYGVTITFSVEEEPLGTAGPLKLAEKVLKKDDTPIFVLNSDVICDYPFQELADFHKTSGGKATIVATKVDEPSKYGVIVHDRDTPNLIDRFVEKPVEFVGNRINAGLYILNPSVIDLIEMKPTSIEKETFPILVENKELYSFDLEGYWMDVGQPKDFLSGTVLYLTALSKKEPKKLCNEKFIHGGNVLVDPSAKIHPSALIGPNVVIGPNVVVGEGARIQRSVLLSNSEVKDHAWVKSTIVGWNSRIGKWARTDGITVLGDDVEIKNEVYVNGAKVLPHKSISSNVEHEAIIM

SEQ ID NO: 35820 - protein, 445 aa, Pseudomonas fluorescens Pf-5
MTLRKFAGLGALLSLVMPGLAMAADEAAAPVLNSGDTAWMLTSTALVLFMTIPGLALFYGGMVRSKNILSVMMQCFAITGLITVLWFIYGYSMAFDTTGMEAGVVNLNSFVGGFSKAFLAGITPASLTGPAALFPEAVFVTFQMTFAIITPALIVGAFAERMKFSAMLIFMGVWFTLVYAPIAHMVWSGPGSLLGDWGVLDFAGGTVVHINAGIAGLVACLVLGKRKGFPTTPMAPHNLGYTLMGAAMLWIGWFGFNAGSAAAANGTAGMAMLVTQIATAAAALGWMFAEWITHGKPSALGIASGVVAGLVAITPAAGTVGPMGALIIGLAAGVVCFFCATSLKRKLGYDDSLDAFGVHGIGGILGAILTGVFAAPSLGGFGTVTDVAAQVWIQAKGVGFTVIYTAIVTFIILKVLDAVMGLRVSEEEEAVGLDLAQHNERGYNL

SEQ ID NO: 35821 - protein, 554 aa, Photobacterium profundum SS9
MLSKVFPTRSHTVSAQGGITVALGNSHPDNWQWHMYDTVKGSDYIGDQNAIEYMCQNGPKSVIELEKMGLPFSRFEDGSIYQRPFGGQSKAFGGEQAARTAAAADRTGHALLHTLYQQNIKHKTTIFSEWYALDLVKNQDGAILGCTAICMETGETCYFKAKATILATGGAGRIYASTTNAFINTGDGVGMALRAGVPMQDIEMWQFHPTGIAGAGVLVTEGCRGEGGYLLNKDGERFMERYAPNAKDLAGRDVVARSMMIEIREGRGCDGPWGPHLKLKLDHLGKDVLESRLPGICELSRTFAHIDPVKEPIPVIPTCHYMMGGVPTQVSGQALKQNSAGQDEEVQGLFACGEIASVSVHGANRLGGNSLLDLVVFGRATGLHLGETLSAQSEARPASESDIEASLARVNRWNSTQKGEDPVQIRKDLQSCMQNNFSVFREGEAMATGLEELKAIRERLKDARLDDTSTEFNTQRIECLELDNLMETAYATAVAANFRTESRGAHARFDFPERDDENWLCHSIYNPETEQMSKRAVNMKPLTREAFPPKARTY

SEQ ID NO: 35822 - protein, 484 aa, Candida albicans SC5314
MVHLGPKPAQKRKGTFTDVSPQLLEALKPIQEQFTISADKLRAIVKHFISELDRGLSKAGGNIPMIPGWVMDFPTGKETGSYLAIDLGGTNLRVVLVKLGGNRDFDTTQSKFALPAHMRTATSDELWDFIAKCLKEFVDEIYPDGCSEPLPLGFTFSYPASQNRINEGILQRWTKGWSIDGIEGKDVVPMLQKAIKKVGVPIDVVALINDTTGTLVASMYTDPEAKMGLIFGTGVNGAYFDVVKDIPKLEGKCPSDIPPESPMAINCEYGSFDNEKYILPRTKYDVQIDEESPRPGQQTFEKMISGYYLGEVLRLILLEFAEEKKLIFKGQNLDKLKVPYVMDASYPSKIEEDPFENLSDVADLFREKLGIETTEPERKIIRCLAELIGERSARFSVCGIAAICQKRGYKTAHCAADGSVYNKYPGFKERTAQALRDIYEWPADVKDPIIIVPAEDGSGVGAAVIAALTEKRLKEGKSVGLLGA

SEQ ID NO: 35823 - protein, 254 aa, Arabidopsis thaliana
MEACLRCSRGSYLIEAMRPLSSSLRPSSSVSFSTGKPIKRAYDGLLLDAGGTLLQLSKPVHETYASLGQKYGLKTTPAEIKEGFKRVFSAPWPEKLRYQGDGRPFWKLVVSEATGCSDNDYFEDVYQYYANGEAWHLPEGAYETMSLLKDAGVKMAVVSNFDTRLRKLLKDLNVIDMFDAVIVSAEVGYEKPDERIFKSALEQISVDVNRAVHVGDDEGADKGGANAIGIACWLWGEDVQTFSDIQKRILVSEL

SEQ ID NO: 35824 - protein, 334 aa, Xanthomonas campestris pv. campestris str. ATCC 33913
MSIEQLAETAQAMVAPGKGIIAIDESTSTIAKRFSGVGIENTEENRRAYRELLLTTPKLSDYISGAILFDETIRQKTKDGVPFAKYMADHGIIPGIKVDKGAQPLAGMPGELVTEGLDGLRARLEEYYTLGARFAKWRAVINIGEDIPSGTCIEANAHALARYAALCQEQGLVPMVEPEVIMDGDHDIETCYEVTEATLRSLFGALYEQNVVLEGTILKASMVISGKGCEEQASVEEVAESTVMCLKSTVPAILPGIVFLSGGQTDEQSTAHLNEMHQLGNLPWPLSFSYGRAMQQAALKLWSKDMTGNYAKAQQIIYERAKENGLAALGKWKG

SEQ ID NO: 35825 - protein, 508 aa, Xanthomonas campestris pv. campestris str. ATCC 33913
MPSSVRDACVKFRGFYREAIMKERQRRTKILATLGPATDPPGVLDALFKAGVNVVRLNFSHGDPSGQAKRAAEVRAAAVRVGAEVGILADLPGPKIRIERFAGGKIKLTMGDRFDLVADINAPAGDQHQVGVSYLGLPQDVTAGDVLLLDDGLVQLQVTDVQGARIVTTVLNDGVLSDRKGLNKQGGGLSLGALTERDKELIGIVAKIGVDFIAVSFCRNAQDMHDARQIAQQHGCDAQLVSKIERTEAIENLVEIVEASDVVMVARGDLGVEIGDAELPGLQKKIIRESLAQNKVVITATQMLQSMVESPIPTRAEVLDVANAVIDGTDAVMLSAETAAGAYPVRAVEAMARICLGAEHQFEFDTDFEAAQRNLQRADQAIAMATMFLSEHIGLGGVVALTESGGTPRYLSRFRSNMPIYAFTRHDGARRQMAMMRGVFPIGFDSRGLTPREAARAAIRLLVENERMGPGDRVVFTSGEHMETHGATNTLRLLEVGEDGRASGLGEL

SEQ ID NO: 35826 - protein, 542 aa, Leuconostoc mesenteroides subsp. mesenteroides ATCC 8293
  misc_feature (429)..(540): Xaa can be any naturally occurring amino acid
  unsure (1)..(542): unsure at all Xaa locations
MAKELKFSEDARAKMKAGVDKLADTVKTTIGPKGRNVVLEQSYGAPTITNDGVTIAKAIELEDHFENMGAKLVAEVASKTNDIAGDGTTTATVLTQAIVGEGLKNVTAGANPVGIRTGIEKATAAAVAKLHEMSHTVNTKDEIAQIASISAANEEVGELIAEAMDKVGNDGVITIEESKGIETTLDVVEGMQFDRGYMSQYMVTDNDKMEANLDNPYILITDKKIGNIQDILPVLQSVVEQGRALLIIADDITGEALPTLVLNKMRGTFNVVAVKAPGFGDRRKAQLEDIAILTGGTVITEDLGLNLKDVTIDQLGQASKINITKDNTTIVEGSGDKGAVASRVDTIKQQIAETTSDFDREKLQERLAKLAGGVAVINVGAATETELKERKYRIEDALNATRAAVEEGFVAGGGTALVNVIAAVSALSXXXXXXXXXXXXXXXXXXXXXXXXXXXXXXXXXXXXXXXXXXXXXXXXXXXXXXXXXXXXXXXXXXXXXXXXXXXXXXXXXXXXXXXXXXXXXXXXXXXXXXXXXXXXXXXXNR

SEQ ID NO: 35827 - protein, 232 aa, Methanocaldococcus jannaschii DSM 2661
MLFVKYKKERRMTMDREALLQAVKEARELAKPRNFTQSFEFIATLKEIDMRKPENRIKTEVVLPHGRGKEAKIAVIGTGDLAKQAEELGLTVIRKEEIEELGKNKRKLRKIAKAHDFFIAQADLMPLIGRYMGVILGPRGKMPKPVPANANIKPLVERLKKTVVINTRDKPYFQVLVGNEKMTDEQIVDNIEAVLNVVAKKYEKGLYHIKDAYVKLTMGPAVKVKKEKAKKK

SEQ ID NO: 35828 - protein, 248 aa, Synechocystis sp. PCC 6803
MLKAVLLDFNGVVINDEAIHRSLIDELLLTENLRPLTPAEYQQFCLGRSDRACLVDLFEHRGRGLTEAYLQKLIDRKAESYHQKLVALETLPIYGGLKEFLEKLQLRRLAIALVTGAVRSEVEYGLDRAGLARYFPVIVAGDDIASSKPQPDGYQLAIHKLNQWRQSQAVTDSLLDDIAPLLPENCLAIEDTFAGIEAAKKAGMAVVGIAHTYPYHFMQRQANWAVDRFDELDLDRLQVIFSRPKLAV

SEQ ID NO: 35829 - protein, 656 aa, Bradyrhizobium sp. BTAi1
MCGIAGLFRPGGADDSALAGIVGRMTAALAHRGPDASGSWVSGRQGIALGQRRLAILDLSEAGAQPMHSACGRYTITFNGEIYNHLDLRAELEDAAAAPNWRGHSDTETLLAAIRQWGLVPALQRLIGMFAFALWDAETRQLILARDRFGEKPLFYGWSGADLVFGSELKALAAHPGWAPSLDRAALTDFMRYSYVPAPATIWRDVRKLPPASFVAFVADAGPGTSPTAQSYWSLRDTVVAAQGDRISGESEAIARLEQLLSTAVKRQCLSDVPLGAFLSGGVDSSTIVALMQAQASQPVRTFSIGFAEGGYNEAEDARKVAQHLGTDHTELYVDARTAMEVVPKLPRIYDEPFADSSQIPTHLVAQLARRHVTVALSGDAGDELFGGYNRHVWGSALQARLGRVPMPLRRAIGAALGAIAPEPADTLLNMLQPVLPARLRVRHAGDQVAKLARIVAADGFDGLYRTLCSIDQDPRATVVAGEERASWAASEMKQLRGQISLLDRMTLADSLSYLSDDILQKVDRAAMAVALETRVPFLDRDVVEFSTRVPASMKVRDGRGKWLVRQVLYRHVPADMIDRPKTGFSIPLDAWLRGPLKSWAGDLLSPARLKRQGLFAPTRVTRMFEEHLSRRHNHAYWLWNVLMAEAWYDEWGRAG

SEQ ID NO: 35830 - protein, 532 aa, Schizosaccharomyces pombe
MQTPSSASAESEKDSGNTYVGPWLLGRTLGQGNLAKVKLGKHFQTNEKVALKMVYNDELEDKDTWKRLQREVTILRQLHHPNIITLYQVFRVPKYTVLALEYMDTDLHSMVVKHNRLDECTTRKIFRQIVHAIDYCHLHRVAHRDLKLENILLNKDLVVKLTDFGLSNFMLDGSFLSTSCGTPHYAAPEVIQGRYYDGCDVDVWGCGILLYLMLVGEFPFEDVTISNVLSRVCKGIYTIPSFVSSSASDLIRQMLMVLPTSRIKVAEIMQHPWFIADLPTHSRLPSRTSSFSSKHRSVTFSPPDLAILFDPSITSPSSSVGQIPQPTDHSALSPSKPMSISGTESPNPDPASLCYSSYEDLYSATSWHSDMAESSGFLDPTDIPPIPSNVETLRSSLPQRHASFMNKVYNHPLSRPPAPNRLRSLRWHYGIQTAKNPIEVLRKLCEALLELGARFRPCDEESFLKENKYKVFSCITCHNSPVYLVIELFSIGPSASVIDIRFSSSDDSIKYTSSYSPMPFLEVVKQLILKIA

SEQ ID NO: 35831 - protein, 545 aa, Porphyromonas gingivalis W83
MAKEIKFDMESRDLLKKGVDALANAVKVTLGPKGRNVILSKTYGAPHITKDGVSVAKEIELECPFENMGAQLVKEVASKTNDDAGDGTTTATILAQSIIGVGLKNVTAGANPMDLKRGIDKAVKAVVTHIAGMAKEVGDDFQKIEHVAKISANGDENIGSLIAEAMRKVKKEGVITVEEAKGTDTTVEVVEGMQFDRGYISPYFVTNTDKMEVQMENPFILIYDKKISVLKEMLPILEQTVQTGKPLLIIAEDIDSEALATLVVNRLRGSLKICAVKAPGFGDRRKAMLEDIAILTGGTVISEETGLKLENATMDMLGTAEKVTVDKDNTTIVNGAGNKEGIASRITQIKAQIENTTSDYDREKLQERLAKLAGGVAVLYVGAASEVEMKEKKDRVEDALSATRAAIEEGTVPGGGTAYIRAIAALEGLKGENEDETTGIEIVKRAIEEPLRQIVANAGKEGAVVVQKVKEGKDDFGYNARTDVFENLYTTGVIDPAKVTRVALENAASIAGMFLTTECVIADKKEDNPAAPAMPGGMGGMGGMM

SEQ ID NO: 35832 - protein, 89 aa, Porphyromonas gingivalis W83
MNIKPLADRVLVKPAAAEEKTVSGIIIPDSAKEKPLKGEVIAVGNGTKDEEMVLKAGDTVLYGKYAGTEIELEGEKYIIMRQNDVLAII

SEQ ID NO: 35833 - protein, 938 aa, GIBBERELLA ZEAE PH-1
MDFDDDAPPELVDTTTNDVDEEITVKVPITIVTGYLGAGKTTLLNYILTAQHGKKIAVIMNEFGDSLDIEKSLTVNKGDEQVEEWLEVGNGCICCSVKDTGVNAIESLMSKKGAFDYILLETTGLADPGNLAPLFWVDDGLGSTIYLDGIVTLVDAKNILLSLDDPKGIVEGHDHDGHGPVMTTAHVQISHADVIVINKADMVSETELNQVKERIQSINGLAKIHVTERSVVPQLEGFLLDLHAYDQFNESDASAKGHSHLDPVSSRPRIQNLQGSRSLTVQTISTVNIPVGRLEPEQLDTVDRWLRSVLWDSKLPDAKEERNFEIHRSKGRLVFANGDVKMLQGVREVFEINDGPSGDETPKEDIIGVCHDVGVYPLIPAHGSSSIHLAKVPASLLQHSNRTRPGSALKANDRIDKHPYLFVSLGTKRHRRRTDRITLLRHIHFATPYRAAPYLSRSRQTSTTMNRPGAVPQTLRGMPGGFGGQQQPQQPGRAATNRLPNGKLGNNNSGWAFGGVPMAGAGPQNAGRQLGGNVSFAQSLTGSQPSTSLDLSEFPSLSNNAQMSNANQSSMWSTAGSRNLGGPIQRNQATPQQGGQDDMFSPTSSRVPGGFRFGNQGNIGQQPQPSSVDDFPPLNQTSNGELGSDRTANLMSSLGFGSQAGPGPSTSNRGNGLLNALSANSRANEVRSPPGIGAPGSSRPQDGKPPGLEEDPRQKPTREDGSTDVDSPAAAFNNDPVSLKAKDDQEPHGSEIIDPLAGMPAVDKWGIKGLQTLMHNYPDYHAMVVGMDPSSLGLDISSPELFSTQNYSLFDDSPPRVPLANGKFRLPDCYNVTNVQPIESKIASFNEETLFWIFYSCTADVKQQMAAVELHSRNWRWHRKMELWLTKDEHMTPQILSPNHERGFYIVWDPNNWRKDRKEFTLHYGDLDTTLNQAQVGP

SEQ ID NO: 35834 - protein, 359 aa, Schizosaccharomyces pombe
MSQYDVEPLLSKAAILNKYADLPQNGKVMAEYIWIDGFNHLRSKTMTLDAKPSSIDQLRVWNFDGSSTGQAPGNNSDTLLKPVAMYNDPFRRGDNILVLAACYTADGSPNGFNHRDACAKLLEKHADKETWFGIEQEYTMLDYYDRPFGWPKGGFPGPQGPFYCGVGTGRVFARDIVEAHYKACLYAGINISGINAEVMPSQWEYQVGPCAGIEMGDQLWMSRFLLHRIAEDFGVKISFHPKPILGDWNGAGCHTNVSTKDTRAEGGIKAIESYLEKFAKRHKEHIAVYGDDNDLRLTGRHETGSIDKFTYGVADRGASVRIPRSVAMNGCGYFEDRRPASSIDPYLVTGIITETMFEH

SEQ ID NO: 35835 - protein, 234 aa, Citrus x paradisi
MAEEIKKQQKSHEYEPSVGTEGAVETKDRGMLDFLGKKEEEKPQHHDQEVIATEFEKVHVSEPQPKVEEHRKEEKEEEKKPGFLDKLHRSTSSSSSSSDEEEGDDEEKKKKKKEKKGLKEKLKEKISGEKEEDTTVPVEKLDDVHAPHHQEEAHPEEKKGFLNKIKEKLPGQQKKPGDHQVPSPPAAEHPTSVEAPEAEAKEKKGILEKLKEKLPGYHPKSEDEKDKDKETAAH

SEQ ID NO: 35836 - protein, 264 aa, Brassica napus
SASPRPPARPEGYEKLTSPCLKGEAWKFPFTGFIAMVAAILTLSVDSFATSYFHRLHNKTSKKIGEGEEQIGGGGGGDELGLHVHAHGHAHGIVSVDSGESEVQLHRTRVVAQVLEVGIIVHSVVIGISLGASQSPHTAKALFAALMFHQCFEGLGLGGCIAQGKFNCMSITIMSIFFSVTTPIGIAVGMGIASSYNESSQTALIVQGVLNAASAGILIYMSLVDFLAADFMHPKMQSNTGLRIMAHISLLIGAGIMSLLAKWA

SEQ ID NO: 35837 - protein, 251 aa, Zea mays
MEPSSQPQPMMGVGSQPYPAAAPYVPVPGSLAVPPGSQPAAAFPNPTQLSAQHQMVYQQAQQFHQQLQQQQEQQLREFWTTQMDEIKQANDFKIHTLPLARIKKIMKADEDVRMISAEAPVVFAKACEVFILELTLRSWMHTEENKRRTLQKNDIAAAITRTDIYDFLVDIIPRDEMKEEGLGHNPIVGLPPAMGAPADHGSHPYYYVPAQQVQGAGMMYGGQQGHPVTYMWQTPQGQAAEPPEEEQQQSA

SEQ ID NO: 35838 - protein, 61 aa, Glycine max
  misc_feature (15)..(15): Xaa can be any naturally occurring amino acid
  misc_feature (30)..(30): Xaa can be any naturally occurring amino acid
  unsure (1)..(61): unsure at all Xaa locations
AWEWLIARVSACGLXHIAYPSAPETLKTEXTSIYSQLWQDDMPMERRTAESNLEKFAATVE

SEQ ID NO: 35839 - protein, 800 aa, Oryza sativa (japonica cultivar-group)
MAGRHAPHLRLAVPPRLSPHPSFRFPTTPLPTPSKTRLHHPSSSPYAAALLRLLALHSLFLLAPAARAPASSFPSLPPLLALLSAAVSLLLPPFSAAAAAHHPFPAVTHLLRPAALLAVTLLLRFASLRLLASPGTLVLAESAGALLARALRRPSRRRVVSVAVASFALFFFASPSSSSSSTSHLLVLLPFASGLVSSADQTPSVRHVTRGRHARAAVFALAAAFLSVPAVLGLFFVGGSDAGDGDGDGGAVLPISQLWWLLLNAAVFGMVLGRRPDYDGSSSRPSVDFAMTFLCTLVLELLYYPKLSLPGFLICGLLLWIASRELAASGYVELGSADVSESVYEAIMGPVRHILNERKSRKIAAFLLINTAYMFVEFTSGFMSDSLGLISDACHMLFDCAALAIGLYASYIARLPANGLYNYGRGRFEVLSGYVNAVFLVLVGALIVLESFERILEPREISTSSLLTVSIGGLVVNVIGLVFFHEEHHHAHGGSCSHSHSHSHSHSHSHSHSHSHVHGHEDHHNHDHALQGVNHNGACCEHHGDANKSHHHDHHHDSSNEESHHNSLTENSCKENHSHCHGHDHHHHHHHDHSEHHQQSGDHAHQDISNISSDPAILEIPLNSIHTHCSEAHSCNGGLQSSENHNKSRNRHHIDHNMEGIFLHVLADTMGSVGVVISTLLIKYKGWLIADPICSVFISIMIVSSVLPLLRNSAEILLQRVPRSLEKDIKEALDDVMKIKGVIGVHNFHVWNLTNTDIVGTFHLHITTEADKSSIREKASDIFHEAGIQDLTIQIECVKR

SEQ ID NO: 35840 - protein, 479 aa, Debaryomyces hansenii CBS767
MSGFRVLDLVKPFTPFMPEVIAPERKVAFQQRLMWTGVTLLIFLVMSEIPLYGIASSDGSDPLYWLRMMLASNRGTLMELGISPIVSAGMVFQLLQGTKLITVDMSNKNDRDQFQTAQKLFAILLAVGQATVYVLTGMYGPPSSLGTGVCLLLVLQLVFAGIVVILLDELLQKGYGLGSGISLFTATNVCEQVFWKAFAPTTSNIGKGTEFEGAVVALFHLLGSRKDKKRALLEAFYRSHLPNMFQLIATVFVFLLVVYLQGFRIELPIKSTRQRGPYGLYPIRLFYTSNIPIMLQSALSSNIFIISQMLFVRWPNNIFVKILGSWDTRQGAAQLYAVSGLAYYIQPPLSFTEALLDPIKTIIYIIFVLGSCAVFSTTWIEISGASPRDVAKQFKEQGLVIAGHRDTSAYRELKKIIPTAAAFGGATIGALSVFCDLMGTLGSGTSILLSVTTIYGYYELAMKEGGFGKSVVSSFSDGI

SEQ ID NO: 35841 - protein, 371 aa, Prochlorococcus marinus subsp. marinus str. CCMP1375
MRFPGYFASILSLIILLGAVNPIYGSIQASDEYTHSFVAKAVENVAPAVVRIDTERTVEHEPFDPTLIDPLLRDLLGEPTLGPEKERGQGSGVLIDQNGLVLTNAHVVENVDEVSVTMANGEKSNGRVVGTDFVTDLALVRLELLSKLEAAPLGNSEDLAVGDWAIALGTPYGLERTVTLGIVSSLHRNINSLGFSDKRLDLIQTDAAINPGNSGGPLVNYLGEVIGINTLVRSGPGAGLGFAIPINLAKRISDQLLANGEVIHPYLGVQLIPLDAKIAKEHNLDPNSLVELPERSGALVQSVLSDSPAEKAGLRRGDLIISADEQEISDPSALLEKVENSRIGTPFLIKLLRNNREIKLSIQPEALPRIS

SEQ ID NO: 35842 - protein, 471 aa, Legionella pneumophila str. Paris
MTIALVWFRQDLRLTDNPAFIEACSHHEIVIPLYIYDDKCSVLGQAQAWWLHHSLIALGKSLNQQGLSLVLRKGDPQEIILELVAQYGVESVYWNRCYEPQVIARDKKIKLALGEREIKVQSFNGNLLHEPWTIKNKNGDFFKVFTPYWKQCRQILNIPSPFMLTKRPRGIEITSDDLGKWKLLPAINWAARFSEYWTPGEEGAQKKLDEFIVHHLSGYKRERDFPAKNATSRLSPHLHFGEISPWVILRALELAKLEQTCDLASVEHFLSELGWREFSVYLLYHFPKLDCENFRKEFDAFPWQNDEQLLTCWQKGMTGYPIIDAGMRELWATGYMHNRVRMIVASFLTKDLLIDWRSGAQWFLDTLVDADLANNSASWQWVAGCGADAAPYFRIFNPVLQSQKFDPDGIYIRQWIPELAQLNSQSIHQPWTDADANSIFLGKKYPKPIIDHQEARTKALSYYQQIKKGMD

SEQ ID NO: 35843 - protein, 468 aa, Pseudomonas fluorescens Pf-5
MTMQHPARTELWAILRLAGPLIASQLAHMLMVLTDTLMMARLSPEALAGGGLGAASYSFVSIFCIGVIAAVGTLVAIRQGAGDIEGAARLTQAGLWLAWLMALVAGLLLWNLKPLLLLFGQTESNVHAAGQFLLILPFALPGYLSFMALRGFTSAIGRATPVMVISLGGTVANFLLNYALITGMFGLPKLGLVGIGLVTAIVANCMAVALAWHIKRHPAYAAYPLRQGLSRLNTHYLRELWRLGLPIGGTYAVEVGLFAFAALCMGTMGSTQLAAHQIALQIVSVAFMVPAGISYAITMRIGQHYGAGQLLDARLAGRVGIAFGAVAMLGFAMIFWLLPNQLIGLFLDHNDPAFAEVIRLAVSLLAVAAWFELFDGTQTIAMGAIRGLKDAKTTFLVGLGCYWLIGAPSAWLMAFTLGWGPTGVWWGLALGLACAAISLTLAFEWRMRRMIRREPPVPAMTLQAGQAD

SEQ ID NO: 35844 - protein, 457 aa, Mesorhizobium sp. BNC1
MTDRSNELNAWDRDHFFHPSTHMGTHARGESPNRVVAGGEGVYITDVNGRTSLDAFAGLYCVNVGYGRQKIADAIAEQARNLAYYHAYVGHGTDASIRLAKMIIDRAPQGMSRVYFGLSGSDANETNIKLIWYYNNVLGRPEKKKIISRWRGYHGSGIMTGSLTGLDLFHNAFDLPRAPILHTEAPYYFRRPDRSMSEEQFSQYCADKLEEMILAEGPDTVAAFIGEPILGTGGIVPPPAGYWEKIQAVLKKYDVLLIADEVVTGFGRLGTMFGSDHYGIKPDLITIAKGLTSAYAPLSGVIVSDKVWQVLVQGSDKLGALGHGWTYSAHPLCAAAGVANLELIDEMNLVENAGTVGAYFRAELANAVGSHPNVGEVRGDGMLAAVEFVADRDDRVFFDASKKIGPQIAAALAERGVIGRAMPQGDILGFAPPLCLTKEEADKVIAATASAVDSVLG

SEQ ID NO: 35845 - protein, 497 aa, Mesorhizobium sp. BNC1
MNAATAKIDLSAKLDLLHDKSLLRELAYVDGRWVTGHEPVNFEVRDPATGAVLAYVASLNAAQVDSAIDAAARAFLSWKRLLPQERAATLRAWYELIVAAKEDLALLMTLEQGKPLAESRGEIDYAASFVEWYAEEAKRLNVESVTSHLPGAEMMVRREPLGVVGVVTPWNFPSAMLTRKAAAALAAGCTIVAHPSSETPLSALALAELGERAGLPAGVLNVVTGDAATIVGRMCGDSRIRAMSFTGSTEIGRLIAAQCAPTMKRLVMELGGHAPLIVFEDAPLDKAVDIAIGAKFATSGQDCLAANRIYVQRGIYGAFCEAFAARIATLKVSDGLDETGDIGPLMHERAIAKVEEQVTDALGRGARCLIGGERHPAGRLFYQPTLLADVPDAALIMREETFGPVAAAVPFDTEDEVVRRANNTEYGLVAYVVTENGARQLRMGRALDYGMVAINRVKITGAPIPFGGVKQSGIGREGARHGLEAFTDLKYLCLDAA

SEQ ID NO: 35846 - protein, 454 aa, Rhodobacter capsulatus
MAEFDVIIIGGGPGGYVCAIRCAQLGLKTACVEGRGALGGTCLNVGCIPSKALLHATHELHEVHENFEKMGLMGAKVKVDWAKIDGNTKGIEFLFKKNKVTYLRGWGSIPAPGQVKVGDEVHTAKNIVIATGSESSGLPGIEIDEQTVVTSTGALSLAKVPKSMVVIGAGVIGLELGSVYARLGAEVTVVEYLDAITPGMDAEVAKGLQRILTRQGLKFVLGAAVQGVDKAKGKNTVRYTLRKDESAHAIEAEVVLVATGRKPFTKGLGLEALGVEMLPRGQVKADSHWATNVPGLYAIGDAIVGPMLAHKAEDEGMAVAEVIAGKHGHVNYDVIPGVIYTTPEVAAVGKTEDALKQEGRAYKVGKFSFMGNGRAKAVFQAEGFVKILADAATDRILGAHIIGPSAGDMIHEICVAMEFGASAQDLALTCHAHPTYSEAVREAALACGDGAIHA

SEQ ID NO: 35847 - protein, 579 aa, Chlamydomonas reinhardtii
MGCNPLQLAQVTALLGGDTATAATICAGTDVAQLGPNGAVTKWTVAELRGAQNALDQVEYGLNVSFVLASAYQVFVMQLGFALFAAGVVRPKNTVSIFIKNFFDTCIAGIAFYLVGYAFAFGAKDGYTNGFIGNWDFALSQTDGSPGSEPPNPWHLFIWNWSFCSASTTILSGSIAERATFASYTIYAAFMPAWVYPVVAHWLWAPDGWLSARNANDRILGIGAIDYAGSGVVHLVGGMAALIGSIAVGPRVGRFDAPGSTGEVSAQLYRATAAPQLYLMGTLLLWFGWYGFNPGSKLAISDYLQATIVSRTAVTTTLAACSGALSNLLLNYGRHRVWDLLSTCIGALAGLVAVTSGCSVIEPWAAIICGAISALFYEAGEQLLEKLKVDDPVSAFPLHAMCGVWGLLFTGLLANEGYITQVYNVPPGGHRMGLFYGGHAQLLLCQVIAIAVIAGWSAFNMCILFFGMKAAGLLRVGADKEATGMDMAACGQYNAAGAVNVHSSKVPTKSDAVLAAMSLNMERRMNGGPGMDYSVRNSSANPSAHNSSLHNTATATTVTTAAATPAAAGGIMLTSAVGG

SEQ ID NO: 35848 - protein, 342 aa, Ralstonia metallidurans CH34
MKKLLPTSTAGSLPKPSWLAQPEKLWSPWKLQDDELIEGKQDALRLSLQEQQQAGIDIVSDGEQTRQHFVTTFIENLSGVDFEKRETVRIRDRYDASVPTVVGAVSRQKPVFVEDAKFLRQQTRQPIKWALPGPMTMIDTLYDNHYKSREKLAWEFATILNQEARELEAAGVDIIQFDEPAFNVFFDEVNDWGVATLERAIEGLKCETAVHICYGYGIKANTDWKKTLGSEWRQYEESFPKLQKSSIDIVSLECHNSYVPIDLIELIRGKKVMVGAIDVATNTIETPEEVANTLRKALRFVDADKLYPCTNCGMAPLPRGVARGKLNALSAGAEIIRGELSA

SEQ ID NO: 35849 - protein, 411 aa, Chlamydomonas reinhardtii
MQIGFVSAESGQGRAKNVRNILLKNSVNIMLCAICWWAVGYAFAYGNSGGGFIGTSRFFSDGESFGSKPWFFTWTFCLSCVTIASGCLAERTHLFVYPVYTAVVSIAVHPVIAHWVWAPDSWLNSMTGSPCRFLDFAGGAVVHTVGGLTGLIGAMLCGPRLGRFEDGVGKDIPGHDVSSVSLGSLMLWFGWYGFNCGSTYIYMAQGGSEASAAVSRVALNMTLCASVAGMTSLVVSSIQTGTFDLAVCCNGLMAGLSASTSNVGFLTPWAACITGALAGLLYVGISRLLVRMGVDDPLDSSAIHCGSGILGVLVSGFLARPSYVMQMVGCNCGGVVYATNGGMQLGMQLLGLSCSMVWTAMWALLTFGILKKLQLLRVDQQTELAGIDNMEHGGPAYPEFLQRVQSTRPGY

SEQ ID NO: 35850 - protein, 1349 aa, Candida albicans SC5314
MPHSRQPSISSSIMSQSNHNHPQKIGPWKLGKTLGRGATGRVLLATHQTTGQKAAVKVVSKSELQDEETEKNGDGLPYGIEREIIIMKLLTHPNVLRLYDVWETSKALYLVLEYVEGGELFDLLVERGPLPEVEAIKYFRQIILGTAYCHALGICHRDLKPENLLLDSQLNVKLADFGMAALESNGKLLETSCGSPHYAAPEIVSGLKYHGAASDVWSCGVILFALLTGRLPFDDENIRNLLLKVQAGNFEMPVDEVSREARDLIARMLEVDPMRRISTEKILRHPLLTKYPMSNEDLISEKSLPHPQTGYKSLGSVRNIDKQILSNLTILWNDRPEEEIVDCLLKDGSNPEKTFYALLMRYKHNQEDNTNNNSPKKSTSFNNKVVRSGSKYSLNGTPRRKRASHISVSRPTSFQYKSNPGAGATANRNSVARHSVASSANNSPRKSPYKSPYRSPYRSPYKSPSKRYSYNQSPTKSPYGRRSNSQRQFENEPLKAKPRNIYNEIVDAQSNFSLPPSLPPSLPSKDSRYMIDEPNQPQLQQPALSQVPENPIVDESPDLMQSAKISSGKRNSIIGKNNNNSNSNKRMSKRKSIRASMTTGLKRNSITMKLLSTYAKLSGDDDWEYMDKQTKRTSATFAALCDKIFNQEDYDEEDEQLVDPEEKEAKEYERLMELERKKHEAELKARRELEKKKRRQKRRSILSSKKLSIIVKNDADPNNSEQELVDEGIKQPKRQSKNLTALRALSEGNHASEELTLEDVENLKRRSASQPVPKRRQTPVLTRRPVSRLDPLWQAHENEQLDRAKDALEQEWRDSQKRSSTVSRKKVNRESMISVMDDIVEEDQGRVNRRSTRNTYYERERDYELPEPTVEDSNLTDDYMTEIRKSRLLNSQLNVRDPLNEKRKSEPKTLISNVQIPSVTRKSRNFTTSNKRLSVLSMYSTKESYRDLNSIINSPDENPEQHQNMNKPALRTSIADRLDKAGLAEPEYETETDGEDKVSVIDLDDHLADRRTSYYDGSGKRASRASTTKRYNVHSSSGQRPKSKVPDLPKNDYDDTFVSNSDEVHKRQYKSMVSDESSASDDVFDKIKLPDGKSTKSSIDELANGTSTSGHRKPKIRHSQPGPEMLIPHLNGGIESSQPMSKVRGNNSSGHDDSVPPPPPAHKVNKKPLDDKTNFPPPEVDPKRKGSFFRKLSWGSKKTIENNTNAATNTTTQQQLPSPAESKEEKPKSSFFRWFSSSNTPSAAEIRKFNTILPKHEMSTALFALLNSWSNFGLKDLRNDQVGYYITGAISKHNSFNLKSCKFRIKINQRDFNQKSEIVCVRVKGSKVTTDTLFSEIEKVLLKEGVLDK

SEQ ID NO: 35851 - protein, 635 aa, Saccharomyces cerevisiae
MSGARSTTAGAVPSAATTSTTSTTSNSKDSDSNESLYPLALLMDELKHDDIANRVEAMKKLDTIALALGPERTRNELIPFLTEVAQDDEDEVFAVLAEQLGKFVPYIGGPQYATILLPVLEILASAEETLVREKAVDSLNNVAQELSQEQLFSDFVPLIEHLATADWFSSKVSACGLFKSVIVRIKDDSLRKNILALYLQLAQDDTPMVKRAVGKNLPILIDLLTQNLGLSTDEDWDYISNIFQKIINDNQDSVKFLAVDCLISILKFFNAKGDESHTQDLLNSAVKLIGDEAWRVRYMAADRFSDLASQFSSNQAYIDELVQPFLNLCEDNEGDLREAVAKQVSGFAKFLNDPSTILNKILPAVENLSMDESETVRSALASKITNIVLLLNKDQVINNFLPILLNMLRDEFPDVRLNIIASLKVVNDVIGIELLSDSLLPAITELAKDVNWRVRMAIIEYIPILAEQLGMQFFDQQLSDLCLSWLWDTVYSIREAAVNNLKRLTEIFGSDWCRDEIISRLLKFDLQLLENFVSRFTILSALTTLVPVVSLDVVTEQLLPFISHLADDGVPNIRFNVAKSYAVIVKVLIKDEAKYDALIKNTILPSLQTLFQDEDVDVKYFAKKSLAECQELLKN

SEQ ID NO: 35852 - protein, 220 aa, Arabidopsis thaliana
MGRRPARCYRQIKGKPYPKSRYCRGVPDPKIRIYDVGMKRKGVDEFPFCVHLVSWEKENVSSEALEAARIACNKYMVKSAGKDAFHLRIRVHPFHVLRINKMLSCAGADRLQTGMRGAFGKALGTCARVAIGQVLLSVRCKDAHGHHAQEALRRAKFKFPGRQKIIVSRKWGFTKFNRADFTKLRQEKRVVPDGVNAKFLSCHGPLANRQPGSAFLPAHY

SEQ ID NO: 35853 - protein, 163 aa, Bradyrhizobium japonicum
MALRELIPWNNGSRNLPARRTEVDNPFLSLHREMNRLFDDVFRGVDIGQFAPPATMGWPSVEFNETDKEVKVIAELPGIEQKDVEVELADGVLTISGEKKSETKDKERRFSERYYGRFERRIPVDDVDQDKVAASFKDGILTVTLPKSPTEQRKVKRIAINGK

SEQ ID NO: 35854 - protein, 333 aa, Xanthomonas campestris pv. campestris str. ATCC 33913
MAIKVGINGFGRIGRNVLRSAVQNFANDIEIVAINDLLEPDYLAYMLQYDSVHGRFKAEVSVDGNTLIVNGKKIRLTQERDPANLKWDAVGAEVVIESTGLFLTKETAQKHIDAGAKKVILSAPSKDDTPMFVYGVNDKTYKGEAIVSNASCTTNCLAPLAKVINDKWGIKRGLMTTVHAATATQKTVDGPSNKDWRGGRGILENIIPSSTGAAKAVGVVIPELNKKLTGMSFRVPTSDVSVVDLTVELEKPATYAEICAEVKAQSEGALKGILGYTEDKVVATDFRGETCTSVFDADAGIALDSTFVKLVSWYDNEWGYSNKCLEMVRVVAK

SEQ ID NO: 35855 - protein, 131 aa, Aeropyrum pernix K1
MYPRELKWGVAHIYSSFNNTHVHITDLTGAETVARVTGGMVVKADREKPSPYAAMIAASRAAQKAMERGIAAIHIKVRAPGGHGPKTPGPGAQAAIRALARAGFIIGRIEDVTPIPHDTTRRPGGRRGRRV

SEQ ID NO: 35856 - protein, 163 aa, Zea mays
  misc_feature (50)..(50): Xaa can be any naturally occurring amino acid
  unsure (1)..(163): unsure at all Xaa locations
MGQAWGNLQDRLQGRRWKEHQVRKITDKVFDRLTEDAQKRDKEALRFEEXDINKYLPGPHHDPPSKEKLRAMMEEYDVNLDGLLDREEFAEFIRKLTADSLCSISVKLLITLVAAPALAMATKRATEGVPGVGKVVRKVPNALYASAITLGVVLLQRSTEGVE

SEQ ID NO: 35857 - protein, 575 aa, Synechocystis sp. PCC 6803
MLEQDVVIVGGGLAGCRAALEIKRLAPDTKVAIVAKTHPIRSHSVAAQGGIAASLKNVDAEDSWEAHAFDTVKGSDYLADQDAVEILTKEAPEVIIELEHLGVLFSRLPDGKIAQRAFGGHSHNRTCYAADKTGHAILHELVNNLRRNKVEIYDEWYVMKLIYEEGEAKGLVMYEIATGRIEIVRAKAVMVATGGYGRVYNTTSNDYASTGDGLAMAAIAGIPLEDMEFVQFHPTGLYPVGVLISEAVRGEGAYLINSEGRRFMEDYAPSRMELAPRDITSRAITLEIRAGRGVNADGSAGGPYVYLDLRHMGREKIMSRIPFCWEEAHRLVGIDAVEQPMPVRPTVHYCMGGIPVNTDGRVRKNANELTEGFFAAGECACVSVHGGNRLGSNSLLECVVYGRRTGRSIAEYVQGRSLPEIDEAVYKTEAQTRIDQLLNQQGTVRINTLRQAFQDCMTSHCGVFRSESFMAEGLEQVQNLKAQYGQIFLDDKQPQWNTEVIEALELQSIMAVGELILTSAIQRQESRGSHAREDFPSRDDEQFLRHTLASFDGEQIKVEYMPVVINRFEPKERKY

SEQ ID NO: 35858 - protein, 539 aa, Porphyromonas gingivalis W83
MADTKYIFVTGGVVSSLGKGIVAASLGKLLQARGFNVALQKFDPYINIDPGTLNPYEHGECYVTEDGHEADLDLGHYERFLNTPTTRANNITTGRIYQNVIRKERKGEYLGKTVQVVPHITDEIKRNVKLLGQKSQYDFVITEIGGTVGDIESLPFLESVRQLKWELGQNCLCVHLTYVPYIAAAGEVKTKPTQHSVKQLQEVGIQPDILVLRTEHELQPDILKKVALFCNVAPDSVVQSVDVPTIYEVPLVLQQQHMDETVLRKVGLQVGPVPEMRQWHEFLEMKHTARETVTIALVGKYVELQDAYKSIDESLMQAAIYNRKKLNLISVHSEKVTEANVAETLKDMDGIVIAPGFGSRGVEGKLIALKYARENDLPTLGICLGMQCMVIEYARNVLGFKDANTTEIESNIEHKVIDLMDEQKTVTDMGGSMRLGAYDCALRKGSKLAAAYGKEFVRERHRHRFEFNSQYREAFEKAGMQCVGENPETGLVEAVEVPACRWFVGVQFHPEYNSTVVNPNPLFMAFIREAIKTRKKDKE

SEQ ID NO: 35859 - protein, 834 aa, Glycine max
  misc_feature (209)..(209): Xaa can be any naturally occurring amino acid
  unsure (1)..(834): unsure at all Xaa locations
MQIFVKTLTGKTITLEVESSDTIDNVKSKIQDKEGIPPDQQRLIFAGKQLEDGRTLADYNIQKESTLHLVLRLRGGMQIFVKTLTGKTITLEVESSDTIDNVKAKIQDKEGIPPDQQRLIFAGKQLEDGRTLADYNIQKESTLHLVLRLRGGMQIFVKTLTGKTITLEVESSDTIDNVKAKIQDKEGIPPDQQRLIFAGKQLEGTKAEXPFVLSQRKKTLAHRFKMQIFVKTLTGKTITLEVESSDTIDNVKAKIQDKEGIPPDQQRLIFAGKQLEDGRTLADYNIQKESTLHLVLRLRGGMQIFVKTLTGKTITLEVESSDTIDNVKAKIQDKEGIPPDQQRLIFAGKQLEDGRTLADYNIQKESTLHLVLRLRGGMQIFVKTLTGKTITLEVESSDTIDNVKAKIQDKEGIPPDQQRLIFAGKQLEDGRTLADYNIQKESTLHLVLRLRGGMQIFVKTLTGKTITLEVESSDTIDNVKAKIQDKEGIPPDQQRLIFAGKQLEDGRTLADYNIQKESTLHLVLRLRGGMQIFVKTLTGKTITLEVESSDTIDNVKAKIQDKEGIPPDQQRLIFAGKQLEDGRTLADYNIQKESTLHLVLRLRGGMQIFVKTLTGKTITLEVESSDTIDNVKAKIQDKEGIPPDQQRLIFAGKQLEDGRTLADYNIQKESTLHLVLRLRGGMQIFVKTLTGKTITLEVESSDTIDNVKAKIQDKEGIPPDQQRLIFAGKQLEDGRTLADYNIQKESTLHLVLRLRGGMQIFVKTLTGKTITLEVESSDTIDNVKAKIQDKEGIPPDQQRLIFAGKQLEDGRTLADYNIQKESTLHLVLRLRGGF

SEQ ID NO: 35860 - protein, 189 aa, Arabidopsis thaliana
MSKLQSEAVREAITTITGKSEAKKRNFVETIELQIGLKNYDPQKDKRFSGSVKLPHIPRPKMKICMLGDAQHVEEAEKMGLENMDVESLKKLNKNKKLVKKLAKKYHAFLASESVIKQIPRLLGPGLNKAGKFWLQLIFHFGNLSMEEKQIFQNVQMSVNFLVSLLKKNWQNVRCLYLKSTMGPPQRIF

SEQ ID NO: 35861 - protein, 319 aa, Prochlorococcus marinus str. MIT 9313
MTSAPSAVLNASWSHLGHDVHCLQRIPDQDVEHGGRQRPALLLVHGFGASTDHWRHNIPKLSLTHEVHAIDLLGFGRSAKPGGLDYGGDLWKDQLVAYVNERIGRPTVIVGNSLGGYAALAAAAALESQSAGVVLLNAAGYFSDEKFSPKPKDMSSRLRQMIGQGLSRDLVVKWLIYPLIQRMIFENLRRPGVIRRTLQQVYIDPANVDDDLIESIRRPSLDPGAFQVFRNVFQARGLRGKAIDELFNDLQAPLLLLWGDGDPWLRNAKAKQDKFRTYAREASLEVKEVLLNAGHCPHDEVPDLVNSELLEWLNGLSIA

SEQ ID NO: 35862 - protein, 303 aa, Streptococcus agalactiae A909
MSNIVIIGSISMDLVMETNRIAKEGETVFGQRFSMVPGGKGANQAVAIGRLSQDRDNITILGAIGEDSFGPILLDNLNKNHVTTDFVGTIPPSSGVAQITLYNNDNRIIYCPGANGKVDTKKWSQEWAIIKKADLVVLQNEIPHQANMKIANFCKEHSIKLLYNPAPSRETDIEMLDKVDYFTPNEHECQELFPNQKLEDILATYPEKLIVTLGTKGAIYSDGKESHLIPALETKAVDTTGAGDTFNGAFGYAISKKFKIANALRFATLAAHLSVQKFGAQGGMPTIKEMEDNQHYEKDWHIK

SEQ ID NO: 35863 - protein, 282 aa, Bradyrhizobium sp. BTAi1
MNVAVRSTAAKPDVAALKAQAARLRGKIIEMSHKAQAAHLASSLSCADAMTAAYWHVLNIDPKNPTDPLRDRFILSKGHAAAALFATLAMKGYFPIEELDTYCQDGGRLAEHPPANLLPGVEAATGSLGHGLPLGCGMALAGRIKGESFRVFALLSDGENNEGSVWEAAMFAAAQKLENVCVVVDYNKWQATARSNETLMLAPLRDKWAAFGWDAHEIDGHDVGALAEAMQNIPNGSGKPVALIAHTVKGKGVSFMEDDNNWHYRAPTAEEVVKSFKELGLS

SEQ ID NO: 35864 - protein, 305 aa, Burkholderia fungorum LB400
MSNPGVNSEFPLFVSAGDILTDLVRTGPSQWLSRPGGAGWNVARCVARLGLPTACAGSLGVDNFSDELWNASVAAGLDMRFMQRVERPPLLAIVHQTHPPAYFFMGENGADLAFDPARLPAGWASHVKWAHFGCISLVRQPLGNTLAALAAQLRSQGVKISFDPNYRNLMEHGYEPTLRKMAALADLIKVSDEDLRLLFKTDDEASALAQLRAMNPAATVLVTRGPETAVLIDGAVVTEARPPRVEVVDTVGAGDASIGGLLFSLMTAPQRAWPEHLAFALAAGAAACRHAGAHAPSLDEVVALL

SEQ ID NO: 35865 - protein, 156 aa, Zea mays
  misc_feature (78)..(78): Xaa can be any naturally occurring amino acid
  misc_feature (113)..(113): Xaa can be any naturally occurring amino acid
  unsure (1)..(156): unsure at all Xaa locations
SYASSKRNEDNAEGHTFMRGGARQPRPRARTRERHHRREAVQETVHDELTLDGRPRVNLRAGGGRPWIGARGADKPHXDSINANYVHMDESPATTELQSRCADRMAHLSNAPXKADETAIGVGTVRTSQAIMPAGLAANRKWLARGREQGNPCDSP

SEQ ID NO: 35866 - protein, 268 aa, Thermobifida fusca YX
MVGVAVAQFAPGMDKQANLRRAVELVRAAVDQGARLVVLPEYAMFTAPATDHRFVAAAEPLDGRYVSGLRDLARDCGVYLVAGVNEAVDDPERFANTTVAVGPDGALLVCYRKLHLYDAFGFTESAVVRPGEITDPAVFTVDGLTFGVQTCYDLRFPEVTRRLADAGAHAVVLGAEWVPGPEKKEHWKLLVRARAVENTLYVAAAGQTAPMGSGHSMVADPMGVVVASLADDEGVAVAAVDPARVAEVRALNPVLELRRFTVAPKYPV

SEQ ID NO: 35867 - protein, 754 aa, Salmonella enterica subsp. enterica serovar Paratyphi A str.
MTILTHTLGFPRVGLRRELKKAQESYWAGNSTREALLAVGRELRARHWEQQKQAGIDLLPVGDFAWYDHVLTTSLLLGNVPARHQNNDGSVDIDTLFRIGRGRAPTGEPAAAAEMTKWFNTNYHYIVPEFSKGQQFRLTWTQLLEEVDEALALGHKIKPVLLGPVTYLWLGKVKGEPFDRLTLLKDILPVYQHVLAELAKRGIEWVQIDELALVLELPQAWLDAFKPAYDALAGQVKLLLTTYFEGVTPNLDTIIALPAQGLHVDLIHGKDDVAELHQRLPVDWLLSAGLINGRNVWRADLTEKYAQINALVGKRALWVASSCSLLHSPIDLSVETRLDTEVKSWFAFALQKCGELALLRDALNSGETAALEEWSAPIQARRHSRRVHNAAVEKRLAAITAQDSQRENPYEVRAEAQRARFKLPAWPTTTIGSFPQTTEIRGLRLDFKKGNLDANNYRTGIAEHIKQAIIEQERLGLDVLVHGEAERNDMVEYFGEHLDGFVFTQNGWVQSYGSRCVKPPVVIGDISRPAPITVEWAKYAQSLTDKPVKGMLTGPVTILCWSFPREDVTRETIAKQIALALRDEVADLEAAGIGIIQIDEPALREGLPLRRSDWDAYLEWGVEAFRINAAVAKDETQIHTHMCYCEFNDIMDSIVALDADVITIETSRSDMELLESFEAFDYPNEIGPGVYDIHSPNVPSVEWIEALLKKAAQRIPAQRLWVNPDCGLKTRGWPETRAALANMVKAAHNLRQAK

SEQ ID NO: 35868 - protein, 398 aa, Mesorhizobium sp. BNC1
MSKPDSNAVMMDAALERRMIEIRRHLHRNPELSNQERETQAYLQQVLEEAGLDQVRPVAGFGLALDIVGTAAPSNRKIVIRADIDALPILETSGVPFASEKPGVMHACGHDAHSAMGYAAAVLLDRQRQTFSGTVRLIFQPAEEAEPLGGRRVVQEGLLDDIDAAIGIHVDPYTPTGKIAVGAGPYTLACDIFDVVVTGNSAHAAKPSEGVDAITVACAMVTELQKIVSREVDPYDQLVVSVTGIEGGGAYNVIAAETRLKGTIRSGRDETRQKAWRRLRQILEGVAAIHGARVEVKLQRGEPPVVNAPEMVDIIRYAGAAVVGTENVLDAPGWTAADDFAFYSEKCPSVYFRLGIRNDSIDAVHPLHHPNFRVDEAALAKGAMVLCTAAKTFLLRLD

SEQ ID NO: 35869 - protein, 593 aa, Mesorhizobium sp. BNC1
MQEGMGAIVHGNGVAFRVWAPHADAVSVVGTFNDWSDEAAPMTAEDGGFWYADLPSAKPGDEYRFLIRNGEKRLSRIDPYARAVTNSVGNGIIVEQQDDWHEAEFETPPWNELVIYEMHIGTFHRPQDNELGTFDDATERLAHLKRLGINAVQIMPAMEFAGDISWGYNPAHIFAIESSYGGPAAFKAFINAAHKQGIAVILDVVYNHFGPSDLDLWQFDGWSEDDKGGIYFYNDWRSDTPWGDTRPVYGRGEVRQFIRDNALFWLEEYHLDGLRFDMTLYIRNVRGDEGDEGDAIPEGWSLLQWVNSEIRERLPGRITIAEDLRNKAEITGAVDEGGAGFGAQWDSEFVHPIRETLIAPDDESRHMGTVAHALGHSYNGDPFQRVVYTESHDEVANGKARIPHEIAPGDPSHWAAQKRSTLGAALMLTAPGIPMLFQGQEFLQGEWFQDTVPLDWDQSEEFKGIVRLYRDLIRLRRNQMSVTSGLLGRNTRIFRVDEEKKLIAFHRWVEGGPRDDVVVVANFSHQAYASYRMGFPRQGLWNLRLNTDWSGYSPDFGSFESHDVVAEAVECDGLSWSGEVAIGPYTALVFSQD

SEQ ID NO: 35870 - protein, 605 aa, Oryza sativa
MELALVGDPSNGVAKLSCDSVGSLPAVSSKAVIHPPVTSAAGATLGRHLARRLVQIGATDVFAVPGDFNLTLLDYLIAEPGLKLIGCCNELNAGYAADGYARARGVGACAVTFTVGGLSVLNAIAGAYSENLPVICIVGGPNSNDYGTNRILHHTIGLPDFSQELRCFQTITCYQAVINNLDDAHEQIDTAIATALRESKPVYISVGCNLAGLSHPTFSREPVPLFISPRLSNKANLEHAVEAAADFLNKAVKPVMVGGPKIRVAKAKKAFAGIAESSGYPFAVMPSAKGLVPEHHPRFIGTYWGAVSTTFCAEIVESADAYLFAGPIFNDYSSVGYSLLLKREKAVIVQPDRVVVGNGPAFGCILMTEFLDALAKRLDRNTTAYDNYRRIFIPDREPPNGQPDEPLRVNILFKHIKELLSGDTALIAETGDSWFNCQKLRLPEGCGYEFQMQYGSIGWSVGATLGYAQAAKDKRVISCIGDGSFQMTAQDVSTMLRCGQKSIIFLINNGGYTIEVEIHDGPYNVIKNWDYTGLIDAIHNSDGNCWTKKVRTEEELIEAIATATGAKKDCLCFIEIIVHKDDTSKELLEWGSRVSAANSRPPNPQ

SEQ ID NO: 35871 - protein, 380 aa, Saccharomyces cerevisiae
MEFVAERAQPVGQTIQQQNVNTYGQGVLQPHHDLQQRQQQQQQRQHQQLLTSQLPQKSLVSKGKYTLHDFQIMRTLGTGSFGRVHLVRSVHNGRYYAIKVLKKQQVVKMKQVEHTNDERRMLKLVEHPFLIRMWGTFQDARNIFMVMDYIEGGELFSLLRKSQRFPNPVAKFYAAEVILALEYLHAHNIIYRDLKPENILLDRNGHIKITDFGFAKEVQTVTWTLCGTPDYIAPEVITTKPYNKSVDWWSLGVLIYEMLAGYTPFYDTTPMKTYEKILQGKVVYPPYFQPDVVDLLSKLITADLTRRIGNLQSGSRDIKAHPWFSEVVWERLLAKDIETPYEPPITSGIGDTSLFDQYPEEQLDYGIQGDDPYAEYFQDF

SEQ ID NO: 35872 - protein, 535 aa, Oryza sativa
MALAFDEFGRPFIILREQEKKSRLRGLDAQKANIAAGKAVARILRTSLGPKGMDKMLQSPDGDVTITNDGATILEQMDVDNQIAKLMVELSCSQDYEIGDGTTGVVVMAGSLLEQAEKLLERGIHPIRIAEGYELASRIAFDHLEHISHKFEFSATNIEPLVQTCMTTLSSKIVNRCKRTLAEIAVKAVLAVADLERKDVNLDLIKVEGKVGGKLEDTELVYGIIVDKDMSHPQMPKRIEDAKIAILTCPFEPPKPKTKHKVDIDTVEKFQMLREQEQKYFDEMVQKCKDVGATLVICQWGFDDEANHLLMHRNLPAVRWVGGVELELIAIATGGRIVPRFQELSPEKLGKAGIVREKSFGTTKDRMLYIEQCANSRAVTIFIRGGNKMMIEETKRSLHDALCVARNLIRNNSIVYGGGSAEISCSVAVEAAADRYPGVEQYAIRSFADALDAIPLALAENSGLSPIDTLTAVKSQQVKESNPHCGIDCNDVGTNHMKEQNVFETLIGKQQQILLATQVVKMILKIDDVISPSDY

SEQ ID NO: 35873 - protein, 1273 aa, Debaryomyces hansenii CBS767
MSLPDLQDLDIGPLDKIQNPMNKIVLDFDDTSKTVSNSQSPNPVDEETYDRYKNSTSQVDIRRNLSLVPITSEAALGSSNHEDDKDSSKISAYARLDFENFTFFVQTLQVILGRKSNDELLQSSHHAVDVHLSSTKAISRRHAKIFYNFGTQRFELSVLGRNGAFVDDAFTEKGITVPLADGTKIQIGDIPFAFVLPSIDSNTNDNSAGTAKQFNPSDAINLRSNLYKVSESPSKNDQKPKQSKEADKPREESKSNILQSPSNSNSDNSSHTSRRTSQSKSNTSRRLSGARKKSVTNDEIDDILNELETNSINAIDEEESELLDSEIQSILNDPDSHGQDEEMDLDEENLLKLTQFNEASNEEDEIDKLVQQHNLEQGVTWDEDELDREDENDDDMHDIDLDLSVLDQEIATLAPLIDAHHQDLMKEKEEKRKQLEQEKRKKELQQLRKMAGKKLPFNKPKVKPSTGSVSQPPTRSTPLMGKPAVPRMGRPASIQPPASRLYGRQAPINGLSKAQLVDNRLTTMSSPLAGLPTHLVAQGSANSGLPLKIAQGTHHSMAHLVNSQMSKPLMPPKPPAPKLDVQLQTITSSTSSTIRIPIRAITIDSKVELPPVCVPKNLTEQKDTPKVPKRRKDINQIKKAAKSIYTIDEIPEHYRIKPTLSYPLMITNVLKSKGGDIGLTLSEINESIKEIYPYYKYCPDGWQASVSHNVTLNKIFKRISKKEYDANWTWGIDDAYIAEREKVKQKQQEMAAAKAKAAAIKAEELKQKQRLEAQQGTTHNIVGRNFASPYGLSPLNAGLRMPQSQFISQLQQKQMGSANTNGQKPKTIAELASEIRRDGLIGSKAPLYFKPQSTLQVNSSGELVKRNDIPATVSSPAASTVSQQPQVTTNTIKAQLAANRSQSPSSLSPTSQGTHTLSEAKPKMNQDTKKSLAYLQKELFTLYKARKLSYNTATTTEVITKALATTIAQVNIIGVKAGCGDNALSFLVEKAPQQVSKILDIALTKSIKEKQGTLSSRPASRGNTPGPTSHSLASSPEKQISSMVNTPQLAGSPKPSSLAASPIEKLGEQLTTSSHKSESVAYSNSKENTPNALGELANDMPKPNQLSGIKSESPSASPSLTRPPVYKSGLSKPPTFFGKSESSSPSQSAFASASYSSGAGLPKPQSFSKPSALSNPPRFLSNKPARPSFHGNKDETAVPRPPSFTSGSFPSTKGQNNSTTATNSPNIRETPTGDSVAEQATVANAPGTKRSASDEGNVEEKLEDNSRKIIKIE

SEQ ID NO: 35874 - protein, 311 aa, Oryza sativa
MKRPTSSSRKSKKQGEDLAFSEEGSLPAVTMEQKDEAEMEEVDEEEEEEVDEDMAGGHAAQSPSPSCGLGEKKRRLALEQVRALERSFDTDNKLDPDRKARIARDLGLQPRQVAVWFQNRRARWKTKQLERDFAALRARHDALRADCDALRRDKDALAAEIRELREKLPTKPADTAASVKVEAGNDAAAGAAAATVCKDGSSDDSDSSVVFNDEASPYSGAAFIGFGPSFLVDDASAATVGCSSSLPALESKWHGPYSDDSCKGGVYGFTEEWLAACSGEMAGNDAAGFFSDEHASNLNFGWCASGNEGWE

SEQ ID NO: 35875 - protein, 398 aa, Saccharomyces cerevisiae
MYVEPMNNNEIRKLSITAKTETTPDNVGQDIPVNAHSVHEECSSNTPVEINGRNSGKLKEEASAGICLVKKPMLQYRDTSGKYSLSDFQILRTLGTGSFGRVHLIRSNHNGRFYALKTLKKHTIVKLKQVEHTNDERRMLSIVSHPFIIRMWGTFQDSQQVFMVMDYIEGGELFSLLRKSQRFPNPVAKFYAAEVCLALEYLHSKDITYRDLKPENILLDKNGHIKITDFGFAKYVPDVTYTLCGTPDYIAPEVVSTKPYNKSVDWWSFGVLIYEMLAGYTPFYNSNTMKTYENILNAELKFPPFFHPDAQDLLKKLITRDLSERLGNLQNGSEDVKNHPWFNEVIWEKLLARYIETPYEPPIQQGQGDTSQFDRYPEEEFNYGIQGEDPYMDLMKEF

SEQ ID NO: 35876 - protein, 400 aa, Bacillus licheniformis ATCC 14580
MTVLSKSEKIMKQTAHFGANNYHPLPIVISEAEGAWVKDPEGNRYMDMLSAYSAVNQGHRHPKIIQALKDQADKITLTSRAFHNDQLGPFYEKVASLTGKDMVLPMNTGAEAVESAVKAARRWAYDVKGVPDNQAEIIACEGNFHGRTMLAVSLSSEEEYKRGFGPMLPGIKLIPYGDLEALKQAITPNTAAFLIEPIQGEAGIVIPPEGFLKQAAEVCKERNVLFIADEIQSGLARTGKMFASDWEDVTPDMYILGKALGGGVFPISCIAANRDVLGVFNPGSHGSTFGGNPLACAVSIAALEVLEDERLAERSLELGEYFKEKLSQIDNPKIKEVRGRGLFIGVELTEAARPYCERLKEEGLLCKETHETVIRFAPPLVISHEDLDWAIEKITRVLSK

SEQ ID NO: 35877 - protein, 481 aa, Bacillus licheniformis ATCC 14580
MNHENREQYTLKRTMKSRHLFMISLGGVIGTGFFLGTGYTINEAGPIGAILSYLAGGMIMYFTMLCLGELAVAMPVSGSFQTYATKFIGPATGFAVGWIYWLGWSVTVALEFLSAGQLMKRWFPDVGVWIWCLIFGLLLFSLNALSAKAFGESEFWLSGIKIIVILLFIILGGGAMFGLIDLKDGQAAPFFSNLIGDGIFPNGFGAIFITMITVNFAFQGTELIGIAAGESENPEKTVPRSIKQTVWRTLVFFGLSVFVLAGLIPWEKAGVVESPFVVVFEQIGIPYAADLMNFVILIALLSVANSGLYASTRMLYSLAKEGMAAQALSRVNKRGIPMNALWITLGFAGLSLISSVVAAETLYIWLLSLAGLSAQVGWITITVSQLLFRRRYVKEGGKVEDLKFKTPLYPYLPLTGFILNSAVLVSLAFDSEQRMALYCGILFMSACYFVYHVFVKKRQALDRQEAMIYQNKTNDEVVIDE

SEQ ID NO: 35878 - protein, 474 aa, Pseudomonas fluorescens Pf-5
MTLYVNLAELLGTRIEQGFYRPGDRLPSVRALSVEHGVSLSTVQQAYRLLEDNGLAMPKPKSGYFVPPSRELPALPAVGRPAQRPVEISQWDQVLELIRAVPRKDVVQLGRGMPDITTPTLKPLLRALARLSRRQDMPGLHYDNIYGVLELREQVARLMLDSGCQLGAGDLVITTGCHEALSTSIRAICEPGDIVAVDSPSFHGAMQTLKGLGMKALEIPTDPITGISLEALELALEQWPIKAIQLTPNCNNPLGYIMPEPRKRALLTLAQRFDVAIIEDDVYGELAYTYPRPRTIKSFDDDGRVLLCSSFSKTLAPGLRIGWVAPGRYLERVLHMKYISTGSTAPQPQVAIAEFLKSGHFEPHLRKMRTQYQRNRDLMLDWVSRYFPAGTRASRPQGSFMLWIELPEGFDALKLNRVLLEQGVQIAVGSIFSASGKYRNCLRMNYAAKPTAQIEDAVRKVGAAAIKLLSETSD

SEQ ID NO: 35879 - protein, 213 aa, Glycine max
MLKMRGKSGLQLQVIQIQQLKIQLKMMTTKKTVPPLVAMTASENPDGYCLIKERMTQALRHFKELTEQNVLAQVWAPVRNGNRYALTTSGQPFVLDPHSNGLHQYRTASLMYMFSVDGENDEILGLPGRVFQHKIPEWTPNVQFYSSKEYQRLNHAQHYNVRGTLALPVFELARQSCVAVVELIMTSQKINYASEVDKICKAFEAVKLRSSEI

SEQ ID NO: 35880 - protein, 457 aa, Rosellinia sp. PF1022
MSTKAHLNVVVIGHVDSGKSTTTGHLIYQCGGIDKRTIEKFEKEAAELGKGSFKYAWVLDKLKAERERGITIDIALWKFETPKYYVTVIDAPGHRDFIKNMITGTSQADCAILIIAAGTGEFEAGISKDGQTREHALLAFTLGVKQLIVAINKMDTAQWAEARYNEIVKETSSFIKKVGFNPKHVAFVPISGFNGDNMLEVTKNASWYKGWEKESPKGAKISGKTLLDAIDAIEEPKRANDKPLRLPLQDVYKIGGIGTVPVGRIETGELKPGMVVTFAPAMVTTEVKSVEMHHQQLEKGNPGDNVGFNVKNVSVKDIRRGNVAGDSKNDPPYGAESFNAQVIVLNHPGQVGAGYAPVLDCHTAHIACKFSELLEKIDRRTGKSVEANPKFVKSGDAAIVKMVPSKPMCVEAFTDYPPLGRFAVRDMRQTVAVGVIKSVEKDTKVKGKETKSATKKK

SEQ ID NO: 35881 - protein, 432 aa, Bradyrhizobium japonicum USDA 110
MAIDAPSSPTAQPWSDRLRHSTIILIAAALALSVVVSLGELSVLHAVAVFLCIAAAALIPWRLHDTAASRDDVRRINPVESAAVAAVVAGMPDPAVLLDRAGRVIHLNAAAAQLAPALRRNELAQFALRSPEIITALRESIATTEPRRATYLDHVPVDRWMELIITPVPVPTTFGGADKCMLMTFHDQTPLRRVEEMRADFVANASHELRTPLAALSGFIDTLQGQAKDDPKARERFLGIMHNQATRMARLIDDLLSLSRVELSAHVRPDTLVDLLPIIRQVADGLEPLARERQVEVEIHLPEPPVMIAGDREELLRLFENLIENALKYGASGGRVIVSLTSGAATDGTQEIRVMVRDFGPGIAPEHLPRLTERFYRVDVGDSRLQGGTGLGLSLVKHILNRHRGRLLIESVPKQGATFTACFPQIRPPVTV

SEQ ID NO: 35882 - protein, 235 aa, Streptococcus pyogenes SSI-1
MVKSYSKTANHNMRRPVVKEELVHYMRTRQKQTTGFLAELEQFARQENIPIIQPEVVAYFRFLLQSLQPKHILEIGTAIGFSALLMAENAPDATIVTIDRNREMIDFAKANFAKYDSRQQIRLLEGDAADILSTLEGNFDFVFMDSAKSKYIVFLPEILRLLRVGGVVILDDVFQGGDITKPIEDIRRGQRTIYRGLQSLFDATLTHPNLTTSLVPLSDGLLMIRKNQADIVLPD

SEQ ID NO: 35883 - protein, 416 aa, Leptospira interrogans serovar Copenhageni str. Fiocruz L1-130
MKEIEYVQDLCSRAKKASKVLKQLSSSKKNKILLSLADLLEKRKAEILLANELDLKDGKEKKLSSALMDRLLLNEKRIFSMASAVREIAALPDPIGEVTRGITLPNGLELVTRRVPLGVVMVIYESRPNVTIDVGALSFKSGNACILRGGSEAFYSNEILIKLFHEILIKEEIDIGSVVFVDKTDRSFMIPFFQQTSLIDIVVPRGGEGLIRFVSENSKIPVVKHDKGVCNLYIDQDADPEKVIPIVINSKVQRPGVCNSTENLILHNGYPFRKELLEALAKEGVELLLDPSSLALYPKGKPVKQQDYLEEFLDLRLSVKTVSSLEEALAFIEKTSSGHTEAIVTEDLNTARIFTNSLDSAALFINCSTRFHDGGEFGLGAEVGISTGKLHVRGPMGLVHLTTTTTYVTGNGQIRG

SEQ ID NO: 35884 - protein, 290 aa, Leptospira interrogans serovar Copenhageni str. Fiocruz L1-130
MKPERNSLSEKIRNAEKIVIKVGSARLSGLPSEVNDFLFQLVSDIRHLRDLGKKVILVSSGAIARGRLLLSELPSTISSGDSLAEKQALAAMGQNRLVNLYDSFFSKVNLSIAQILFGVLDLESKEGYKNLKNTFTQLVEWGILPVVNENDSVATEEVKFGDNDMLSALVSLIVEADLLIILTGVDGFLKEEKVVPFLEKISKEDLGLAGGPSGPGTGGMFTKLKSAGLLSEAGIPTAILNGKKMHVIREFLEKNSIGTLVAPSGNRVFSEEDVKEIIRKNRNGNGGNSL

SEQ ID NO: 35885 - protein, 435 aa, Candida albicans SC5314
MNSLLSRRIISQPKLYKRIISTRTICNSFSLYHSNCQHQHQHQQQQQPQQEVAKTMQAIEYHGNRNLKYVTDRPIPEITHPHDVKIKISHCGICGSDLHEYLDGPIFFDGEINAVSKKKKLGQCLGHELCGVITEVGSDVSHHLQPGQHVVLEANGSCLDKKYLQQSQEEQNDVCSACAHGRYNACKRLGFYGLGYDNGGFAEYIVASENKVIPYDANIIPDEVAALVEPLAVSWHGVRQSKIEECKSPQALILGGGPIGLCTIFALKGHKVTDIVVSEPAEGRRELAQSFGVKTFNPFDYKDAEIQIKELLKMTKTNSGFTHVYDCSGNKATFNTMLKVLATGGVGTNVAIWPKVPIDFYPMDLTLNELYLTASMDYTKIDFELVVKAFETGLIDPKEAAKLVSKKVPLRDGIEHGILDLINNKEKYIKILLHP

SEQ ID NO: 35886 - protein, 397 aa, Thiomicrospira crunogena XCL-2
MAIESIKNRFAPVLAKREAEALYRRRPLVTSPQTAEMQINGLQVINFSSNDYLGLANHPALKHSCETIQDLSYGSGAAHLVTGHHLEHHLLEDELADWLGCERALLFSTGYMANLAVQQTLMQKGDWILADKLNHASLIDGARYSEADLKRYPHLDMQALEKRLQKAQQENRQCLIVTDGVFSMDGDCAPLQTIQALAKTYQAWLFLDDAHGFGTLGEQGKGTLAHFNLTPDENTIIMGTLGKAFGASGAFVAGSEVLVETLIQMARPYIYTTAMPPINARVARTALKQVQQADAEREQLKRNIQHFQTGANQLGLTLWPSDSAIQPIMLGRSAQAIQWSEALKQKGLWVTAIRPPTVPKNTARLRVTLSAAHTAEHIEKLLQALAQCQDDFPSSNT

SEQ ID NO: 35887 - protein, 320 aa, GIBBERELLA ZEAE PH-1
MTSHASAPQITVLGSLNMDLVSYVPHHPLPGETLTSSHFNTSPGGKGANQAVACGKLSRDSDLANPSANVSMVGAVGADPYGTLLLDSLRSFGVSVDSVTARQDQKSGIAIIIVDEPSGQNRIIVSPEANHSLRPADFETLPGLRPDLLIMQLEIPFDTVMQALKVAKRDGVPVLLNPAPAQTLPMDAYDGLAHLVVNETEAAILAECNESELDTPAGLERVGRVFIDRGVHNVIITLGGRGVYFVNKQGQSALLPATKTTVVDTTAAGDTFVGSYSLAAVAARGGQFDIEAAVTAANRAAALTVARKGAQISIPWKDEL

SEQ ID NO: 35888 - protein, 540 aa, Carboxydothermus hydrogenoformans Z-2901
MAGKQILFREDARRALERGVNALADAVKVTLGPKGRNVVLEKKFGSPQIINDGVSIAREIELADPVENMGAQLVKEVATKTNDVAGDGTTTATVLAQAIIREGLKNVTAGANPMILRKGIEKAVAKAVEEIKAIAKPVETSEAIAQVAAISANDEEIGKLIAEAMEKVGKDGVITVEESQGLGTTLEVVEGMSFDRGYISPYMITDPDKMEAILNDPYILITDKKISAIADLLPILEKVVQTGKPLLIIAEDVEGEALATLVVNKLRGTLTCVAVKAPGFGDRRKAMLEDIAILTNGQVVSEELGFKLENATLSMLGRAKQVRVKKEETIIVGGQGSPEAIEKRIAQIKKQIEETTSDFDREKLQERLAKLAGGVAVIQVGAATETEMKEKKLRIEDALNATRAAVEEGIVAGGGTTYIHIIKALEELEKTATGDERTGIAIVRKALEEPLKQIAINAGLEGSVIVEKVKTLPVGHGFNALTEEYVDMIAAGIVDPAKVTRSALQNAASVAAMLLTTEALVAEKPEKEKKGPDMPNMDMM

SEQ ID NO: 35889 - protein, 227 aa, Oryza sativa
LQWLIKLAIAMSKRSRSMWDMQEFVGSVDTARVLMLLAQQSQHGLLGGGGFAAGAQPVVVRGGAHDRVFECKTCNRQFPTFQALGGHRASHKRPRQQQQHALGGGAGADDAGLCLGRQPTPPRPQPAKPRVHECPVCGLEFPIGQALGGHMRRHRAEAEAAATTTTTTTKNGDVGKAAAVKACDGGGVCLDLNLTPSENRAKCRNVVGLGAGGQGVHKALAMLDCFL

SEQ ID NO: 35890 - protein, 274 aa, Triticum aestivum
  misc_feature (220)..(220): Xaa can be any naturally occurring amino acid
  misc_feature (248)..(248): Xaa can be any naturally occurring amino acid
  misc_feature (264)..(264): Xaa can be any naturally occurring amino acid
  unsure (1)..(274): unsure at all Xaa locations
NKFVQKSRLVPVRNSRDIVDPRVRGFGVNTYTLISRDGKAHLVKFHWKPTCGVKCLLDDEAVTVGGTCHTHATKDLTDSIAAGNYPEWKLFIQTIDADHEDKFDFDPLDVTKTWPEDIIPLQPVGRMVLNKNIDNFFAENEQLAFCPAITVPGIHYSDDKLLQTRIFSYADTQRHRLGPNYLMLPVNAPKCAHHNNHHDGLMNFMHRDEEVNYFPSRFDXTRHAEQYPIPPRVLSGCRGECIIEKETXFSAAGEKYRSFDPGRXDRFLKRWFDA

SEQ ID NO: 35891 - protein, 487 aa, Escherichia coli
MYLGIDLGTSEVKALVIDENNEIVATHSAPLTIQRPHPHWSEQSPQAWWEATEYLMSTLREKCGHHWQAIKAIGLSGQMHGAVLLDEKGEAIRPAILWNDTRSAQECAELEEIAPELHQVAGNLAMPGFTAPKLLWVRRHEPQHFARISTVLLPKDYLRFKMTGQKISDMSDSAGTLWLDVEKRDWSDSLLEKCGLTRANMPELVEGCDVSATLSPEVPARWGLTSSVVVAGGGGDNAVSAIGVGAVSPGDAFISLGTSGVMFVVTNAYRPAPQSAVHAFCHVLPNLWHQMSVMLSAASCLQWFCRLVGVTETELLEEIAQLSDADKASAPMFLPYLSGERTPHNDPHARGLFWGLTHSSQRALMGYAVLEGVSFGIADGLRVLQESGTAIEQCSLVGGGARSPFWAQLLADILDMPVVTHKGGETGGALGAARLACLAAGKPLAAVCEKPEIFKTWRSDPERHNALMQRYQQFTALYHNDLNYRNQ

SEQ ID NO: 35892 - protein, 2310 aa, Schizosaccharomyces pombe
MSLYKSLDVAIDYAISQLGEFQFQPIRTQSNPSSLLSACLVRAVHVETRRKVIFKFSQQTFKLENEYFLLRQLSSHPNGRNYAIAPAYILLLNETLGALIYDDPGPNILDEWLGNPNPLDLKLFLKFALGVSYVLCFLHEKKIVHGEIRLDTFHYDLNAPIHAKLLTIGSSVSPIRFTLSSLNWKRLYQVQNICHKLQFFSPEQIGNVGRPLDSRSDIYSLGILFYVILTKQYPWGGQSMRIVQSIHMRQFPSVLPRRPDAFPALDQLIQKMTAKSMNSRISSATDLCYTIVELMQEFSTITSSPLLDQKLLSINKPQQEKLKFPKLLLTNSSDYVRIFHELVAFSSKRDLLTSAKRVDKLPKQHLFKYRPVDNEATYCQVVTVTGEKGSGKSNLLNAVADEARKFGYFAMSSFKGHHFSPYSAIFKCVSLIMQQTLREEKQLVTDYFTSLWEFLGFQLIYMGELFEYVPELNSLLSPKYNLHCKRENYFKLKKRDPQQFRSASGRLGFMVCLLEILSFTSRVRPVIIILDELHLADHPSLSLIIGMISHRLPILLILAWDEPVMFKDFSKCLHEAPYAMVTDIRMNLFDRKNITEFLDSTLESPTQALGPLVLLMQKLSKGNPLVLKSLLLIAFANNGFAFHPKSSSWTYDLPVINRSFEALSSYDIPPLLASLLDALLPARCIEFLLWAALLVEPFPFELLRLITTSMHLFIPKEEILDFPLNVLQFDNDNESCQFSETFFREGILSKISLRRAESMHAQIAKELITGTAKEFYDIRTVHHILKGLGVIKKFDNTKPYILALKESADALMQFGSYEYATELLKSCLFLLPRNFWNSKLYTRKDLISIHISLAMCYWWSKDHENAIKVLKNPKLSSSNVYDYLPAFRLLTKIEYYKYQSLRSIDKAQELLSNLGLKLKEPTDDVLREFYDRLSTKFLECDFLVKQSEPLDRKRIDAISVILSECGFVLFNFSQPYYYYFSFLLAEMYLRYGNPSLRYSVMFLASYCFVTRRKPEFLLRISQVDSDLFVIKDRSAVAHAELIYWGLKRELCSTETGSAVTLESILLQCVMFGDKIYGAYCLACLMAQRVFRGDHIHQLLLDQENSETLLLLWDCEPPFTYYLMLIRNSLLALFGLTNNDDPNNILTTKQRTQKDLHDKLTSKKVPCTFCCWYYAGIIFLNTLFHHYEYVMSIAQEVRKLVDGKLYERYYLITRSFIGVAALQLLFYKKNISEFEREKVEDVAHWAQSSLSEMAKCFHAELYKLWVCLLEGLRQRNLGNYMEALRLFEKVTSMGASVFSPIEFPFVLELIGEFYYGRGHKFLAKSYITRALSCLKNIGCYGVENKLRSRYSDLISDVESRGTTVVSIATTTGDYAEKLKLLRNQDINDFSLGLASYSDIFDKPLVTLPVKKSSAVDESENDFYDRNDEESFDIVSLVSVIKCGQLLSSKLRLGPLLTTVIKLVIEYSQAKHAAIILKDASNYTLAAHGNVEKAESFEPPVILSQSDVKIPDSLLSEVFDHCRIVSLYTVSASQDAELLRWLQEEHDMDFFAIIPLQFKESVIGALYLCLSRRAIRTGNVTFLKLLSQQIAISVSNALLFQSLRRTITDNVTLIELQRLSYQRYKAIEEKCITLLDSLPCIVWTLDSDIGEIEYTNASKRNYFGVPEDCHDSLSWKTFIHPDHHHQFQEKLLNLKTLELGDIELLLRMEDGNYHWHLCRGLSFKEDANAKKWIVVCIDINDEKEAREAAMHAVNLKTNFLANMSHELRTPFSSFYGMLSLLSDTKLNEEQYDIVSTAKQSCTSLVQIIDDLLNFSELKSGKMKLEPDKVFDVEENIADCIELVYPSLSSKPVQISYDIYPNVPALLAGDSAKLRQVITNLLGNSVKFTTEGHILLRCMAIDEEINAEENQCKLRFEIEDTGIGLKEEQLKLLFNPFTQVDGSTTRIYGGSGLGLSICLQICKIMDGDIGVQSVYGEGSTFWFHVQLRNVTSKLSQKHFEESHERFANIRQSLKNAKILVVKSFTTSRSIFRSLFSLAVVDTTTIYSDIEQQLIDSLDKRQPYDFLCIEAASGQTEQIITQILSNQKLNKVLLIVLLPSIQRTKVRSDGDPFITSLNKNQSRIFCFREPIRISKLLQNFPALLSKWSTPTKLVEPSQFRASPRKVDQAVVLSSEEKEILQKKYALIAEDNLIARKLLTKQLSNLGFQVHAAVDGVELVKMYEAKQFGFYSVIFADYHMPIRDGAEAVMDIRAYERENNCSTPIPVIALTADIQKSAKQRCLEVGMNFYLTKPFTQKQLVNAVREFVLLEKSAR

SEQ ID NO: 35893 - protein, 736 aa, Podospora anserina
MASYLPSMEKVQHAVLGPRGGDKVADLQKETKEMSDKARLTTDYGVKQTSADDWLKIVNNDKTGPMLLEDPFARERIHRFDHERIPERVVHARGSGAFGKFKLFESAEDVTFAPILTDTSRETPIFIRFSTVLGSRGSADTVRDVRGFAIKFYTQEGNWDIVANNIPVFFIQDAIKFPDVIHAGKPEPHNEVPQAQTAHNNFWDFQYNHTEATHMFMWAMSDRGIPRSYRMMQGFGVNTFTLINAKGERHFVKFIFTPELGVHSLIWDEALKLAGQDPDFHRKDLWEAIENGVFPKWKFGIQVIPEADEHKFDFDILDATKIWPEDLVPVRYIGEFELNRNPDEFFPQTEQVAFCTSHIVPGIGFSDDPLLQGRNFSYFDTQLSRLGINWQELPINRPVCPVMNFNRDGAMRHTITKGTVNYWPNRFEKVKPATHEEGGYVEYAEKVAGIKARARSAKFKEHFAQAQLFWNSMSAVEKNHIINALGFELDHCEDPVVYERMVTRLADIDLGLAQTVAEMVGGEPPKEASRPNHGRKAPGLSQTEFPGSKPTIASRRIAILVADGYDQVAYSAAYAAISAGLAIPLVIGTKRSKIVAAGGAGSTTPHHHLEGFRSTMVDAIFIPGGVDSIRALSKNGRALHWIREAFGHLKAIGATGEAVDLVNKAIGLPAVSVSESAEVQDSYGVVTMRETKPGSLSEAVDIVKAGAGFMEKFFHNIAQHRCWARELDGLHSQVAY

SEQ ID NO: 35894 - protein, 171 aa, Triticum aestivum
FNSYVNLLISALPGSVDDEVNLEGLGNKIVRMAETEDQQLALLANASLLAEELLPRAAMKLYSMNPVSMDRLHRRGPEKQNRAAEQREWKRKLHRMVHKIIDRHCRQHALDLIFTEEGDTHLSPEMYINMDNTAEDPEWVPSPIFQELYAKLNNMASVAPHMFVGRERLST

SEQ ID NO: 35895 - protein, 240 aa, Psychrobacter arcticus 273-4
MSKQILLIEDDPDLAELISDYLTMNYYDVHHAGLGQEGLDLLNTKERDIDLVVLDLMLPDMDGMQVCQKIRGNKNNMTNKVPIIMLTAKGDTTDRVLGLEMGADDYIAKPFEPRELLARIRAVIRRHEQPNQADSQSDSLTFGRLSVFPDSHEVTIDDLPVRLTTHQFQLLHYFATHSGKVLNREQLWQAMPNDDSSDNIDRAIDVHISRLRALIEDNPRQPKRIITVRGVGYQFATDQV

SEQ ID NO: 35896 - protein, 396 aa, Escherichia coli
MFENITAAPADPILGLADLFRADERPGKINLGIGVYKDETGKTPVLTSVKKAEQYLLENETTKNYLGIDGIPEFGRCTQELLFGKGSALINDKRARTAQTPGGTGALRVAADFLAKNTSVKRVWVSNPSWPNHKSVFNSAGLEVREYAYYDAENHTLDFDALINSLNEAQAGDVVLFHGCCHNPTGIDPTLEQWQTLAQLSVEKGWLPLFDFAYQGFARGLEEDAEGLRAFAAMHKELIVASSYSKNFGLYNERVGACTLVAADSETVDRAFSQMKAAIDANYSNPPAHGASVVATILSNDALRAIWEQELTDMRQRIQRMRQLFVNTLQEKGANRDFSFIIKQNGMFSFSGLTKEQVLRLREEFGVYAVASGRVNVAGMTPDNMAPLCEAIVAVL

SEQ ID NO: 35897 - protein, 298 aa, Candida albicans SC5314
MVVGESRAELLNWLNSTLGLNYTKIEQCGSGAAFCQLMDTIVGDVPLSKVKFNAKTEYEFRHNYKILQHVFVKNSITKTIDVEKLIRCKLQDNLELLQWIKRYASSNNVPMKTTVARQPPKQTTKPTTSSPGSSPINAGPSAAPLISKPRERKSNTPIGSRKTSSNGPINLTPTAVRSTNIAASKNNNRSGNGTIVNNGHVGAVSASEPEAVDAAAVGAAAAAAAPIDSGATSSIPEDFAIYSQHVESERDFYFNKLRAIEILVQHAKEMEGLSGDVLQFANEIEKIMYEEYVEDDEF

SEQ ID NO: 35898 - protein, 552 aa, Deinococcus radiodurans R1
MTQAHPEWYKSAVFYELSVRTFQDGNGDGKGDFPGLTSRLDYLKNLGVDCLWLLPWFPSPLRDDGYDVADYRGIHPDLGTLDDFKVFLREAHARGLRVIGDLVTNHTSSDHPWFQAARRGPTLPDGSPNEYHDYYVWSDEGKEYADTRIIFTDTEVSNWTLDEQAGKYYWHRFFASQPDLNYDNPKVVEELHGAARFWLDLGLDGFRVDAVPYLIEREGTSCENLPETHEILKGFRAMVDREYPGRLLLAEANQWPEEVVEYFGTEAEPEFHMCFNFPVMPRLYMSLKREDTSSIREIMGRLPKIPSFGQWCTFLRNHDELTLEMVTDDERAFMYAAYAPDARMKINVGIRRRLAPLLDNDRRRIELLNTVLLALPGSPILYYGDEIGMGDDLGLPDRNGVRTPMQWNAGTSGGFSTAQPSDCFFPPIQDPVYGFGRVNVQSQLQDPSSLLKWTARQLELRRAHPAFAHGDLTFIETGNPAILAFTRQYDGETLLIVSNFAGNAQAGLLDLAPFVGRAPVTLSGASPLPVVTGNGQYPVVMGKYDYYWLRLN

SEQ ID NO: 35899 - protein, 666 aa, Xanthomonas campestris pv. campestris str. ATCC 33913
MTQPTRRQLANAIRFLAADAVEAAKSGHPGMPMGMADIAEVLWNDFFRHNPNNPQWFNRDRFVLSNGHGSMLQYALLHLSGYDLPIEQLKQFRQLHSKTAGHPERSETPGVETTTGPLGQGFANAVGFALAEKLLAQRYNRPELEIVDHRTWVFMGDGCMMEGISHEAASLAGTWGLGKLVAFWDNNQISIDGNTAGWFSDNTPARFEAYGWHVIRDVDGHDADKIKAAIEAALENSDKPTLICCRTKIGFGAPTKSGKESSHGAPLGKEELEGARKALEWPYGPFEIPEEIYAGWRAGGTGTLRQAEWEQLFDKYAKQYGEQADELTRRSRGELPADFIVQADAYIAKAQEDGQTIASRKASQLAIEAFAPLLPELVGGSADLAHSNLTLWKASKSVATDDPNANYVYYGVREFGMTAIANGLALHGGFIPFDATFLVFSDYARNGVRMSALNPAHAIHVYTHDSIGLGEDGPTHQPVEHLASLRYIPNNDVWRPGDAVESAVSWKAAITRKDGPSCLVFSRQNLQHQPRSAEQIKLIERGGYVLADAEGGTPDVILIGTGSEVGLAVEAKKTLDAAGLKTRVVSMPSTDVFDRQDAAYREQVLPNAVRKRVAVEAGVTGFWRKYVGLDGDVVGIDTFGASAPADQLYAYFKITAEHVVEAAKAL

SEQ ID NO: 35900 - protein, 726 aa, Podospora anserina
MKRLLTWATLVGSMSAVTKAACPFADPNYHLAKRDEGASQQTENILEEYEVDDSNAYMSSDVGGPMEDQNSLKAGYRGSTLMEDWIFRQKIQHFDHERIPERAVHARGAGAHGTFTSYADWSNITAASFLGGAGKKTPVFVRFSTVAGSRGSADTARDVHGFATRFYTDEGNFDIVGNNIPVFFIQDAIRFPDLIHSVKPSPDNEVPQAATAHDSAWDFFSQQPSTMHTLFWAMSGNGIPRSYRHMDGFGVHTFRFVTDDGNSKLIKWHFKTKQGKASLVWEEAQVLAGKNADFHRQDLWDAIESGNGPEWELSVQIVDEEKALAFGFDLLDPTKIIPEELAPLVPLGIMKLDRNPTNYFAETEQVMYQPGHIVRGVDFTEDPLLQGRLFSYLDTQLNRNQGGPNFEQIPINRPVSPVHNNNRDGAGQMLIHKNVYPYTPNTLNGGYPLQANQTHGKGFFTAPNRIVDGKLVRALSPTFDDHWSQPRLFYNSLTRVEQQFLINAIRFEASHLKNEQVKKNVLEQINRVSNDVAKRVAVALGLEAPAPDPAFYHNNVTAGLSIFNGTLPTIATLRVGVLASSFNDGSLAQARELKEQLSKEGVVVTVVGEVLKEGVDQTYSAADATGYDAVVVTDGAEGLLTGGKNSPLFPAGRPGQILVDSYRWGKPVAAVGENSGQALEQTVGVSRGQDEGVVVGEGVEQVVKGVEEGLRVFRYLGRFPVDEGAE

SEQ ID NO: 35901 - protein, 212 aa, GIBBERELLA ZEAE PH-1
MPAFTLYGARGSTNTDRVRLTLAEGGFTDYELVLLDLSKGQQKSKEHFARHPWGKVPAIEFSNGFTLYESRAICKYLSKKYNFPLLPSESDMETIAIFEQAQSVEMQYFAEPAGRIAFEKFAKKFIGLPPNEQVVKDAVKAVEAFFDVAEKFLSEREYMAGNEFTLVDIYYVPLVQRLFVCGFGNAITERPAVSAWWERISTRPAVQKTMAA

SEQ ID NO: 35902 - protein, 332 aa, Arabidopsis thaliana
MAKEPVRVLVTGAAGQIGYALVPMIARGIMLGADQPVILHMLDIPPAAEALNGVKMELIDAAFPLLKGVVATTDAVEGCTGVNVAVMVGGFPRKEGMERKDVMSKNVSIYKSQAAALEKHAAPNCKVLVVANPANTNALILKEFAPSIPEKNISCLTRLDHNRALGQISERLSVPVSDVKNVIIWGNHSSSQYPDVNHAKVQTSSGEKPVRELVKDDAWLDGEFISTVQQRGAAIIKARKLSSALSAASSACDHIRDWVLGTPEGTFVSMGVYSDGSYSVPSGLIYSFPVTCRNGDWSIVQGLPIDEVSRKKMDLTAEELKEEKDLAYSCLS

SEQ ID NO: 35903 - protein, 452 aa, Glycine max
METGGGRDSGMSSETINSSTQRTSMSNESVCSTSFSRLSFDLPPPSSSPETLFVKPHRSSDFAYSAILRRKSALTFRDFHLLRRIGAGDIGTVYLCRLRHDAGDEDDDEDPCFYAMKVVDKEAVALKKKAQRAEMERKILKMVDHPFLPTLYAEFEASNFSCIVMEYCSGGDLHSLQHNHPNNRFSLSSARFYAAEVLVALEYLHMLGIIYRDLKPENVLVRSDGHIMLSDFDLSLCSDAIPAVESPDCSLDPAFAPALRYTRQYSTPFSCLSNRVFRSRKVQTLQPNRLFVAEPVGARSCSFVGTHEYVSPEVASGNSHGNAVDWWSFGIFIYEMVYGRTPFAGSSNEATLRSIIKKPLAFPTSTPSSTLEMHARDLISGLLNKDPNRRLGSKRGSADVKKHPFFAGLNLALIRTVTPPEVPSLRRHKTTPFYYPANVNNSRQQLTAFDYF

SEQ ID NO: 35904 - protein, 325 aa, Wolbachia endosymbiont strain TRS of Brugia malayi
MVGAVQIKKTGGPEVLEFIDKSIGEPKGEEVLIRHTAIGLNRYDLEHRKGVRKIKGLPSVLGVEAVGVIEKLGKKIDDSLQIGDRVGYCTAPPGAYCEKRVIHQKYLVKIPDEIPDEVVAAVLFKGMTAHYLINQSYKIKPGAFVLVHGANGGLGQIICQWAKDKKGVVIGSVSSDKKMEVALQNGCTYAINYNDKNFVSKIMEITQNRGVGAVYDPIGYSTSRLSFESLSKFGIYVSYGQISGIAPVSFSLLSSRSLFATGTSIYHYKRDRFALVLTAMEIFEMVKKKLLTVRINKKYKFDEIIKAHHDMENRKVSGLNIIKVF

SEQ ID NO: 35905 - protein, 394 aa, Burkholderia fungorum LB400
MHLLDTLAEGLKEIDARGLRRRRRTADTPCAAHMTVDGRAIIGFASNDYLGLAAHPQLIAAIAEGAQRYGAGSGGSHLLGGHSRAHAQLEDDLAEFVGGFVENARALYFSTGYMANLATLTALAGRGTTLFSDALNHASLIDGARLSRADVQIYPHCDTDALSAMLEASDADVKVIVSDTVFSMDGDIAPLPRLLELAEQHGAWLIVDDAHGFGVLGPQGRGAIAQAALRSPNLISIGTLGKAAGVSGAFVAAHETVIEWLVQRARPYIFTTASVPAAAHAVSASLRIIGGEEGDARRAHLQQLIGRTRAMLKATPWLPVDSHTAVQPLIIGANDATLEIAATLDRAGLWVPAIRPPTVPTGTSRLRISLSAAHSQADLDRLEAGLQQLGAKAA

SEQ ID NO: 35906 - protein, 507 aa, Yersinia pestis
SGKHSAETHHAAKKRWLDSHDTGYHKSMGLRHIQMIAIGGSIGTGLFLGTGARLQMAGPALALVYLVCGIFSFFILRALGELVLHRPTSGSFVSYAREFLGEKASYVAGWMYFLNWAMTGIVDITAVALYMHYWGTFSDVPQWLFALGALSIVATMNMIGVRWFAEMEFWFALIKVAAIALFLIVGVIFLGTGQSVAGHTTGIHLITDNGGFFPHGLLPALIMVQGVIFAFAGIELIGTAAGECKDPEKMLPKAINSVIWRIGLFYVGSVVLLVCLLPWHAYQAGQSPFVTFFSNLGVPYIGTIMNIVVLSAALSSLNSGLYSTGRILRSLSMGGSAPKFMSKMSPQSVPYAGILVTVGIYVLGVLLNYLVPSQVFEIVLNIASLGIISSWAFIIICQMKLRQAIKRGMAKPVSFKMPGAPVTSWLTLIFLAGVLVMMAFDYPNGTWTIASIPVLTLLLIAGWFSLRKRANEVAAAPIDVWSQEILFEEPDAQNVSPKELYEQKSVG

SEQ ID NO: 35907 - protein, 151 aa, Triticum aestivum
MSIVRRTNVFDPFADLWADPFDTFRSIVPAISGGGSETAAFANARMDWKETPEAHVFKADLPGVKKEEVKVEVEDGNVLVVSGERTKEKEDKNDKWHRVERSSGKFVRRFRLLEDAKVEEVKAGLENGVLTVTVPKAEVKKPEVKAIQISG

SEQ ID NO: 35908 - protein, 305 aa, Pyrococcus abyssi GE5
MVLVMICSIGELLVDVIATEEGDLKDVRLFEKHPGGAPANVAVGIARLGFDSCLVSKVGDDPFGEFLVESLRRENVKTDGIVKDEEKHTGIVFVQLTGVSPSFILYDGVAYFNLRREDINWELINSSRIVHFGSVILARSPSRETVLDVIKRVKTIVSFDVNLRLDLWKNRGEDMLRTIEEAIKLADIVKASEEEVDYLEDNGIEVEGKLITAITMGSKGAKLNGIQVPGYKVNPVDTTGAGDAFTAALLVGIMKVREITNENLEKIGKFANLVAALSTLKRGAWSVPKVEELLKYKEAREILRL

SEQ ID NO: 35909 - protein, 170 aa, Triticum aestivum
  misc_feature (114)..(114): Xaa can be any naturally occurring amino acid
  misc_feature (130)..(130): Xaa can be any naturally occurring amino acid
  misc_feature (137)..(137): Xaa can be any naturally occurring amino acid
  unsure (1)..(170): unsure at all Xaa locations
MAPTVMASSATSVAPFQGLKSTAGLPVSRRSNGASLGSVSNGGRIRCMQVWPIEGIKKFETLSYLPPLSTEALLKQVDYLIRSKWVPCLEFSKVGFIFREHNASPGYYDCRYWXTMWKLPMFGCTDATQXINEVEEXKKEYLTRTSHIGFTTSQVQCSTQCLKHGLQDPG

SEQ ID NO: 35910 - protein, 342 aa, Candida albicans
QAVPVTLHNEQVTYAADITVGSNNQKLNVIVDTGSSDLWVPDVNVDCQVTYSDQTADFCKQKGTYDPSGSSASQDLNTPFKIGYGDGSSSQGTLYKDTVGFGGVSIKNQVLADVDSTSIDQGILGVGYKTNEAGGSYDNVPVTLKKQGVIAKNAYSLYLNSPDAATGQIIFGGVDNAKYSGSLIALPVTSDRELRISLGSVEVSGKTINTDNVDVLLDSGTTITYLQQDLADQIIKAFNGKLTQDSNGNSFYEVDCNLSGDVVFNFSFNAKISVPASEFAASLQGDDGQPYDKCQLLFDVNDANILGDNFLRSAYIVYDLDDNEISLAQVKYTSASSISALT

SEQ ID NO: 35911 - protein, 484 aa, Agrobacterium tumefaciens str. C58
MPNRSCPAMFGGRGGVSAVAFMGVRSVMNEVSKPMSNLAAIDAAHHLHPFSDMGKLNAAGTRIIERAEGVFIYDSTGKKYLDAFAGLWCVNIGYGRREIADVVQRQMNELPYYNAFFGTTTPPATLLAQKIASRAGPKMNHVFFTNSGSEATDTWFRMARVYWKALGHPTKTRVIARRNGYHGSTVAGASLGGMKWMHEQGNLPIEGIAHIGQPYWYAEGGDLSPAEFGLKVARELDAKIDELGEENVAAFVAEPIQGAGGVIVPPETYWPEIARICKARNILLVSDEVICGFGRLGSWFGYQHFGVEPDLAPVAKGLSSGYLPIGGVIVSDRVAEVMLSEVGDFNHGFTYSGHPVCAAAALENLRIIEDEGLVERVRDDIGPYFSEGWKSLADHELVGEAVNVGLMGGLQLTADKATRRRFAKPDDIGTAVRNHCLANGLVMRATGDRMLASPALTVSRSEVDEIIETLRQGLNHLRDTREHF

SEQ ID NO: 35912 - protein, 754 aa, Lycopersicon esculentum
MMKKVVSWLLFLSIVASLWVVDGYIECPCDDSDAFFSMETMLFVQKAGDLGIAVAYFSIPIEIIYFVSCSSFPFKWVLFQFGAFIVLCGLTHFLTFLTHFGKYTFHLILALIVCKLLTALVSMLTAITLMNLIPLLLKAKAREFMLRRKNRELDREVEKIKQLEELGLHVRMLTNEIRKSIDRHTILYTTLVGLSKLLSLQNCVIWMPNENRTEMKLTHDTTRENVSSVYNVPIPISDREVKEIKGSDDVKILGADSRLAAASSRGSCEPESVAAIRIPMLTVSNFRGETREIVSQCYAILVLVQPCGHGRFWLNQEVEIVRAAADQVAVALSHAAVVEESEYIKDRLTEQNQALQKAREEALRASQARSSFQTVMSHRLRRPMHSILGLLSMLQEQKLRDEQQLLVHSIIKSSNVVSTLMDDVIVTSTKENVKFPLEMKHFQLHSLIREAACTAKSLCMYKGYNITIEVEKSFPNKVMGDERRFFQVLLHIIGNLLNGIHGGHLTFKVLSASENDVSWKTPRSNSSNDIVYIKFEICTKFNRSQSEITPAPPTYDTEEIEESLSFAVCRKLVHLMQGDIFIIRNLADFDQGMAVIVGFQRQPLIPLGMSEYVESSNPTYPHPVLRGVEVLLADYDDSNRAVTKKMLEKLGCIVTLVSSGYECLGAVGPVVSSLQIILLDLHLPDLDGFEVTMRLRKHRRQTWPLIIGLAAITDEDIRKCLKIGMNGIICKPLLLSGLADELQKVLLHANRGMP

SEQ ID NO: 35913 - protein, 1484 aa, Candida albicans SC5314
MSDIPPTNESNSDSTLINQNNNGNNDNKETGKDISSTHTHHRVTFAEQQPISTSSRKSSLLRKHSSNNTSSDSDKRPSIISRNSNPDIHRDSLPPLNRGPSYNGNYTRSHSSRNVNANNTINTGVTSDSNSNNNVDSNAPISSPATPAISSPPANSKYFNLTLPAGKSREKSPGRHSKEGHTRSRSFTKQQHGIGSTSSQSSSQYLAQEKAYLRKMRNQSVDDYYSKGIPGAHEVSKADDNDDEDDDDDEEHSSFDGGDNANLLAAIDDDKYQIDYSMALSLMKNSNVNLRKIANLNTDDTDDPAIIERLEWQSMLTSVLTGDVVRSEKTKIININNPDSTQESYLHATFKENLWFGIRAKIFNRTEDEQRKIVAYRRTLVDQLIDDVMKFEIDYENSTDNPIRDQVKTILDRYDQACSLWKTLEDMYSDKPACRSEEFQNRIDALTAWLTITDAISRETKSLRLWIGNDELDITKSPVEVSSSNAATSTSKIVKKIFDEDNKSLAERLMKEKDVQTIFRKRIFKPIAPWMIKSKDTYIRLGVIFENMKLPDYLHDLLQICIIPVRLIKEIVIVRLGYAMKLQNPTLMMIDQMLDDFKSYITVALEVKSGISEYKEPDEDRKWLISDLFDSELEDFDNVILRCVRYFLVLLNRKLLDSSRSPTTFRTFKEPEELEEAWNFLKPLGHYVDGGSVVVAEEITMLASRLIHRLMAYFNHQIREPTYNGVPQDLIRWYSSTSENFGQLRRKLARFMGEISRDFKNSVVFDIPSQSNCTKTLLEILRSSNHFLVYTGTVETQGTYFFASPELLGNEQEILKILTGSCVGLDPSTDNSHFTDLLHLIRSGSEEHLRYNDDDLDSYDDSNGAYAYVLALCPMKPIVWDGLVVNVDIDSVPITDMKNGELLLVSKLSYYDLHIVRNRFLEVASEVSLGNAGLKQVEYRCSLAKVNQELKKMNRVVFKMCSSVLESVQVIKTRIAELDPVGEYQALINSYFIYARDYGKNSVRTLDPQRKSTIIMKMIQLSIDWVSFICDDCIPTDRKTFRWCVLALEFSMEMIRGINIFLLTEEQFTKLKVKVARCMSLLISHFDIMGARSSEAEKNKLLKWTAQRHNIASSQNDDEYLNKVYHEEVMGQINKIEERRRNLQEEFQSIGRVLDVSDSEYQFLTLLASSFSSVSIRWQKGACIGRGTFGQVFSAVNLDTGGVMAVKEITFHDSQSVKTIVPSIKEEMTVLEMLNHPNVVQYFGVEVHRDKVYIFMEFCEGGSLAGLLTHGRIEDEMVIQVYALQMLEGLAYLHQSGVVHRDIKPENVLLDHNGVIKYVDFGAAKVIASNGRTIGGMTNSSLRKSVKRDGHNNLNSMTGTPMYMSPEAITGTSTDRSGVVDIWSLGCCVLEMATGRRPWANLDNEWAIMYHIAAGHKPQLPSPEQLSEPGRTFLARCLEHDPTKRPSAVELLADPWMVEIRHMAFGNSDVTTTPLSEVAGPVSE

SEQ ID NO: 35914 - protein, 94 aa, Triticum aestivum
  misc_feature (78)..(78): Xaa can be any naturally occurring amino acid
  unsure (1)..(94): unsure at all Xaa locations
VGVFASVSADGSVRVFDLRDKEHSTIVYESPRPDTPLLRLAWNRYDLRYMAALLMDSNAVVVLDIRAPGVPVAELHRXGGCVNAVAWAPQAARH

SEQ ID NO: 35915 - protein, 1470 aa, Oryza sativa
MASQPLLFRVWMQIDFSFIRSIQMPQKVPLPCYLQSPPSAPHPRHSAAFSRSLRPCRPNGPPPAFASAEFPGSVPDIAQMPPRRRHRSVAGIDQDDLLDPDALADPDSSFYEINGIRVHHKVCTHEDSSDQSADSAITNADQNQIGLPIVLLHGFGSSVFSWTHIMRPLARIAGAKPINPYSMVIATLAFIDQLGAKKAVLVGHSAGCLVAVEAYFEAPERVAALVLVAPAIFVPVFRRKGVKEYGVGEQEWQNKKDSNGSNLPTNPLNRIWGKFLELCLWIAGFLMNMIRAIGSIVRSLYCKAVVAVLRSSVGVRLVRLVMDKFGILAVRNAWYDPSKVTDHVIQGYTKPLRSRGWEMALLEYTISMIMDSISSSKVPVSERLSEISCPVLVVSGDTDRLVPRWNTERVARAIPGAGFEVIKNSGHLPQEERPEEFVSVVERTAVSVTFIFCLVFGTSTVSHYKTFLSFEWIHEWIRREKLNQILLTTCLFTIIWKQFSGKIIYQKNNSPVALTGYHIQSNGALLTNFSVGISMSDHQFAGQPDVQCLVCTRPFTLDAQVTDTFEALAICRDCKATVLNDVERDEITSTSHHTRRRRQRSRTASIDSLEDAFSQEFSQLIDLARRQGRETDIDSSSVLPQHASYNATPSHSQRWHASDDESDGLNYVDSVFGEIESTISFGDYGADSDTSIEEHSVSARRRISIQLDNGSYMNTDTDIDPMNARLDQWDSDDQEDVEESGFDETINTMTQHQQQSHDIQLSGLSEDESEDGVWNWSVAVRQRANVTNLLEDMEGPEMRTTFVGNPDDYVDARQFEMLLEQFAEDNSSRRGAPPAATSFIENLPSVIISTSHQINDDVICPVCKDPIPTRARAKQLPCMHLYHSSCILPWFSSRNTCPVCRYELPTDDAEYERSKQATTNVRDIQVVEENSDEQEVQVTRQMAVGAIEETNTSEHNVRVDEQPSSARRRSGWLFIAAAPVYASTELKAGFRLSSALFYLCNILWLRAVKIRKKLRRQGIRGPKPTFLYGNTKEIKRIRQELKLSQKQGTNNFISTLFPHFLLWRETYGPVFLYSTGAMEILQVSHPDMVKDIGRWTPSELGKPNYLKKSRKALFGGGLFTENGDEWAYQRKIIAPEFFMDKIKGMIQLIEDATVPVLEAWEDMIDDEGGCREIVVDDYLRNLSADVIARACFGSSFTKGEEIFCKLRQLQKAIARQDSFVGLSALWKYLPTKSSQEIQMLDEQVRLLILDVAKEQHHYQDSHNSLVNAIIDGAQDGRSAAEAEDFIVGNCKTIYFGGHESTAVTAIWCLMLLATHPEWQERARAEAMEVTMVIQETLRLYPPASVMMREALTDVKLGSIEVPRGTIVQVPRLMLHLDKEAWGADADEFRPDRFANGVAAACRAAHMYVPFGHGPRTCIGQNLAMAELKVVLARLLTKFAFSPSPRYRHSPAFRLTIEPGFGLPLMVTKLP

SEQ ID NO: 35916 - protein, 396 aa, Campylobacter coli RM2228
MLERVKNLSDKYYEKIVNLRHQIHMHPELEFEEENTARLVCEILDEYGIKYEKNIAKTGILASIEGKKPSTKKAQCVLLRADMDALPVQEQTNLSYASKINGKMHACGHDGHTAGLLGAVLILNELRDEFSGTIKFMFQPAEEGSGGAKPMIEAGILENPHVDAVFGCHLWGPLLENTAQIVSGEMMAGVDVFDLEFIGKGGHGAHPHTTIDPIVMASKFVSDVQCIISRRLRPVDAGVITIGKFHAGTTFNVIPQNAILQGTVRFLSDENQKLLQSSIENTARAVALEFGGDFKLDYKREYPPLINDENAAKIARKAFGKVLGEQNIISVAKPDMGAEDFAFLTRERMGAYVFVGISKDLKNPTLHHSSTFCWEDENLKVLMQGDSMMALEFLNS

SEQ ID NO: 35917 - protein, 235 aa, Methanococcoides burtonii DSM 6242
MIQLVLLRHGESISNKENRFTGWADVDLSNRGIVEAKDAGKILRESGFVFDLAFTSVLKRTIKTLWIVLEKMDLMWIPVRKSWHLNERHYGALQGLNKEESLKIDGENQLLIWIKSYDTRPSGLEKNDMRYAGNDPKYKDVDGKRIPVSESLKDSVERVLPYWHHNIVPIIKSGKKVLIVAHGNSLRALIKYLDDIPDEEIVKLDISTNIPLVYELDENLKPIKHYYLDNSGVCR

SEQ ID NO: 35918 - protein, 754 aa, Lycopersicon esculentum
MGSLLRMNRLLSSIVESCNCIIDPQLPADDLLMKYQYISDFFIALAYFSIPVELIYFVKKSAVFPYRWVLVQFGAFIVLCGATHLINLWTFNMHTRNVAIVMTTPKALTALVSCITALMLVHIIPDLLSVKTRELFLKKKAAQLDREMGIIRTQEETGRHVRMLTHEIRSTLDRHTILKTTLVELGRTLALEECALWMPTRTGLELQLSYTLRHQNPVGLTVPIQLPVINQVFGTNHVVKISPNSPVARLRPAGKYMPGEVVAVRVPLLHLSNFQINDWPELSTKRYALMVLMLPSDSARQWHVHELELVEVVADQVAVALSHAAILEESMRARDLLMEQNVALDLARREAEMAVRARNDFLAVMNHEMRTPMHAIIALSSLLQETDLTPEQRLMVETILKSSNLLATLINDVLDLSRLEDGSLQLDIGTFNLHALFREVHSLIKPIASVKKLFVTLSLSSDLPEYVIGDEKRLMQILLNVVGNAVKFSKEGNVSISAFVAKSDSLRDPRAPEFFAVPSENHFYLRVQIKDTGIGITPQDIPNLFSKFTQSQALATTNSGGTGLGLAICKRFVNLMEGHIWIESEGLGKGSTAIFIIKLGIPGRANESKLPFVTKLPANHTQMSFQGLKVLVMDENGVSRMVTKGLLTHLGCDVTTVGSRDECLRVVTHEHKVVIMDVSMQGIDCYEVAVVIHERFGKRHGRPLIVALTGNTDRVTKENCMRVGMDGVILKPVSVYKMRSVLSELLEHGVVLES

SEQ ID NO: 35919 - protein, 278 aa, Triticum aestivum
  misc_feature (180)..(180): Xaa can be any naturally occurring amino acid
  unsure (1)..(278): unsure at all Xaa locations
WIPRAAGIRHEQGTADAVRQYLWLFEEHNVMEYLILAGDHLYRMDYEKFIQAHRETDADITVAALPMDEERATAFGLMKIDEEGRIIEFAEKPKGEQLKAMMVDTTILGLDDARAKEMPYIASMGIYVISKHVMLQLLREQFPGANDFGSEVIPGATSTGMRVQAYLYDGYWEDIGTIEXFYNANLGITKKPIPDFSFYDRSAPIYTQPDTCSFKRFWGSEFDITPANVNPPPPPRLKSPVKGGAHSPLRWANFWKGKWGGPFSLFPPRGKGEFSPRQ

SEQ ID NO: 35920 - protein, 136 aa, Neurospora crassa
MARTKQTARKSTGGKAPRKQLASKAARKSAPSTGGVKKPHRYKPGTVALREIRRYQKSTELLIRKLPFQRLVREIAQDFKSDLRFQSSAIGLLQESVESYLVSLFEDTNLCAIHAKRVTIQSKDIQLARRLRGERN

SEQ ID NO: 35921 - protein, 421 aa, Clostridium tetani E88
MNVEELNPFKNVQKIMKKICEDLNLNESVYELIKEPSRIVEVNIPVKMDNGSIKVFKGYRSQHNNSIGATKGGVRFHQGVNLDEVKALSIWMTLKCAIANLPFGGGKGGIIVDPKTLSKGELERLSRGYVEKLYEVLGEDLDIPAPDVNTNGEIIAWMADEYNKLSRQNAWGTFTGKPVELNGSKGRTEATGLGVAIVAREALKKLNRNIENSSVAVQGFGNVGSHAALCIENLGGKIVSVSEWDREKGFYAIYDEKGLNIKELISYFNENGTLLDFPRTSKISEEEFWSLSVDVLVPAALENSINTNNANLINAKLVCEGANGPVTPAADEILEKKGIEVTPDILTNAGGVIVSYFEWVQNLDNYYWNEKDVKTREEEFLVEGFNNVWFMKDKFNCTMRNAAYMYAINKLAKSMKARGWY

SEQ ID NO: 35922 - protein, 122 aa, Brassica napus
  misc_feature (119)..(119): Xaa can be any naturally occurring amino acid
  unsure (1)..(122): unsure at all Xaa locations
MNKGSSFKLDNDYEKRKAEAGRIREKYADRIPVIVEKAEKSDIPNIDKKKYLVPSDLTVGQFVYVIRKRIKLSAEKAIFIFVDNVLPPTGEIMSSVYEEKKDQDGFLYITYSGENTFGXSSI

SEQ ID NO: 35923 - protein, 337 aa, Bradyrhizobium sp. BTAi1
MTVLVTGGAGYIGSHMVLALAEAGENVVVIDNLSTGFSAFVPENVPLFIGDAGDEHLVDGVISQHGVDSIIHFAGSVVVPESVRDPLLYYRNNTMTTRSLLNAAVKRGVSRFIFSSTAAVYGNPEQVPVTETAPTRPTSPYGTSKLMAEIMLHDVATAHELNYVVLRYFNVAGADPQGRVGLATVGATHLMKIAMEVATGQRAKIDIYGTDYPTPDGTCIRDFIHVSDLAQAHRAALAYLRTGGSSVTLNCGYGRGYSVLETIEAVRRVSGRAIPTQYAPRRPGDIMTMVADTTRLKALLDWTPAYDNLETIADHALAWEEKLFLERHSGALQRATA

SEQ ID NO: 35924 - protein, 922 aa, Cytophaga hutchinsonii
MSALTVTQDKLGKTYHNLEFLLNCFKEVLIENGEEELARYIPWINKKGKASPDTITEKHIQVYSIAFQLLNMAEENGAVKLRRKHESEKSLSSVNGLWGKSLLMLKQKKITPEQIAEELCNVRIEPVLTAHPTEAKRTIVLEHHRQLYLLFLRWEDSTYTELEKSEIRREIKLTLDRLWRTGEIYLEKPDLSSERSNVLHYLTTVFPEVVSILDRRLGMAWEQMGFDPELIITYTKLPKISFGNWVGGDRDGHPLVTSEVTRETLELFRLNAFILMHRHLEKLEKNLSFTCLFKETIKPLQKRINELVEETGTQELLEKESNNREIFRFYIELLIMKLPLEENKGDGLRLNEKTYSYNESQKLIEDLVILRDALLAFGARAIAYNDVRDMVRLVQTFGFHLAHLDIRQNSKFHDNAISQLMNAASMDGDRFLTLNEEERCKFINKELLSLRPFSYPNTTLGPEAEAVTSCLRVVAEHVEKYGTKALGSLIVSMTRSTSDLLLVYLLAREAGLLIKTEKGIVCKLPVVPLFETIEDLQGSPHILSKFLEHPITKNSLEYHRTCTGEKEKVQQVMIGYSDSNKDGGILASQSNLSNTQLKLVDVGKKYGARIRFFHGKGGSISRGAGPTQWFIKTLPHNTIQGDMRLTEQGETISQKYANKINAAFNLELLEAGTAGYTILHKYTKHKKNRFDKHLDYLAEKSKEFYTNLITDKNFITFFGQATPIDVIEQSKIGSRPARRSGKRTLADLRAIPWVFSWAQSRFNITSWYGVGNALETFYKEQPEEFEYLKKMASSDTIIRYIFTNVDTSLAATDEKIFRSYATLVEDEEVRAEILDMIVKEYNKTKKMLALLFDNPFEVRRSFHHYSNVLRAEALNDLHYDQIELLRKWRKMNTQPQSEKANKILTELLLTVNAIAGALRNTG

SEQ ID NO: 35925 - protein, 514 aa, Oryza sativa
MQFMMPLDTNACAQPMRRAGEGAGTERLMERLNIGGMTQEKALRKRCFGDGVTGTARRVFTSDADRDTPHLRTQFSRKNYADASHVSAVILGGGTGVQLFPLTRTRATPAVPVGGCYRLIDIPMSNCFNSGINKNIFVMTQFNLTSLNRNIHHTYLVGGINLTDGSVQVLAATQMPDEPAGWFQGTADAIRKFMWILEDHIHKSIDNIVILCGDQLYRMNYMELVQKHVDTNADITISCAPIDGSRASDYGLVKFDHSGRVIQFLEKPEGADLESMVDTSFLSYAIDDKQKYPYIASMGIYVLKKDVLLDILKSKYAHLQDFGSEILPRALLEHNVKVACVFTEYWEDIGTIKSFFDANLALTEQPPKFEFYDPKTPFFTSPRYLPPARLDKCKCKIKDAIISDGCSFSECTIEHSVIGISSRVSSGCELKIYETEEETSKLLFEGKVPIGIGQNTKIRNCIIDMNARIGRNAIIANTQGVQESDHPEEGYIRSGIVVILKNATNATIKHGTVI

SEQ ID NO: 35926 - protein, 441 aa, Arabidopsis thaliana
MDNNNNNNNQQPPPTSVYPPGSAVTTVIPPPPSGSASIVTGGGATYHHLLQQQQQQLQMFWTYQRQEIEQVNDFKNHQLPLARIKKIMKADEDVRMISAEAPILFAKACELFILELTIRSWLHAEENKRRTLQKNDIAAAITRTDIFDFLVDIVPREEIKEEEDAASALGGGGMVAPAASGVPYYYPPMGQPAVPGGMMIGRPAMDPSGVYAQPPSQAWQSVWQNSAGGGDDVSYGSGGSSGHGNLDSQGGLSMEASSSQPSDSSDQTASKFLSDLPSRGFLSSTVVSSNPGSLRVYICEHDTSPPEGQLIKTNQQNILIRSLLLKKQKGESSSKDSKGTAEDGPKKRAANRALDDRSSAKRAANASRQEGSSSRTGERDFQSLTVEKLRAMLKEKGLPTKGRKATSQSCTLNSILKNLSYGVASSSLFIVALVPLIDYGT

SEQ ID NO: 35927 - protein, 214 aa, Pyrococcus abyssi GE5
MMLMPAKVVGEDKVKKQPSFVKPWLGLKYLFKKPVTIKIPYEKIDPAPKYRGFHTLDWKKCIGCNFCGQICPARAIEMTWIEVDGKMEKRPHPKIDYGRCTFCQFCVDVCPTGALGFIESYILTTTGDEEELQLFDWVPLPPDKFRELQEEYKDWRFPVEKIDFNEETKEVTYYLRNGEIFKFKILGYGLRPPKPPAKPKTQPKKEESQNQSKS

SEQ ID NO: 35928 - protein, 464 aa, Legionella pneumophila str. Paris
MILEFDTIILGGGKGGKTLAMDLAKSGQKIAMVENNQIGGTCINVACIPTKTLVQAAKVAHYCRKAKGYGLNTTLNPIDFKAIRARKDAVVNGMREANLKQFLDSGMDLMLGHGHFIGPKMIEVTLSSPRDNQKTLHITADKIIINTGALPYNPPIAGLDKVNYFTNDSLMNTDSVPQHLLIIGGGYIGLEFAQMFRRFGAEVTVIEASSEFLGREDKDIAEQVFQTLSNEGIQFAVDTKINAIRQEQTEVIIEANRQGQSEIIRGTAVLVAVGRIANTAGLHLDKTGVELDERGFIKVNEFLETTAAGIWALGDVKGGAQFTHLSLDDYRLVKHNLQNPQKKLSSQNRLIPYTVFLDPELARIGLTEAQARSQGRPIKIATIPAAAIPRAKTQGETTGVLKAVIDAETDLILGVSIFCAEAGEILGVIQLAMELRVPYQKLRDMMFAHPTLVEGINLWFAQII

SEQ ID NO: 35929 - protein, 240 aa, Zea mays
MSAAAASSVTKFIKCVTVGDGAVGKTCMLICYTCNKFPTVECSHLFTTTSLFFLSSDYIPTVFDNFSANVSVGGSIVNLGLWDTAGQEDYSRLRPLSYRGADVFILSFSLVSRASYENVLKKWMPELRRFSPTVPVVLVGTKLGISATADLREDRSYLADHSAASIISTERGEELRKQIGAVAYIECSSKTQRNVKAVLDTAIKVVLQPPRRREVTTKKMKARSNQSLRRYLCGSGCFTS

SEQ ID NO: 35930 - protein, 580 aa, Arabidopsis thaliana
MDVTKSLLCFISFVAFLLFSSVAEANKAHHHEFIIQATKVKRLCETHNSITVNGMFPGPMLVVNNGDTLVVKVINRARYNITIHWHGVRQMRTGWADGPEFVTQCPIRPGSSYTYRFTIQGQEGTLWWHAHSSWLRATVYGSLLVFPPAGSSYPFTKPHRNVPLLLGEWWDANPVDVLRESIRTGGAPNNSDAYTINGQPGDLYKCSSQDTTVVPINVGETILLRVINSALNQPLFFTVANHKLTVVGADASYLKPFTTNVIVLGPGQTTDVLITGDQPPNRYYMAARAYQSAQNAPFGNTTTTAILQYKSAPCCGVGGGSGTKKGNSFKPIMPILPAYNDTNTVTRFSQSFRSLRRAEVPTEIDENLFVTIGLGLNNCPKNFRSRRCQGPNGTRFTASMNNVSFALPSNYSLLQAHHHGIPGVFTTDFPAKPPVKFDYTGNNISRSLYQPDRGTKLYKLKYGSRVQIVLQDTGIVTPENHPIHLHGYDFYIIAEGFGNFNPKKDTAKFNLEDPPLRNTVGVPVNGWAVIRFIADNPGVWIMHCHLDAHISWGLAMAFLVENGNGVLQTIEQPPHDLPVC

SEQ ID NO: 35931 - protein, 560 aa, Arabidopsis thaliana
MGNCCGTAGSLAQNDNKPKKGRKKQNPFSIDYGLHHGGGDGGGRPLKLIVLNDPTGREIESKYTLGRELGRGEFGVTYLCTDKETDDVFACKSILKKKLRTAVDIEDVRREVEIMRHMPEHPNVVTLKETYEDEHAVHLVMELCEGGELFDRIVARGHYTERAAAAVTKTIMEVVQVCHKHGVMHRDLKPENFLFGNKKETAPLKAIDFGLSVFFKPGERFNEIVGSPYYMAPEVLKRNYGPEVDIWSAGVILYILLCGVPPFWAETEQGVAQAIIRSVLDFRRDPWPKVSENAKDLIRKMLDPDQKRRLTAQQVLDHPWLQNAKTAPNVSLGETVRARLKQFTVMNKLKKRALRVIAEHLSDEEASGIREGFQIMDTSQRGKINIDELKIGLQKLGHAIPQDDLQILMDAGDIDRDGYLDCDEFIAISVHLRKMGNDEHLKKAFAFFDQNNNGYIEIEELREALSDELGTSEEVVDAIIRDVDTDKDGRISYEEFVTMMKTGTDWRKASRQYSRERFNSISLKLMQDASLQSCVFDILANERAEYGDQERKTVLAFGCV

SEQ ID NO: 35932 - protein, 256 aa, Arabidopsis thaliana
MTTTTELTRPQQRGSGGGYLSPSRSIAFSDGTTSSGENFTTVSREFNALVIAGSSMDNNSNGTNQSGGHRDVIRDERNELTRIGENDDVGDHGQVPEEDSNPWAIVPDDYNNRDGSENNIVLASSGGQNRMVTTASVQRVKREEVEAKITAWQTAKVAKINNRFKRQDAVINGWLNEQVHRANSWMKKIERKLEDRRAKAMEKTQNKVAKAQRKAEERRATAEGKRGTEVARVLEVANLMRAVGRPPAKRSFFSLS

SEQ ID NO: 35933 - protein, 280 aa, Triticum aestivum
  misc_feature (60)..(60): Xaa can be any naturally occurring amino acid
  misc_feature (211)..(211): Xaa can be any naturally occurring amino acid
  misc_feature (222)..(222): Xaa can be any naturally occurring amino acid
  unsure (1)..(280): unsure at all Xaa locations
MGNCGTREENAVVAAHAQVQQLHLLQHSAKNALADRKHNRTFSDISDPSTPGKIEDTKDXFIYNNVIAFTLFELETITKSFRADYVLGEGGFGTVYKGYIDENVRVGLKSLPVAVKVLNKDGHQGHREWLTEVNFLGQLRHPNLVKLIGYCCEDDHRLLVYEFMFRGSLENHLFRKTASPLPWATRMSIALGAAKGLACLHNAERPVIYRXFKTSNILLDSXYTAKLSDFGLAKAGPEGDETHVSTRVMGTYGYAAPEYVMTGHLTARRRCLQYGVVMNE

SEQ ID NO: 35934 - protein, 462 aa, Ralstonia metallidurans CH34
MAQAPHIASRKLRDIVTSRTLDSFLAGVSRRDPNQPEFFQAVKEVMMTLWPFVERNPRYGDQALLERLVEPERVIQFRVAWTDDRGQVQVNRAFRVQHSSAIGPYKGGMRFHPTVNLSVLKFLGFEQTFKNALTTLPMGGGKGGSDFDPKGKTDAEVMRFCQALITELYRHLGPDTDVPAGDIGVGAREVGFMAGMMKKLSNQSACVFTGKGLAFGGSLMRPEATGYGTVYFAQEMLHRRGREFDGLRVLLSGSGNVAQYAAEKAIELGAKVLTVSDSGGVLHFPEGMNREQLDALMTFKNDTRGRLSDFAEQHGLRFEAGKTPWHVPADVALPCATQNELNGQDAERLLSNGVFCVAEGANMPSTLDAVDRFVAARILYAPGKASNAGGVATSGLEMSQNAMRMAWHHAEIDEKLHAIMKDIHGNCIHYGQKEDGYINYVEGANIAGFVKVADAMLAQGVI

SEQ ID NO: 35935 - protein, 167 aa, Vibrio vulnificus
LYARRALRGDEAARKRMIESNLRLVVKISRRYSNRGLALLDLIEEGNLGLIRAVEKFDPERGFRFSTYATWWIRQTIERALMNQTRTIRLPIHVVKELNIYLRTARELSQKLDHEPTAEEIAAQLDIPVDDVGKMLRLNERISSVDTPIGGDGEKALLDIIRDANNS

SEQ ID NO: 35936 - protein, 430 aa, Oryza sativa
MAMSRAAAAAAGTPVARRRLMGAVAARSMASWFGHVEPAAKDPILGVTEAFLADPSPDKVNVGVGAYRDDSGKPVVLECVREAGRRIAGSMNMEYLPMGGSIKMIEESLKLAYGENCEFIKDKRIAAVQALSGTGACRLFADFQKRFLPDSQIYIPTPTWANHHNIWRDAQVPQKTFTYYHPESRGLDFAGLMDDIKNAPDGSFFLLHACAHNPTGVDPSEEQWREISHQFKVKKHFPFFDMAYQGFASGDPERDAKAIRIFLEDGHQIGCAQSYAKNMGLYGQRAGCLSILCDDEMQAVAVKSQLQQIARPLYSNPPVHGALIVSTILGDPELKSLWLKEVKGMADRIIGMRTALKENLEKLGSPMSWEHITNQIGMFCYSGMTPEQVDRLTKEFHIYMTRNGRISMAGVTTGNVAYLANAIHEVTKTK

SEQ ID NO: 35937 - protein, 210 aa, Lycopersicon esculentum
MAMVNLNGISKEVHYRGVRKRPWGRYAAEIRDPGKKSRVWLGTFDTAEEAARAYDNAAREFRGAKAKTNFPKLEMEKEEDLKFAVKNEINRSPSQTSTVESSSPVMVDSSSPLDLSLCGSIGGFNHHTVKFPSSGGGFTGSVQAVNHMYYIEALARAGVIKLETNRKKTVDYLGGGDSDSSTVIDFMRVDVKSTTAGLNLDLNFPPPENM

SEQ ID NO: 35938 - protein, 166 aa, Leptospira interrogans serovar Copenhageni str. Fiocruz L1-130
MKNKILLSIIVICFGFISCLKTNGDSNQTNSKGGMMNYEVNKSDEDWKKELTPEQYRILRQKGTEMAFTGALYKNQDKGTYVCAACGAVLFSSDTKYESGSGWPSFYQPVKDGVVDKQKDSSHGMERTEILCSKCGGHLGHVFNDGPRPTGLRYCINSASLKFQKE

SEQ ID NO: 35939 - protein, 317 aa, Haemophilus somnus 129PT
MSKTLTVLGSINADHVISVPHFAKPGETLSGKQYHIAYGGKGANQAVAAARLADFSQGATVNFVGCIGSDDIGQAMKKAFAQDGINVATITEIPNEMTGIAMIQVADSGENSIVISAGANAYLTPEIVDKFATEIERADYLLMQLETPLNAILEAAKLAKKHGATVVLNPAPASQLPDELLSLLDMITPNETETEILTGVKVTDEQSAAKAASVLHQKGVATVLITLGSKGVYVSRKSSTQELGQNKVIAGFRVNAVDTTAAGDTFNGAFLTALLENKSLDEAIRFAHAAAAISVTRQGAQPSIPTRRETLDFLAQH

SEQ ID NO: 35940 - protein, 484 aa, Bradyrhizobium japonicum USDA 110
MYLGLDIGTSGVKAVLVNDAGAVVATAARELALSHPAPLWSEQDPDTWVEAATGAVDDLASCHPREVARVAGIGLSGQMHGATLLGEDGRPLRPAILWNDGRSQAECVALERRCPSLHTIAGNLAMPGFTAPKLLWVARHEPKIFARVAKVLLPKAYVRYRLTGEMVEDMSDAAGTLWLDVGQRRWSALLLHATGLDLHHMPRLVEGSAVSAVLAPEFAQRWGMAKDVVVAGGAGDNAASAIGLGAIAPGDAFLSLGTSGVMFRATDRFAPAPASAVHAFCHALPGLWHQMGVMLSAAASLAWLASVMETPAAALLAPLGERVDGPSPIRFLPYLDGERTPHNDAAASGAFVGLRGATGRGQIVQAVLEGVAFAARDNLAALSAASGPIVEVDLVGGGSRSPLWAQICADVLGITVHRVEEGEVGAALGAARLGRLAATGDDPAEVCTRPRRLASFAPRASVTAAYDEAYRRWRALYPALKESA

SEQ ID NO: 35941 - protein, 689 aa, Schizosaccharomyces pombe
MDIKDYYCVETKDSKQPGESYIYRSIHSAGKLLDTPEDGVSTVYDLLCTAAKNHGEKQAMGSRKLIKENREEREIIRKVDNEEVVEKKLWTTYELGPYEYISFNKVYEIALALGSGLVASGITSETTMLFFAATSAKWFTTAQGCSSQAIPIVTAYETLGEDGIYTSLDECKSRAIFTDPNLIPKLLGPLKQSTWVKLIVCSSTPSEDLVELVKSTAPDVEIITYDNLLSLGKEKPQPPHPPKADDICCYMYTSGSTGKPKGVVLLHRNIIAALGGINRILSQHINVKDYVLAYLPLAHIFEFIFEMCCLYWGGVLGYASPRTLTDASVVNCKGDLTEFRPTVLIGVPAVYELIKKGILAKVSSMPAHRQKVFSGSLSLKQYLIERNLPGSAALDAIVFNKVKAATGGRLRYCISGGAALAASTQAFLSSCICPVLPGYGLTETCAGSFVLSPEQWHLYANTVGFPIPSIEFKLVDIPDLGYYTDSSPPRGEVWIRGPAVCNGYLNRPEDNKAAFTEDGWFKTGDVGEIAKGNTLRLIDRKKNIVKSLNGEYIALEKIEAQFFTSPLVSNVCAYADVNHAKPVVIVNPDENGLRTYLTKNSGSSFNGNPNDTLTNLCKDSGVQHLILKELINIGKQQRLASIEIPEGVVLSDFEWTAENNFLTASRKVKRQVIVAHYSDEIQKAYSKKH

SEQ ID NO: 35942 - protein, 429 aa, Xanthomonas campestris pv. campestris str. ATCC 33913
MSDLDQVTLNAGDTSVVLPVLKPTLGNDCVDISKLTKETGLFTYDSGFTATASCKSAITYIDGDNGVLLYRGYPIEQLAEKSSFLEVSYLLMNGELPTADEFKKFDHEVTHHTMMHESLKNFLGGFRHDAHPMAMLAGSVASLSAFYHDTLDLNDPEQRRQAAIRLIAKVPTLAAAAYRYSIGWPIRYPRNNLNYVDRFLHMMFEVPSEPLEINPVVAKALDLLFILHADHEQNASTSTVRLVGSTGANPYASVAAGITALWGPAHGGANEAVLKMLEEIGTADNVESAVAKAKDKNSSFRLMGFGHRVYKNFDPRAKIIREMTHKVLGELGVNDPLLEVALKLEEAALKDDYFVQRKLYPNVDFYSGLIYKALNIPVEMFTVMFAIARTAGWVSHWLEQQVDPEMKIGRPRQIYTGYDKRDYTDAGKR

SEQ ID NO: 35943 - protein, 267 aa, Salmonella typhimurium
MAEPLTVSPELTANYAYFFDLDGTLAEIKPHPDQVVVPHKILQLLDRLAAHNAGALALISGRSMTELDALAKPFRFPLAGVHGAERRDINGKTHIVRLPEAVVREVEALLRSTLVALPGTELESKGMAFALHYRQAPEHEAALLALAQHVTQHWPQLALQLGKCVVEIKPKGTNKGEAIAAFMQEAPFAGRIPVFVGDDLTDEAGFGVVNHAGGISVKVGVGATQAAWRLESVPDVWRWLEQINYPQQEQQVMNNRRDGYESFSRSI

SEQ ID NO: 35944 - protein, 453 aa, Campylobacter lari RM2100
MENKTDLIYGLEDRPPFAKAFFAALVHLMAMFVAVITPALLICKGLGIDDANTARIICMSLFASGVASLLQIKTWGPIGSGLLSIQGTSFNFVAPIILGGLVLKNNGLSQEAMLGAIFGTLMLCSTTEMIISQILPFIRRVISPLVSGIVVMIIGLSLINVGLVSAGGGFAAKASGEFGSLQNLLLAGVVIFSIIVLNRFDNAYIRISSLFIAMIIGLLVAMTFENFSFNFNENLPLMFLPDPLHYGLSIDYNLILPLILVFMVTSLETIGDISATSEVSNQPVKGELYAKRLKGGVLANGFNSFVSAFFNTFPNSCFGQNNGVIALTGVASRYVGFIVAFMLMILGLFPIVADITLQIPEPILGGATLVMFGTIAATGVRIISKENLNRRSIIIIAMSLGIGLGVSNNPDILEFMPMWFKTLFSSGIAAGGITAIILNFVFPLEENNKNKVK

SEQ ID NO: 35945 - protein, 211 aa, Frankia sp. EAN1pec
MGILDPYKGFGVTFSTMFKKPTTEQYPEQKKETAPRFHGRHQLNRHPDGLEKCVGCELCAWACPADAIYVEGADNTDEQRFSPGERYGRVYQINYLRCILCGLCIEACPTRALTMSNDYELADDSRDDLIFTKEQLLAPLRAGMESPPHPMRLGESETDYYTRDPDAPLPWQVGGSPADEADEAGEAGEAGEAERAADKVPAHGAGSERPR

SEQ ID NO: 35946 - protein, 307 aa, Synechocystis sp. PCC 6803
MAEVVCFGEMLFDCLADQLGVPLEQVKSWTNYAGGAPANVACALVKQGVSAAFVGRLGADQAGQELKNVLQQCQVNTDGLQIDPHRPTRLVYVTRTGDGDRHFAGFGEYHTGDFADTAMQGETIPESLFTSAQYLVMGTIALAYAPSRTATERLVALAKKHQVKIFLDVNWRSVFWDDEAQAKERIPALITHAQILKCTDEEAVWLFGHQDPVTIHQKLPHLQGVLVTAGDKGCSYSLGKNHGEVPAFKVNVRDTTGAGDSFVAGFLAQALTHGENLFIDPHLSCQAVTYASAIGALTTLHPGAIAR

SEQ ID NO: 35947 - protein, 521 aa, Deinococcus radiodurans R1
MTVRPFDCLTLRRSHMPATSMEELVSLCKRRGFIFQGSEIYGGLQGFYDYGPLGVELKNNIKAAWWRSNVYERDDMEGLDASIIMHRMVLRHSGHEATFSDPMIDNKKNNKRYRLDHLLKDQKADVQAKVAEIMGESADNFAALVAALNAKPAQASAAFKEAGVRDPFSGEVGEWTDPKPFNMMFRTTIGPVADEESYGYLRPETAQGIFTNFKNVVDSTSRRLPFGIAQIGKAFRNEITPRNFIFRVRELEQMEIEFFVTPGTDEEWHEHWLEKRLKWWEDQGVPREKIEILDVPKEDLAHYSKRTYDLMYDYPTLGHEEIEGIANRSDYDLGSHTKSQSELGLVAKVEENNDSIAKLTIPHPETNKPVVPFVIEPSAGVDRAMLAVLSEAFTKETLENGNERIVLKLKPHLAPIKVAVIPLARNREEITDVAKAIKAELQGLGLGRVLYEDSGNIGKAYRRHDEVGTPYCVTVDFDTVGLGENTDESLKDTVTVRDRDTLAQERVKISELAGWIQAKLR

SEQ ID NO: 35948 - protein, 647 aa, Prochlorococcus marinus str. MIT 9312
MGNFAYWPSAKSFYEKDKFAKNRDYIENINHIDQIWENLKFKCGDTLAVYDLRGKYKEKFSYSELADLITKASFSFKNYGLVKGDVVTLISENSPRWLIADQGLMRLGAINAVRGINSPSIELDYILEHSNSVGLIVQSKETWLKLNKKEELKKRLKFIINLEDEQFESLISWSQFISEGEKEYSQNKITEKCNLSIDDVATILYTSGTTGKPKGVPLTHANFLHQIINLAHIADPGPGTSVLSVLPIWHSYERSAEYFFFSCGCTQYYTIPKFLKDDITQIKPVVMATVPRLWEAIHDGFFQALKKMPSKKQKLIKFLISNSSVFKISLRKIRNLDIFQTTFIAKIPLLFSVLGRYPLHKLSSVFLWPNILRQLCGEKLKFPINGGGALPEHVDLFFESLGIDVLVGYGLTETSPVLTCRRRELNVRGSSGQPLAFTEIKIVNEDKKKILKFREVGKILVKGPQVMKGYLNNDLATKDVLSKDGWFDTGDLGFLIPNGSLFITGRAKDTIVLSSGENIEPNPLETEILSSEFINQVQLVGQDKKCLTALVVPNVELVKNKFLEEDLSKLNLNKNIGIFFKSQINNLLKGRLGARTEEQILDCYFVDPFTLENGLLTQTLKQKRKEIEKQYSSQIENMYENKFSKKI

SEQ ID NO: 35949 - protein, 153 aa, Brassica napus
MASAVGGGSDVEVGFAKLQGEDFEYYMQSYSIMLGRNSKKSTVDVDLSSLGGGMNISRNHARIFYDFTRRRFSLEVLGKNGCFVEGVLHLPGNPNVKLDSQDLLQIGDKEILGGPRLVVSRPVGPCHKYPGSGASPCSARGPPLTSPFPPLPP

SEQ ID NO: 35950 - protein, 438 aa, Nostoc sp. PCC 7120 [sequence omitted]

SEQ ID NO: 35951 - protein, 660 aa, Xylella fastidiosa Ann-1
MIARMVNVKRAFDWSEASTSVDALPVPEAVTYSDNKRMQSVIAYLKQQEIKPLLRFITCGSVDDGKSTLIGHLLYGSQCLAEDQLADLTVDSQRYGTQGEHIDYALLLDGLAAEREQGITIDVAYRYFDTEKRKFIVADCPGHAQYTRNMATGASTADAAVVLVDARKGLLTQTRRHSYIVALLGIRHVVLAVNKMDLVGYDQQIFEAIASDYLALAAKLGINQVQCIPLSALEGDNLSKRSARMLWYVGPSLLEYLEALEPADVDLAAAMCLPVQWVNRPDSQFRGFTGTLAAGRVRSGDGVVVLPSGCVSRVVRVFNGDTEVHEAVAGQAVTLTLADEIDISRGDVIAALDDPPEVADQVTAYVLWMDDTALLPGRRYWLKLGARMVAASVSDIKHRVDVNTQEQRIAQRLQLNELGYCQLSLDAPVAFVPYARNRVLGSFILIDRQSNATVGAGTLDSGVHRASNVHWQPLDIDHVARARIKGQTPKVLWFTGLSGAGKSAIANIVDKRLHALGYHTFILDGDNVRHGLNRDLSFTAEDRVENIRRVAEVARLMVDAGLVVLVSFISPFRDERQLARERFAADEFVEVFVDVPLAVAEARDVKGLYAKARAGLITDFTGIDSPYEPPQHPELHLRADQGTPEQLASQVLSLLGVEGK

SEQ ID NO: 35952 - protein, 415 aa, Cytophaga hutchinsonii
MIKRVVVTGIGALTPIGNNTESFWNSLISGTSGAAPITKFDASKFKTRFACELKNFDPVNFMEKSEARKYDLFTQYALIAVEEAVQHAQINFETLNRNRIGVIWGSGNGGIGTFQEQVTEFVKGDGTPRFNPFFIPKMILDIAAGVISIKYGLRGANFATVSACATSNTAIIEAFNHIRWGKADMIITGGSEAPINEVSVGGFNASRALSTLNENPSIASRPFDTNRDGFVMGEGAGALILESYESAVKRNAPILAEVVGGGMAADAYHLTGTHPEGEGAYLGMLEALAEANISAADIDYVNAHATSTPQGDISEMKAIERVFGASTKLHVSATKSMTGHLLGAAGAVEAIACIKAVQHNIIPPTINTMEIDAAINPSFQFTLGEAHHKTVHYAMSNTFGFGGHIATAIFKKYEE

SEQ ID NO: 35953 - protein, 390 aa, Phlebia radiata
MAFNFAAILAFVSLAAVTSAAPSKTTCSNGVVVPDAVCCDFVPLASALQSEVLMGDCGEDAHELVRLIFHDAIAISQSMGPSAGGGADGSMLIFPTVEPAFFPNLGIADSVNNLIPFLSQFPTISAGDLVQFAGAVAISNCPGAPQLEFLAGRPNATAPAIDGLIPEPQDDVTKILARFKDAGNFSPAEVVALLASHSIARADHVDPTLDAAPFDSTPFDFDTQIFLEVLLKGVGFPGLANNTGEVSSPLPVTDGTDVGELRLQSDFALARDERTACAWQSFVNEQEAMATAFKNAVKKLAVLGHNRNDLVDCSAVVPVPKPATGTPATFPASTGPQDLELTCTTEPFPTLSTAPGAQQTLIPHCSDGTMTCNSVQFDGPATNFGGADDS

SEQ ID NO: 35954 - protein, 455 aa, Glycine max
IRLEVNTKDTDKVLNGMPSYAPPLPSSSNSMAMEATNAHPSRISEFGTLEQSLGFRVEDTINLSRNPMFNQMKSNSQALGADIQFGALNKSIATSDINLSAAIAASQALVFQKDSQPTLASTSAGRENWGETNMADASPRTDTSTDDTEDKNQRPERDESSGSKDKSDQKTLRRLAQNREAARKSRLRKKAYVQQLESSRLKLTQLEQELQRSRQQGIFISSTGDQAQSMSGNGAMAFDVEYARWLEEHNRQTNELRAAINSHAGDIELRTIVDNFMTQFDDIFRLKGIAAKADVFHILSGMWKTPAERCFMWIGGFRSSELLKLLLSQLEPLAEQQLMGIYNLQQSSQQTEDALSQGMDALQQSLSETLANGSPSSSGSSGNVANYMGQMAMAMGKLGTLEGFLHQADNLRQQTLQQMLRILTTRQSARALLAISDYFSRLRALSSLWLARPRE

SEQ ID NO: 35955 - protein, 442 aa, Pyrus communis
MMSLSVLQVKRLQPELITPAKPTPQETKFLSDIDDQEGLRFQLPVIMCYKDNPSLNKNRNPIKVIKEALSRALVYYYPLAGRLREGPNRKLMVNCNGEGILFVEASADVTLEQLGDKILPPCPLLEEFLFNFPGSDGIIGCPLLLVQVTCLTCGGFILALRLNHTMCDATGLLMFLTAITEMGRGADAPSILPVWERELLFARDPPRITCAHYEYEDVIDHSDGSYAFSNQSNMVQRSFYFGAKEMRVLRKQIPPHLISTCSTFDLITACLWKCRTLVLKINPKQAVRVSCIVNARGKHNNVHIPLGYYGNAFAFPAAVSKAEPLCKNPLGYALELVKKAKATMNEEYLRSVADLLVLRGRPQYSSTGSYLIVSDNTRAGFGDVNFGWGQPVFAGPAKALDLISFYVQHKNNIEDGILVPMCLPSSAMERFQQELERITTGT

SEQ ID NO: 35956 - protein, 190 aa, Triticum aestivum
  misc_feature (113)..(113): Xaa can be any naturally occurring amino acid
  misc_feature (157)..(157): Xaa can be any naturally occurring amino acid
  unsure (1)..(190): unsure at all Xaa locations
STHASGPTRPSTHASVGPPVRPRLPPRARKGVMQMLNAIIRNERDGILVPVPQYPLYSAAISLFGGSLVPYYLEEEANWGLDLVSTRQSVAEARSKGITVRAMVIINPGNPTXGQCLSEANIRELLNFCYQENLGLLADEVYQQNVYQDERPFISAXRKVMFDMGPPVSREVQLILPYGSKDIGMWLVGL

SEQ ID NO: 35957 - protein, 184 aa, Ustilago maydis 521
MVGKLRTWSILGFCDGDGSDIDGRRAALLMLKRLLTLPLPFAPAQSDAEYKEAFALFDKKGTGTIARESLGDLLRALGQNPTQAEVADLANAAPKDIDYASFLNILNRPNGFKPAGTPEEFIRGFQVFDKDGNGFIGAGELRYVLTSLGEKLSDDEMDELLKGVQVHPDGNIHYESFVRQILSQ

SEQ ID NO: 35958 - protein, 340 aa, Arabidopsis thaliana
MLSCAGADRLQTGMRSAFGKALGTCARVAIGQVLLSVPSSSSSSSSSFLGFETTINAMGRRPARCYRQIKGKPYPKSRYCRGVPDPKIRIYDVGMKRKRVDKFFRRAAALFGRGRIKRDAMGRRPARCYRQIKGKPYPKSRYCRGVPDPKIRIYDVGMKRKGVDEFPFCVHLVSWEKENVSSEALEAARIACNKYMVKSAGKDAFHLRIRVHPFHVLRINKMLSCAGADRLQTGMRGAFGKALGTCARVAIGQVLLSVRCKDAHGHHAQEALRRAKFKFPGRQKIIVSRKWGFTKFNRADFTKLRQEKRVVPDGVNAKFLSCHGPLANRQPGSAFLPAHY

SEQ ID NO: 35959 - protein, 567 aa, Vibrio cholerae O1 biovar eltor str. N16961
  misc_feature (520)..(520): Xaa can be any naturally occurring amino acid
  unsure (1)..(567): unsure at all Xaa locations
MISKNMRSHLKLSFKSIFSIKFIVISHLVKRVIYPYILAGQKRAFDFFILRNVGQNGRSHWRATMHMSKSFLIISMGFVAVSVQAQTLTRDNGAPVGDNQNSITAGEHGSVLLQDVHLIQKLQRFARERIPERVVHARGTGAHGEFVASGDFSDLTLSAPFTSKGKITPVFVRFSTVIHSKGSPETLRDPRGFATKFYTEQGNWDLVGNNLPVFFIRDSIKFPDMVHSLKPSPVTNLQDPNRFFDFFSHEPGSTHMLTWVYTNLGTPASYRTMDGFGVHAYKWINQKGDVNYVKFHWKSLQGIESLRPDEVVKVQGQDFNHLTNDLYTQINAGNHPKWDLYVQVLTPEQLSKLDYNGLDATKVWLDVPEKKVGTMTLNKVPDNFFLETEQSAFAPSNLIPGIEPSEDRLLQGRLFAYADTQLYRLGANLFQLPINRPLVEVNSHNQEGASNSAQTASDINYQPSRKLELKEDPQFKAVQTQLVGSVQQKAISNPRNFYQAGVLYRSLNEQDKQDLITNLXGBLNKVTDKEIKATMVSHFYRADKDYGTRLARATNTDLKQVAKLAAM

SEQ ID NO: 35960 - protein, 591 aa, Mesorhizobium sp. BNC1
MCGICGEVRFDGRTPSVSAISGMMEALAPRGPDGAGIVSHGNAGFGHRRLRIIDLSEKAQQPMVDSALGLTIAFNGCIYNYPELREALEAKGYSFFSHGDTEVILKAWHAWGETCVERFHGMFAFVIQERDTGRIVMARDRFGIKPLYLAEKSGVLRFASSLPALVKAGDVDTSIDRVALHHYMTFHAVVPPPRTILNGVRKLPPATIRVIEADGRSTERRYWDPPYRRDPADAGVSAEEWRDRVHEALRLAVKRRMVADVPVGVLLSGGVDSSLIVGLLAEAGQTGLMSFSVGFEEANGEKGDEFVYSDLIAKEFGTDHHKIFVPSDRLMDALPGTFAAMSEPMVSYDNVGFYLLSQEVSKHIKVVQSGQGADEVFGGYHWYPPLARSNDVVADYAKVFFDRSHETLKRQLGANWINGEDYSRGLVAAELMRPGADSPVDRALRLDANVMLVDDPVKRVDNMTMAWGLEARVPFLDHELVELAARIPPEEKLKDGGKGVLKDVARLVVPHEVIDRPKGYFPVPQLKYVAGPYLEMVRDALGSQRARERGLFRQDYLDRLFAQPADHITPLRGSELWQAGLLELWLQTHGI

SEQ ID NO: 35961 - protein, 447 aa, Saccharomyces cerevisiae
MREVISINVGQAGCQIGNACWELYSLEHGIKPDGHLEDGLSKPKGGEEGFSTFFHETGYGKFVPRAIYVDLEPNVIDEVRNGPYKDLFHPEQLLSGKEDAANNYARGHYTVGREILGDVLDRIRKLADQCDGLQGFLFTHSLGGGTGSGLGSLLLEELSAEYGKKSKLEFAVYPAPQVSTSVVEPYNTVLTTHTTLEHADCTFMVDNEAIYDMCKRNLDIPRPSFANLNNLIAQVVSSVTASLRFDGSLNVDLNEFQTNLVPYPRIHFPLVSYSPVLSKSKAFHESNSVSEITNACFEPGNQMVKCDPRDGKYMATCLLYRGDVVTGDVQRAVEQVKNKKTVQLVDWCPTGFKIGICYEPPTATPNSQLATVDRAVCMLSNTTSIAEAWKRIDRKFDLMYAKRAFVHWYVGEGMEEGEFTEAREDLAALERDYIEVGADSYAEEEEF

SEQ ID NO: 35962 - protein, 388 aa, Leptospira interrogans serovar Copenhageni str. Fiocruz L1-130
MKNTEKLKYVAIVSISLLLGAFLSPVMFCGTGQNSPLFLSAKGDKEPSPATRQAITIQQAFEEVYQTASPSVVSIATERIQNVPAHPGPFGDPFFDQFFGRGQGGGGRVMKQKQTGLGSGIILNTQGYILTNEHVVRSMDKLTVRLKTGKTFTAELIGSDPVIDLALLKIKPEGEIVPIELGDSSAVKVGDWAIAIGAPLGYEQSLTAGIVSAVGRTGIDNSGVHYLQTDASINQGNSGGPLLDINGRVIGINRMIASQSGGSVGIGFAIPINEAKAIMEELKTTGKVKRPAQAWLGVGVDYLHEDDAKKLNLSGGAVVVQIMNDSPADRAGIQLMDVITEISGTKINSPEEVVSTVKKNKVGDRITVTVVRQGNISRISIQLKERPN

SEQ ID NO: 35963 - protein, 340 aa, Campylobacter coli RM2228
MAVTVYYDKDCDLSLIKSKKVAIIGFGSQGHAHAMNLRDNGVNVVIGLREDGASFSKAKSAGFEVMSVSEASKVADVIMILAPDEIQADIFNAEIKPNLSEGKAIAFAHGFNIHYGQIVAPRGIDVIMIAPKAPGHTVRNEFAIGGGTPCLIAIHQDESKNAKNLALSYASAIGGGRTGIIETTFKAETETDLFGEQAVLCGGLSALIQAGFETLVEAGYEPEMAYFECLHEIKLIVDLIYQGGIADMRYSISNTAEYGDYITGPKIITEETKKAMKGVLKDIQDGNFAKDFILERRAGFARMHAERKNMNNSLIEQTGRNLRAMMPWISAKKLIDKDKN

SEQ ID NO: 35964 - protein, 587 aa, Triticum aestivum
  misc_feature (219)..(219): Xaa can be any naturally occurring amino acid
  unsure (1)..(587): unsure at all Xaa locations
MAMVDEPLYPIAVLIDELKNEDIQLRLNSIRRLSTIARALGEERTRKELIPFLSENNDDEDEVLLAMAEELGVFIPYVGGVEHAHVLLPPLETLSTVEETCVRDKAVESLCRIGAQMKKNDIVDYFIAVVKRLAAGEWFTARVSSCGLFHIAYPSATDPLKTELRTIYGQLCQDDMPMVRRAAASNLGKFAATVEQSHLKTEIMSIFDDLTQDDQDSVXLLAVEGCAALGKLLEPQDCVAHILPVIVNFSQDKSWRVRYMVANQLYELCEAVGPEPTRADLVPAYVRLLRDNEAEVRIAAAGKVTKFCRILSPQLAIQHILPCVKELSSDSSQHVRSALASVIMGMAPVLGKDATIEQLLPIFLSLLKDEFPDVRLNIISKLDQVNQVIGIDLLSQSLLPAIVELAEDRHWRVRLAIIEYIPLLASQLGVGFFDDKLGALCMQWLEDKVFSIREAAANNLKRLAEEFGPEWAMQHIIPQVLEKINNPHYLYRMTILQAISLLAPVMGAEITCQKLLPVVINSSKDRVPNIKFNVAKVLQSLVPILDQSVAEKTVKPCLVELSEDPDVDVRYYANQALQACDQIMMSS

SEQ ID NO: 35965 - protein, 475 aa, GIBBERELLA ZEAE PH-1
MSSALRRGTAQPLRWATASSSAITINTLRPCLAARRHIHSSDRRTNTIVEQRQIRDPLPSVPSKAPLSVLPLIMILRSLATMTVSSSPLLLPPSLHVMGILANTSNPILNPDKNPLLRFFLKKTFYAQFCAGEKSPEIKKTIDGLKNIGFNGVILNYAKEVVLTKDEGADLKNAAVETESAIQNEILPWARGTLETVRLAEPGDFVALKFTGAGSIALHQLKERMPPSPAMYKAIDSICQLAHERGVRLLFDAEQDMLQDGIDDWTLEFIRKYNKGLGEAVIFGTYQAYKKKCPEVLSAHLKLAKEEGFALGVKLVRGAYLNSDPRELFHDTKEDTDACFDSLSASVLTREWNADVKGSGPYPAASLVVASHNAESVRLSRAIMEAGRAKSDIAFAQLQGMADEVSCELVEANQQDKTMNLPAYKYLVWGTTGECMKYLLRRAHENKDAVQRTKGSRDALWHELVRRCKSVVGLA

SEQ ID NO: 35966 - protein, 149 aa, Triticum aestivum
  misc_feature (93)..(93): Xaa can be any naturally occurring amino acid
  misc_feature (96)..(96): Xaa can be any naturally occurring amino acid
  unsure (1)..(149): unsure at all Xaa locations
MLSLQEAIGLDMDAMTSGFGFTPWAPDTCPTLEELMAASSTSSPSSSGGAVDQAAGLVEDEEERRRRQRRKVSNRLSAQRSRARKQQRLEELXRDXARLRAEKRELAAKLHAVARHELAVRRQNARLRAEEAALKRRLHRLLAHEGLTL

SEQ ID NO: 35967 - protein, 230 aa, Zea mays
  misc_feature (96)..(96): Xaa can be any naturally occurring amino acid
  unsure (1)..(230): unsure at all Xaa locations
MAVSFANLNSEAGLKKLDEYLLTRSYITGYQASKDDLAVYTSFSAAPSSKYINVARWFNHIDALVRLSGITAEGQGVKVESSAVPSAPTPDVAGSXRAPAAEEEDDDDVDLFGEETEDEKKAAEERAAAAKASGKKKESGKSSVLLDVKPWDDETDMAKLEEAVRSVQMEGLLWGASKLVPVGYGIKKLQVMMTIVDDLVSVDTLIEDYLCAEPVNEYVQSCDIVAFNKI

SEQ ID NO: 35968 - protein, 151 aa, Schizosaccharomyces pombe
MDPSKLAKLQAGARIGGKGTPRRKVKKPSKSAMSAADDKKVQGALKKLNMQNLAGIQEVNMFKEDGGVINFRAPTVHSSLPNETTAIYGKAEEKTLSEILPGILNNLGPESLTALRQMAEQLKVSEGEKGADAQADDGEIPDLVEKFDEQD

SEQ ID NO: 35969 - protein, 542 aa, Medicago sativa
MGCLLSKDKDSEQEHNNGGYRYAESSGMHNHRNNHEQVNTSRTAPTSSYQPQIPTKPSSISAPSPKPLIKQDTNTILGKGLEDVKQFYTLGKELGRGQFGVTFLCTENSTGLLYACKSISKRKLVSKSDREDIKREIQIMQHLSGQPNIVEFKGAYEDRNSVHVVMELCAGGELFDRIIAKGHYSEKAAASICRQIVNVVNICHFMGVMHRDLKPENFLLASKDENALLKATDFGLSVFIEEGRVYRDIVGSAYYVAPEVLRPRCGKEIDIWSAGVILYILLSGVPPFWAETEKGIFDAILEGHIDFESEPWPKISDSAKDLVRKMLIQEPKKRITAAQVLEHPWIKGGNASDKPIDSAVLSRMKQFRAMNKLKKLALKVIAENMSEEEIRGLKAMFTNMDTDNSGTITYEELKAGLQRLGSKLSEAEVKQLMEAADVDGNGTIDCIEFITATMHRHKLERDDHLYKAFQYFDKDSSGFITRDELETAMKEYGMGDDATIKEIISEVDTIISEVDTDHDGRINYEEFCAMMRSGNQQQVKLF

SEQ ID NO: 35970 - protein, 577 aa, Geobacter sulfurreducens PCA
MAKKSTDEVKQLIDLGKEKGFLTYDEVNDLLPPDISSEQIDDVMSMFGEMDIDIVDSAQKVKIPKMKLDLEEEEEIEGEQEDFEYEPGALGRTSDPVRMYLREMGSVSLLTREGEVEIAKRIEEGERDIAGVILNTPITVKEIIALGEKLLRGQVSAAEISKEVEEEELEEDEEDVQKTRLLAQVEEIAAVDVRLAALNAELEEESLSASRRQELLAERQELKEKLAEMVTSLRLKDRHIAKIAQRLKELSAKVDTIMAEIAAIEKEAGVSADTLKEIAASEAVGKGIKLSLEDAQKHEKKVRSAEKKLKKVEEESGFKARELSDALRAIDRGEAKSKLAKSELVEANLRLVVSIAKKYTNRGLQFLDLIQEGNIGLMKAVDKFEYQRGYKFSTYATWWIRQAITRAIADQARTIRIPVHMIETINKLIRTSRQLVQEIGREPSPEEIAERMNLPLDKVRKVLKIAKEPISLETPIGEEEDSHLGDFIEDKGVVSPLEAVIKANLSEQTARVLATLTPREEKVLRMRFGIGEKSDHTLEEVGQDFEVTRERIRQIEAKALRKLRHPSRAKKLRSFVE

SEQ ID NO: 35971 - protein, 334 aa, Chlorobium tepidum TLS
MAKVKVGINGFGRIGRLVFRQAMENPEIEIVGINDLTDVKTLAHLLKYDSSHKKFNGEVTIEGDNLIVNGRTIAICAQKDPAQLPWASLGATLVVESTGIFTSREAASKHLAAGAKKVIISAPAKDKIDATIVIGVNDKSITGKEEIISNASCTTNCLAPMTKVLNDNFGIVKGFMTTVHAYTNDQNILDLPHKDLRRARAAACSIIPTSTGAAKAIGEVLPELAGKLDGFAMRVPIPDGSVTDLSVIIEKSATKEEINAVMKAAAEGPMKGILEYNVDPIVSCDIVGNAHSCIFDSPLTMSSGNMVKIVGWYDNELGYATRVVDLLGIYSKFV

SEQ ID NO: 35972 - protein, 904 aa, Lotus corniculatus var. japonicus
MGDGAVTTTSAAMMEAPTNETSMDFEYMSDLLLDGCWLEASADGSNFLLQQSPPFSSPLFDPSFSWPALETNEPTHVEDQHESQEAPLGNTQLVSQSQNMVNVVDGRYNNQSETETHSVVEGTSDGVKRWWIAPTCSPGLGPSIMEKLIRALKWIKQFNWNKDMLIQIWVPVPRGDRPILSANNLPFSLDSGSENLARYREISEGFQFSAEEDSKELVPGLPGRVFRDKVPEWTPDVRFFRSDEYPRVEHAREFDICGTLAVPIFEQGSRTCLGVIEVVMTTQQINYVPQLESVCKALEVVDLTSLKHSSIQNAKQARDKSYEAALPEIQEVLRSACHMHKLPLAQTWVSCFQQGKDGCRHSEDNYLHCISPVEQACYVGDPSVRFFHEACMEHHLLKGQGVAGKAFMINQPFFSTDITMLSKTDYPLSHHARLFGLRAAVAIRLRSIYSSADDYVLEFFLPVNCNDSEEQKNMLISLSIIIQRCCRSLRVITDKELERTSSSVEVMALEDSGFARTVKWSEPQHITSVASLEPEEKSSETVGGKFSDLREHQEDSILKGNIECDRECSPFVEGNLSSVGISKTGEKRRAKADKTITLEVLRQYFPGSLKDAAKNIGVCTTTLKRVCRQHGIKRWPSRKIKKVGHSLQKLQLVIDSVQGASGASFKIDSFYSNFPDLASPNLSGASLVSALNQSENPNSLSIQPDLGPLSPEGATKSLSSSCSQGSLSSHSCSSMPEQQPHTSDVACNKDPVVGKDSADVVLKRIRSEAELKSHSENKAKLFPRSLSQETLGEHTKTEYQSYLLKTCHKATPKEDAHRVKVTYGDEKTRFRMPKSWSYEHLLQEIARRFNVSDMSKFDVKYLDDDLEWVLLTCDADLEECIDVCLSSESSTIKLCIQASSGMRS

SEQ ID NO: 35973 - protein, 166 aa, Campylobacter coli RM2228
MKNIILGGGCFWCVEAAFENFEGIIHTEVGYTGGNDNPSYESVCNGDGNIEVVKIIYNEAKISLEQILSLFFKIHDPTSFDKQGADIGIQYRSAIFYENQSDKNTIEDFIKKEQVNFSLPIVTQIYKLQKYYKAEDYHQHYFIHNPNQSYCRFVIAPKLEKIRNYE

SEQ ID NO: 35974 - protein, 467 aa, Corynebacterium ammoniagenes
MAATESSDQAFGEGAEETPAVKAPAKKTAKKTAKKTAKKTAKKTAKKTAKKTAKKTAAKKTVRKSAAKKATSPAEASAESNDEEALEDQDVRPTADEDQAEVDFDPNAADEDEFGEPDDLEEDEDEEEEEDAGASVWDEDESATLRQARKDAQLTASADSVRAYLKQIGKVALLNAEQEVSLAERIEAGLYAQHRLDEMERLIAEGDAAAKLSPAQKRDLRWIARDGRKAKNHLLEANLRLVVSLAKRYTGRGMAFLDLIQEGNLGLIRAVEKFDYTKGYKFSTYATWWIRQAITRAMADQARTIRIPVHMVEVINKLGRIQRELLQDLGREPTPQELAKEMDITEEKVLEIQQYAREPISLDQTIGDEGDSQLGDFIEDSEAVIAVDAVSFTLLQDQLQDVLTTLSEREAGVVRLRFGLTDGMPRTLDEIGQVYGVTRERIRQIESKTMSKLRHPSRSQVLRDYLD

SEQ ID NO: 35975 - protein, 141 aa, Thiomicrospira crunogena XCL-2
MSLLLRNLEPFRELKELENRLHHLFPKGEESNVAAFTPTVNTREGDYAYHIEIDLPGVKKEDIHVEVKENRLMISGERKVKEEVKEEDYHRVESRYGKFERSFTLPDNVDAENVDASTTDGVLEVVLPKKERSTSKKIEVK

SEQ ID NO: 35976 - protein, 371 aa, Triticum aestivum
  misc_feature (71)..(71): Xaa can be any naturally occurring amino acid
  unsure (1)..(371): unsure at all Xaa locations
MERITTNPFYTSGIPVTVPSPLPSTTMDESFTRLPDAQNVSLERELRRTPLPPHQSTVAPICGQFHPSTGXSVGPLRSPPAVRFSSVPNPEQYNGANPYISQTPSTGSSSAMIYGSHHEGFEPTFNDFPRDVGPTWCPDPVESMLGFSDDVPVGNNLAGISPIAATDELAKQTEWWTDFMNDDWKDIADNAGAAKTQPQAGPPVQSSISVHQSASQQAGTTSVHQPALQQIVTTQSIESSVVAAPSPSASSNTSKTRMRWTPELHERFVGAVNLLGGSEKATPKGVLKLMKADNLTIYHVKSHLQKYRTARYRPELSEGTSERLEASKEEWPSIDLKGNFDLTEALRLQLELQKRVHEQLEVQSFFFFFFF

SEQ ID NO: 35977 - protein, 662 aa, Hypocrea jecorina
MSWKLTKSMSLLFPLSPTFRPPTSPSPSPFDWQNETDWPCAELKDTHLGPLSAFSRSPSTSTITDKDEKGTSPGATTPTSENAIAASEALSQAPVVKKPGILVVTIHEGQGFSLPEQHRSAFASSHQSSRSSGGALAGSVRPDGQRVAGSYTNGARPHSSGGGFGSLPTNHGRISGKYMPYALIDFDKVQVFVNSVEGSPENPLWAGGNTQYKFDVSRVTELVIHLYMRNPAAPPGSGRSQDIFLGVARINPRFEERQPTTDDAKSSKKDREKAADAQRQKGEGHSGVEWVDVQYGTGRIKVGVEFVETRAGKLKIEDFELLKVVGKGSFGKVMQVRKKDTNRIYALKTIRKAHIISRSEVAHTLAERSVLAQINNPFIVPLKFSFQSPEKLYFVLAFVNGGELFHHLQKEHRFDVNRSRFYTAELLCALECSHGFSVIYRDLKPENILLDYQGHIALCDFGLCKLDMKDEDRTNTFCGTPEYLAPELLLGQGYNKTVDWWTLGVLLYEMLTGLPPFYDENTNEMYRKILSEPLHFSDVVPPAAKDLLTKLLNRDPKKRLGANGSAEIKAHPFFHDIDWRNVLQRKYEPTFKPSVTDAMDTANFDPEFTSEAPQDSYVEGPMLSQTMQDQFQGFSYNRPIAGLGDAGGSVRDPSFVGSLQDN

SEQ ID NO: 35978 - protein, 596 aa, Thiomicrospira crunogena XCL-2
MVSLDSVDTFHFDAIIIGAGGAGLRAALQLAKSDQRVAVVSKVFPTRSHTVAAQGGINAALGNLTEDNWHWHMYDTIKGSDYLGDQDAIEFMCREASEIVRELEHFGVPFSRTEQGKIYQRPFGGQSQNFGESQATRTCAAADRTGHAILHTLYQQNLQAGTTFFDEYFAIDLVKDELGHIGGMVVMNIQTGQYQLLRAHAVMMATGGACQLFKTNTNAKINTGDGLAMVLRAGLPLQDMEFWQFHPTGVADKGMLLSEAARGEGGVLRNGNGEAFMVKYAPHVKDLASRDVVSRAIAVEVKEGRGCGPNKDYVLLDLTHLDAEVIKKRLPGIREIGLTFMGLDMCIDPIPVYPTAHYMMGGIPTNFNGQVVTLDDSGQSITVPGLYAVGECACVSVHGANRLGGNSLLDIVVFGRAAASEIERILKLQKPASFFDKALDLSSVEARLNKWEAKPDANAQAESTAQIKRDLQRVMQEGCGVFRNQESMSTLIEQLEPIQKRIDQAVLQDHSHAFNLERLEAFELENLMTLAYATVHSAIERQESRGAHSRVDFPQRDDENWLQHSLYFPQDHQLRYKPVCLTPLTVPGFEPKARVY

SEQ ID NO: 35979 - protein, 429 aa, Leptospira interrogans serovar Copenhageni str. Fiocruz L1-130
MAEVAILKIDGKEYELPIVIGTEKEKAIDISKLRQQTGYVTLDNGYLNTGACTSAVTFLDGELGILRYRGIPIEQLAENSTFTEVAYLLIYGKIPSDSELKKWNDELTMHTLIHEDLKRLYNGFPKDGHPMAIMSSMIGSLSTYYQDSYDPENAEHRHISMIRLLAKFPTIAAFAYKKSIGQPTIHPLNSLDYCANFMNMMFSVPSEDYKIDPEIVKALNLLLILHADHEQNCSTSTVRLVGSSLANLYGAISAGICALWGPRHGGANQEVLEMLQEIQASGLPVKKIVEKAKDKNDSFRLSGFGHRVYKNFDPRAKIIKKACDSVLKRLGVQDSLLDIAKELEETALHDPYFVERKLYPNVDFYSGIIYRALGIPVNMFTVMFAMGRLPGWIAQWKEMIESPDMKIGRPRQIYTGSTETSYKEAKKKA

SEQ ID NO: 35980 - protein, 1666 aa, Magnetospirillum magnetotacticum MS-1
MGLVVLANVVLIGRVISPQLDMQARVQSGIAGQQLMGLGLEAASRISAERGPSNGALGSELPLPPERTEALKAARTATDAALRQVVESLDKSPSLRHGAAVRNSLFAAGSQLETARRQIDALIARPRPERADQEVAAAVGGMVKVLPLMAPGLNVIETNLAQADPALINYVTISRLSTEMRDFAGQIGSIFTAPYVARRPLTVDELAQVERSLGTIAALDTQLRLAIDKTGSPPDLLAALATIDAEFFGGGLPLIRRIRDVGRSSGEYGMNAAEFAKIYVPQMNSILGLRAAALAAIADRMIHLEHETDATLRFNLLLTVIVVMSVLACFLLIRLRMSRPLSQVHRALGQLARGEDHMDLPVARRHDEIGEVVEALTQLAAVVRDRAHESYVSGLVARITADLQAAEDFESLARGLFSNMAPVIDLGFAVYFRCDGETGELVECGGYARHGDAPARSPSDGLVAECAAERREILISNPPEGYLKIRTGLLSAAPGAILLLPVVGGDECLGVIEMATMKPIEGRDRDVLDAVLPVLAMRMEILARSERTRQLLLATQRQAGELTAQQERIQALLSEQDAIFDNAPMGIMYTASGRIQRANPAMAELLGYTVESMKGLEASRLFATADSYREFGGLVAPKLGAGEGIHQEWDLIRGDGQLFSAMISAKGVRLEGLERASIWIVEDITERKRLEREMRESGERLRRILENSPAGVSINTEDGHSLFSNQRMAEMLATTPEELSHRSATEFWFDPTDRQEFIATLRRDGYVRDYQSRFVRADGTPITVLLASALTEFADGRYLVSWAYDITERQKAEDAVRFAGAEQQAIFEAATVGIAFLKNRVIVRGNPQLDRLFGYEPGELVGQSTRIWFPDDESFADVGDAYEALSRGEVHQREQCYVRKDGTRFWCRISGSAIDPSDLSRGAVWMLEDVTDARAAAEALAKARDVAEDAAKTKSDFLANMSHEIRTPMNAIIGMSHLALKTELNPRQRDYVKKIQQSGQHLLGIINDILDFSKIEAGKLEVEVTEVHLDKVLENVGNLISDKASAKGLELLFDLGAGVPLDLMGDSLRLGQVLINYANNAVKFTEEGEIVVAVRLLEDLGAEVMLRFEVRDTGIGLTEEQKARLFQSFQQADTSTTRKFGGTGLGLAISKKLAELMGGEVGVDSVPGEGSTFWFTARMGKGKPRAPLLPEPELVGRRMLVVDDNENARAVLVDMLSSMSFEVDSVEGGAAAIDAIREAMLDQPYEVVFLDWQMPGMDGLEVAERIHDIRLPFPPHLIMVTAYGREEIIKGAQAADIGEVLVKPVNPAALFDSIMRVFASDDRRSEEDEGTEGGTVDVSGLKGVRVLLVEDNELNQEVASEILGDAGLVVDIAANGQIAVDKAKTGHYDLILMDMQMPVMDGVTATREIRAMGFQDLPIIAMTANAMQADREKCLEAGMNDHIAKPIDPDSMFATMMKWLGRQPVAVAAPAASPDEAVAVIARLRALLADSDPEAEELVEAHGDLLRGLLGKKADRFAALVSGYDFDKALKLLPAEAKEDGRRNLPEIDPDIFDFEVMGSIYKWDLERLRPILAGFLDDAAAKVAKIEAAQPEDTALREIAHGLKGAANTAGAIRLGRLAADMESSAKADNTAALAMLAPLMAPTLDELKGALAPFLSSVTEKASS

SEQ ID NO: 35981 - protein, 298 aa, Salmonella enterica subsp. enterica serovar Paratyphi A str.
MVRIACVGITVMDRIYYVEGLPTEGGKYVAKRYTEVGGGPAATAAVAAAKLGAQVDFIGRVGDDDTGNSLLAELESLGVNTRYTRRYTQAMSSQSAIMVDAKGERIIVNYPSPDLLPDADWLNDIDFSQWDVVLADVRWHDGAKQAFTLARQAGVMTVLDGDITPQDISELVALSDHAAFSEPGLARLTGMSEAIDALKKAQMLTNGHVYVTRGSEGCNWLEKAVVRHQPGFTVEVVDTTGAGDVFHGALAFGLASGYAIEEAVRFASGVAALKCTRPGGRAGIPDCEQTRSFLSLFV

SEQ ID NO: 35982 - protein, 239 aa, Phalaenopsis equestris
MDSSSMEPKEKMGRGKIEIKRIENTTNRQVTFCKRRNGLLKKAYELSVLCDAEVALIIFSTRGRLYEYANNSVKGTIERYKKASTDNSNTGSISEANSQYYQQEATKLRQQITNLQNSNRNLLGDALTTMSLRDLKQLETRLEKGINKIRAKKNELLHAEIDYMQKREMELQTDNMFLRNKISDNERAQQQHQHMSILPSTSTEYEVMPPFDSRSFLHVNLMDPNDRYSHQQQTALQLG

SEQ ID NO: 35983 - protein, 254 aa, Glycine max
MARTGPSHFLLSMLCEILSRRFEKMSKLQSDALREAISGIMADSKEKNRKFVETIELQIGLKNYDPQKDKRFSGSVKLPHIPRPKMKICMLGDAQHVEEAEKIGLDWMDVEALKKLNKNKKLVKKLAKKYHAFLASEAVIKQIPRLLGPGLNKAGMYCRRKFPTLVTHQETLESKVNESKAMVKFQLKKVLCMGVAVGNVSMEEKQIFQNVQLSVNFLVSLLKKNWQNMMKRFFIVSSFYNMPVQYALNVISHQ

SEQ ID NO: 35984 - protein, 332 aa, Glycine max
MAKDPVRVLVTGAAGQIGYALVPMIARGVMLGPDQPVILHMLDIPPAAESLNGVKMELVDAAFPLLKGVVATTDVVEACTGVNIAVMVGGFPRKEGMERKDVMTKNVSIYKSQASALEKHAAANCKVLVVANPANTNALILKEFAPSIPEKNISCLTRLDHNRALGQISERLTVQVSDVKNVIIWGNHSSTQYPDVNHATVATSAGEKPVRELIADDAWLNGEFITTVQQRGAAIIKARKLSSALSAASAACDHIRDWVLGTPQGTWVSMGVYSDGSYNVPAGLIYSFPVTCANGEWAIVQGLSIDEFSRKKLDLTAEELSEEKALAYSCLN

SEQ ID NO: 35985 - protein, 240 aa, Nocardia farcinica IFM 10152
MADSDERISHHEPHSRGLSTRLNWLRAAVLGANDGIVSTAGLVVGVAAATTTQSAIFTAGIAGVSAGAISMAVGEYVSVSTQRDSEEALLAKERRELREDPADELRELAAIYEAKGLSPATARTVAEELTAHDAFTAHAEAELGLDPGALTNPWQAAASSAVSFTLGALLPLLAILLPPVTARIPVTFAAVLVALALTGSISARLGGSNRLRAVVRVVVGGALAMTITYCIGQIADVAGI

SEQ ID NO: 35986 - protein, 1043 aa, Vibrio vulnificus
MFTATDVLKPEFVAQPLDKLWALISPLYMVDESQWLEQLLPLATPSAEEKQAIASRTTQLIEAIRADKKSIQLIDALLLEYSLDTHEGILLMCLAEALMRIPDAATADALIKDKMSVADWKSHLKNSESVFVNASTWGLMLTGKVVGLGDDETQSASQALNRLVNKLSEPVIRKAMYQAMKIMGHQFVRGRTIEEAQKNGRPMRDKGFTYSFDMLGEAALTTADANKYFKDYLMAIEAVGRETYGNDTSPAPSVSIKLSALHPRYEVANEHRVMSELFDTLAQLLKRAVELDVAITIDAEEADRLELSLKLFEKLYRSETVKGWGKFGLVVQAYSKRALPVLVWLNALAKEQGDLIPLRLVKGAYWDSEVKWSQQRGYDNYPVYTRKEATDVAYLACARFLLSDDVRGNIFPQFASHNAQTVSSIATMATHSDYEFQRLHGMGDSLYNHVMEQYRQPVRIYAPVGSHKDLLPYLVRRLLENGANSSFVHRLVDARCPVAELTKHPVEALTSFETLNNTKIPLPAAIFPERKNSYGVNVDIESEAKPFEAQVESFLSKQWLAGPIINGASLAESMIKDGQAESVTAPYDRRIQVGQIAFANLDHVSQAIDIAQAAFADWNRTPLVEKARCLDNLADLMEANLAELVALCHQEAGKTLHDSIDEVREAVDFCRYYAKQAQNLQPFELEGFDGVKRIASREGLGVFVCISPWNFPLAIFLGQVTAALVAGNTVVAKPAEQTSLIAVRAVELMLQAGFPASVVQLIPGRGADIGSALTSHPSIAGVAFTGSTATAQRINVTLAQREAKPVPFIAETGGQNAMIVDSTALPEQVVRDVIRSAFASAGQRCSALRVLFVQQDIADRVIGLIQGAMNELSVGVPYLHKTDVGPVIDARAKEKLLQHIEQMNQTQKPIAQLTLADDCQHGDFVTPTAFEISGIDVLKEEQFGPILHIVRFKASELTRVVEHINQTGFGLTMGIHSRNETTYRWIEKHARVGNCYINRDQVGAVVGVQPFGGQGLSGTGPKAGGPHYLYRFTQVQFNQTENA

SEQ ID NO: 35987 - protein, 297 aa, Arabidopsis thaliana
MGVREKDPLAQLSLPPGFRFYPTDEELLVQYLCRKVAGYHFSLQVIGDIDLYKFDPWDLPSKALFGEKEWYFFSPRDRKYPNGSRPNRVAGSGYWKATGTDKIITADGRRVGIKKALVFYAGKAPKGTKTNWIMHEYRLIEHSRSHGSSKLDDWVLCRIYKKTSGSQRQAVTPVQACREEHSTNGSSSSSSSQLDDVLDSFPEIKDQSFNLPRMNSLRTILNGNFDWASLAGLNPIPELAPTNGLPSYGGYDAFRAAEGEAESGHVNRQQNSSGLTQSFGYSSSGFGVSGQTFEFRQ

SEQ ID NO: 35988 - protein, 370 aa, Rhodobacter sphaeroides 2.4.1
MPLQAPDIRSAKRLVVKIGSALLVDGEGLRRQWLSALALDVAEARTRGTQVILVSSGSIALGRRVLHLPPGPLALEQSQAAAAVGQIRLARAYEEVLAPHGITTAQVLVTLEDTEDRRRYLNSRATMETLLGLGTVPIVNENDTVATDEIRFGDNDRLAAQIAVTVGADQLVLLSDVDGFYSANPKEDPTAERFDLVETITPALEAMAGDPVSGLSKGGMKTKIMAAKTAVAGGCAMAITEGSAMRPLKALEQGAARTWFVAQGDPQAARKRWINAMKPRGTIRVDAGAVQALQAGKSLLPAGVVAVEGNFGRGDPVEIAGPMGEVLGRGLTRYTAVEAVQIAGHRSAEIVAILGYSGRAALIHRDDMVI

SEQ ID NO: 35989 - protein, 420 aa, Rhodobacter sphaeroides 2.4.1
MDGTDVTMLMREIGVRARAAAAELAFAEPSRKEEALNAAAEAMLARSDEILEANGRDLAFGAEKGLTPAMMDRLKLDAARIDGIVEGLRAVAGQPDPVGQVIAEWDRPSGLHIRRVRTPLGVVGVIYESRPNVTADAGALCLKSGNAVILRGGSESFHSSGAIHAALQDGLRQAGLPVDAIQRVPTRDRAAVAEMLRMVEHIDVIVPRGGKGLVGLVQAEARVPVFAHLEGICHVYADGEADLEKARRVVLNAKTRRTGICGSAECLLIDRAFLAKHGPVLIEDLLKAGVEVRAEGELAQVPGTVPAQPEDFGREFLDMIIAAKVVDGVDEAIAHIRRYGSSHTESILTENDATAERFFRRLDSAILMRNASTQFADGGEFGMGAEIGIATGKMHARGPVGAEQLTSFKYLVTGDGTIRT

SEQ ID NO: 35990 - protein, 428 aa, Methanosarcina barkeri str. fusaro
MRLKANREKISNKQEDTKGGKNVQVIVVGGFLGSGKTTTIINMGKYLAEKGKKVAIIVNEIGEVGIDGDVIKKFGFDTKEITSGCICCSLKVGLRVTVTHLANEYKPDILMIEPTGIAFPNLIKKEIELMNLGEQVKIAPLVTLIDGSRFKYLMKEVKEFAMRQIIDAEILGINKIDLIEPIRIPILEASVQQLNPKSRVVLLSGKDTGESFENFMRLVLPDLEELSKEVPTEITEEVKPSKAEPSAPQETENSIEASKVGSYSVEFAVENGNLSTEVSRELTTELMNTIKAKVLQLNPEFIGHIKLFLDNGSETVKQNITIYYEEPQEDVIKSKEGATPTLKILSAVSNVDKEAVKAAVNDSVHEVFERKQIKVNKIEHEHNHEHEHHEHEHHEHEHHEHEHHEHEHHEHEHHEKHKHGDQEEEISE

SEQ ID NO: 35991 - protein, 771 aa, Cyanophora paradoxa
MSAFVVPVPSGSSSSAQIVASSQVVISREHAPKIHSRAQNFAIDTRARSFLNTPSQAAQFRQFNGLRRAESVFSKKSDANAALRQSKVAASTGFVINNQATAAMTPVDDKCINSIRFLAIDAIEKAKSGHPGLPMGCAPMSYVLFNEFMKFNPKNPDWIDRDRFVLSAGHGCMLQYALLYLTGYDSVGIEDIKTFRQWESECPGHPENFVTKGIEVTTGPLGQGIAQAVGLAMGEAHLAARFNKPDVKLIDHYTYVIMGDGCNMEGVAAEAASLAGHYGLGNLIALYDDNEISIDGNTDISFTEDVTKRYQSYGWHTVVVEDGNTDINAIRKAIAEAKAVTDKPSLVTIRTTIGYGSPNKANSYAVHGAALGDKEVDATRQNLNWPYAPFEIPEEAMNKWREAIPKGKSAEDEWNKKFAEYKAKYPQEAADFEKYVMKKELPANWEKCLPVYDPATDAGDATRILTGNTLNAIADAVPTFLGGSADLASSNMTLLKKYADFQKTSPEGRNLRFGVREFAMAAIANGLHLHPSGLIPYGATFLVFSDYMRAAMRLSSLSKCRTIYVLTHDSIGAGEDGPTHQPIEHLAAHRAVPNTFVFRPCDGNEVSGAYKVAVEERETPSLMILTRQKIPTLDGTSIANTAKGAYVLSDNSTNGKPDLILMGTGSEVHLCVNAAEAIRKEGKTVRVVSMPSWELFERQSAEYEASVFPKDCKRALAVEAASSFGWHKYFGDEGAMVSIDGFGASAPGDKLMQEFGFTTENVIAQAKKLLA

SEQ ID NO: 35992 - protein, 168 aa, Triticum aestivum
  misc_feature (71)..(71): Xaa can be any naturally occurring amino acid
  unsure (1)..(168): unsure at all Xaa locations
LRFNRVFNEGMKNHSIIITKKLLELYKGFNGLDTLVDVGGGIGATVGAITAHYPTVKGINFDLPHVISEAXILHDWSDEHCATLLKNCYDALPAHGKVVLVECILPVNPEATPEAQGGFHLDMIMLAHNPGGRERYEREFEALAKGAGFGAIKTTYIYANIWVIEFTK

SEQ ID NO: 35993 - protein, 414 aa, Desulfotalea psychrophila LSv54
MKRRVVVTGVGLVTPLGTGVEKTWENLCAGKSGIDTITRFDTSDFAVKIAAEVKDFQAEDFFDKKSAKHMDLFAQYGVAAAVMALKDSGFEITEENCERVGVITGCGMGSLPMIEKYHQVFMEKGPRKISPFFIPMAIPNMPSGHISMRIGAKGPNLALTTACAAGTHAVGEAFNAVSSGKCLAIVAGGTESVICPTGIGGFTALKALSTRNDDPAASSRPFDKDRDGFVMAEGAGMLILEDYEHAIARGARIYAEMAGYGLSSDAYHITAPPEDGEGGARAMKMAIEDAGFQPEDIDYINAHGTSTPLNDRCETRAIKSVFGEHAYKLAISSTKSMLGHMLGATGGVEAVLTALSLDKQFVLPTINLQEPSPECDLDYTPNVGRSMKMRAAISNSFGFGGTNAVVAMKQYIGE

SEQ ID NO: 35994 - protein, 333 aa, Mycobacterium bovis AF2122/97
MFYDDDADLSIIQGRKVGVIGYGSQGHAHSLSLRDSGVQVRVGLKQGSRSRPKVEEQGLDVDTPAEVAKWADVVMVLAPDTAQAEIFAGDIEPNLKPGDALFFGHGLNVHFGLIKPPADVAVAMVAPKGPGHLVRRQFVDGKGVPCLVAVEQDPRGDGLALALSYAKAIGGTRAGVIKTTFKDETETDLFGEQTVLCGGTEELVKAGFEVMVEAGYPAELAYFEVLHELKLIVDLMYEGGLARMYYSVSDTAEFGGYLSGPRVIDAGTKERMRDILREIQDGSFVHKLVADVEGGNKQLEELRRQNAEHPIEVVGKKLRDLMSWVDRPITETA

SEQ ID NO: 35995 - protein, 461 aa, Penicillium chrysogenum
MMQNLPFEPEFEQAYKELASTLENSTLFQKKPEYRKALQVVSVPERVIQFRVVWEDDKGQVQINRGYRVQFNSALGPYKGGLRFHPTVNLSILKFLGFEQIFKNALTGLNMGGGKGGSDFDPKGKTDNEIRRFCVSFMTELCKHIGADTDVPAGDIGVTGREVGFMFGQYKKIRNQWEGVLTGKGGSWGGSLIRPEATGYGVVYYVEHMIQHASGGKESFAGKRVAISGSGNVAQYAALKVIELGGSVISLSDSQGALVLNGEEGSFTAEEINTIAEIKVQRKQIAELATQDAFSSKFKYIPGARPWTNIAGRIDVALPSATQNEVSGDEAKALIAAGCKFIAEGSNMGSTQEAIDVFEAHRDANPGAAAIWYAPGKAANAGGVAVSGLEMAQNSARVNWSREEVDSRLKKIMEDCFNNGLSTAKEYVTPAEGVLPSLVAGSNIAGFTKVAEAMKEHGDWW

SEQ ID NO: 35996 - protein, 291 aa, Triticum aestivum
  misc_feature (175)..(175): Xaa can be any naturally occurring amino acid
  unsure (1)..(291): unsure at all Xaa locations
MAKDIEAAPPGGGYAAKDYSDPPPAPLFDAEELTKWSLYRAVIAEFVATLLFLYITVATVIGYKHQADPAGPNAADAACSGVGILGIAWAFGGMIFVLVYCTAGVSGGHINPAVTFGLFLARKVSLVRALLYIIAQCLGAICGVGLVKGFQSAFYVRYGGGANELSSGFSKGTGXLAAEIIGTFVLVYTVFSATDPKRSARDSHVPVLAPLPIGFAVFMVHLATIPITGTGINPARSLGAAVIYNNEKAWDDHWIFWVGPFIGAAIAALYHQYVLRASATKFGSSASFGSR

SEQ ID NO: 35997 - protein, 642 aa, Neurospora crassa
MFRTIRTLTPTTSVFPPTSLHFKLKTTMAPSKRKASAPPQTSHVNGNPSADKKRKTTTDAPPTNPNTSSDPLRAPHPFYKDSETHGIVLRKFYPHEMSNARAQAYNDNELPRPIETLSAALAETAALRKSLPVRQAVVHWFKMDLRLHDNRSLWLASQKAKEAGVPLICLYVLSPEDLEAHLRAPIRVDFMLRTLEVLKTDLEDLGIPLWVETVEKRKEVPTKIKELMKSWGASHLFCAMEYEVDELRREAKLVKLLAEGEKGEKMAADVVHDTCVVMPGALQSGSGGQYAVYSPWFRAWIKHIEENPECLEIYEKPGPNPPGTKEKHENLFACSIPEAPEGKRLRDDEKARYHSLWPAGEHEALKRLEKFCDEAIGKYAERRNIPAMQGTSNLSVHFASGTLSARTAIRTARDRNNTKKLNGGNEGIQRWISEVAWRDFYKHVLVHWPYVCMNKPFKPTYSNIEWSYNVDHFHAWTQGRTGFPIIDAAMRQVLSTGYMHNRLRMIVASFLAKDLLVDWRMGERYFMEHLIDGDFASNNGGWGFAASVGVDPQPYFRVFNPLLQSEKFDPDGDYIRKWVEELRDLPELKGGKGGEIHDPYGRGSEKVKKKLEEKGYPRPIVEHSGARDRALDAYKRGLARDL

SEQ ID NO: 35998 - protein, 412 aa, Schizosaccharomyces pombe
MIERLKIAKNRLEAMNSFNFPAQDRHERAPLLGSEYDHSMARQLSLLNVVGMTKSVLMSSYFNLMLVFVPIGLIAGWFEWNAKSVFILNMLAIIPLASLLSFATEQLSIISGPTLGALLNASFGNAIELIVGVLALKRGELRIVQSSLLGSILSNLLLVFGMCLVTTGIRREITTFNITVAQTMIAMLALSTATILIPATFHYSLPDNANSENALLHVSRGTAVIVLIVYVLLLVFQLKTHKHVCHDPSEVEEETEPRILGLRSSIAMLAIVTVFVSLCADYLVGSIDQLVEEVNISKTFVGLVILPVVGNAAEHVTAIVVSYRGQMDLALGVAIGSSIQIALFLAPFLVIVGWIISQPLTLYFESLETVILFVSVFLVNYLIQDGATHWLEGVQLLALYAIVVLAFFYYPQ

SEQ ID NO: 35999 - protein, 200 aa, Haemophilus influenzae R2866
MLDYKMFNPYEGLIFDMDGTLIDTMPVHAQAWTMVGERFGYEFDCQIMYNFGGATVKTIAGEMMKAANMPLDRIEDVLAAKRELSYQLIPTQSKLLPTFEIVKYFHQKKPMALGSGSHRKIIDMLMDKLAIAPYFNAIVSANDVKEHKPHPETFLRCAELIQANPSRCIVFEDADLGVQAGLNAGMDVFDVRTREIISPR

SEQ ID NO: 36000 - protein, 141 aa, Oryza sativa (japonica cultivar-group); identical to SEQ ID NO: 1331

SEQ ID NO: 36001 - protein, 434 aa, Bradyrhizobium japonicum
MDAKASNKTATLTVGNKNYDLPIHSGSVGPDVIDIGKLYGQSGLFTYDPGFTSTASCQSKITYIDGDAGVLEYRGYPIEQLAENGDFLETCYLLLYGNLPTAAQKKDFDDRVIHHTMVHEQMARFFQGFRRDAHPMAVMVASVGALAAFYHDSTDINDPKQRMIASMRMIAKIPTLAAMAYKYTIGQPFVYPKNSLKFAENFLHMCFAVSCEEYKINPVLADALDKIFILHADHEQNASTSTVRIAGSSGANPFACIAAGIACLWGPAHGGANEAALAMLGEIGSVDKIPEFIAKVKDKNSEVRLMGFGHRVYKNYDPRAKIMQKMCHAVLKETGHGDDPMLKVALELEKIALSDQYFIDRKLYPNVDFYSGITLKAMGFPVSMFTVLFAVARTVGWISQWSEMIEDPQQKIGRPRQLYTGVTRRDYVAIKDRK

SEQ ID NO: 36002 - protein, 216 aa, Oryza sativa
MNALAATSRNFRQAARLLGLDSKLEKSLLIPFREIKVECTIPKDDGTLASFIGFRVQHDNARGPMKGGIRYHPEVDPDEVNALAQLMTWKTAVAAIPYGGAKGGIGCAPGELSTSELERLTRVFTQKIHDLIGAHTDVPAPDMGTNSQTMAWILDEYSKFHGHSPAVVTGKPIDLGGSLGRDAATGRGVMYATEALLAEHGKSISGSTFVIQVSHN

SEQ ID NO: 36003 - protein, 139 aa, Arabidopsis thaliana
MSRWSSCQEFLKHVESRNPGQPEFMQAVTEVIESLWPFIEKNPKYADASLLERIVEPERVVMFRVCWMDDKGVVQVNKGYRIQHSMAIGPYKGGLRFHPSVNLSILKFLAFEQTFKNALTTLPMGGGKGGSDFDPKGKS

SEQ ID NO: 36004 - protein, 345 aa, Arabidopsis thaliana
MKEEQTRSLFGISLSDKPTWQQFLICTSGFFFGYLVNGVCEEYVYNRLQFSFGWYFTFIQGFVYLFLIYLQGFTTKHIVNPMRTYVKLSAVLMGSHGLTKGSLAYLNYPAQIMFKSTKVLPVMIMGAFIPGLRRKYPVHEYISAFLLVLGLILFTLADAQMSPNFSMIGIMMITGALIMDAFLGNLQEAIFTMNPETTQMEMLFCSTVVGLPFLFVPMVLTGEVFRAWTACAQHPYVYGVLVFEAMATFIGQVSVLSLIALFGAATTALITTARKGVTLLLSYLIFTKPLTEQHGSGLLLIAMGIVLKMVPMDSKAPAKIPARPAVRIAGGDGDREEDEERKSLV

SEQ ID NO: 36005 - protein, 294 aa, Arabidopsis thaliana [sequence omitted]

SEQ ID NO: 36006 - protein, 253 aa, Mesorhizobium sp. BNC1
MGRLQEKTCIVTGGAGSIGSATARLFLQEGARVLLVDRDAAGLQRLAAELGGRERLAWAAADVSDAAQTAAYVEKAVQTFGPVDVLFSNAGNFGVVRPIADYPDEVFEAVMAVHVRGAYLAAKHTVPKMRDGGSIIITSSVAGVRGDAGVYAYITAKHAQVGLMRCLAKELAPRGIRVNTIHPGPVENGFQLSVEEGVGKALDVDGAEFFNRLIPLARHATPQEIARSVLYLASDESSFTTGTTLMVDGGMSV

SEQ ID NO: 36007 - protein, 341 aa, Aegilops tauschii
MERYEVIKDIGSGNFGVAKLVRDVRTKELFAVKFIERGHKIDENVQREIMNHRSLRHPNIVRFKEVVLTPTHLAIVMEYAAGGELFERICGSGKFNENEARFFFQQLLSGVSYCHSMQICHRDLKLENTLLDGSEAPRLKICDFGYSKSSVLHSQPKSTVGTPAYIAPEVLSRREYDGKVADVWSCGITLYVMLVGAYPFEDPDEPKNFRKTITRILSVQYSVPDYVRISMECRHLLSRIFVANPEQRITIQEIKNHPWFLKNLPIEMTDEYQMSLHMVGVNAPPQTLEEIMAIIQEARIPGDGSKFAGQLSVPGLGSMELDDIDDVDVDVEDSGDFVCAL

SEQ ID NO: 36008 - protein, 378 aa, Lactococcus lactis subsp. cremoris
MKEMLIITPGPTRVAENVRLARAKVTTNPDIDLEFYDFYKRTCDKLAQFLKTKNDLRILAGEGILGLEATCASLTESGDRVLVLDNGIFGHGFAEFVELYGGQALLLQSSEKEAFDIEILEKFLEKDHDFKYATIVHCDTPSGVLNDLSKICPLLKKYGILTVVDSVAAMGGEDLQVDNWQIDIALGGSQKVLSAPPGLTIVSISPLAYQAMENRQSPIASFYCNLLTFKDYYEKKWFPYTMPISDIYGLDQAVDNILFDQEILKRHAMIGKATRKAIKNSPLELYLQNGYSNTVSVIKVPNGLNDQELLRKMRQDYQVMITGSFDRLAGKVLRIGHMGENARTSKVAYSLYALQKVLEESGLKFETSLQEDFLQALK

SEQ ID NO: 36009 - protein, 276 aa, Lactobacillus gasseri
MKHMQVNHKKAALLGLQHLLAMYSGAIAVPLLIGTALKFNSTQMTYLVSIDIFMCGLATALQLLRNRYFGIGLPVVLGCAIQAVAPLQMIGKKFTIGTMYGAIIVAGIFVFLVAGYFSKIKKLFPPVVTGSLITVIGLSLIPVSIQNLGGGNSAAKNFGDPKNLLTGFITVAIILALQVWGRGFIKSIAVLVGLIAGTLIASTLGMVSLTPVAQASWFHLPQPFYFGMPQFEWSSSLTMIIIALVSMVESTGVFFAIGDLLHKDISSDDLKKGYRA

SEQ ID NO: 36010 - protein, 612 aa, Arabidopsis thaliana
  misc_feature (192)..(192): Xaa can be any naturally occurring amino acid
  unsure (1)..(612): unsure at all Xaa locations
MALLIITALVFSSLWSSVSPDAQGDALFALRSSLRASPEQLSDWNQNQVDPCTWSQVICDDKKHVTSVTLSYMNFSSGTLSSGIGILTTLKTLTLKGNGIMGGIPESIGNLSSLTSLDLEDNHLTDRIPSTLGNLKNLQFLTLSRNNLNGSIPDSLTGLSKLINILLDSNNLSGEIPQSLFKIPKYNLSNLXFTANNLSCGGTFPQPCVTESSPSGDSSSRKTGIIAGVVSGIAVILLGFFFFFFCKDKHKGYKRDVFVDVAGEVDRRIAFGQLRRFAWRELQLATDEFSEKNVLGQGGFGKVYKGLLSDGTKVAVKRLTDFERPGGDEAFQREVEMISVAVHRNLLRLIGFCTTQTERLLVYPFMQNLSVAYCLREIKPGDPVLDWFRRKQIALGAARGLEYLHEHCNPKIIHRDVKAANVLLDEDFEAVVGDFGLAKLVDVRRTNVTTQVRGTMGHIAPECISTGKSSEKTDVFGYGIMLLELVTGQRAIDFSRLEEEDDVLLLDHVKKLEREKRLEDIVDKKLDEDYIKEEVEMMIQVALLCTQAAPEERPAMSEVVRMLEGEGLAERWEEWQNLEVTRQEEFQRLQRRFDWGEDSINNQDAIELSGGR

SEQ ID NO: 36011 - protein, 224 aa, Alkaliphilus metalliredigenes QYMF
MNKILIVDDDPHIRELVKVLLRNEGFDVHEAFDGVEALSKLETIKVDMVILDVMMPNMDGWQLCRELREHYDLPLLMLTAKGETSQKVKGFQLGTDDYLVKPFEPMELVVRVKALLKRYQIITSQTVRIGELVMNQKNYKVTVGSESFTLPLKEFELLFKMASYPEKTFSREQLIEDIWGYDFAGNERTLDVHINRLRQRFPEENHSFKIRTIRGLGYRLEVSP

SEQ ID NO: 36012 - protein, 309 aa, Apium graveolens
MAITLNSGFKMPVLGLGVWRMDRNEIKNLLLSAINLGYRHFDCAADYKNELEVGEAFKEAFDTDLVKREDLFITTKLWNSDHGHVIEACKNSLKKLQLEYLDLYLIHFPMASKHSGIGTTRSILDDEGVWEVDATISLEATWHEMEKLVEMGLVRSIGISNYDVYLTRDILSYSKIKPAVNQIETHPYFQRDSLIKFCQKYGIAITAHTPLGGALANTERFGSVSCLDDPVLKKLSDKHNKSPAQIVLRWGVQRNTIVIPKSSKTKRLEENINIFDFELSKEDMELIKTMERNQRSNTPAKAWGIDVYA

SEQ ID NO: 36013 - protein, 518 aa, Alkaliphilus metalliredigenes QYMF
MKKQKITKAAAVILSGLTALIVSFVIAFFSILILSLIITSIMGYEISEEPTLSFKIFVLLAWIFILLMVKRYPRVRQLFGIEFMRQETIVRSAMVAIIVTTVLAGCFAIAHGLATFIYTMIGYQAIAAPDARYFWSLNWLLWLFILFLIKRFLWAKLPFGDEFMNKDKIVKGAAITITVMVIGIGCMAVAYLFASLIHSIVMGYRYSVPEEAPPYFNLFWFCIWILLLLMIKWYLKHRNIAKYIDLFAAVIRALESIAKGNFNVRLDDKFKKDESFSRLVKSVNMMASGLDQMEKMRQEFISNVSHEIQSPLASIQGFAQLLQNDELSPEERKHYLSIIETESKRLSKLSDSLLKLAILESDSMRFEPKAYRLDKQLRNLILACEPQWREKRINMEAFLDEVTITADEDMMSQVWINLIYNSIKFTPEGGSVRVDLNQHGKTIVCKISDTGIGIPEEDQKHIFERFYKADKSRERSKKGGGLGLSITKKIIDMHYGDISVQSKSGTGTTFTVSLPIQR

SEQ ID NO: 36014 - protein, 347 aa, Chlorobium tepidum TLS
MSEPTYFMPPEWAPHASTWLSWPHKLESWPGKFEPVPAVFAELAYQLSRSETVNINVLDDAMEAQARELLKERDPEGKYAERIVFHRIPTNDAWCRDHGPNYVIRTQDGRRDKVIMNWEYNAWGGKYEPYDDDNAVPERVAKAQGLPMVSTGMVLEGGAIDVNGAGLLLTTTACLLNPNRNPSLGKAEIEAQLRRYLGIEKVLWLGDGIAGDDTDGHVDDMARFVNENTVVIAVEEDPEDENYKPLRENYELLKTMTGLDGKPLNIVKLPMPEPVYYDGERLPASYANFYIANTVVLVPTYRCPRDQQAIDILQQCFPKREVVGIDCSDLIWGLGAIHCVTHEEPAM

SEQ ID NO: 36015 - protein, 521 aa, Schizosaccharomyces pombe
MRIWILIFFSFIKLVSSLQYTGNGVLALDFVAKTFPNQENQLEKRDYTYSPSGITSFPLDLQSYTYYTTTLSIGRPSISYTVAIDLDMPYTWLTYYNVMAFNPAYLGIVNSGTQWSTDELRYFLCKKESDSCYFGNASSSFHFVTSPSTFFIRYDDNITVAGINVQDSLSYSHYQALPDFQFGITLKEYVPSSMLPYKGVLGLAASTEINSIDYSDSISSFSPPTFLEQLVKEDILAYPAFSMYLDNQGNGSLLLGAVDTSKYQGQFVALKQTKLTHYAVSIYSVQFLNSTFFSNYSIITDAYFQTRETYIYLPAELAYSVMDNAGAYLSEGYFALNCDEIDLEAALIFQFGCNSTIKVPISLLVIGQVSNICLLGIRPSTDSEIVLGLLFFRNAYTFYHQSQKMIAIGQAFYNATSNLSAIVDQHIPGALTCSQYPTSVASTQLVQTSHFTSTSLSAVNISESVVYSYTSSSSMPSSAIPSFNISLISQNAVANAGNSFSPLSAMVIMMMSAVFLGLGII

SEQ ID NO: 36016 - protein, 601 aa, Synechococcus sp. CC9605
MSERTLRKASATRSPLMRLLGHLAPQSRLVVAAVTCSLLNKLFDLAPPILIGLAVDVVLLKEQSVLAGFGLKTAGHQLLGLALLTFVIWAAESLFEYLYDVLWRNLAQTTQHSLRLEAYDHLQKLELSFFEQDSTGRLMAVLNDDINQLERFLDRGANQILQLITTVLVVGIGMAMVAPEVALFAYLPIPVILWGSLHFQRQLAPRYREVRARVGDLSSRLANNLGGMLTIKSFTAEALELERLRAESLAYRQSNAGAIRLSAAFIPLIRFAILFAFLAILLIGGFKALAGELPVATYSVLVFITQRLLWPLTAIGRTLDEYQRSMASTQRVLDLIDTPVLIQGGTVPVDPQRLRGEIRFEAVDFGYAGRGTLLQGFDLTVPAGSTLGIVGATGSGKSTVVKLLLRLYERDGGRICLDGVSIDTLQLQDLRRCIALVSQDVYLFHGTVAENIAYGVADPDPLAIEQAARLAEAAGFIDALPQRYDTLVGERGQRLSGGQRQRIALARAILKDAPVLVLDEATAAVDNDTEAAIQRSLVQITQQRTTVVIAHRLSTVRHADWIVVMDQGRIVEQGCHDSLVAQGGMYTNLWQVQAGEGVVAS

SEQ ID NO: 36017 - protein, 425 aa, Campylobacter lari RM2100
MKNNKKAFEEACEYIAGGVDSPVRAFASVGSNPLFIKKGKGAYISDIEDNTYIDYVQSWGPLLFGHCDEDVEKACKKALEHGSSFGAPTLAETKLAKFILQDWPHLDKIRFVSSGTEATMSAIRLARGFSKKDKIIKFEGCYHGHSDSLLVSAGSGAATFNTPSSLGVLEDVAKNTLVAIYNDIDSVKNLVEKHSDIACIIIEPIAGNMGLVPAKKEFLQELQALCKKHQILLIFDEVMSGFRASYLGSYGIYNIQADIVTFGKVIGGGMPAAAFAARAEIMDLLSPLGGVYQAGTLSGNPLAMASGYASLKKARNYEGLYEKLEKLGKRLTQGLKEAANDCKIPLQVNCVGSMFGFFFCENPVNNYQDALKSDTKLFAKFHAQMLSKGIYLAPSQFETGFICESMDKKIIEKTIQAAQESFKTL

SEQ ID NO: 36018 - protein, 88 aa, Aspergillus carbonarius
QGWRWPDHHQGAGQFLTMMARKMKDTDSEEEIREAFKVFDRDNNGFISAAELRHVMTSIGEKLTDDEVDEMIREADQDGDGRIDYNEF

SEQ ID NO: 36019 - protein, 210 aa, Cyanidium caldarium
AAGGISEMSELPLSVHDTTDKLDALGNTTAAKGKDFYNGSVCGKCLALLVALVFEFGLAPVGLSKLCKSPQTSSHVIELDVILQLTDIYVVASMLVGIMLPHLFGALTMLGVSRAAQAMIVEVRRQFREIPGLREGGPGVSPEHQSSAIQIATKSAIIEMVLPGALAILSPLIIGFGFGQKALIAMLLAAIGSGYHDGIISNAGGAWDNA

SEQ ID NO: 36020 - protein, 75 aa, Medicago sativa
MSGCNCGSSCNCGDNCKCNSRSSGLGYLEGETTETVILGVGPAKIHFEGAEMGVAAEDGGCKCGDSCTCDPCNCK

SEQ ID NO: 36021 - protein, 222 aa, Cytophaga hutchinsonii
MKAHLKELGTLAIGLFSIMACSSITKETKPIAHDIHMENQTGDTKQLDTATFGNGCFWCTEAVFQDIKGVVKVTSGYSGGTVTNPSYKQICTGTTGHAEVLQIVYNPSIVSYSELLQMFWYSHDPTTLNRQGNDVGTQYRSVVFYHNETQRKEAEFYKKKLDEEKIFEKPIVTEIVSFTKFYPAEDYHQNYYKEHGSEPYCMYIIRPKLEKFKKVFGEKFKQ

SEQ ID NO: 36022 - protein, 310 aa, Zea mays
MCLQCGAAVTPQWRSGPMGQGTLCNACGVRLKAAGALRGQVKHRPTPATARTPARPPLDSPASESSPDSPILEPGSVPDVYLVRKKPLKRGRPPPPPRTVPAAAPPLAPAVYLVKKKKKSASARKPWRPPKSAKQCLHCGSSSTPQWREGPLGRSTLCNACGVRYRQGRLLPEYRPLASPTFEPSEHANKHSQVMQLHRQRKSQGQHHPLPAEHPRAMDVLQFPQRWQVKEEYPPTPLHQPLPHPVVDGSLASGELRVGDMVDAAADAGHGGGGGKGSDLNNNAPSSLDSRLLEGPSAPLLVDGDKPLVH

SEQ ID NO: 36023 - protein, 606 aa, Chlamydomonas reinhardtii
MAAAGLDTLRLEDSDDDFKYEEVDVMSDGEDDASEDLDAALRKLQQFTSKQEAATGPARTTEVKPGQVVKKPEVIDDFLRNFFIKMGLSRTCECFEAEWYELKATGRLDNSTTVPDVYLRNAELEDDVAGLRRELAEAKSIAGRASATWDKFRKERDFHRMHHKRVAQEKNKLLTDLRRLKEHYAKYEPTILELKKKYETLMKEKMMMSLERDKLAARVDALEQVASSPLPGAERSLGGQSTAAAGGGASGRALGATNRALTGDVPPAAGAAAAAATGRSGAVSAGPRSGWASLNAPPRRNPYADLEFPAAPVKMLSLNKTFKGHLLSVANLALHPTKPILVTASDDKTWKMWHMPGGDLIMCGEGHKDWVAGVDFHPAGTCLASGGGDSAVKIWDFEKQRCVTTFTDHKQAIWSVRFHHLGEVVASGSLDHTVRLWDLPAGKCRMALRGHVDSVNDLAWQPFSSSLATASSDKTVSVWDARAGLCTQTYYGHQNSCNGVSFNILGTQLASTDADGVVKLWDTRMTAEVATINTGKHPANKSCFDRSGQVLAVACDDGKVKAYSTTDGVLQAELAGHEDAVQAVLFDPAGQYLVSCGSDNTFRLWS

SEQ ID NO: 36024 - protein, 387 aa, Schizosaccharomyces pombe
MNHGTKIPVDPFRIIKETARDGSTGEVKQLSYTSSKVVGSGSFGVVMQVHLIESDSKAAIKRVLQDKRFKNRELQIMRIMKHPNIVDLIAYYYTTGDNSDEVYLNLVLEFMPETIYRASRLYTRQKLSMPMLEVKLYIYQLLRSLAYIHASGICHRDIKPQNLLLDPENGILKLCDFGSAKILVAGEPNVSYICSRYYRAPELIFGATDYTHAIDIWSTGCVMAELMLGHPLFPGESGIDQLVEIIKILGTPSREQIKTMNPNYMEHRFPQIRPQPLSRVFSRSVPLDALDLLSKMLQYTPTDRLTAAEAMCHPFFDELRDPNTKLHNSRNPDASPRHLPELFNFSPFELSIRPDLNQKLIPSHARDALPVKLDDFVPIPIHRARID

SEQ ID NO: 36025 - protein, 596 aa, Debaryomyces hansenii CBS767
MHALFETDWFLDSKKYGTPCIPKSFNEFMYLVEINAFYTYNKLRDYINTYYINAYCGVWGYLAIIRDAVFIYLMYLYMSQMVVLIRGRGMIASIRIFIHAISKRGFQFLLSIPPIKKKIDQELSETTKKIEEELMQNDESLMQFKSLPEKGLDATIVKKELDRLQDLKHSDWYNGRVSGAVYHGGNELLDLQSDAYHKYSIANQLHPDVFPGIRKMESEIVSMVLRLFNAPEEGCGSTTSGGTESLLLAGLSAREYGKFYKNISNPEIIAPITIHAGIEKACYYFGMKLHKVDLDPVTFKVDVNKVKKLINGNTVLLVGSAPNFPHGIIDDIEALSNLAVKYKIPLHVDACLGSFIVSFLEKSKVHGDKPIPKFDFRLPGVTSISCDTHKYGFAPKGSSIVMYRNSKLRQCQYYILTDWTGGMYGSPTLAGSRPGALMAGCWATLVNFGEDNYAESCRTIVGASMKLKCAIKEHEMLSKYLEVIGDPIGSVVAFGVTKNYRSTLSIYKIGECLSSKGWHFSTLQNPAALHFALTRLTVPVIGELISDLVEVTSAALKDESNSESEIAALYGVAGSVKTTGVAERVVVAFLDTLYKI

SEQ ID NO: 36026 - protein, 342 aa, Agrobacterium tumefaciens str. C58
MKTLLPTSTAGSLPKPSWLAQPEKLWSPWKLQDEELIEGKRDALRLSLNDQQQAGIDIVSDGEQTRQHFVTTFIEHLSGVDFEKRETVRIRNRYDASVPTVVGAVSREKPVFVEDAKFLRQQTRQPIKWALPGPMTMIDTLYDSHYKSREKLAWEFAKILNQEARELEAAGVDIIQFDEPAFNVFFDEVNDWGVATLEKAIEGLKCETAVHICYGYGIKANTDWKKTLGSEWRQYEEAFPKLQKSNIDLISLECHNSRVPMDLIELIRGKKVMVGAIDVATSAIETPEEVADTLRKALRFVDADKLYPCTNCGMAPLSRQVARSKLNALGAGAEIIRRELSV

SEQ ID NO: 36027 - protein, 427 aa, Arabidopsis thaliana
  misc_feature (177)..(177): Xaa can be any naturally occurring amino acid
  misc_feature (196)..(196): Xaa can be any naturally occurring amino acid
  unsure (1)..(427): unsure at all Xaa locations
MRYDQEAGSSSHSLPSGSSSHSLPPTEDTPLLGPRTLSSQPKTFANVFIAIVGAGVLGLPYTFKKTGWLLGLLTLLFVSSLTFFCMMLLVHTRRKLESLSGFNSITSFGDLGESVCGPAGRLVVDVMLVLSQSGFCVSYLIFVATTMANLLSRGTEHILGGFSKFRILVNFYPMTSXIWIRMLLIPVMIYLIHGKXVDVAATLVVMVQDVFIFLKRRPPLRVFGGVSVFFYGLGVAVYAFEGIGMVLPLELEAKYKDKFGRALGLAMGLISIMYGAFGLLGYMAYGEETKDIITTNLGTGVVSTLVQLGLAINLFFTFPLMMQPVYEVVERRLCSSRYSVWVRWATVLVVTLVALLVPNFADFLSLVGSSVCVVLGFVLPSLFHLQAFKNELSITRIVVDVLVFLIGVMIAITGTWTAVHEILTSKA

SEQ ID NO: 36028 - protein, 294 aa, Saccharomyces cerevisiae
TTPLVHVASVEKGRSYEDFQKVYNAIALKLREDDEYDNYIGYGPVLVRLAWHTSGTWDKHDNTGGSYGGTYRFKKEFNDPSNAGLQNGFKFLEPIHKEFPWISSGDLFSLGGVTAVQEMQGPKIPWRCGRVDTPEDTTPDNGRLPDADKDADYVRTFFQRLNMNDREVVALMGAHTLGKTHLKNSGYEGPWTANNNVFDNSFYLNLLNEDWKLEKNDANNEQWDSKSGYMMLPTDYSLIQDPKYLSIVKEYANDQDKFFKDFSKAFEKLLENGITFPKDAPSPFIFKTLEEQGL

SEQ ID NO: 36029 - protein, 440 aa, Taxus baccata
MAGSTESVVRSLERVMVAPSQPSPKAFLQLSTLDNLPGVRENIFNTLLVYNASDRVSVDPAKVIRQALSKVLVYYSPFAGRLRKKENGDLEVECTGEGALFVEAMADTDLSVLGDLDDYSPSLEQLLFCLPPDTDIEDIHPLVVQVTRFTCGGFVVGVSFCHGICDGLGAGQFLIAMGEMARGEIKPSSEPIWKRELLKPEDPLYRFQYYHFRLIRPPSTFGKIVQGSLGITSETIKWIKQCLREESKEFCSAFEVVSALAWIARTRALQIPHSENVKLIFAMDMRKLFNPPLLKGYYGNFVGTVCAMDNVKDLLSGSLLRVVRIIKKAKVSLNEHFTSTIVTPCSGSDESINYENIVGFGDRRRLGFDEVDFGWGHADNVSLVQHGLKDVSVVQSYFLFIRPPKNNPDGIKILSFMPPLIMKSFKFEMETMTNKYVTKP

SEQ ID NO: 36030 - protein, 319 aa, Triticum aestivum
  misc_feature (32)..(32): Xaa can be any naturally occurring amino acid
  misc_feature (204)..(204): Xaa can be any naturally occurring amino acid
  misc_feature (275)..(275): Xaa can be any naturally occurring amino acid
  misc_feature (294)..(294): Xaa can be any naturally occurring amino acid
  misc_feature (304)..(304): Xaa can be any naturally occurring amino acid
  unsure (1)..(319): unsure at all Xaa locations
MASGGGDDAGEKRVTDRYLKREVLGEGTYGVXVFKAIDTKTGETVAIKRIRLGKYKEGVNFTALREIKLLKELKDPNIIELIDAFPYKGNLHLVFEFMETDLEAVIRDRNIVLSPADIKSYIQMMLKGLAFCHKKWVLHRDMKPNNLLIGAEGQLKLGDFGLARIFGSPERNFTHQVFARWYRAPELLFGTKQYGSAVDVWAAXGCIFAELLLRRPFLQGSSDIDQLGKIFAAFGTPKSSQWPDMVCLPDYVEYQFVSAPPLRSLFPMASDDALXIFLSRMFTYDPKSKNTAQXQALRTQVLSXNYQAPTKPNLLPKPN

SEQ ID NO: 36031 - protein, 208 aa, Zea mays
  misc_feature (96)..(96): Xaa can be any naturally occurring amino acid
  unsure (1)..(208): unsure at all Xaa locations
MDDPVERLKDGFHKFKTEVYDKKPELFEPLKAGQAPKYVVFACSDSRVCPSVTLGLQPGEAFTVRNIAAMVPAYDKFTKYTGIGSAIEYAVCALKXVRVLVVIGHSCCGGIRALLSLQDGAPDTFHFVENWVKIGFPAKIKVKKDHASVPFDDQCSILEKEAVNLSLENLKTYPFVKDGLANGTLKLVGGHYNFVSGEFLTWDNKQPS

SEQ ID NO: 36032 - protein, 462 aa, Arabidopsis thaliana
MSEEQPHANLAVPAFKTEKEPITQTRNGQSSVWRFGGSDKAAKASTVTLRGVIYMLFDNCGKDVNETILPLGHGDPSVYPCFRTCIEAEDAVVDVLRSGKGNSYGPGAGILPARRAVADYMNRDLPHKLTPEDIFLTAGCNQGIEIVFESLARPNANILLPRPGFPHYDARAAYSGLEVRKFDLLPEREWEIDLEGIEAIADENTVAMVVINPNNPCGNVYSHDHLKKVAETARKLGIMVISDEVYDRTIFGDNPFVSMGKFASIVPVLTLAGISKGWVVPGWKIGWIALNDPEGVFETTKVLQSIKQNLDVTPDPATIIQAALPAILEKADKNFFAKKNKILKHNVDLVCDRLKDIPCVVCPKKPESCTYLLTKLELSLMDNIKDDIDFCVKLAREENLVFLPGDALGLKNWMRITIGVEAHMLEDALERLKGFCTRHAKKTETETESLQALKLSDNNLEM

SEQ ID NO: 36033 - protein, 206 aa, Glycine max
MDKKPCNSSSHDPEVRKGPWTMEEDLILINYIANHGEGVWNSLAKASGLKRTGKSCRLRWLNYLRPDVRRGNITPEEQLLIIELHAKWGNRWSKIAKHLPGRTDNEIKNFWRTRIQKHIKQAETSQQHGNSENNDHQASTSTSKVSTMAHPNETFSPPSYQGTFEPFQPQFPTITDQSSCCTTTNDNNNYWSIEDIWSSMQLLNGD

SEQ ID NO: 36034 - protein, 473 aa, Leuconostoc mesenteroides
MKKTKIVSTLGPSSSDVETIVKLIQAGANVFRFNFSHGDHEEHLGRMNAVHEAEKITGKTVGILLDTKGAEIRTTKQADGKIEFHTGDTLRIAMDENLEGTKEKIAVTYAGLFDDVKEGGQVLFDDGLLGTTVIEKDSATRELVVRVDNDGILGSRKGVNAPGVSINLPGITEKDADDIRFGLDHEINYIAASFVRKPEDVLEIRGLLKEKNMEHVQIIPKIESQEGIDNLDAILEVSDALTVARGDMGVEIPAENVPLVQKDMIRKMNKAGLPVITATQMLDSMEENPRPTRAEASDVANAVFDGTDATMLSGESANGDYPVESVATMAAIDEKAETSLRENGRHEDIFFDETDSTEAVAASVARIARNVNAKAVVVSTNSGYTARMVSKHRPDVNILAVTYSERVQRGLTLNYGVVPVVYDAPKTIDEMVDLAKKAVKDQGLANSGDTIVIAAGVPMSQSGTTNMLTVQTV

SEQ ID NO: 36035 - protein, 421 aa, Brucella suis 1330
MTKDIAQVMAEVGRKAKAAAAPLSIATSEQKNKALNAAADAILEARADILEANRLDLANAEKNGMAASFVDRLTLNEARIDAIAEDIRAIATLPDPVGEVIAEWDRPNGLHIERVRTPLGVIGVIYESRPNVTADAGALCLKAGNAVILRGGSDSAHSSAAIHKALVKGLEAANLPADAIQIVPVTDRAAVGEMLKGLGGAIDVIVPRGGKSLVARVQSEARVPVFAHLEGICHLYIDKSADLDMARRIALDAKMRRTGICGAAETLLVDRAVASTHLAPILGDLAAGGCEIRGSAEVLALYPAAKPATEEDWSTEYLDAIISVALVDGISGAIDHINRYSSHHTEAIVAEDAQTVARFFNEIDSAILLHNASTQFADGGEFGMGAEIGIATGKMHARGPVGVEQLTSFKYRVRGSGQVRG

SEQ ID NO: 36036 - protein, 492 aa, Streptococcus mutans
LVRGVDILADTVKVTLGPKGRNVVLEKSFGSPLITNDGVTIAKEIELEDHFENMGAKLVSEVASKTNDIAGDGTTTATVLTQAIVREGLKNVTAGANPIGIRRGIETAVATAVDELKAIAQPVSGKEAIAQVAAVSSRSEKVGEYVSEAMEKVGNDGVITIEESRGMETELDVVEGMQFDRGYLSQYMVTDNEKMVADLENPYLLITDKKISNIQDVLPLLEEVLKTNRPLLIIADDVDGEALPTLVLNKIRGTFNVVAVKAPGFGDRRKAMLEDIAVLTGGTVITEDLGLELKDTTIDALGQAARVTVDKDSTVIVEGSGGKEAVANRVNLIKSQIETATSDFDREKLQERLAKLSGGVAVIKVGAATETELKEMKLRIEDALNATRAAVEEGIVAGGGTALINVIEKVAALDLTDDAATGRNLVLRALEEPVRQIAKNAGYEGSVIIDKLKNSSAGTGFNAANGEWVDMIDAGIIDPVKVTRSALQNAAS

SEQ ID NO: 36037 - protein, 414 aa, Schizosaccharomyces pombe
MISSAVILVGGPSRGTRFRPLSFDVPKPLFKIGGREMIYHHLAALSKIESVKDVFLVGFYDESVFKDFINEVASHFPSFNRIKYLREYNCLGTGGGLYHFRDQILKGHTSNVFVMHADVCCSFPLQELLNVHHEKKALVTLMATKVSKEDASNFGCLVEEPSTGRVLHYVDKPSSYLSNIISCGIYIFDASIFDEIKKAYERRLEEVEKQLRSLDEGMEDYLSLETDVLAPLCSDSSKAIYAYNTPEFWRQIKTAGSAVPANSLYLQKAYHDGTLPKPDTEAEIIQPVFIHPNAIVSKGAKIGPNVSIGARVRIEDGARIRNSIIQEDCEISANAVVLHSILSRHCKIGKWSRVEGSPTLPSQHSTTIMRNSVKVQAITVMGADCIVHDEVRVQNCLVLPHKEIKVGLVGEIVM

SEQ ID NO: 36038 - protein, 378 aa, Brucella suis 1330
MLKKLKDYRRIVVKIGSALLVDRATGLKREWLESLGQDIAALQHAGVEVLVVSSGAIALGRTVLGLPKKALKLEESQAAAAAGQIALAKAYADVLGGHGIKSGQILVTLSDTEERRRYLNARATIETLLKLKAVPIINENDTVATTEIRYGDNDRLAARVATMMGADLLILLSDIDGLYTAPPHKNPDAQFLPFVETITPQIEAMAGAAASELSRGGMKTKLDAGKIANAAGTAMIITSGTRFGPLSAIDRGERATLFEAAHAPVNAWKTWISGNLEPAGRLTVDAGAVKALKSGKSLLPAGVKEVDGDFERGDTVAVMNEDGREIARGLIAYDAADARKVAGHKSDEISAILGYDARAAMIHRNDLVVRAASDAKAA

SEQ ID NO: 36039 - protein, 404 aa, Vibrio cholerae O1 biovar eltor str. N16961
MLPEFQRVVTFMFTHLPAPVLDPILSLSVAFRNDPRPQKVDLGIGVYKNSLGETPIMRAVALAQDKVVASQKTKSYVGLAGCEEFNQSMMQLVLGSTLDTERTIAIQTPGASGALRMLGDLMRVAQPDTTVWITDPSYVNHKPVMEAAGLKVRYYRYFSRETKMVDTEQMLADLAQAGTKDVVLLHGCCHNPTGADIDFSAWQAITELAQKNGFIPFVDIAYQGFGDGLEQDAQGLRYMAERMEEMLITTSCSKNFGLYRERTGAAIVIGKNQQEVTNARGKMLTLARSTYTMPPDHGAALVKTVLRDEQLTAIWKQELSEMQQRLLTLRKNLCNELRNQHNTRQFDFIESHRGMFTVLGFSAEQMGRLREEFAIYGVADGRINIAGLTEKDIPYVANAIIHVS

SEQ ID NO: 36040 - protein, 334 aa, Symbiobacterium thermophilum IAM 14863
MLDHRAAGLTDEQALAIYRWMLLTRRLDERLGVLQRSGAIPLALSSRGHEAAQVGAALAFARGKDWWFPYYRDLGAVLVAGTTPLDVMLSSFGRAADPSSGGRQTPYNWGDRRLNIVARSAPVGVQIPQAVGVAQAAVRRGDPIVVYCSFGEGAASQGDFHEGLNWAALHRLPVIFFCQNNGWAISVPLSRQVAGGSVAARAAGYGIEGVSLDGTDPFAVHAAVRRAVVRARAGGGPALIEARVHRLDPHTCDDNHAAYRTGAELRAAREADPLPAVADYLRRRGLLTDAAAAAVERAVAAEIDAAEAAARAARPPAGEEALGPVTAPPAPAPP

SEQ ID NO: 36041 - protein, 492 aa, Streptococcus anginosus
MVRGVDILADTVKVTLGPKGRNVVLEKSFGSPLITNDGVTIAKEIELEDHFENMGAKLVSEVASKTNDIAGDGTTTATVLTQAIVREGIKNVTAGANPIGIRRGIETAVATAVEALKANSVPVSNKEAIAQVAAVSSRSEKVGEYISEAMEKVGNDGVITIEESKGMETELDVVEGMQFDRGYLSQYMVTDNEKMVADLDNPYILITDKKISNIQEILPLLENILKTSRPLLIIADDVDGEALPTLVLNKIRGTFNVVAVKAPGFGDRRKAMLEDIAILTGGTVITEDLGLELKDATIEALGQASKVTVDKDSTVIVEGSGDAEAIANRVAVIKSQIESSTSDFDREKLQERLAKLSGGVAVIKVGAATETELKEMKLRIEDALNATRAAVEEGIVSGGGTAFVNVLSAVEALDLSGDEATGRNIVLRALEEPVRQIALNAGFEGSIVIDRLKNSEAGTGFNAATGEWVNMIDAGIIDPVKVTRSALQNAAS

SEQ ID NO: 36042 - protein, 209 aa, Micromonas pusilla
AGGISEMAVLPEDVRKQTDALDAVANTTKASTKGYAMGYAGLGALVLLAAYTQDLSFLAATSEPYPYFAGGVSDFSLSNPYVVVGLFVGGLLPYLFGSMGMMAVARAAGAIVEEVRRQFKEKPGIMQGTEKPDYGAAVDLLTKAAIKEMIIPMPCLPVLSPVVLYFHQSMAVADKYRGLLQQLGAMLLGVIITGLHVALSASGGAWDNA

SEQ ID NO: 36043 - protein, 205 aa, Citrus unshiu
KLGDDEFGYMLANILKENNVDTSGVRYDSTARTALAFVTLRADGEREFLFFRHPSADMLLCESELDKNLIKQGSIFHYGSISLIAEPCRSTQLAAMNLAKESGSILSYDPNLRLPLWPSEEAARKGIMSIWDQADIIKVSDDEITFLTGGDDHNDDNVVLEKLFHPNLKLLIVTEGSKGCRYYTKEFKGRVPGVKTKAVDTTGAG

SEQ ID NO: 36044 - protein, 365 aa, Phaseolus vulgaris
MARYTLCALLLFAAVAAAAGGASTDADDILIRQVVPEGEVEDHLLNAEHHFSTFKSKFGKTYATKEEHDHRFGVFKSNMRRARLHAQLDPSAVHGVTKFSDLTPAEFHRKFLGLKPLRLPAHAQKAPILPTNNLPKDFDWRDKGAVTNVKDQGSCGSCWSFSTTGALEGAHFLATGELVSLSEQQLVDCDHVCDPEEYGSCDSGCNGGLMNNAFEYLIGSGGVQREKDYPYTGRDGTCKFDKSKIAASVSNYSVISLDEEQIAANLVKNGPLAVAINAVYMQTYVGGVSCPYICGKHLDHGVLLVGYGEGAYAPIRFKEKPYWIIKNSWGENWGGNGYYKICRGRNVCGVDSMVSTVGAIHASTQ

SEQ ID NO: 36045 - protein, 492 aa, Streptococcus oralis
MVRGVDILADTVKVTLGPKGRNVVLEKSFGSPLITNDGVTIAKEIELEDHFENMGAKLVSEVASKTNDIAGDGTTTATVLTQAIVREGIKNVTAGANPIGIRRGIEAAVAAAVEALKNNAIPVANKEAIAQVAAVSSRSEKVGEYISEAMEKVGKDGVITIEESRGMETELEVVEGMQFDRGYLSQYMVTDSEKMVADLENPYILITDKKISNIQEILPLLESILQSNRPLLIIADDVDGEALPTLVLNKIRGTFNVVAVKAPGFGDRRKAMLEDIAILTGGTVITEDLGLELKDATIEALGQAARVTVDKDSAVIVEGAGNPEAISHRVAVIKSQIETTTSEFDREKLQERLAKLSGGVAVIKVGAATETELKEMKLRIEDALNATRAAVEEGIVAGGGTALANVIPAVADLELTGDEATGRNIVLRALEEPVRQIAHNAGFEGSIVIDRLKNAEVGTGFNAATGEWVNMIEEGIIDPVKVSRSALQNAAS

SEQ ID NO: 36046 - protein, 702 aa, Zea mays
  misc_feature (41)..(41): Xaa can be any naturally occurring amino acid
  misc_feature (141)..(141): Xaa can be any naturally occurring amino acid
  unsure (1)..(702): unsure at all Xaa locations
MAAAEARGADFPVGMKVLVVDDDPTCLVVLKRMLLECRYDXTTCPQATRALTMLRENRRGFDVIISDVHMPDMDGFRLLELVGLEMDLPYVNMWCWNTSEIIADEIAVMSADSRTDIVMKGIKHGACDYLIKPVRMEELKXIWQHVVRKKFNGNKDHEHSGSLDDTDRNRPTNNDNEYASSANDGGDGSWKSQKKKREKEDDETDLENGDPSSTSKKPRVVWSVELHQQFVNAVNHLGIDKAVPKKILELMNVPGLTRENVASHKQKFRLYLKRIAQHHAGIPHPFVAPVSSANVAPLGGLEFQALAASGQIPPQALAALQDELLGRPTSSLALPGRDQSSLRVAAIKGNKHHEEREIAFGQPIYKCQNNAYGAFPQNSPAVGGLQPFAAWPNNKVGMTDSTSTLGNVGNSQNSNMLLHELQQQPDTLLLGTLHNIDAKPSGVVMPSQSLNTFPASEGISPNQNPLIIPSQPPSFVSSIPPSMKHESLLGLPSTSTSLLGGLDMVNQASTSQALISSHVTNLPGLMNRSSNAIPSPGISNFQSGNIHYVVNQNAMGVSSKPPGVLKTESTDSLSCSYGYIGGSTSVDSGLFSSQSKNPQYGLLQNQNDVNGSWSPSQDFDSFGNSLGQGHPGTTSSNFQSSALGKLPDQGRGRNHGFVGKGTCIPSRFAVDEVESPTNNLSHSIGNSGDIVNPDIFGFSGHM

SEQ ID NO: 36047 - protein, 1023 aa, Arabidopsis thaliana
PRYQALLRMTSAPRKRFPGDIKSFSHELNSKGVRPFPLWKPRRSNNVEEVLNLIRAKFEKAKEEVNSDLAVFAADLVGVLEKNAESHPEWEETFEDLLILARSCAMTTPGDFWLQCEGIVQDLDDRRQELPPGVLKQLHTRMLFILTRCTRLLQFHKESWGEEEQVVQLRQSRVLHSIEKIPPSGAGRSYSAAKVPSTKKAYSQEQHGLDWKEDAVVRSVPPLAPPENYAIKESESPANIDRMSSWKKLPSPALKTVKEAPASEEQNDSKVEPPNIVGSRQGRDDAAVAILNFPPAKDSHEHSSKHRHNISWGYWGEQPLISEESSIMCRICEEEVPTTHVEDHSRVCTLADKYDQKGLSVDERLMAVAGTLDKIAETFRHKDSLAAAESPDGMKVSNSHLTEESDVLSPRLSDWSRKGSEDMLDCFPEADNSIFMDDLRGLPLMSCRTRFGPKSDQGMTTSSASSMTPRSPIPTPRPDPIEQILGGKGTFHDQDDIPQMSELADIAKCAADAIPGDDQSIPFLLSCLEDLRVVIDRRKFDALTVETFGTRIEKLIREKYVHMCELMDDEKVDLLSTVIDEDAPLEDDVVRSLRTSPVHPRDRTSIDDFEIIKPISRGAFGRVFLAKKRTTGDLFAIKVLKKADMIRKNAVESILAERDILINVRNPFVVRFFYSFTCRDNLYLVMEYLNGGDLYSLLRNLGCLEEDIVRVYIAEVVLALEYLHSEGVVHRDLKPDNLLIAHDGHIKLTDFGLSKVGLINSTDDLAGPAVSGTSLLDEEESRLAASEEQLERRKKRSAVGTPDYLAPEILLGTGHGATADWWSVGIILFELIVGIPPFNAEHPQQIFDNILNRKIPWPHVPEEMSAEAHDIIDRFLTEDPHQRLGARGAAEVKQHIFFKDINWDTLARQKAAFVPASESAIDTSYFRSRYSWNTSDEQFFPSGEVPDYSDADSMTNSSGCSSNHHEEGEAEECEGHAEFESGIPVDYSFSNFSFKNLSQLASINYDLLSKGWKDEPQQIPHHK

SEQ ID NO: 36048 - protein, 193 aa, Picochlorum maculatum
AGGISEMALQDYPEVSEKTDALDAAGNTTAAIGKGFAIGSAALVSLALYGTFAVRIGIRNGVNILSPVTFAFLLIGSNLPYWFSALTMKSVGTAAMQMVMEVERQFREQPQLLNEGTTLPPDYTRCVDISTKAALKEMVPSRPPLVMGATRMIPGIVSFFNVAREAGVLTVGLVSGVQLAVSMSNTGGAWDNA

SEQ ID NO: 36049 - protein, 764 aa, Glycine max
  misc_feature (546)..(546): Xaa can be any naturally occurring amino acid
  unsure (1)..(764): unsure at all Xaa locations
MASHIVGYPRMGPKRELKFALESFWDGKSSAEDLQKVSSDLRASIWKQMADAGIKYIPSNTFSHYDQVLDATATLGAVPPRYGWTGGEIGFDTYFSMARGNATVPAMEMTKWFDTNYHFIVPELGPDVNFTYASHKAVDEYKEAKALGVDTVPVLVGPVTYLLLSKPAKGVEKSFSLLSLLPKVLAVYKEVIADLKAAGASWIQFDEPTLVLDLESHKLQAFTDAYAELAPALSGLNVLVETYFADIPAEAYKTLTSLNGVTAYGFDLVRGTNTLDLIKGGFPSGKYLFAGVVDGRNIWANDLAASLTTLQGLEGIVGKDKLVVSTSSSLLHTAVDLVNETKLDDEIKSWLAFAAQKIVEVNALAKALSGHKDEAFFSGNAAALASRKSSPRVTNEAVQKAAAALKGSDHRRATNVSARLDSQQKKLNLPILPTTTIGSFPQTVELRRVRREFKANKISEEEYVKSIKEEIRKVVELQEELDIDVLVHGEPERNDMVEYFGEQLSGFAFTVNGWVQSYGSRCVKPPIIYGDVSRPKPMTVFWSSLXAQSFTKRPMKGMLTGPVTILNWSFVRNDQPRSETTYQIALSIKDEVEDLEKAGITVIQIDEAALREGLPLRKSEQAHYLDWAVHAFRITNVGVQDTTQIHTHMCYSNFNDIIHSIIDMDADVITIENSRSDEKLLSVFREGVKYGAGIGPGVYDIHSPRIPPTEEIADRINKMLAVLEKNILWVNPDCGLKTRKYTEVKPALTNMVAAAKLIRNELAK

SEQ ID NO: 36050 - protein, 388 aa, Symbiobacterium thermophilum IAM 14863
MESNEAKMQNARELVKQLIAKGKRKGSLSYDEVADSLQELELDAEQMEAIFDTLTEAGIKLQGDEPDEAEEPVDGDADVEALDVVEPPPVDDAEPDDDAAAGEDDDLSVPEGIAIDDPVRMYLKEIGRVPLLTAEEEIMYAERIEKGDEEAKRKLAEANLRLVVSIAKRYVGRGMQFLDLIQEGNLGLIKAVEKFDYRKGFKFSTYATWWIRQAITRAIADQARTIRIPVHMVETINKLIRVTRQLVQELGREPTPEEIAAVMDIPVERVREIQKIAQEPVSLETPIGEEEDSHLGDFIEDQDAPAPAEAASFTLLKEQLEEVLESLTPREEKVLRLRFGLDDGRARTLEEVGQVFGVTRERIRQIEAKALRKLRHPSRSKKLKDYLE

SEQ ID NO: 36051 - protein, 202 aa, Picochlorum maculatum
AGGIFEMSQQPEFVRESTDRLDAAGNVTKAITKGYSIGSASLACFLLFGAFMDEFSQFSGKPFRVVDIAVPEVLIGGIIGTMMVFYFVGLTVAAVGKTAGEVVKEVRRQFRDNPEIMTFKARPDYRSCVALVTHAALKEMVWPGLLATGLPIVVGVVFREVGAITDRSLLGAEVLAGYLMFGTETGIMMALFLTAGGAWDNA

SEQ ID NO: 36052 - protein, 217 aa, Zea mays; identical to SEQ ID NO: 1199

SEQ ID NO: 36053 - protein, 610 aa, Kluyveromyces lactis NRRL Y-1140
MSKQFKHTTQERRSSIIYSNNNGKGGLFSPQDYISGDKTQAFIDDDISEDSEDSLFATNNSRTLQHEYGSTGRTGSSDSSEIHSALPKNLIREERDLLMDNKLYNSNHALHNHAAYSTNDPNSSFAPTSSIEDQEVIETWEDAIESGKDINTTFKREAIVITSNASPLVLTFILQNSLSLASIFSVSHLGSNELGAVTLGSMTASITGFAAIQGLCTCLDTLCAQAYGGNHYHLVGVLFQRCAIITIILSLPVLFTWWQWSEQILALFIPERELCALAAKYLQIVSLGIPAFILFECGKRFLQCQGIFHASSIVLLVCAPLNALMNYVLVWDKNIGIGYLGAPISVVLNYWLMALGLFAYTLYTKNEKNPMKCWNGFIKPHQILKNSRKMFNLALPGIIMVEAEFLGFEILTIFASHLGTHELAAQSIISTIASLAYQVPFSISISTSTRVANFIGASLYRSCVITCKVSLLLSFIISSLNMAMIYKARYLIARLFSSEPDVVRLVSSSLPILAFMQIFDAFNASTAGCLRGQGQQKIGGYINVFAFYCIGIPVSYLLTFHYGFGVSGLWWGITSGLVFMSIFQSYAVFHCNWNDIIRAAKSRNSEGAMV

SEQ ID NO: 36054 - protein, 339 aa, Arabidopsis thaliana
MSTSENTPFNGVASSTIVRATIVQASTVYNDTPATLGKANKFIVEAATKGSELVVFPEAFIGGYPRGFRFGLGVGVHNEEGRDEFRKYHASAIKVPGPEVEKLAELAGKNNVYLVMGAIEKDGYTLYCTALFFSPQGQFLGKHRKLMPTSLERCIWGQGDGSTIPVYDTPIGKLGAAICWENRMPLYRTALYAKGIELYCAPTADGSKEWQSSMLHIAIEGGCFVLSACQFCLRKDFPDHPDYLFTDWYDDKEPDSIVSQGGSVIISPLGQVLAGPNFESEGLITADLDLGDVARAKLYFDSVGHYSRPDVLHLTVNEHPKKPVTFISKVEKAEDDSNK

SEQ ID NO: 36055 - protein, 189 aa, Nannochloropsis gaditana
AGGLAEMALQDYPEFREKTDALDAAGNTTAAIGKGIAIGSAALVSLALYGAFAVSIGIRNGVNILSPVTFAFLMIGSNLPYWFSALTIKSVGTAAMQMVMEVERQFREQPQLLNEGTTLRPDYTRCVDISTKAALKEMVPPTALVMLSPLIAGTFFGKYAVAGVLTVGLVSGVQLAVSMSNTGGAWDNA

SEQ ID NO: 36056 - protein, 318 aa, Saccharophagus degradans 2-40
MSSNQLDQLKALTTVVVDSGDINAVARYQPEDATTNPSLVLKAIEQPEYNHLVAQAVAWAKEFAKDKPLVTATADKLAVMLGCEILKHIPGRVSTEVDAHLSFNTEATIAKALELVAMYEQAGVDKSRILIKIASTWEGIQAAKQLEKMGIQCNLTLLFGFAQAQACAEAGVFLISPFVGRILDWYKKDQPNADFTGLNDPGVVSVTKIYNFYKACGFQTVVMGASFRNVGELQSLAGCDRLTISPALLDELQNQTAPLVALLVDKGVSEEKPAPLTEGSFRWAMNEDPMATEKLAEGIRNFAKDQVKLYRLIEKVAG

SEQ ID NO: 36057 - protein, 808 aa, Dendrocalamopsis oldhamii
MAAKLTRLHSLRERLGATFSSHPNELIALFSRYVNQGKGMLQRHQLLAEFDALMDADKEKYAPFEDILRAAQEAIVLPPWVALAIRPRPGVWDYIRVNVSELAVEELSVSEYLAFKEQLVDGHTNSNFVLELDFEPFNASFPRPSMSKSIGNGVQFLNRHLSSKLFQDKESLYPLLNFLKAHNPKGKTMMLNDRIQSLRGLQSALRKAEEYLISIPQDTPCSEFNHRFQELGLEKGWGDTAKRVLDTIHLLLDLLEAPDPANLEKFLGTIPMTFNVVILSPHGYFAQSNVLGYPDTGGQVVYILDQVRALENEMLLRIKQQGLDITPKILIVTRLLPDAVGTTCGQRLEKVLGTEHTDILRVPFRTENGILRKWISRFDVWPFLETYTEDVANEIMREMQAKPDLIIGNYSDGNLVATLLAHKLGVTQCTIAHALEKTKYPNSDIYLDKFDSQYHFSCQFTADLIAMNHTDFIITSTFQEIAGSKDTVGQYESHIAFTLSGLYRVVHGIDVFDPKFNIVSPGADMSVYFPYTETDKRLTAFHPEIEELIYSDVENSEHQFVLKDKNKPIIFSMARLDRVKNMTGLVEMYGKNAHLRDLANLVVVAGDHGKESKDREEQAEFKRMYSLIEEYKLKGHIRWISAQMNRVRNGELYRYICDTRGVFVQPAFYEAFGLTVIESMTCGLPTIATCHGGPAEIIVDGVSGLHIDPYHSDKAADILVNFFEKCKEDPTYWDKISLGGLKRIYEKYTWKLYSERLMTLTGVYGFWKYVSNLERRETRRYLEMFYALKYRSLASAVPLAVDGDSVAK

SEQ ID NO: 36058 - protein, 457 aa, Yersinia pestis biovar Medievalis str. 91001
MKKTSLLLSALAISVGLGLASVPMVSAAALPAAVAGQTLPSLAPMLEKVLPAVVSVHVSGSQAQQQRLPEEFKFFFGPNAPSGKESSRPFEGLGSGVIINAEKGYILTNNHVINNADKIRVQLNDGREYDAKLLGRDEQTDIALLQLTDAKNLTAIKIADSDNLRVGDFAVAVGNPFGLGQTATSGIISALGRSGLNLEGLENFIQTDASINRGNSGGALVNLDGELIGINTAILAPGGGNIGIGFAIPSNMAQNLSQQLIEFGEVKRGLLGIRGSEMTADIAKAFNIDAQRGAFVSEVLPKSAAAKAGIKPGDVLISVDGKKISSFAELRAKVGTTGPGKTIKIGLLREGKPLEVSVTLDNSSSTSTSAENLSPSLQGASLSNGELKDGSKGIKVDSVTKGSPAAQSGLQKDDVIIAVNRERVKDIAELRKAIEAKPAVIALNIVRGEDNIYLLIR

SEQ ID NO: 36059 - protein, 200 aa, Saccharophagus degradans 2-40
MVLDQYSAIIFDMDGTLVDSGQLHEVAWTETLNRFAIPIDRPLMRSLAGVPTKQTIAMLIERFDCKVDSPLEEMNHFKEQVVRDNIHKYVKPTQLAELAKRYHGVLPMSVGTGAYTDEAEVILELCGLRKLLDYIVGADQVTKPKPAPDTFLRCAQLMGQPAQQCVVFEDAKLGIQAAIAAGMDAIDVLTAFQIENEYFL

SEQ ID NO: 36060 - protein, 476 aa, Ustilago maydis 521
MYNHHSQGRYGSGSRSSSSTDTPQGALGALADWAARNLDPETQSSPVSIYVERCCHPSLSSPNLALNLELADYVNQKKANTPREAAFETVRKINSRNPHVGMLGLSLLDILVKNCGYPFHLQIATKEFLNEMVKRFPERPPVFASPVQSKILELIHEWKLTLCVTSKHREDLVHIRDMHRLLTYKGYRFPNVDSRAASVMNSDNNLKSPEELEEEDRAAQGAKLQELIRRGTPKDLAQAQELMKIMSGAEPENKPDYSKQTRRELDKVQSRAILLNDMLNNAKQGERFVSGDAYDQIASHLRSVQPRIQKWIGDVEEGSGGGEAADNMDRLLLVNDLINQVVERYKQFTQGNYDAKAVIDPSIDPSKGGADAVPTAKISDLISFDDDESKSKTQSAQQGGASGSIMDDFASLTFNDVPVAMTAPSSTAPTTTLGGLPADLFSNNSGSSTPNSTNAITNPASGLGNWAKAQVYRSIR

SEQ ID NO: 36061 - protein, 254 aa, Gibberella zeae
PGVGFGTFANEGAKGETYKAVIAALKTGYRHLDCAWFYLNEGEVGQAVRDFLAEDNGVKREDLFICTKVWNHLHEPEEVKWSFENSLKNFGLDYIDLFLVHWPIAAEKGDDYQPKIGPDGKYVIKKDLTENPEPTWRAMEEIYASGKARAIGVSNWTIDGLKQLMAFAKVKPAVNQIEIHPFLPNEDLVKFCLENDILPAAYSPLGSQNQVPTTGETVRSNKTLNEVADRSGNTLAQVLIAWGLRRGTLFCPRA

SEQ ID NO: 36062 - protein, 123 aa, Astragalus membranaceus
RLVEADATKGSDHLRDVFGKGMGLSDQDIVALSGGHTIGAAHKERSGFGGPWTSNPLIFDNSYFKELLSGEKEGLLQLPSDKALLTDPVFRPLVEKYAADEDAFFADYAVAHQKLSELGFAEA

SEQ ID NO: 36063 - protein, 516 aa, Triticum aestivum
MDKAYIAVLTIAFLFLLHYISGKISNGRRGKGAVQLPPSPPVIPFLGHLHLVEKPFHAALRRLAARLGPVFSLRLGSRRAVVVSSAECARECFTEHDVTFANRPRFPSQLLVSFDGAALATSSYGPHWRNLRRVAAVQLLSAHRVACMSGVIAGEVRAMARRLFRAAAAAPGDAARVQLKRRLFELSLSVLMETIAQTKGTRSEADADTDMSVEAQEFKKVVDEIIPYLGAANTWDYLPVLRWFDVFGVRNKILAAVSRRDAFLHRLIDNERRRLDDAGAEGDKKSMIAVLLNLQKTEPEVYTHTMITALCANLFGAGTETTSTTTEWAMSLLLNHPEALRKAQAEIDATVGTTRLVTADDVPRLAYLQCIVSETLRLYPAAPMLLPHQSSADCKVGGYNVPSGTMLMVNAYAIHRDPAAWERPLEFVPERFEGGKAEGRFMIPFGMGRRRCPGETLALRTIGMVLATLVQCFDWERVDGAEVDMTEGGGLTIPKAVPLEAVCRPRPAMRDVLQSL

SEQ ID NO: 36064 - protein, 228 aa, Magnetospirillum magnetotacticum MS-1
MARRRGGPRPARLRRAALVPASAEEAGRRLPEAAMTAQEGAGLRTATFAGGCFWGVQGVFQHVKGVTKAVSGYAGGDRASARYEQVGTGRTGHAEAVQVTYDPAVIRYDELLQIFFSVALDPTEVDRQGPDTGPQYRSALFPADEGQATVARAYIAQLDRAKAFDKPIATRIESGAFYPAEGYHQDYMTLHPNNGYIVANDTPKLRDLKALFPERANAQPVLVGRPPA

SEQ ID NO: 36065 - protein, 484 aa, Streptococcus intermedius
RRAILADTVKVTLGPKGRNVVLEKSFGSPLITNDGVTIAKEIELEDHFENMGAKLVSEVASKTNDIAGDGTTTATVLTQAIVREGIKNVTAGANPIGIRRGIETAVATAVEALKANSVPVSNKEAIAQVAAVSSRSEKVGEYISEAMEKVGNDGVITIEESKGMDTELDVVEGMQFDRGYLSQYMVTDNEKMVADLDNPYILITDKKISNIQEILPLLENILKTSRPLLIIADDVDGEALPTLVLNKIRGTFNVVAVKAPGFGDRRKAMLEDIAILTGGTVITEDLGLELKDATIEALGQASKVTVDKDSTVIVEGSGDAEAIANRVAVIKSQIESVTSEFDKEKLQERLAKLSGGVAVIKVGAATETELKEMKLRIEDALNATRAAVEEGIVSGGGTAFVNVLDAVAALELEADEATGRNIVLRALEEPVRQIALNAGFEGSIVIDRLKNSEVGTGFNAATGEWVNMIEAGIIDPVKVTRYAL

SEQ ID NO: 36066 - protein, 436 aa, Triticum aestivum
  misc_feature (342)..(342): Xaa can be any naturally occurring amino acid
  misc_feature (377)..(377): Xaa can be any naturally occurring amino acid
  misc_feature (387)..(387): Xaa can be any naturally occurring amino acid
  unsure (1)..(436): unsure at all Xaa locations
TLEVASSDSIDNVKAKIQDKEGIPPDQQRLIFAGKQLEDGRTLADYNIQKESTLHLVLRLRGGMQIFVKTLTGKTITLEVESSDTIDNVKAKIQDKEGIPPDQQRLIFAGKQLEDGRTLADYNIQKESTLHLVLRLRGGMQIFVKTLTGKTITLEVESSDTIDNVKAKIQDKEGIPPDQQRLIFAGKQLEDGRTLADYNIQKESTLHLVLRLRGGMQIFVKTLTGKTITLEVESSDTIDNVKAKIQDKEGIPPDQQRLIFAGKQLEDGRTLADYNIQKESTLHLVLRLRGGMQIFVKTLTGKTITLEVESSDTIDNVKAKIQDKEGIPPDQQRLIFAGKQLXEDGRTLADYNIQKESTLHLVLRLRGGMQIFVKTLXTGKTITLEVXSDTNDNVKAKSRQGGYPPDNVLVTTDGRTWRLQRRISTGLLQGGSLENT

SEQ ID NO: 36067 - protein, 476 aa, Streptococcus parasanguinis
LADTVKVTLGPKGRNVVLEKSFGSPLITNDGVTIAKEIELEDHFENMGAKLVSEVASKTNDIAGDGTTTATVLTQAIVREGIKNVTAGANPIGIRRGIETAVATAVEALKNNAIPVSSKEAIAQVAAVSSRSEKVGEYISEAMEKVGKDGVITIEESRGMETELEVVEGMQFDRGYLSQYMVTDNEKMVADLENPYILITDKKISNIQEILPLLESILQSNRPLLIIADDVDGEALPTLVLNKIRGTFNVVAVKAPGFGDRRKAMLEDIAILTGGTVITDDLGLELKDATIEALGQAAKVSVDKDSTVIVEGSGNPEAIANRVAVIKSQIETTTSEFDREKLQERLAKLSGGVAVIKVGAATETELKEMKLRIEDALNATRAAVEEGIVAGGGTALVNVISAVATLELEGDEATGRNIVLRALEEPVRQIAHNAGYEGSIVIDRLKNAEVGTGFNAATGEWVNMIDAGIIDPVKVT

SEQ ID NO: 36068 - protein, 606 aa, Oryza sativa
MGEKKENFCAGKTEQPPTPTSVHDSGPHLDPTGRRHIRRAFSIHVGAPTPQRPRDPTPTSVTEPANAVPTRVPSPLPEPRIPRAAAIRGPLAARPHEFAEPSPSTRRRFNRRSPQRRPPHQRRFLKMVSSEISSVTTTHAQGPKLFRGKILLPMGPPDVVPSENVEFDFSDVFGPTAVQTPTDLSILTPDSPAPLTESSEGIYNDPLVIVKRSHSLVGPSSLVSQSLPLSKLTLHESDSALDLLECTKEKKSNQEALSDEELDDTKNENGVVGLDDFEVLKLVGQGAFGKVFQVRKKGTSEIYAMKVMRKDKILEKNHAEYMKAERDILTKVDHPFVVQLRYSFQTKYRLYLVLDFINGGHLFFQLYQQGLFREELARIYTAEIVSAVAHLHANGIMHRDLKPENILLDADGHAMLTDFGLAKEFDENTRSNSMCGTVEYMAPEIVQGRGHDKAADWWSVGILLFEMLTGKPPFVGGNRDKVQQKIVKEKIKLPAYLSSEVHSLLKGLLHKEAGRRLGCGPGGSNEIKNHKWFKSVNWKKLDSRQIQPSFRPNVAGKTCIANFDECWTSMPVLDSPVASPVAADSNFVGFSYVRPAPFLQRPSPLG

SEQ ID NO: 36069 - protein, 321 aa, Nostoc punctiforme
MSNLTFSDTKASNTNKATTDTVRAYLKEIGRIPLLTQEQEIIFAQEVQQLMTILAESEKLTIELKRTPTLSEWANQMQLSEQELLQQLNQGKKAKHKMITANLRLVVSIAKQYQRRNLELMDLIQEGTLGLERGVEKFNPALGYRKTTYAYWWIRQGITRAIAQQGRAIRLPIHINEKLNKIKRVQRELSQTLGRIPTSTEIANALSLKPSQIREFLLLATRTISLDIRVSSAKDLRLQDLIEDYKYSSNSYITEESLNQEVNSLLSNLSRQQQEILNLHFGLTDGEELSLQQIGQRLGISRERVRQIEKQALKLLQQQLS

SEQ ID NO: 36070 - protein, 641 aa, Ricinus communis
MISLKNSFLSGSCSSPVPGKQRAGLVVPTAPSSLKVVALNPNRERNGSIMMESTLQEMRDGASVLDLDPKSTVAGGVRDVYGEDTATEDQFVTPWSLSVASGYSLLRDPHHNKGLAFNDKERDAHYLRGLLPPAIVSQELQVKKMMHIIRQYQLPLQKYMAMMDLQERNERLFYKLLIQNVEEMLPIVYTPTVGEACQKYGSIFGRPQGLYISLKEKGRILEVLRNWPEKNIQVIVVTDGERILGLGDLGCQGMGIPVGKLSLYTALGGVRPSSCLPVTIDVGTNNEKLLNDEFYIGLRQRRATGQEYAELLHEFMTAVKQNYGERVLVQFEDFANHNAFDLLAKYGTTHLVFNDDIQGTASVVLAGLVAALKLVGGSLADHRFLFLGAGEAGTGIAELIALEMSKQTNMPVEETRKKIWLVDSKGLIVSSRMDSLQHFKRPWAHEHEPIKTLLDAVNDIKPTVLIGTSGVGRTFTKEVVEAMASFNEKPIILALSNPTSQSECTAEEAYTWSQGRAIFASGSPFAPVEYEGKVYVPGQANNAYIFPGFGLGLIMSGTIRVHDDMLLAASEALAAQVTQENFDKGLIYPPFTNIRKISANIAANVAAKAYELGLASRLPQPKDLVKYAESCMYSPAYRSYR

SEQ ID NO: 36071 - protein, 487 aa, Zea mays
MVSGGSTKEQQHEMNISFGMMNQHHQPPSSSSSSSMHAAAASFMSGKEASGAYDHLGELDQALFMYLDHGSSHGGGATQQERRQTLNIFPSQPMHVEPSPKGEISLVLSPAPVGSKQPRSPDHHHHQQAAMEELAGSRRQQQEHLHLQHHQPFAAAAEPAAPGMIKDVKPLAKKDHRRGTSTAERDPKTLRRLAQNREAARKSRLRKKAYIQQLESSRIRLAQLEQELHTARAQGVFFPNSGILADQGVAGKGVPIGGIDGLSSEAAMFDVEYGRWQEEHYRLMYELRAALQQHLPEGELQMYVESCLAHHDEMVGIKEGAIKGDVFHLISGVWRSPAERCFLWLGGFRPSEVIKMLLSHVEPLTEQQIVGVYGLQQSALETEEALSQGLEALYQSLSDTVVSDALSCPSNVSNYMGQMAVAMNKLSTLEGFVRQAENLRQQTLHRLHQVLTTRQMARSLLAVSDYFHRLRTLSSLWVTRPRAPQEQ

SEQ ID NO: 36072 - protein, 484 aa, Streptococcus sanguinis
GSSILANTVKVTLGPKGRNVVLEKSFGSPLITNDGVTIAKEIELEDHFENMGAKLVSEVASKTNDIAGDGTTTATVLTQAIVREGIKNVTAGANPIGIRRGIEAAVATAVEALKSNSVPVSNKEAIAQVAAVSSRSEKVGEYISEAMEKVGNDGVITIEESKGMETELDVVEGMQFDRGYLSQYMVTDNEKMVAELDNPYILITDKKISNIQEILPLLENILKTNRPLLIVADDVDGEALPTLVLNKIRGTFNVVAVKAPGFGDRRKAMLEDIAILTGGTVITDDLGLELKDATIEALGQASKVTVDKDSTVIVEGSGNPEAIANRVAVIKSQIESSTSEFDREKLQERLAKLSGGVAVIKVGAATETELKEMKLRIEDALNATRAAVEEGIVSGGGTAYINVLDAVAGLELAGDEGTGRNIVLRALEEPVRQIALNAGFEGSIVIDRLKNSEVGTGFNAATGEWVNMIEAGIIDPVKVTRSAS

SEQ ID NO: 36073 - protein, 470 aa, Selenomonas ruminantium
MLKKTKIVCTQGPSTEKPGVIDALIANGMNCARFNFSHGDHEEHLGRINMVREAAKKAGKVISLILDTKGPEMRLGEFKDGKVMLEKGNKFTLTYDDEPGDETHVSVNHKGLYTEVKPGDTLLLSDGLVALKVDEIKGKDIVTTIQNSGKMSTRKRVAAPGVPLGLPPISEQDAKDIIFGCEQDMDFVAASFIQRPDDVIAIRKLIEEHNGHMEILPKIENLEGVKNFDAILEVSDGIMVARGDLGVEVPAEDVPLIQKEIIRKCNAAGKPVIVATQMLDSMERNPRPTRAEVSDVGNAILDGTDAIMLSGETASGDYPVEAVATMNRIAQRMESSLEYKELYVERGLQHMESRTRAIAHATVQMAYELDAPAIITPTESGYTTKVVSKYRPKAAIVAYTPSEKVLRQLNLRWGVYPVLGTQWSDVDEMISNATAAAVKEDLVQRGDLTIITSGVKMESRTRAIAHATDI

SEQ ID NO: 36074 - protein, 185 aa, Phaeodactylum tricornutum
AGGIAEMSELPEEVRERTDILDSVGNTTAAIGKGFAIASAALTALALFAAYVEFTGIDGINIYKADVLAALFIGGMVPVVFSALAMNSVGKAAMEMVKEVRRQFKEIPGIMEGTGTPEYGKCVDISTKAALREMMLPGAITIVAPILIGFLMGPEALGSYMAGVAVSGVLWAIFQNNAGGAWDNA

SEQ ID NO: 36075 - protein, 329 aa, Vibrio cholerae O1 biovar eltor str. N16961
MINRVPTNIITGFLGVGKTTAILHLLATKPAHEKWAVLVNEFGEIGIDGAIMSEQGAMIKEVPGGCLCCTAGVPMSVGINALLRQKPDRLIIEPTGLGHPKQVVATLISEQYQPYVDLKATIALMDPRHLSMDKYRSNQNFNDQLASADIVLGNKVDQCSSSDIDAFNDWVTDQTPAKTFSQLIKQGQFPIELLDMPRLVGHASTHIDSHHHHHAADEPQFQLAPQQPFLRKENRGQGYFSCGWLFGAEYQFNFDLLFQLLNDLTAERVKGVLNTDRGCYAFNVANGVVSVTEMSLDGFESRLEVIDSQLMPWSELESILLKIAGIPQA

SEQ ID NO: 36076 - protein, 251 aa, Oryza sativa (japonica cultivar-group)
MLAVFDPTVAKCPEGLRSPPVAGGAVAAGGAGALMKGFAGAHADAVTVSLGPAGALAYSAANQSPLVPRLFGAVNDIFCLFQGHIENIASLKQHYGLSKTATEVTILIEAYRTLRDRGPLPASQVVRDLSGKFTFILYDTLSKSTFVAADADGSIPFFWGVDSENHLVFSDNVDLLKASCGNSFAPFPKGCFYTTSGGLQSFEHPLNELKPVPRVDSQGQMCGSNYKVDSEAKKDSGIPRVGSAADWSNHF

SEQ ID NO: 36077 - protein, 451 aa, ASPERGILLUS NIDULANS FGSC A4
MRGEVCHIHIGQAGTQLGNSAWELYLLEHGLGADGRLDPEKGEDINAGGSFETFFTETGSGKYVPRSIFVDLDPSPIDEIRTGPYRQLFHPEQLISGKEDAANNYARGHYTVGKELVDTVVDRVRRLSDNCSSLQGFLVFHSFGGGTGSGFGALLLERLSTEYGKKSKLEFAVYPSPRVSTAVVEPYNAVLSTHSTIENSDCTFLVDNEAVYDICRRNLDIPRPSFEHLNRLIAQVVSSITSSLRFDGALNVDLNEFQTNLVPFPRIHYPLISYAPVISSNRSSHESFKVQDLTLQCAEPNNQMVVCDPRNGKYMAVALLYRGDCVPRDCTQAIASLKAKASFNLVEWCPTGFKVGINYQKPARVPGSELAPVDRSVSMLSNTTAISEAWSRLDHKFDLMYSKRAFVHWYVGEGMEEGEFSEAREDLAALEKDYEEVAGDSLDMEGEEAEY

SEQ ID NO: 36078 - protein, 189 aa, Phaeodactylum tricornutum
AGGIAEMAELEERVRDTTDALDALGNTTAATGKGFAIGSAVLTALSLLSAFTDKAGLGNVNVDIGEPVVLAGVLIGAMLPFLFAALTMLSVQKAAGAIIIEVRRQFAEIPGLREGTAEADSDKCVAISTQSSVEEMVLPGIYAILSPITVGFLIGPRCLTGLLGGAIASGMMLALMMIQSNAGGAWDNA

SEQ ID NO: 36079 - protein, 716 aa, Oryza sativa (japonica cultivar-group)
MAAVAPPQVPVVAPAPAAAAAPPAPAPAAAATAAPVADQTTDLLQKLSLDSQPKAVDAATEPAGAKKGPAASQPLSVAIPPERSITPVLQDFMDPNMFYLPAYYYGELCWFAKLPGYDGSVSEWDDYPRYVNPDGVEITPAVYGDIYGYGYAPYGAYSPASSPVPTVDGQMFGQHYQYPTSYYQPPTPVPSTTQGDLQPSANPDKPTAKADPAKTTTNGAPNGTVHSNSGTVPLGSSQQNSSLTPDGTYRAPLLGGVPSAGYLDSTYGYDSTGAHFAWYDGSAYTNGQQRTTTTNHMSSSTFSNGSSARTQNKGSTPQQMGMNNRRPTTTTGSAAPTYPNRMYPSTRSYSQYGNSYKTGLSYSTNGYGSNGYGSNGYDSRLYGRWGLSMDNRYKPRGRGNGYYGFGNESQDGTIELNRGPRSGRFKNQKLFGHTVTIAVKGQSLPTSDSMNATDVPDRTQFNRDDFPVQYDDAKFFVIKSYSEDDIHKSIKYNVWASTTNGNKKLDAAYQEAQAKSSKCPIFLFFSVNTSGQFVGVAEMTGAVDFEKTLEYWQQDKWNGSLSLKWHIVKDVPNNILKHIILENNENKPVTNSRDTQEVNLDQGIQMLKIFKEHVSKTSILDDFAFYENRQKLMQEKRVKQQQIQKQVWDSRAPSSVTGEKQQDAATAKPKLPNGVNGELKVPAENGTAPVVTYAAKVAQTAATEKPALANGTVKAS

SEQ ID NO: 36080 - protein, 349 aa, Rickettsia honei
ISMVSAEADCFTYDPGFMSTASCQSTITYIDGDKGILRHRGYDIKDLAEKSDFLEVAYLLIYGELPSGEQYNNFTKQVAHHSLVNERLHYLFQTFCSSSHPMAIMLAAVGSLSAFYPDLLNFKEADYELTAIRMIAKIPTIAAMSYKYSIGQPFIYPDNALDFTENFLHMMFATPCTKYTVNPIIKNALNKIFILHADHEQNAFTSTVRIAGSSGANPFACISTGIASLWGPAHGGANESVISMLKEIGSSEYIPKYIAKAKDKNDPFRLMGFGHRVYKNYDPRAAVLKETCKEVLKELGQLDNNPLSQIAIELEAIALKDEYFIERELYPNVDFYSGIIYKAMGIPSQ

SEQ ID NO: 36081 - protein, 183 aa, Porphyra purpurea
AGGIAEMSGLPKEVRERTDILDAVGNTTATTGKGFAIAFAALTSLALFAAFVGIAGIDSIDIYKADVLAGLFVGAMVPFIFSALSIAAVGRAAMEMVQEVRRQFKEIPGIMEYKANPEYDKCVDISTKASIREMMLPGAIAIITPIVVGFIFGPEMLGGLLAGVTVSGVLMHFQNSGGAWDNA

SEQ ID NO: 36082 - protein, 208 aa, Porphyra purpurea
AGGISEMAELPSEVRERTDKLDAVGNTTAAVGKGFAIASAALTALALFAAFMKTAGVTAIDVSQPKIMAGLLVGGMLPFVFSALSMNAVGRAAMAMIEEVRRQFRDIPKLKAALEVMRAVDSDMTKASKEQRAIFDEADGVADYGKCIDISTKASIKEMVFPGLLAIVVPVAVGFLALEAEMVGGLLAGVTTGSLNAISNTGGAWDNA

SEQ ID NO: 36083 - protein, 280 aa, Triticum aestivum
MSSLSIPPPLLRSSHSPSPAAAAAANWRKRAVRVRVRAPVAALAGDGGCAGTGMEQHLQAGSASGSPVREKPVMSNIGKSTNILWHDCPIGQPERQKLLGQKGCVIWITGLSGSGKSTVACALSRELHYRGHHTYVLDGDNLRHGLNRDLSFKAEDRTENIRRVGEVAKLFADAGTICIASLISPYRRDRDACRALLPDSRFIEVFMGLPLELCEARDPKGLYKLARTGKIKGFTGVDDPYESPVNSEIVIKMEGGECPSPKAMAQQVLSYLEKNGYLQA

SEQ ID NO: 36084 - protein, 156 aa, Brassica napus
  misc_feature (147)..(147): Xaa can be any naturally occurring amino acid
  unsure (1)..(156): unsure at all Xaa locations
YKYYPFVHRSLCDTHTTMELTTLASWLTPTTLFLLLNFTIGTIFFTNKLGSGSKKHQPHQDGFGPGHNHDNAQLGRPPSFVDRVKSINFSLYNSPSHESEIHFNGSDSNPSPPRSLLQRVRSFNMPSFKFPQHNSEGDYAAYALTTXPEDTNRVDP

SEQ ID NO: 36085 - protein, 648 aa, ASPERGILLUS NIDULANS FGSC A4
MELESSAFPKTLAEQDNTMVPRNEQSSLKRSRVTADHESQDQKKPRRSERISSQQQSQTPVIQSYLPTPLTHHDSTATDLRNEMTATPPSQALPRSPSDLGSPPGDTQALSQFVYPPRAFADDVEDEAAEGVWGYLIPLDDKVRDALVLRKRDGCDAKPTKERSSKERKSRESSTKHAANRRPGGYLIGRHPECDLSLNIPTVSNRHFLVFPENRRGDTVAILEDLSSNGTFINDAIVGRNKHRELEDGDEVTVLDEVRFVFRAPRTKNISGFRQQYRVLQQLGKGHFATVYLCVERTTGAKFAVKVFEKRADSKSQNDALMQEIGLLMSVSHPNLLCLKDTFDESDGVYLVLELAPEGELFNMIIRKQKFTEKETRHIFRQLFEGLKYLHDRGIVHRDIKPENILVADNKLTVKLGDFGLAKIIGEDSFTTTLCGTPSYVAPEILQESRRRKYTKAVDIWSLGVVLYICLCGFPPFSDELYTPENPYTLAQQIKLGRFDYPSPYWDSVGDPALDLIDRMLTVDVDKRITVDECLQHPWLTGELPSVTDSTDGLTGALGNLDFSKRKIARERTLLSGINDVRSSQQKTGDGASVKVYHKNIAGQRMHNQRATRQHEFPNKNSGPKDFVNLGECGDPVLFEEEPTSRHN

SEQ ID NO: 36086 - protein, 333 aa, Mesorhizobium sp. BNC1
MTGRKKPLVVITRKLPDQVETRMRELFDARLNIDDGPMTQPELVAAVKEADVLVPTITDRIDAALLAQAGERLKLIANYGNGVEHIDVTAAAERGITVTNTPNVLNEDTADMTMALMLAVPRRLVEGAEMLKQGGKWAGWSPTWMLGRRIWGKRLGIVGMGRIGTAVARRAKAFGLSIHYHNRRRVAPMIEDELEATYWDSLDQMLARMDIISVNCPSTPATYHLLSARRLALMQPSSYLVNTARGEIVDEEALIRMIEEGKLAGAGLDVFAHEPAVSRRLLKLSEIGKVVILPHMGSATIEGRIDMGEKVIINIRAFFDGHRPPDRVLPRKL

SEQ ID NO: 36087 - protein, 407 aa, Rhodobacter sphaeroides 2.4.1
MEFSQHFQKLIDDMRLDGRYRTFAELERIAGEFPTALWHGPDGQARRVTVWCSNDYLGMGQNAEVLAAMHRSIDLSGAGTGGTRNISGTNRQHVALEAELADLHGKESALIFTSGWISNLAALGTLGKILPECAIFSDALNHNSMIEGIRRSGAERFIFHHNDPVHLDRLLSSVDPARPKIVAFESVYSMDGDIAPIAEICDVAERHGALTYLDEVHAVGLYGPRGGGISDRDGLADRVTIIEGTLAKAFGVMGGYVSGPSLLMDVIRSMSDSFIFTTSICPHLAAGALAAVRHVKAHPDERRRQAENAVRLKVLLQKAGLPVLDTPSHILPVMVGEAHLCRSISEALLARHAIYVQPINYPTVARGQERFRLTPTPFHTTSHMEALVEALLAVGRDLGWAMSRRAA

SEQ ID NO: 36088 - protein, 566 aa, Sulfolobus acidocaldarius
MEKLSYDAVIIGAGLAGLMAAHEISKAGYSAAVISKVFPTRSHSAAAEGGIAAYVNGNSDPNDSPDYMAYDTIKGGDYLVDQDAAELLAYKSGEIVELLEKWGALFNRQPDGRIALRYFGGQTYPRTRFVGDKTGMALLHTLYERTSGSGKVDFYFEWFAWELIRDESRVRGVVAFDMRNMVPFFFKAKAVVIAAGGMGMLYRHTTNSYIGTGDGYAMALRARVALKDPEFVQFHPTALYPSDILISEAARGEGAVLKNAKGERFMTRYAPKKLDLAPRDIVSRAIITEIKEGRGFPGGYVGLDISHLGEEYIKERLALAYEAAKTFSGVDATKELIPIRPAHHYYMGGIDVDITGKNPDVIGLFAAGEAACVSVHGANRLGSNSLLETLVFGRETGNEVVKFLQSFTEPSSDIDKEAEKAEQSAYDIMKKESGVHFGDILEKLRDYMWEFVGIYRDENGLKNAVSEILKLREQMKNMYVLDKSKVYNTEFYNALELKNMIDLGLVIASTALNRKESRGAHYRTDYPKRDDQNWLKHTIAYLSGNTVEITYKPVKMTKWKPEERVY

SEQ ID NO: 36089 - protein, 84 aa, Glycine max
MSMEASRKLLSAALLLVLLLAATGEMGGPVAVAEARTCEAKSHRFRGPCVRHRNCANVCKTEGFPGGKCRGFRHRCFCTTHCRQ

SEQ ID NO: 36090 - protein, 427 aa, Pyrococcus abyssi GE5
MGPGVLVKVDEKVEPRKAILLGLQHVLAMFGATVTVPLVVGTAVGLSKEEISIMIQAVLLAMGIATLLQTTIGSRYPIVQGSSFAFIPGLISIGKSLGMAATEGALIVGGIIEALIGGTGIVGKVKRLFTPLVTGVTIMLIGFSLADVAVKYFFNFYADPSGSSIPRATIVALVTFITTVYVALKAKGPIRAMPVIAGALVGYLVSVPLGLANFQLVKELPLVSLPRPFPWGIPEFNLTAIVTLLFAFMVSIIESVGDYHAISAIAEAPITNKHINRGIMSEGIACSIAGILGACGTTSYSENIGLVALTKVASRYVVQIGGIILVVLSLFPKFAGILASMPAPVLGGLTIALYGMISVTGLRLIKDKVELNDRNTLILATSLIVGLGAPQLPPKFLAHFPRIVASILESGMAIGAITAIVLDQLLR

SEQ ID NO: 36091 - protein, 364 aa, Acinetobacter sp. ADP1
MAGNTALCTVGRSGNDLHYRGYDILDLAVGSQFEEVAHLLVHGKLPNQAELKAYKAKLKALRGLPAALKTALEQLPPSAHPMDVMRTGVSVLGCLTPEHEDHNEAGAKDIADKLMASLGSMLLYWYHFSNNGRRIEVETDDDSIAAHFLHLLHGEKPSEEWIQAMHTSLILYAEHEFNASTFTSRVVAGTGSDMYSAITGGIGALRGPKHGGANEVAFVIQQRYDNADEAEADIRSRVEKKEVVIGFGHPVYTVSDPRNEVIKKVAYDLAQSQQNTKMYLIAERLEAVMKEVKNMFPNLDWFSAVSYHLMGVPTAMFTPLFVIARTAGWSAHVIEQRQDGKIIRPSANYTGPENLEFKPLAERG

SEQ ID NO: 36092 - protein, 477 aa, Pseudomonas aeruginosa PAO1
MNSPALPLSRGLRIRAELKELLTLAAPIMIAQLATTAMGFVDAVMAGRASPHDLAAVALGNSIWIPMFLLMTGTLLATTAKVAQRHGAGDQPGTGPLVRQALWLALLIGPLSGAVLWWLSEPILGLMKVRPELIGPSLLYLKGIALGFPAAALYHVLRCYTNGLGRTRPSMVLGIGGLLLNIPINYALIYGHFGMPKMGGPGCGWATGSVMWFMFLGMLFWVNKASIYRASQLFSRWEWPDRATIGPLVAVGLPIGIAVFAESSIFSVIALLIGGLDENVVAGHQIALNFSALVFMIPYSLGMAVTVRVGHNLGAGLPRDARFAAGVGMAAALGYACVSASLMLLLREQIAAMYSPDPAVIAIAASLIVFSALFQFSDALQVTAAGALRGYQDTRVTMIMTLFAYWGIGLPVGYSLGLTDWFQEPTGPRGLWQGLVVGLTGAAIMLCIRLARSARRFIRQHERLQREDAEAASVLGR

SEQ ID NO: 36093 - protein, 318 aa, Arachis hypogaea
VMHRDLKPESFLFANKKENSPLKAIDFGLSVFFKPGEKFSEIVGSPYYMAPEVLKRNYGPEIDIWSAGVILYILLCGVPPFWAESEQGGAQAILRGLIDFKREPWPSISESAKSLVKQMLEPDPKLRLTAKQVLEHPWIQMLRRAPNIPLGDAVKSRLKQFSMMNRFQKKALRVIADFLSNEEVEDIKDIFQKMDTDNDGIVSIEELKAEFQNFGSQLAESEIQMLLEAVNTNGKGTLDYGEFVAVSLHLKRMANDEHLRKAFSYFDKDGNGYIEPDELRNALMEDGTDDCADVANDIFQEVDTDKDGRISYEEFVAM

SEQ ID NO: 36094 - protein, 8817 aa, Polyangium cellulosum
MNNDEKLVSYLQQAMNELQRAHQRLRAVEEKEHEPIAIVAMSCRFPGDVRTPEDLWKLLLDGKDAISDLPPNRGWKLDALDVHGRSPVREGGFFYDADAFDPAFFGISPREALAIDPQQRLLLEISWEAFERAGIDPASLQGSQSGVFVGVIHNDYDALLENAAGEHKGFVATGSTASVASGRIAYTFGFQGPAISVDTACSSSLVAVHLACQALRRGECSLALAGGVTVMATPAVFVAFDSESAGAPDGRCKSFSVEANGSGWAEGAGMLLLERLSDAVQNGHPVLAVLRGSAVNQDGRSQGLTAPNGPAQERVIRQALDSARLTPKDVDVVEAHGTGTTLGDPIEAQAILATYGEAHSQDRPLWLGSLKSNLGHAQAAAGVGSVIKMVLALQQGLLPKTLHAQNPSPHIDWSPGTVKLLNEPVVWTTNGHPRHAGVSAFGISGTNAHVILEEAPAIARVEPAASQPASEPLPAAWPVLLSAKSEAAVRAQAKRLRDHLLAKSELALADVAYSLATTRAHFEQRAALLVKGRDELLSALDALAQGHSAAVLGRSGAPGKLAVLFTGQGSQRPTMGRGLYDVFPVFRDALDTVGAHLDRELDRPLRDVLFAPDGSEQAARLEQTAFTQPALFALEVALFQLLQSFGLKPALLLGHSIGELVAAHVAGVLSLQDGCTLVAARAKLMQALPQGGAMVTLRASEEEVRDLLQPYEGRASLAALNGPLSTVVAGDEDAVVEIARQAEALGRKTTRLRVSHAFHSPHMDGMLDDFRRVAQSLTYHPARIPIISNVTGARATDHELASPDYWVRHVRHTVRFLDGVRALHAEGARVFLELGPHAVLSALAQDALGQDEGTSPCAFLPTLRKGRDDAEAFTAALGALHSAGITPDWSAFFAPFAPRKVSLPTYAFQRERFWPDASKAPGADVSHLAPLEGGLWQAIERGDLDALSGQLHVDGDERRAALALLLPTLSSFRHERQEQSTVDAWRYRITWKPLTTAETPADLAGTWLVVVPAALDDDALPSALTEALTRRGARVLALRLSQAHLDREALAEHLRQACAETAPIRGVLSLLALDERPLADRPALPAGLALSLSLAQALGDLDLEAPLWFFTRGAVSIGHSDPLAHPAQAMTWGLGRVIGLEHPDRWGGLVDVCAGVDESAVGRLLPALAERHDEDQLALRPAGLYARRIVRAPLGDAPPARDFTPGGTILITGGTGAIGAHVARWLARRGAQHLVLISRRGAEAPGASELHDELSALGARTTLAACDVADRNAVATLLEQLDAEGSQVRAVFHASGIEHHAPLDATSFRDLAEVVSGKVEGAKHLHDLLGSRPLDAFVLFSSGAAVWGGGQQGGYAAANAFLDALAEHRRSAGLTATSVAWGAWGGGGMATDQAAAHLQQRGLSRMAPSLALAALALALEHDETTVTVADIDWARFAPSFSAARPRPLLRDLPEAQRALETSEGASSEHGPAPDLLDKLRSRSESEQLRLLVSLVRHETALVLGHEGASHVDPDKGFLDLGLDSLMAVELRRRLQQATGIKLPATLAFDHPSPHRVALFLRDSLAHALGTRLSVEPDAAALPALRAASDEPIAIVGMALRLPGGVGDVDALWEFLAQGRDGVEPIPKARWDAAALYDPDPDAKTKSYVRHAAMLDQVDLFDPAFFGISPREAKHLDPQHRLLLESAWQALEDAGIVPPTLKDSPTGVFVGIGASEYALREASTEDSDAYALQGTAGSFAAGRLAYTLGLQGPALSVDTACSSSLVALHLACQALRQGECNLALAAGVSVMASPEGFVLLSRLRALAPDGRSKTFSANADGYGRGEGVIVLALERLGDALARGHRVLALVRGTAINHDGASSGITAPNGTSQQKVLRAALHDARITPADVDVVECHGTGTSLGDPIEVQALAAVYADGRPAEKPLLLGALKTNIGHLEAASGLAGVAKIVASLRHDALPPTLHTGPRNPLIDWDTLAIDVVDTPRSWARHEDSSPRRAGVSAFGLSGTNAHVILEEAPAALSGEPATSQTASRPLPAACAVLLSARSEAAVRAQAKRLRDHLLAHDDLALIDVAYSQATTRAHFEHRAALLARDRDELLSALDSLAQDKPAPSTVLGRSGSHGKVVFVFPGQGSQWEGMALSLLDSSPVFRAQLEACERALAPHVEWSLLAVLRRDEGAPSLDRVDVVQPALFAVMVSLAALWRSLGVEPAAVVGHSQGEIAAAFVAGALSLEDAARIAALRRKALTTVGGNGGMAAVELGASDLQTYLAPWGDRLSTAAVNSPRATLVSGEPAAVDALLDVLTATKVFARKIRVDYASHSAQMDAVQDELAAGLANIAPRTCELPLYSTVTGTRLDGSELDGAYWYRNLRQTVLFSSATERLLDDGHRFSVEVSPHPVLTLALRETCERSPLDPVVVGSIRREEGHLARLLLSWAELSTRGLALDWKDFFAPYAPRKVSLPTYPFQRERFWLDVSTDERFRRRLRRPDLGRPIPLLGAAVAFADRGGFLFTGRLSLAEHPWLEGHAVFGTPILPGTGFLELALHVAHRVGLDTVEELTLEAPLALPSQDTVLLQISVGPVDDAGRRALSFHSRQEDALQDGPWTRHASGSLSPATPSLSADLHEWPPSSAIPVDLEGLYATLANLGLAYGPEFQGLRSVYKRGDELFAEAKLPEAAEKDAARFALHPALLDSALHALAFEDEQRGTVALPFSWSGVSLRSVGATTLRVRFHRPKGESSVSIVLADAAGDPLASVQALAMRTTSAAQLRTPAASHHDALFRVDWSELQSPTSPPAAPSGVLLGTGGHDLALDAPLARYADLAALRSALDQGASPPGLVVAPFIDRPAGDLVPSAHEATALALALLQAWLADERLASSRLVLVTRRAVATHTEDDVKDLAHAPLWGLARSAQSEHPDLPLFLVDIDLSEASQQALLGALDTGERQLALRNGKPLIPRLAQPRSTDALIPPQAPTWRLHIPTKGTFDALALVDAPEAQAPLAHGQVRIAVHAAGLNFRDVVDTLGMYPGDAPPLGGEGAGIVTEVGPGVSRYTVGDRVMGVFGAAFGPTAIADARMICPIPHAWSFAQAASVPIIYLTAYYGLVDLGHLKPNQRVLIHAAAGGVGTAAVQLARHLGAEVFATASPGKWSALRALGFDDAHLASSRDLGFEQHFLRSTHGRGMDVVLDCLAREFVDASLRLMPSGGRFIEMGKTDIREPDAIGLAYPGVVYRAFDVTEAGPDRIGQMLAELLSLFERGVLRLPPITSWDIRHAPQAFRALAQARHVGKFVLTIPRPIDPEGTVLITGGTGTLGVLVARHLVAKHSAKHLLLTSRKGARAPGAEALRSELEALGASVTLVACDVADPRALRTLLDSIPRDHPITAVVHAAGALDDGPLGSMSAERIARVFDPKLDAAWYLHELTQDEPVAAFVLFSAASGVLGGPGQSNYAAANAFLDALAHHRRAQGLPAASLAWGYWAERSGMTRHLSAADAARMRRAGVRPLDTDEALSLFDVALLRPEPALVPAPFDYNVLSTSADGVPPLFQRLVRARIARKAASNTALASSLAEHLSSLPPAERERVLLDLVRTEAASVLGLASFESLDPHRPLQELGLDSLMALELRNRLAAAAGLRLQATLLFDYPTPTALSRFFTTHLFGGTTHRPGVPLTPGGSEDPIAIVAMSCRFPGDVRTPEDLWKLLLDGQDAISGFPQNRGWSLDALDAPGRFPVREGGFVYDADAFDPAFFGISPREALAVDPQQRILLEITWEAFERAGIDPASLQGSQSGVFVGVWQSDYHASLVNATGEYKGLVATGSAASVASGRIAYTFGLQGPAISVDTACSSSLVAVHLACQALRHGECSLALAGGVTIMATPGIFIAFDSESAGAPDGRCKAFSAEADGSGWAEGAGMLLLERLSDAVQNGHPVLAVLRGSAVNQDGRSQGLTAPNGPAQERVIRQALDSARLTPKDVDVVEAHGTGTTLGDPIEAQAVFATYGEAHSQDRPLWLGSLKSNLGHTQAAAGVGGIIKMVLALQHGLLPKTLHAQNPSPHIDWSPGIVKLLNEAVAWTTSGHPRRAGVSSFGVSGTNAHVILEEAPAATRAESGASQPASQPLPAAWPVVLSARSEAAVRAQAQRLREHLLAQGDLTLADVAYSLATTRAHFEHRAALVAHDRDELLSALDSLAQDKPAPSTVLGRSGSHGKVVFVFPGQGSQWEGMALSLLDSSPVFRTQLEACERALRPHVEWSLLAVLRRDEGAPSLDRVDVVQPALFAVMVSLAALWRSLGVEPAAVVGHSQGEIAAAFVAGALSLEDAARIAALRSKASPPSPATGMAAVELGASDLQTYLAPWGDRLSIAAVNSPRATLVSGEPAAVDALIDSLTAAQVFARRVRVDYASHSAQMDAVQDELAAGLANIAPRTCELPLYSTVTGTRLDGSELDGAYWYRNLRQTVLFSSATERLLDDGHRFFVEVSPHPVLTLALRETCERSPLDPVVVGSIRRDEGHLPRLLALLGRALWPGLTPEWKAFFAPFAPRKVSLPTYAFQRERFWLDAPNAHPEGVAPAAPIDGRFWQAIERGDLDALSGQLHADGDEQRAALALLLPTLSSFHHQRQEQSTVDTWRYRITWRPLTTAATPADLAGTWLLVVPSALGDDALPATLTDALTRRGARVLALRLSQVHIGRAALTEHLREAVAETAPIRGVLSLLALDERPLADHAALPAGLALSLALVQALGDLALEAPLWLFTRGAVSIGHSDPLAHPTQAMIWGLGRVVGLEHPERWGGLVDLGAALDASAAGRLLPALAQRHDEDQLALRPAGLYARRFVRAPLGDAPAARGFMPRGTILITGGTGAIGAHVARWLARKGAEHLVLISRRGAQAEGAVELHAELTALGARVTFAACDVADRSAVATLLEQLDAGGPQVSAVFHAGGIEPHAPLAATSMEDLAEVVSGKVQGARHLHDLLGSRPLDAFVLFSSGAVVWGGGQQGGYAAANAFLDALAEQRRSLGLTATSVAWGVWGGGGMATGLLAAQLEQRGLSPMAPSLAVATLALALEHDETTLTVADIDWARFAPSFSAARSRPLLRDLPEAQRALEASADASSEQDGATGLLDKLRNRSESEQIHLLSSLVRHEAALVLGHTDASQVDPHKGFMDLGLDSLMTVELRRRLQQATGIKLPATLAFDHPSPHRVALFLRDSLAHALGARLSVERDAAALPALRSASDEPIAIVGMALRLPGGIGDVDALWEFLAQGRDAVEPIPHARWDAGALYDPDPDAKAKSYVRHAAMLDQVDLFDPAFFGISPREAKYLDPQHRLLLESAWLALEDAGIVPSTLKDSPTGVFVGIGASEYALRNTSSEEVEAYALQGTAGSFAAGRLAYTLGLQGPALSVDTACSSSLVALHLACQALRQGECNLALAAGVSVMASPGLFVVLSRMRALAPDGRSKTFSTNADGYGRGEGVVVLALERLGDALARGHRVLALVRGTAMNHDGASSGITAPNGTSHQKVLRAALHDAHIGPADVDVVECHGTGTSLGDPIEVQALAAVYADGRPAEKPLLLGALKTNIGHLEAASGLAGVAKIVASLRHDALPPTLHTTPRNPLIEWDALAIDVVDATRAWARHEDGSPRRAGVSAFGLSGTNAHVILEEAPAIPQAEPTAAQLASQPLPAAWPVLLSARSEPAVRAQAQRLRDHLLAHDDLALADVAYSLATTRATFEHRAALVVHDREELLSALDSLAQGRPAPSTVVERSGSHGKVVFVFPGQGSQWEGMALSLLDTSPVFRAQLEACERALAPHVDWSLLAVLRGEEGAPPLDRVDVVQPALFSMMVSLAALWRSMGVEPDAVVGHSQGEIAAACVAGALSLEDAAKLVALRSRALVELAGQGAMAAVELPEAEVARRLQRYGDRLSIGAINSPRFTTISGEPPAVAALLRDLESEGVFALKLSYDFASHSAQVESIRDELLDLLSWLEPRSTAVPFYSTVSGAAIDGSELDAAYWYRNLRQPVRFADAVQGLLAGEHRFFVEVSPSPVLTLALHELLEASERSAAVVGSLWSDEGDLRRFLVSLSELYVNGFALDWTTILPPGKRVPLPTYPFQRERFWLDASTAPAAGVNHLAPLEGRFWQAIESGNIDALSGQLHVDGDEQRAALALLLPTLASFRHERQEQGTVDAWRYRITWKPLTTATTPADLAGTWLLVVPAALDDDALPSALTEALARRGARVLAVRLSQAHLDREALAEHLRQACAETAPPRGVLSLLALDESPLADHAAVPAGLAFSLTLVQALGDIALDAPLWLFTRGAVSVGHSDPIAHPTQAMTWGLGRVVGLEHPERWGGLVDVGAAIDASAVGRLLPVLALRNDEDQLALRPAGFYARRLVRAPLGDAPPARTFKPRGTLLITGGTGAAGAHVARWLAREGAEHLVLISRRGAQAEGASELHAELTALGARVTFAACDVADRSAVATLLEQLDAEGSQVRAVFHAGGIGRHAPLAATSLMELADVVSAKVLGAGNLHDLLGPRPLDAFVLFSSIAGVWGGGQQAGYAAGNAFLDALADQRRSLGQPDTSVVWGAWGGGGGIFTGPLAAQLEQRRLSPMAPSLAVAALAQALEHDETTVTVADIDWARFAPSISVARSRRSCATCPSSAPSKTEKARPPPSTARPPDLLDKLRSRSESEQLRLLAALVCDETALVLGHEGRFPARPRQGFFDLGLDSIMTVELRRRLQQATGIKLPATLAFDHPSPHRVALFMRDSLAHALGTRLSAEATPPRSGRASSDEPIAIVGMALRLPGGVGDVDALWEFLHQGRDAVEPIPQSRWDAGALYDPDPDADAKSYVRHAAMLDQIDLFDPAFFGISPREAKHLDPQHRLLLESAWLALEDAGIVPTSLKDSLTGVFVGICAGEYAMQEASSEGSEVYFIQGTSASFGAGGLAYTLGLQGPRSSVDTACSSSLVSLHLACQALRQGECNLALAAGVSLMVSPQTFVILSRLRALAPDGRSKTFSDNADGYGRGEGVVVLALERIGDALARRHRVLVLVRGTAINHDGASSGITAPNGTSQQKVLRAALHDARITPADVDVVECHGTGTSLGDPIEVQALAAVYADGRPAEKPLLLGALKTNIGHLEAASGLAGVAKMVASLRHDALPPTLHATPRNPLIEWEALAIDVVDTPRPWPRHEDGSPRRAGISAFGFSGTNAHVILEEAPAALPAEPATSQPASQAAPAAWPVLLSARSEAAVRAQAKRLRDHLVAHDDLTLADVAYSLATTRAHFEHRAALVAHNRDELLSALDSLAQDKPAPSTVLGRSGSHGKLVFVFPGQGSQWEGMALSLLDSSPVFRAQLEACERALAPHVEWSLLAVLRRDEGAPSLDRVDVVQPALFAVMVSLAALWRSLGVEPAAVVGHSQGEIAAAFVAGALSLEDAARIAALRSKALTTVAGNGAMAAVELGASDLQTYLAPWGDRLSIAAVNSPRATLVSGEPAAIDALIDSLTAAQVFARKVRVDYASHSAQMDAVQDELAAGLANIAPRTCELPLYSTVTGTRLDGSELDGAYWYRNLRQTVLFSSATERLLDDGHRFFVEVSPHPVLTLALRETCERSPLDPVVVGSIRRDEGHLARLLLSWAELSTRGLALDWNAFFAPFAPRKVSLPTYPFQRERFWLDASTAHAADVASAGLTSADHPLLGAAVALADRDGFVFTGRLSLAEHPWLEDHVVFGIPCPARRRLLELALHVAHLVGLDTVEDVTLDPPLALPSQGAVLLQISVGPADGAGRRALSVHSRRHDALQDGPWTRHASGSLAQASPSHCLRCSANGPPSGATQVDTQGFYAALESAGLAYGPEFQGLRRRLQARRRALRRSQAPGRRRRGRRSFCPPPRPARQRLAGARLCRRPGKGLQDALLVERSIAALRSEPPPCACVSTVLRANPRARSSSPTPEANPSPRCKRSPCAPRPPSSSADPGASHLDALFRIDWSELQSPTSPPIAPSGALLGTEGLDLGTRVPLDRYTDLAALRSALDQGASPPSLVIAPFIALPEGDLIASARETTAHALALLQAWLADERLASSRLALVTRRAVATHAEEDVKGLAHAPLWGLARSAQSEHPERPLVLVDLDDSEASQHALLGALDAREPEIALRNGKPLVPRLSRLPQAPTDTASPAGLGGTVLITGGTGTLGALVARRLVVNHDAKHLLLTSRQGASAPGADVLRSELEALGASVTLAACDVADPRALKDLLDNIPSAHPVAAVVHAASVLDGDLLGAMSLERIDRVFAPKIDAAWHLHQLTQDKPLAAFILFSSVAGVLGSSGHSNYAAASAFLDALAHHRRAQGLPASSLAWSHWAERSAMTEHVSAAGAPRMERAGLPSTSEERLALFDAALFRTETALVPARFDLSALRANAGSVPPLFQRLVRARTVRKAASNTAQASSLTERLSALPPAERERALLDLIRTEAAAVLGLASFESLDPDRLLQELGLDSIIALDLRNRLAAATGVRLPATLLFEHPTPAALAALLLARLEPGMRRGPAKDGASPTDTESDGALLGMVQPANEIGAIEEARNLIAAALKVRLAVEDASKRSAVAIAEEPPTRLARGQATPQLICFPAFVVPSAPIQYARFASHLRDRRDIWFIPHPGYRHKTPLTRSLDELVSSHARTTLACARNSPFVLFGHSSGGNIAHMVAEHLESIGHGPAGVVLLDSYDYASPAVEAGLKIFHVEQLQTWGASDAGLTAEAWYYEHIGLETWKPRQLAAPTLHVRATEPMKQFVGSEGAPAEWRASWKLPHVAIDAPGDHATVVDHPFLAQAVDDWLSSLSNEPSNQ

SEQ ID NO: 36095 - protein, 762 aa, Vitis vinifera
MHMDAMDPTRAFVKDVKRLVIKFGTAVVTRSDGRLALGRLGALCEQIKELNSQGYQVIVVTSGAVGLGRQRLRYRSLLNSSFADLQKPQAELDGKACAAVGQNNLMALYDTLFSQLDVTSAQLLVTDNDFRDEAFRNQLTQTVDSLLALRVIPIFNENDAEVTRKAPYEDSSGIFWDNDSLAGLLALQLKADLLVLLSDVDGLYSGPPSDPRSLLIHTYLEKGHQGQITFGDKSRVGRGGMTAKVKSAVYSSQAGIPVVITSGYATGSILKVLNGERIGTLFHRDAYKWVQVKEVGAREMAVAARESSRRLQAMSSQDRKKILLDIANALETNEELIKIENDADVEAAQLAGYEKSLVSRLVLKPGKISSLANSIRVLANMERPIGHVLKKTEVADGLILEKMSCPLGVLLIVFESRPNALVQIASLAIRSGNGLLLKGGKEAKRSNAILAKVITEAIPDSVGKKLIGLVTSREEIPNLLKLDDVIDLVIPRGSNKLVSQIKDSTKIPVLGHADGICHVYVDKSANMDTAKHIVLDAKVDYPAACNAMETLLVHKDLVQTGGLNQLIVELRNEGVTLYGGPKASALLNLPEAHSFHHEYNSMACTVEIVDDVHSAIDHIHRHGSAHDCIIAEDLEVAEVFLRQVDSAAVFHNASTRFCDGARFGLGAGGWISTSRIHARGPVGVEGLLTTRWILRGNGQVVNGDKGVTYLHPQGAYFAALSLSHSLLGGDLLNNVGLGTFDFSFCNGRRVNWTLDLKEVIYQ

SEQ ID NO: 36096 - protein, 6315 aa, Polyangium cellulosum
MTKEYTRPQSAPLTEGDLLTLIVAHLAERLRMDARFIDVHEPFSRHGLDSRGAVDLVVDLRTALGRPLSPVVVWQHPTPDALARHLAGGADAREGQARADSAYERPGAPNEPIAIVGMACRFPGAPDVDSYWRLLSGGVDAVTEVPAGRWDMDAFYDRDPRSLGDVSTLRGGFIDDVDRFDAMFFGISPREAVSMDPQQRLMLELAWEALEDAGIVAERLKESLTGVFFGCIWDDYVTLIHQRGRGAIAQHTVTGNHRSIIANRVSYTLDLRGPSMTVDSACSSALVTIHMACESLRSGESTLALAGGVNLNIAPESTIGVHKFGGLSPDGRCFTFDARANGYVRGEGGGVVVLKRLSSAIADGDPIICVIRGSAVNNDGASNGLTGPNPLAQEAVLRTAYERAGVNPADVQYVELHGTGTQLGDPVEASALGAVLGKRRPAERPLLVGSAKTNVGHLEGAAGIVGLLKAALCLKHKQLAPNLNFETPNPHIPFAELNLKVQGALGPWPDMDRPLVCGVSSFGLGGTNAHVVLSEWASLEAELHPLAAESPEALREEVQRRLLTMTSLVGRAPLSFLCGRSAAQRSAKEHRLAVTARSFEELKQRLLGFLEHEKHVSVSAGRVDLGAAPKVVFVFAGQGAQWFGMGRALLQREPVFRTTIEQCSSFIQQNLGWSLLDELMTDRESSRLDEIDVSLPAIISIEIALAAQWRAWGVEPAFVVGHSTGEIAAAHVAGVLSIEDAMRTICAYGRIIRKLRGKGGMGLVALSWEDAGKELTGYEGRLFRAIEHSADSTVLAGEPDALDALLQALERKNVFCRRVAMDVAPHCPQVDCLRDELFDALREVRPNKAQIPIVSEVTGTALDGERFDASHWVRNFGDPALFSTAIDHLLQEGFDIFLELTPHPLALPAIESNLRRSGRRGVVLPSLRRNEDERGVMLDTLGVLYVRGAPVRWDNVYPAAFESMPLPSTAGGGKPLPPMPLLISARTDAALAAQAARLRAHLDSHLDLELVDVAYSLAATRTHFERRAVVVARDRAGILDGLDALAHGGSAALLGRSAAHGKLAILFTGQGSQRPTMGRALYDAFPVFRGALDAAAAHLDRDLDRPLRDVLFAPDGSEQAARLDQTAFTQPALFALEVALFELLQSFGLKPALLLGHSIGELVAAHVAGVLSLQDACTLVAARAKLMQALPQGGAMVTLQASEQEARDLLQAAEGRVSLAAVNGHLSTVVAGDEDAVLKIARQVEALGRKATRLRVSHAFHSPHMDGMLDDFRRVAQGLTFHPARIPIISNVTGARATDQELASPETWVRHVRDTVRFLDGVRTLHAEGARAFLELGPHPVLSALAQDALGHDEGPSPCAFLPTLRKGRDDAEAFTAALGALHAAGLTPDWNAFFAPFAPCKVPLPTYTFQRERFWLDASTAHAASATPAAALEGRFWQAVESGDIDTLSSELHVDGDEQRAALALVLPTLSSFRHKRQEQSTVDAWRYRVTWKPLTTAATPADLAGTWLLVVPSALGDDALLATLTEALTRRGARVLALRVSDIHIGRSALVEHLREALAETAPLRGVLSLLALDEHRLADRSALPAGLALSLALVQGLDDLAIEAPLWLFTRGAVSIGHSDPITHPTQAMIWGLGRVVGLEHPERWGGLVDVSAGVDESAVGRLLPALAQRHDEDQLALRPAGLYARRIVRAPLGDAPPAREFRPRGTILITGGTGALGAHVARWLARQGAEHLILISRRGAEAPGASELHAELNALGVRTTLAACDVADRSALQALLDSIPSDCPLTAVFHTAGARDDGLIGDMTPERIERVLAPKLDSALHLHELTKNSALDAFVLYASLSGVLGNPGQANYAAANAFLDALAEHRRSLGLTATSVAWGGWGGGGMATERVAAQLQQRGLLQMAPSLALAALAQALQQDETTITVADIDWSRFAPAFSVARQRPLLRDLPEAQRALQASEGASSEHGPATGLLDELRSRSESEQLDLLATLVRGETATVLGHAEASHVDPDKGFMDLGLDSLMTVELRRRLQKATGVKLPPTLAFDHPSPHRVAFFLRDSLARAFGTRLSAERDGAALPAPGATSDSDEPIAIVGMALRLPGGIGDVDALWDFLHQGRDAVEPIPPTRWDAGALYDPDPDAKAKSYVRHAAMLDQVDLFDPGFFGISPREAKHIDPQHRLLLEAAWQALEEAGIVPSTLKDSPTGVFVGIGASEYAPREPGAEDSEAYIVQGTYASFAAGRLAFTLGLQGPALSVDTACSSSLVALHLACQALRRDECNLALAAGASVMVSPETFVLLSRLRALAPDGRSKTFSASADGYGRGEGVIVLALERLRDALAQGRRVLAVVRGTAVNHDGASSGITAPNGTSQKKVLRAALHDARIAPADVDVVECHGTGTSLGDPIEVQALAAVYGEGRSAEKPLFLGAVKTNVGHLEAAAGLAGVAKIVASLLHNALPPTLHTTPRNPLIAWDALAVAVVDATRPWVRHADGRPRRAGVSAFGLSGTNAHVILEEAPAIARVEPAASQPASEPLPAAWPVLLSAKSEAAVRAQAKRLRDHLLAKSELALADVAYSLATTRAHFEQRAALLVKGRDELLSALDSLAQGHSAAVLGRSGAPGKLAVLFTGQGSQRPTMGRALYDAFPVFRDALDTVAAHLDRDLDRPLRDVLFAPDGSEQAARLDQTAFTQPALFALEVALFQLLQSFGLKPALLLGHSIGELVAAHVAGVLSLQDACTLVAARAKLMQALPQGGAMVTLRASEEEVRDLLQPYDGRASLAALNGPLSTVVAGDEDAVVEIARQAEALGRKTTRLRVSHAFHSPHMDGMLDDFRRVAQSLTYHPARIPIISNVTGARATDHELASPDYWVRHVRHTVRFLDGVRALHAEGARVFLELGPHAVLSALAQDALGQDEGTSPCAFLPTLRKGRDDAEAFTAALGALHAAGLTPDWSAFFAPFAPRKVSLPTYAFQRERFWLDASKAHAADVASAGLTSTDHPLLGAGVPLADRDGFLFTGRLSLSEHPWLADHVVFGTPILPGTAFLELALFVAGRVGLDTVEELTLETPLALPSEGALLVQVSVGPLDDAGRRPLSLHSRPQGAPQDAPWTRHASGSLAPATPSPSFDLHDWPPSGATQVDTQGLYATLESAGLAYGPQFQGLRSVWRRGDELFAEAQLPDAAKKDAARFALHPALLDSALHALALDDERAPGVALPFSWGGVSLRAVGATTLRVRFHRPKGETAGSLVLADAAGGPIASVQALATRITSAEQLRTPGASHHDALFRVDWSELPSPTSPSGAPSAVLLGIGGLDLAPEVPLARVADLAALQSALDQGASPPGLVVVPFMARTADDLIQSAHSITARALALLQAWLADERLASSRLVLLTRRAIAARADEDVKDLAHAPLWGLARSAQSEHPELPLFLVDLDLSEASQHTLLAALETGERHSRLRNGKPFIPRLANARSKDELIAPDASNWRLHIPTKGNFDALTLVDAPLARAPLAHGQVRVAVHAAAFNFRDVLDTLGLYPGDAGPLGGEGAGIVTEVGPGVSRYTVGDRVMGIFGAACGPTAIADARMICPIPHAWSFAQAASVPIIYLTAYYGLVDLGHLKPNQRVLIHAAAGGVGTAAVQLARHLGAEVFATASAGKWSALRALGFDDAHLASSRDLDFEQHFLRSTHGRGVDVVLDCLAREFVDASLRLMPSGGRFVEMGKTDIREPDAVGVAYPGVVYRAFDLIEAGPDRIEQMLAELLSLFERGALRPPPITSWDIRHAPQAFRALAQARHVGKFVLTIPRPIDPEGTVLITGGTGTLGALVARHLVARHGAKHLLLTSRQGAHAPGAEASRTELEALGASVTLRACDAADPRALQALLDSIPSAHPLTAVVHAAGALDDGLLGAMSPERIDRVFAPKLDAAWHLHELTQDKPLAAFVLFSSAAGVLGSPGQSNYAAANAFLDALAHHRRAHGLPASSLAWGYWAERSRMTEHLSAADVSRMRRAGVRPLATDEALSLFDAALLRPEPALVPARFDVNALGANADEVPPLFQRLVRARVARKAASNTALASSLSQRLSSLPPAESERFLLDLVRTEAATVLGLASFESLDPHRPLQELGLDSLIALELRGRLAAATGLRLQPTLLFDYPTPAALSRFFTTQFFGETTDRPAAPLTPAGSEDPIAIVSMSCRFPGDVRTPEDLWKLLLDGKDAISSFPQNRGWSLDALDAPGRFPVREGGFVYDADAFDPAFFGISPREALAIDPQQRLLLEISWEALERAGIDPASLQGSQSGVFVGIIHNDYGAWLMNGTDEHKGFAATGSTASVASGRIAYTFGFQGPAISVDTACSSSLVAVHLACQALRHGECSLALAGGVTVLATPAVFVAFDSESAGAPDGRCKAFSAEANGAGWAEGAGMLLLERLSDAVRNGHPVLAVLRGSAVNQDGRSQGLTAPNGPAQERVIRQALDSARLTPKDIDAVEAHGTGTTLGDPIEAQAILATYGESHSQDSPLWLGSLKSNMGHTQAAAGVGSVIKMVLALQHGLLPKTLHAKNPSPHIDWSPGTVKLLDEPVVWKTNGHPRRAGVSSFGFSGTNAHVILEEAPAIARAESAAAQPASEPLPAAWPVLLSAKSEAALRAQAARLRDHLQAHPDLELADVAYSLATTRAHFERRAVVVAKDRDEATFALDAFEQGSPAHHVAHGEARVAGKLVFVFPGQGSQWPGMAQQLLTTSDAFRAQVEACARAFAPHLGWSLLAVLRGDEGAPSLERIEVVQPALFTVMVSLAALWRSRGIEPDAVVGHSQGELAAAYVAGALSLDDAAKVVARRSRLLSTLSGQGAMAAVERPPAALEPYLARFGRRLSIAAINSPSATTVSGEPDAIDHLLRLLKAEQIFALKLRVDVASHGAQIEGMREQLLEELREIEPRESRIPFYSTVRGEKLAGTELGAAYWYDNLLRPVRFADATQLLLDDAHRFFVEVSPHPVLMLPLEETLEASGLPTAVLGSLWQDEGDLSRFLASLGELYARGYAVDWRAFFEPLRPRRVALPTYAFQRERFWLDAPTAHADVASAGLTSADHPLLGAAVRLADTDAFLFTGRLSLQSHPWLAEHAAFGIPILPGTAFLELALLAADRVGLDTVEEVTLEAPLALPSQGTILIQISVGPMDEAGRRSLSLHGRTEDAPQDAPWTRHASGSLAKAAPSLSFDLHEWAPPGGTPVDTQGSYAGLESGGLAYGPQFQGLRSVWKRGDELFAEAKLPDAGAKDAARFALHPALFDSALHALVLEDERTPGVALPFSWRGVSLRSVGATTLRVRFHRPNGKSSVSLLLGDAAGEPLASVQALATRITSQEQLRTQGASLHDALFRVVWRDLPSPTSLSEAPKGVLLETGGLDLALQASLARYDGLAALRSALDQGASPPGLVVVPFIDSPSGDLIESAHNSTARALALLQAWLDDERLASSRLVLLTRQAIATHPDEDVLDLPHAPLWGLVRTAQSEHPELPLFLVDLDLGQASERALLGALDTGERQLALRHGKCLVPRLVNARSTEALIAPNVSTWSLHIPTKGTFDSLALVDAPLARAPLAQGQVRVAVHAAGLNFRDVLNTLGMLPDNAGPLGGEGAGIVTEVGPGVSRYTVGDRVMGIFRGGFGPTVVADARMICPIPDAWSFVQAASVPVVFLTAYYGLVDVGHLKPNQRVLIHAAAGGVGTAAVQLARHLGAEVFATASPGKWDALRALGFDDAHLASSRDLEFEQHFLRSTRGRGMDVVLNALAREFVDASLRLLPSGGSFVEMGKTDIREPDAVGLAYPGVVYRAFDLLEAGPDRIQEMLAELLDLFERGVLRPPPITSWDIRHAPQAFRALAQARHIGKFVLTVPRPIDPEGTILVTGGTGTLGALIARHLVANRGAKHLLLTSRKGASAPGAEALRSELEALGAAVTLARCDAADPRALQALLDSIPSAHPLTAVVHAAGALDDGLISAMSPERIDRVFAPKLDAAWHLHQLTQDKPLAAFVLFSSASGVLGGMGQSNYAAANAFLDALAHHRRVHGLPASSLAWGHWAERSGMTRHLSGVDTARMRRAGLRSIASDEGLALFDMALGRPEPALVPARFDMNALGAKADGLPSMFQGLVRARVARKVASNNALAASLTQRLASLPPTDRERMLLDLVRAEAAIVLGLASFESLDPRRPLQELGLDSLMAIELRNRLAAATGLRLQATLLFDHPTPAALATLLLGKLLQHEAADPRPLAAELDRLEATLSAIAVDAQARPKIILRLQSWLSKWSDAQAADAGPILGKDFKSATKEELFAAFDEAFGGLGK

SEQ ID NO: 36097 - protein, 446 aa, Acinetobacter sp. ADP1
MNILKDILFPILKLALPLILIQICQASLGVINTMVAGRYYYIDLAGIGLGSNMWTPVFILFTGILYVLVPKISAMQQHSSQEIGVLIQQGKRVAFLLSIFGFILIQLLAFLCPWLIGDQQVAQIAKQYLHFVAFGVPGLVYMTLFRFVSEGHSLLKPIILTYAILLVCDASLCLVLVNGIGFIPEMGGAGTGLATAMSAYIACFCMYQFVSKAIPELKIKRIQVGFKESLGLLKQGLPIGITLILQILALATLAFFASQLGAKAIAAHQIVINIAMLIIMIPIAISSATTIRIAYFSATNHHQGKISTSLCVVVLTLIYSFLMAGILIGFAQHIVSLFTQDAEVLNVAVGLMSYVAIFLIFDAIQTVASGVLRGLHQFMQPLFIILFCYWFVIIPLSYLMGVQGWLQVRANVDVIWIVLTCGISLAAVLLTIQSYCHVTGIMNKRS

SEQ ID NO: 36098 - protein, 199 aa, Brassica oleracea
MAEETKNVHEHEAPKVATEESSTATGEVTDRGLFDFLGKKKDETKPEETIDSEFEQKVHISEPVPEVKHEEEKEEKKHSLLEKLHRSDSSSSSSSEEEGEDGVKRKKKKDKKKVTATEGEVKTEEEKKGFMDKLKEKLPGHGKKPEEKPEDASPAPVVAPPVEEAHPAEKKGILEKIKEKLPGYHSKTVEEEKKDKDDH

SEQ ID NO: 36099 - protein, 488 aa, Streptococcus pneumoniae
RGVDILADTVKVTLGPKGRNVVLEKSFGSPLITNDGVTIAKEIELEDHFENMGAKLVSEVASKTNDIAGDGTTTATVLTQAIVREGIKNVTAGANPIGIRRGIETAVAAAVEALKNNAIPVANKEAIAQVAAVSSRSEKVGEYISEAMEKVGKDGVITIEESRGMETELEVVEGMQFDRGYLSQYMVTDSEKMVADLENPYILITDKKISNIQEILPLLESILQSNRPLLIIADDVDGEALPTLVLNKIRGTFNVVAVKAPGFGDRRKAMLEDIAILTGGTVITEDLGLELKDATIEALGQAARVTVDKDSTVIVEGAGNPEAISHRVAVIKSQIETTTSEFDREKLQERLAKLSGGVAVIKVGAATETELKEMKLRIEDALNATRAAVEEGIVAGGGTALANVIPAVATLELTGDEATGRNIVLRALEEPVRQIAHNAGFEGSIVIDRLKNAELGIGFNAATGEWVNMIDQGIIDPVKVSRSALQDA

SEQ ID NO: 36100 - protein, 273 aa, Zea mays
MGRSPCCEKAHTNKGAWTKEEDERLVAHIRAHGEGCWRSLPKAAGLLRCGKSCRLRWINYLRPDLKRGNFTEEEDELIVKLHSVLGNKWSLIAGRLPGRTDNEIKNYWNTHIRRKLLSRGIDPVTHRPVTEHHASNITISFETEVAAAARDDKKGAVFRLEEEEERNKATMVVGRDRQSQSQSHSHPAGEWGQGKRPLKCPDLNLDLCISPPCQEEEEMEEAAMRVRPAVKREAGLCFGCSLGLPRTADCKCSSSSFLGLRTAMLDFRSLEMK

SEQ ID NO: 36101 - protein, 167 aa, Zea mays
MASAEGERGVELATDFSQGSRAALQGAPPNLLRAGDHLLLLHVIKEPDYEQSEAILWESTGSPLIPLSEFSDPIIAKKYGAKPDIETLDILNTTATQKEIVGVVKVLGGDPREKLCQVIHDTPLSCLVIGSRGLGKLKRVLLGSVSDYVVNNATCPVTVVKSTSTEG

SEQ ID NO: 36102 - protein, 456 aa, Bilophila wadsworthia
MTYDKAELVALDKKYVWHHLTQHKNFEPAIYVKGEGMRITDIDGKTYLDAVSGGVWTVNVGYGRKEIVDAVAKQMMEMCYFANGIGNVPTIKFSEKLISKMPGMSRVYLSNSGSEANEKAFKIVRQIGQLKHGGKKTGILYRARDYHGTTIGTLSACGQFERKVQYGPFAPGFYEFPDCDVYRSKFGDCADLGVKMAKQLEEVILTVGPDELGAVIVEPMTAGGGILVPPAGYYETIREICDKYELLLIIDEVVCGLGRTGKWFGYQHFNVQPDIVTMAKGVASGYAPISCTVTTEKVFQDFVNDPADTDAYFRDISTFGGCTSGPAAALANIEIIERENLLENCTKMGDRLLEGLKGLMAKHPIIGDVRGKGLFAGIEIVKDRATKEPIAEAVANAMVGAAKQAGVLIGKTSRSFREFNNTLTLCPALIATEADIDEIVAGIDKAFTTVEQKFGL

SEQ ID NO: 36103 - protein, 216 aa, Porphyridium purpureum
AGGIAEMTELPNFVDGRITKRKSDRLHTDAFGNTTSAVGKGFAIASAALTALAFYAAFQKHAGVDAMDVYQPKILAGLLVGGMLPFVFSALSMHSVGRAAMAMMKEVRRQFRDIPKIKPALEVMRAVDFEMTKAFQEQRPILDQPEGIRDYGKCIEFSTKAFLFKEMVLPGLLAILFPVAVGFLFGAEMIGGLLAGVTVSWGLNAISNTGGAWDNA

SEQ ID NO: 36104 - protein, 212 aa, Navicula pelliculosa
AGGIAEMMAEIPEEDGSREITDKLDAAGNTTAAIGKGFAIISAALTAAAVFTASTKAANESFIDMAPHGIIMGRIVAVMFPAVFTAFVINTVVRDPMPIIVEVRRQFTDIPQVQAVVEEIRGEVSNKAKGTPAEKRHILNAACGKPEYDKCVDISTEASIREMVSPGILAIVVPVAVGLISGAESVGGILVGAISGVLMALTSQSGGAWDNA

SEQ ID NO: 36105 - protein, 792 aa, Nocardioides sp. JS614
MTGIVPAVVEVSGGNLVLVIVVALIALGALAMAAMFRQEVLAAGEGTDNMKNIAQAVQEGANAYLQRQFRTLAIFAVVAFFLLLALPADDAMVRIFRSVFFLVGAGFSATVGYLGMSLAVKANLRVAAAAQTQGRDPAMNIGFRTGATVGMLTVGLGLLGASVVVILFQEDAPHVLEGFGFGAALLAMFMRVGGGIFTKAADVGADLVGKVENNIPEDDPRNAATIADNVGDNVGDCAGMAADLFESYAVTLVAALILGSQAFGDKGLVFPLLIPAIGALTAVVGVYLCKPRAGENGLTTINRAFYISAAIGAVASIILALVYLPGDFADLTNSTVDADASPRVVAALAVLIGIVLAAAILGLTGYFTGTDHRPVKDVGKTSLTGAATVILSGLSVGFESAVYTTLVIGAAVFGAFLVGAGSIPVALFAVALAGCGLLTTVGVIVAMDTFGPVSDNAQGIAEMSGDVDEHGAQILTELDAVGNTTKAITKGIAIATAVLAASALFGSYTNALQDAIDEVTLTEEPGALTSLAFSFNASYPNILVGMLLGAAVVFLFSGLAINAVGRAAGAVVYEVRRQFREIPGIMEGTGRPEYGRVVDIVTRDSLRELATPGLLAILAPIAVGFGLGVGPLAGFLAGAIATGTLMAVFLANSGGAWDNAKKLVEDGNHGGKGSDAHAATVIGDTVGDPFKDTAGPAINPLLKVMNLVSLLIVAAIVKLSIGEDANTPLRIVIALAAFAGIVAAVYVSKRRPVHIEGDDDGTTAPPPPPPPVEAVPPTEPAPTQQFEAPQQH

SEQ ID NO: 36106 - protein, 134 aa, Carboxydothermus hydrogenoformans
ITPGKARNIENFRQNIKYKKLIIPEVFWNFTNENILVLEAVYGIKVSERFQLIEMGIDLDQLARDLVEIFILQILEDGYFHADPHPGNIAITPLGDIILYDFGMVGFLNPWLREILITLLISVVRKDFARISEL

SEQ ID NO: 36107 - protein, 184 aa, Navicula pelliculosa
AGGIAEMSELPEEVRERTDILDSVGNTTAAIGKGFAIASAALTALALFAAYVEFTGIDGINIYKADVLAALFIGGMVPVVFSALAMNSVGKAAMEMVKEVRRQFKEIPGIMEGTGTPEYGKCVDISTKAALREMMLPGAITIVAPILIGFLMGPEALGSYMAGVAVSGVLLAIFQNSGGAWDNA

SEQ ID NO: 36108 - protein, 368 aa, Oryza sativa (japonica cultivar-group)
LLQRECHVKKPLRVVPLFEKLADLEAAPAALARLFSVDWYRNRIDGKQEVMIGYSDSGKDAGRFSAAWELYKAQEELIKVAKQFGVKLTMFHGRGGTVGRGGGPTHLAILSQPPDTIHGSLRVTVQGEVIEQSFGEEHLCFRTLQRFTCATLEHGMHPPISPKPEWRALMDEMAAVATKEYRSIVFQEARFVEYFRLATPELEYGRMNIGSRPSKRKPSGGIESLRAIPWIFAWTQTRFHLPVWLGFGAAFKHVLQKDIRNLQILQEMYNEWPFFRVTIDLVEMVFAKGDPGIAALYDKLLVSEDLWPFGARLRANYEETKQLLLQVAGHKDLLEGDPYLRQRLRIRDSYITALNVCQACTAKAYQGP

SEQ ID NO: 36109 - protein, 548 aa, Buchnera aphidicola (Myzus persicae)
MAAKDVKFGNEARIKMLRGVNVLADAVKVTLGPKGRNVVLDKSFGAPSITKDGVSVAREIELEDKFENMGAQMVKEVASKANDAAGDGTTTATLLAQSIVNEGLKAVAAGMNPMDLKRGIDKAVISAVEELKNLSVPCSDSKAITQVGTISANADEKVGALIAEAMEKVGNDGVITVEEGTGLQNELEVVKGMQFDRGYLSPYFINKPETGIVELENPYILVADKKISNVREMLPILESVAKSGKPLLIISEDLEGEALATLVVNSMRGIVKVAAVKAPGFGDRRKAMLQDISILTGGSVISEELAMELEKSTLEDLGQAKRVVISKDTTTIIGGVGEKHTIQSRISQIRQEIQEATSDYDKEKLNERLAKLSGGVAVLKVGAATEVEMKEKKARVEDALHATRAAVEEGVVAGGGVALVRVAGKTSNLRGQNEDQNVGIRVALRAMEAPLRQIVSNSGEEPSVVTNNVKDGKGNYGYNAATDEYGDMIDFGILDPTKVTRSALQYAASVAGLMITTECMVTDLPKEDKSSDSNSSPAGGMGGMGGMM

SEQ ID NO: 36110 - protein, 208 aa, Rhodomonas salina
AGGIAEMAELEGSVRETTDTLDAVGNTTKAVTKGYAIGSAGLGALVLFAAYTEDLAYFASKPDVYPFFAGIEVDFALSNPYVVVGLLFGGLLPFLFAGMSMTAVGRAAQAVVEEVRRQFKEKPGIMTYEEKPDYGRAVDILTTAAIREMIIPSLLPVLAPIVLFTVLYFIADLNQALAAVGAMLLGVIVTGLFVAISNSSGGGAWDNA

SEQ ID NO: 36111 - protein, 265 aa, Oryza sativa (japonica cultivar-group)
ISPKPEWRALMDEMAAVATKEYRSIVFQEARFVEYFRLATPELEYGRMNIGSRPSKRKPSGGIESLRAIPWIFAWTQTRFHLPVWLGFGAAFKHVLQKDIRNLQILQEMYNEWPFFRVTIDLVEMVFAKGDPGIAALYDKLLVSEDLWPFGARLRANYEETKQLLLQVAGHKDLLEGDPYLRQRLRIRDSYITALNVCQACTAKAYQGPGFHVSPRAHLSKDIMDSGKPAAELVKLNTTSEYGPGLEDTLILTMKGIAAGMQNTG

SEQ ID NO: 36112 - protein, 44 aa, Paeonia szechuanica
GHNIVLISNHQTGADPAIIALLLEKTNPRISEDLTYVAGDRVIT

SEQ ID NO: 36113 - protein, 746 aa, Ustilago maydis 521
MASSSPKRDVHNPLLFEAAWEVANKVGGIYTVIKTKAPVTHQEYGERYTLIGPLSYKTAPMEVEALEPEDPILKETLDSMRDAGVKFLYGRWLIERAPRVLLFDTSSMYHRMDEWKGDLWNLAGIPTPPNDHETNETLVFGYLVAWFLGEFSSRDRKRAIIAHFHEWQAGLAIPLCRKRHIDVTTIFTTHATLLGRYLCAGSVDFYNNLQYFDVDHEAGKRGIYHRYCVERAAAHCADVFTTVSHITAYESEHLLKRKPDGVLPNGLNVVKFSAMHEFQNLHAVSKAKINEFVKGHFYGHYDFDLDNTLYFFTAGRYEYRNKGVDMFIESLARLNYKLQKSGSKTTVVAFIIMPAATNSYTIEALKGQAVTKQLRDTVEQIQARVGERLFEKMARYQGETGSDVIDPATLLSDADKIALKKRIFALKRNSLPPVVTHNMQDDDNDPILNQIRRVQLFNRTSDRVKVIFHPEFLNANNPILGLDYEEFVRGCHLGVFPSYYEPWGYTPAECTVMGVPSITTNLSGFGCFMEDTIERGEDYGIYIVDRRMKSVEDSVNQLTDQMFSFSQKTRRQRINQRNRTERLSELLDWKRLGLEYAKARQLALRRAYPDSFDEDDTIESYFDDIHHDGKMPPPLSMPGSPRFGSGARTPGEFGTLTEELQSLSTSDYRGHQQFWKTMSQHGSDDEEENYRYPLVIKSRARGTSVGSMSGASTPGLGGGKFLSSADLDRADAALSNHSGAPNGHGY

SEQ ID NO: 36114 - protein, 287 aa, Brassica napus
MAKDVEAVSGEGFQTRDYQDPPPAPLFDPAELTKWSFYRAVIAEFVATLLFLYITVLTVIGYKIQTDSTAGGVDCGGVGILGIAWAFGGMIFILVYCTAGISGGHINPAVTFGLLLARKVSLVRAILYMVAQCLGAICGVGFVKAFQSSYYVRYGGGANSLADGYSTGTGLAAEIIGTFVLVYTVFSATDPKRSARDSHVPVLAPLPIGFAVFMVHLATIPITGTGINPARSFGAAVIFNESKPWDDHWIFWVGPFVGAAIAAFYHQFVLRASGSKSLGSFRSAANV

SEQ ID NO: 36115 - protein, 42 aa, Paeonia szechuanica
GHNIVLISNHQTEADPAIIALLLEKTNPRISEDLTYVAGDRV

SEQ ID NO: 36116 - protein, 900 aa, Pirellula sp. 1
MDTVRRATNMVLNVDSEASLSLSQISGVEGGSFQDDWLILCAVIVLLMQAGFMCLESGLVREKNSINVAVKNLADLMISVASFWTIGFSVMFGATIFGLFGVGQLMPDFGVSDSLAAFFVFQAVFCGTATTIVSGAVAERMRFHGYLVSCVCVSALIYPVVGHWVWASGANGMSIGWLEGLGFRDFAGSTVVHSVGGWAALAGCIVLGPRLGRFRKDGRVRDIQPSNLTLAYLGAFILFFGWFGFNCGSTFKATGEIALIAINTLLGGCFGGLSSILVSSLRTGIPDPRSIANGLLGGLVGITASGSMIDPRAAALVGAIAGVVAVYSDEWLVRLRIDDAVGAISVHGFCGAWGTIAFALFIRTDELAPGMSRWEFLAVQVFGVVVTFGFVFGGVFVLLRGLGRFIQLRVDPETERLGLNVAEHNASSRLLDLAVSMDAAARMRKLEPSCKVRSEYGTAIGDLIDSYNQMIDHICEDQTALAEATKRAEALTAILDDSPNEIAIVHADTGQVLSLNRGARVNLQRDEDEFSELTFDCLFNTEFGELQKFRLSAFDDEAGFTQQLATAVRKDGTTYPASISVQHAEFLGYQVLVVLTVDMTSQVELKERLHAAEKMEAVGQLAAGIAHEINTPLQCMSGNVEFLQSVQQNLQDTLRLVAEGVSDEQALHEITEKLSSDRWSRLLGESDAAIEDTQKSIGRVVQIIGAMRVLSHPGPAGKTNTSINGILRDSAAISRGRWKYAAQMDFDLCDSEPTVACRANELSQVFCNLFVNAADSIEEKNEKVPEAGLGNIFVSSSIEQDGVLIKVRDSGVGMSESVRRRCFEQFYTTKPVGKGTGQGLSIAYQIIVGRHGGNIEITSEEGVGTEFQIWIPMHASDDACDGATKTNAGQTNDATSLAAV

SEQ ID NO: 36117 - protein, 350 aa, Candida albicans SC5314
MRPIKLMGHERSLTQVKYNREGDLLFSVAKDNAASIWYSSNGERLGTLEGHQGVIWSIDVDPETHLCATGGGDLAIKLWKVENGQCVYTWDSPSPVRRVAFSPDGKKLLAIADQVMGHIGTVSVFDINDDDATLSQQKAEPSLVIETKSEGSKATVAGWSGDGDYIIVGHDNGYVSKYDSKTGKLVTSLQAHGIHNEEKNVSITDIQFAPEDRSYFITSSKDKTATLIDVDTFEILKVYKADAPMNTAAITPVKDFVILGGGQEARNVTTTAESQGKFEARFYHKIFEEEIGRVKGHFGPLNTVAVHPDGTGYSSGGEDGFIRVHTFDKSYQDFLFDAERTERAAAAGTI

SEQ ID NO: 36118 - protein, 252 aa, Rhodobacter sphaeroides 2.4.1
MDLKDRTAFVTAGGAGIGRAGALAMARAGATVVVTDLDASRAEAVAAEIAAAGGRAEGLGLDVGDDAALEAAILSAAARHGRLDVLHSHAGAQVPGRLDQVSVADMDLSWRLNVRAHFVAAKAAMSIMAPRRQGSIIVTSSNSGVQYDREMIAYCTTKHAVIAMVRQIAVDYARHNIRCNALCPGFVDTVFNAGFEAQMGGRAALESYVAETIPMGRFGTPEEIGEAVLYLASDRSAFMTGHALVIDGAESL

SEQ ID NO: 36119 - protein, 622 aa, Debaryomyces hansenii CBS767
MSKKGSIESSNTQTMDATEPGTLTHSASENSYHSNSSNDRSYQEQISNINSQNANLKTINKHLVNQEDTLKLQGGDVARHLYLQLENVSSKELTNLKRRTRSSSFSNFLSQSRRQSTASDINIPGGFRREFLINKSLQENTEPPNFLTRNFVEFLSIYGRFAGENFDDDDNEEQYEETFDEESLLLPNERRTPPTRRPRPEKKGAANVPKTFFLVFKALVGSGILFLPKAFSNGGLLFSAIMLLCFGILTFLCYIILIRSKRILNKSSFGELGFKTHGKPLRICILISILISQIGFVATYILFTAENLISFIENYLHFSANYVSTRNIVIVQCILLIPLVLIRNLAKLSIISLISSVFIVIGLIIIFYFSIMKISVEGVGDNIVYFNSSNWSMLIGVAVTSFEGIGLILPIESSMAQPEKFPMVLSISMCVITTLFMSIGVLGYSTFGDQVKSIIILNLPQGKLSVQFISLLYSLAVFLTAPLQLFPVTKILESLIFNSYLFNDNTTTARKKDDEGKLYHFSGKYSTSIKWSKNLIRAILISSICIIAYLNANDIDKFISFNGCFACIPLVYIYPPLIHLKTYKFDRQNDWKGKFFKIFDYILIIVGIVAVIYTTYQILFLI

SEQ ID NO: 36120 - protein, 574 aa, Dendrobium crumenatum
MASSSVPPMITEEEARFEAEVSAVESWWRTDRFRLTRRPYSARDVVSLRGTLHHSYASDQMAKKLWRTLKSHQSAGTASRTFGALDPVQVTMMAKHLDTIYVSGWQCSSTHTATNEPGPDLADYPYNTVPNKVEHLFFAQLYHDRKQHEARVSMTREQRAKTPYVDYLRPIIADGDTGFGGATATVKLCKLFVERGAAGVHIEDQSSVTKKCGHMAGKVLVAVSEHINRLVAARLQFDVMGVETVLVARTDAVAATLIQSNVDLRDHQFILGATNPDFKRRSLAAVLSAAMAAGKTGAVLQAIEDDWLSRAGLMTFSDAVINGINRQNLPEYEKQRRLNEWAAATEYSKCVSNEQGREIAERLGAGEIFWDWDIARTREGFYRFRGSVEAAVVRGRAFAPHADLIWMETSSPDLVECGKFAQGMKASHPEIMLAYNLSPSFNWDAAGMTDEEMRDFIPRIAKMGFCWQFITLGGFHADALVTDTFAREFAKQGMLAYVERIQREERNNGVDTLAHQKWSGANYYDRYLKTVQGGISSTAAMGKGVTEEQFKEESRTGTRGLDRGGITVNAKSRL

SEQ ID NO: 36121 - protein, 147 aa, Brassica napus
  misc_feature (26)..(27): Xaa can be any naturally occurring amino acid
  unsure (1)..(147): unsure at all Xaa locations
IAIFSAMASAKEGNGAPTKKTSLHDXXELQGLSPWYDNLCRPVTDLLPLIASGVRGVTSNPTIFQKAISSSSAYDDQFKQLISGGKDAESAYWELVIKDIQDACSLFEPIYDETDGADGYVSVEVSPRLANDTQGTVEAAKWLHKVV

SEQ ID NO: 36122 - protein, 481 aa, Zea mays
MVSSEITSVTAARAQGPKLFRGKILLPGGPPDVVPSENVEFDFSDVFGPSAVQTHTEVSILTPDSPAPVAESNDEVYNDPDVIVKRSHSLVGPSSLVSQSLPFSKLTLHKTESSLELSECPSKGKQINQGSLSDDEFDDVKKENEGVGLDDFEVLKLVGQGAFGKVYQVRKKGTSEIYAMKVMRKDKIVEKNHAEYMKAERDILTKVDHPFVVQLRYSFQTKYRLYLVLDFINGGHLFFQLYHQGLFREELARIYTAEIVSAVAHLHANGIMHRDLKPENILLDADGHAMLTDFGVAKEFDENTRSNSMCGTVEYMAPEIVQGRGHDKAADWWSVGVLLFEMLTGKPPFVGGNRDKIQQKIVKEKIKLPTYLSSEVHSMLKGLLHKEAGRRLGSGPGGSDEIKNHKWFKSVNWKRLEARQIEPSFRPNVAGKTCIANFDECWTNMPVLDSPVASPVAANSNFVGFSYVRPAPFLQKPSPLG

SEQ ID NO: 36123 - protein, 257 aa, Deinococcus radiodurans R1
MSSADSLPLQGHTVAVTRPDSGGDGGGGRLGELLRAQGAEVLSVPLIRFLPPADPRALWSGLRDLRGVDWLLVTSPQGGRLLGEALAAAGVADLAGTRLAAVGEATARELRARGLPVDFLPTTATALSLGRKLPAQPGQAALHLTSQLSENTLRGELAARGVTYRRLELYHTAPAVLNAAERVALAGVSAVTLASGSAAQGLAALAGPDFDPLRLPVAAIGEQTAAAAWTLGFVSVTTAPQPSLEGLVAAAIKAVRS

SEQ ID NO: 36124 - protein, 1391 aa, Mesorhizobium loti MAFF303099
MAEADEAIGARGKRGPDKPVHRGDAPPCADRDSPDALRQLLEAGSDWIWETDAELRFSWLSPTYQAATGIDPADVLGRFRFDFLNQDLKGSRSAAAHLEDLQARRPFRDFVYELKAGGADCRWVLTSGFPRFDNEGKFAGYRGIGRNVTTLAGAFETVEQNPLSGSDPDRHLADLERTMDAMHMGVVLLDAKLDTLIVNKAYRDLSSIPDGAVTVGAPFSRLMELNRRNGIYGDIDEQQWQRYLASRIEEIRAGSVAPREFVHASGRTMMFSVTALSGGKRLLTYYEVTELKRRDAEIESANAKIAETFVNLRTMVDEMPIGVLVLDADMRAEVINSAFYDFWRIDPGRAGIGSAFRELMEASRAIDPYGADELAWQRHTTEREAEIRAGVAGSKQLPHNDGRTLVASLAPLPGGKRLISYVDVTDMKGRETEAQDARKHLASVLESLPAGVIIYDRDDKFVFANRKLQDTLPALKPFWQPGCSFREALEFGQSIGYFRSSGDAGIDRLYEVEPEHWLDSMLARYRLPNSSYERLNADGRWYQVYDMRTDDGTFIGVRVDITDIKSREAALRDSMRQIDLFRHVMDELPVAAFIKAQDLSIEFVNKAWCALTGIAKEDVIGRTDRELFGTQDAEGYSHDDTQVVVTGKGIEVEEPVTHRDGTVRQLMTRKSRLVATDGSVHLVGSSTDITDVKAREKALEESMRENEVFRSLIDNVPVSIYAKRSDLRQFYVNKGWCDLTGLSREDAIGKTDIEIFGEDGEAFVAGDLAVLRTGETQEVEETVRLADGSVRHQFARKGAMIASDGSLYLIGSTTDITELKMREAELSEARQRAVLADRAKSEFLANMSHEIRTPMNGVLGMAELLAKSNLDPKQKTFTDIIVKSGNALLTIINDILDFSKIDAGQMVLDPAPFNLAEAIEDVATLVSTRAKEKDLELIVRVEPRLESLFVGDVGRIRQIVTNLLGNAVKFTDEGHVLVDVTGERVPTGTRLTISVTDTGIGIPEEKLKLVFEKFSQVDTSSTRRHEGTGLGLAITSRLVELMGGTIGVESAEGKGSTFWFTVTLPRAGQQNGQRIMPVDVTGARVLIVDDNAVNRAILTEQMTSWTFDSCAAESGAEGLKVLIAAAAYGVPVDCVVLDYQMPEMSGAEMARIVRNTGGLADTPIIMLTSVDQSLANTSYRDLGIDAQLIKPARSSVLLETLVATIQRHRHATDSHAVQPLAAERPDVPQPPPLALSEQRAQLQPPPVRPRLPATGGDGHRLDILVAEDNEVNQMVFTQILGETGYGFEIVGNGRKALDAFGKLNPCMILMDVSMPEMSGLEATAAIRQLEQQTGTHVPIVGVTAHALKGDRERCLEAGMDDYLPKPISPRALLEKVERWLGAGRQVQRNAG

SEQ ID NO: 36125 - protein, 213 aa, Blastochloris viridis
AGGIAEMSGLPKEVRKATDALDAVGNTTKAVTKGYAIGSAGLGALVLFAAYSEDLKFFSANPTEFPYFKDVVIDFSLSNPYVVVGLLFGGLLPYLFGAMGMMAVGRAASAIVEEVRRQFRENPGIMDYKVKPDYGRAVDMLTKAAIKEMIIPSLLPVLSPVVVYFVIYFVAGGGAAGKSAAFSSVGALLLGVIVTGVFVAISMTSGGGAWDNA

SEQ ID NO: 36126 - protein, 205 aa, Wolinella succinogenes
MDLKQKYIFIEGTNCPVTVRGRLLQVFRRSVSGELFKGLWLVLREMLRFNIHTTQYPKEKLPLSPRYRAIHELLRLLESGNERCIGCGLCEKICISNCIRMETSYGEDGRKKVHEYTINFGRCIFCGFCAEVCPELAIVHGGRYENASEQRAHFGLKEDMLTPMERFMNQGQKEFPGFGALSQDADSKVKKTPLAYFTPKGEENV

SEQ ID NO: 36127 - protein, 199 aa, Azospirillum brasilense
AGGIAEMADMPKDIRVTTDALDAVGNTTKAVTKGYAIGSAGLAALVLFAAYVQDLKHYFPNVTVEFRLDDPYVVVGLLIGGLLPYLFGAMGMTAVGRAAGSVVVEVRRQFREISGIMEGTAKPDYGRAVDMLTRAAIKEMVIPSLLPVLAPVVLYIVIAAIAGQAQAFAALGAMLLGTIVTGIFVAISMTAGGGAWDNA

SEQ ID NO: 36128 - protein, 368 aa, Malus x domestica
MGKGGQSCNGVVRDAKPVEQENMAAWLVDVNTIKILPFKLPAIGPNDVRIRIKAVGICGSDIHYLKTMKCGDFQVKDPMVIGHECAGIVDKVGSEVKHLVPGDRVAVEPGISCAHCQQCKGGRYNLCPDMKFFATPPVHGSLANQIVHPADLCFKLPENVSLEEGAMCEPLSVGVHACRRANVGPETTVLIVGAGPIGLVSVLAARAFGAPRIVIVDMDDRRLAMAKSLGADGTVKVSTKMEDLDDEVAKIKEAMGSEVDVTFDCVGFNKTMSTGLNATRPGGKVCLVGMGHGVMTVPLTPAAAREVDVVGVFRYKNTWPLCLEFLRSGKIDVKPLITHRFGFTEKEVEEAFATSARGGNAIKVMFTL

SEQ ID NO: 36129 - protein, 199 aa, Rhodothalassium salexigens
AGGIAEMAELEADVRERTDALDAVGNTTKAVTKGYAIGSAGLAALVLFGAYKADLDLYFADLAVSFELTNPYVVVGLFIGALLPYLFGAMGMTAVGRAGGAVVEEVRQQFRDKPGIMKGTEKPDYAKSVDLLTRTAIREMVVPSLLPVLAPLALYFAIYGVAGQGQAFAALGALLLGVIVSGLYVAISATAGGGAWDNA

SEQ ID NO: 36130 - protein, 209 aa, Rhodovibrio salinarum
AGGIAEMGELEDSVRETTDTLDAVGNSTKAVTKGYAIGSAGIGAIVLFASYTEDLSNFAAKPIVYPYFAGIEVDFALSNPYVVVGVVFGGLLPFLFAGHSMTAVGRAAQTVVEEVRLQFKEKPGIMTYQEKPDYGKRVDILTTAAIREMIIPSLLPVLAPVVLFHCGLLQAGHNACDRPALGAMLTGVIVTGLFVAISMTSGGGAWDNA

SEQ ID NO: 36131 - protein, 116 aa, Carboxydothermus hydrogenoformans
  misc_feature (9)..(9): Xaa can be any naturally occurring amino acid
  unsure (1)..(116): unsure at all Xaa locations
NPLTLQDFXPAGGIFEEGADVVVRAEIPGLNAKEDLEVIVEPESLTLRGEIRDERERKQERFYRSERYYGKFSRTIALPAEVEPDHARASYQNGILEVRMKKSGKNNPRARRIEIQ

SEQ ID NO: 36132 - protein, 388 aa, ASPERGILLUS NIDULANS FGSC A4
MVQFAFVSLWCLLLSYLSTKLPWLKTSIPALKNNIRPPSRDVIMTALPLAIFQLAGHILSSMATSQIPVSLVHTIKGLSPLFTVLAYRFLFRIRYAKATYLSLVPLTLGVMLACSTGFSTNFFGILCALVAALVFVSQNIFSKKLFNEAERAESDIQSAGRRKLDKLNLLYYCSGLAFILTLPIWLVTEGYPLFSDLMQDGAISLTNKAGSLDHGALFLEFVFNGVSHFAQNILAFVLLSMVSPVSYSVASLIKRVFVIVVAIVWFGNSTTPVQGFGIALTFLGLYLYDRNSHDDVADQKANADHFHFKNPILPLNTRGASKLRGSNGYAIPQGRPVDQHVLDRSFPISSNSKKDDGVGHARPRASSNTKAWLPPGTKQETTWQSSDS

SEQ ID NO: 36133 - protein, 523 aa, Perilla frutescens
MAATAVFKSTPGKTAIANYSSLEDVNSTSFKRLSFAASNVAGERITSPPRLRVRRSRAGGELERRSPVIVSPKAVSDSQNSQTCLDPDASRSVLGIILGSGAGTKLYPLTKKRAKPAVPFGANYRLIDIPVSNCLNSNISKIYVLTQFNSASLNRHLSRAYASNMGGYKNEGFVEVLAAQQSPENPNWFQGTADAVRQYLWLFEEHNVLEFLILAGDHLYRMDYERFIQAHRETDADITVAALPMDEKRPTAFGLMKIDEEGRIIEFAEKPKGEQLKAMKVDTTILGLDDKRAKEMPYIASMGIYVVSKDVMLNLLRDEFPAANDFGSEVIPGATAMGLRVQAYLFDGYWEDIGTIEAFYNANLGITKKPVPDFSFYDRSAPIYTQPRYLPPSKMLDADVTDSVIGEGCVIKNCKIHHSVVGLRSCIAEGAIIEDTLLMGADYYETDADRRFLAAKGGVPIGIGKNTHIKRAIIDKNARIGENVKIVNGDNVQEAARETDGYFIKSGIVTVIKDALIPSGTMI

SEQ ID NO: 36134 - protein, 520 aa, Perilla frutescens
MAAVASSSPMGFSKICGLNSVSELSGQCKPTVGFSKSELFGGAVCVKSISKNGGRGNARTRLPSARVVSPKAVSDTSSSLTCLEPDANFSELAFFLEWSGTRLYLLRKKRAKPAVPIGANYRLNDIPVSNCLNSNVSKIYVLTQFNSAFLNRHLSRAYASNMGGYKNEGFVEVFAAQQSPENPNWFQGTADAVRQYLWLFEEHDVLEYLVLAGDHLYRMDYEKFVQSHRETDADITVAALPMDEKRATAFGLMKIDDEGRIIEFSEKPKGEALKAMRVDTTILGLDDERAKEMPYIASMGIYVFSKNAMLNLLRDKFPGANDFGSEVIPGATSVGLRVQAYLYDGYWEDIGTIEAFYNANLGITKKPVPDFSFYDRSAPINTQPRYLPPSKMLNADVTDSVIGEGCVIKNCKIHHSVIGLRSCISEGAIIEDTLLMGADYYETDSDRRILAAKGGIPIGIGKNSHIKRAIIDKNVRIGENVKIINSDNVQEAARETDGYFIKSGIVTVIKDALIPSSTII

SEQ ID NO: 36135 - protein, 527 aa, Perilla frutescens
MDACCATLKSTSHLSNVSKSAFCGEKNGFWGEKIKGSLNNCARAYQFGKKLNLEKRGRKIKPGVAYSVLTKKNINETLMIPPPLFEKRGANPKIVAAIILGGGAGKQLFPLTSKAATPAVPVGGCYRLIDIPMSNCINSGINKIFVLTQFNSASLNRHISRTYTGNGVSFGDGFVEVLAATHTAGETGNQWFQGTADAVRQFTWVFEDAKAKDIDNILILSGDHLYRMDYMDFVQNHIDRNADITLSCAPVCDSRASEYGLVKIDSRGRIILFSEKPKEADRMAMEVDTSIIGLSPEEALKSPYIASMGVYAFKTDVLLKLLRWRYPTSNDFGSEIIPSSVKEHNVQAYIFRDYWEDIGTIKSFYDANLALTDEFPKFEFYDPKTPFYTSLRFLPPTKIDNCKIKDAIISHGCFLRECVCQHSILGERSRLDSGVELKDTLMMGADYYPTESEIASLLVQGKVPMGIGRNTKISNCIIDKNARIGKDVIIKNKDGVEEADRSEEGFYIRSGITIVVEKATINDGTII

SEQ ID NO: 36136 - protein, 231 aa, Arabidopsis thaliana
  misc_feature (18)..(18): Xaa can be any naturally occurring amino acid
  misc_feature (72)..(72): Xaa can be any naturally occurring amino acid
  unsure (1)..(231): unsure at all Xaa locations
MEEEYIRVISITTIGVIXLVRRIFSSYSFDLSTRIISTLHATIGVTLATLSIQDWSCPVCPIASTSPLLLHXSLRQMETLAFSLSYMIYDLICSHFDQVLSIDNAVHHSVCILGFVAGLFYQKCGSEMVAAIWITEISSPFLHLREILKEIGYRDTDLNLAADVCFATIFSLARMVGGPYLVYVTISADNPILIKAMALGLQLVSAFWFYKILKMMRYKFIKRSMSNKKST

SEQ ID NO: 36137 - protein, 219 aa, Mesorhizobium sp. BNC1
MFFQTSEKKLRLPSPQEALPGRPQPIATAEHHFVNGRPLKGPYPEGAEQVLFGMGCFWGAERLFWQMEGVWVTAVGFAGGLTPNPTYRETTTGLTGHAEVVLVVYDPKVVSFSALLKVFWESHDPTQGMRQGNDVGTTYRSVIYATTDAQLHEAEASRDAYEKALRGAGRDRVTTEIDRAPTFFFAEEEHQQYLAKNPGGYCGLQGTGVACPMPGASVQ

SEQ ID NO: 36138 - protein, 231 aa, Arabidopsis thaliana
MESISPVSNQLLQPTTTSSNSDRSRRKRKKKSSPSSVEKSPSPSISLEKWRSEKQQQIYSTKLLVHALRELRISQQPSSSSSSSIPRGGRAVREVADRALAVAARGKTLWSRAILSKAVKLKFRKHKRQRISNPTTTTLTTGSIRSKKQRATVLRLKAKGLPAVQRKVKVLSRLVPGCRKQSLPVVLEETTDYIAAMEMQIRTMTAILSAVSSSPPPPTPGHEGGQTHMLG

SEQ ID NO: 36139 - protein, 44 aa, Paeonia californica
GHNIVLISNHQTEADPAIIALLLEKTNPRISEDLTYVAGDRVIT

SEQ ID NO: 36140 - protein, 316 aa, Glycine max
MGSQGGGDNNGKHSQLQPLVRQNSMYSLTLDEVQNHLGDLGKPLSSMNLDELLKNVWTVEANQSTGVDIEGTAQTRQAALQRQASLSLTSALSGKTVDEVWRDIQQSKDNKDKKSQERQSTLGEMTLEDFLVNAGVVAEASTRKNTGATIGVDSNVVAPQFPQHGPWIQYPQPQYQHPQQGLMGIYIAGQNIAQPLHMGAGAASDVPYADGQVALSSPVMGTLSDTRRPGRNGGTPEDMIEKTVERRQKRMIKNRESAARSRARKQAYTTELEHKVSRLEEENEKLRRQQELEKMLSSAPPPEPRYQIRRTSSASF

SEQ ID NO: 36141 - protein, 162 aa, Geobacter sulfurreducens PCA
MGENTSLEKATFGAGCFWHVEEEFRRVPGVVSTLAGYMGGWKEHPTYEEVCSKTTGHAEVVEVTFDPAAVTYDHLLRVFWDCHDPTQLNRQGPDIGTNYRSVIFYHSPDQERAARASLEHEQRSGRHARPIVTEIVPAATFWWAEEYHQHYLEKRGGGSCRW

SEQ ID NO: 36142 - protein, 231 aa, Triticum aestivum
ARGPATAECVPSIQEVIANGISVNVTLIFSIARYEAVIDAYLDGLEASGLSDLSRVTSVASFFVSRVDSLIDKMLEKIGTPEALALRGKAAVAQAKLANQLYQKKFSGPRWEALAKKGAKKQRLLWASTGVKNPAYPDTLYVDSLIGPDTVNTMPDQALQAFIDHGTVSRTVDANVSEAEGVYSALEKLGIDWDAVGKQLELEGVDSFKKSFDSLLVSLQEKGNSLKTASV

SEQ ID NO: 36143 - protein, 271 aa, Mycobacterium intracellulare
MTVKQSEASRLGPIFDVCRDDGRAALIGYLPTGYPDVTTSVHAMVALVESGCDIVEVGVPYSDPGMDGPTIVKATEAALHGGVRVRDTLAAVEAISAAGGHAVVMTYWNPVLRYGIDAFARDLASAGGYGLITPDLIPDEAGQWLAASEEHRLDRIFLVAPSSTPQRLAMTVEASRGFVYAASTMGVTGARDVVSNAAPELVGRVKEISDIPVGVGLGVRSGEQAAQIGGYADGVIVGSALVSALGDGGLTALRALTEELAAGVRQRAAAS

SEQ ID NO: 36144 - protein, 337 aa, Pseudomonas aeruginosa PAO1
MRVLVTGGAGFIGSHVLVELLGQGAKVVVLDNLVNGSSESLKRVERITGHPVGFVLGDVRDSLLVERLLIDEKVDAVIHLAGLKAVGESVDDPLEYYESNVQGTISLLRAMQRVGVFKIVFSSSATIYQMPGTLPISESSKVGGVASPYGRTKLTAEHMLDDLARSDTRWSIAVLRYFNPIGAHESGLIGEDPCGTPNNLLPYIAQVAVGRLSRLTVHGGDYPTIDGTGVRDYIHVCDLAAGHTRALEYLGQGHGYHVWNLGTGTGYSVLQVIEAFERVSGRRIPFTVSGRRPGDVAECWADVSKAERELGWKAGLGLECMIADAWRWQVSNPSGYS

SEQ ID NO: 36145 - protein, 160 aa, Zea mays
  misc_feature (42)..(42): Xaa can be any naturally occurring amino acid
  misc_feature (47)..(47): Xaa can be any naturally occurring amino acid
  misc_feature (51)..(52): Xaa can be any naturally occurring amino acid
  misc_feature (62)..(62): Xaa can be any naturally occurring amino acid
  misc_feature (70)..(70): Xaa can be any naturally occurring amino acid
  misc_feature (75)..(75): Xaa can be any naturally occurring amino acid
  misc_feature (91)..(91): Xaa can be any naturally occurring amino acid
  misc_feature (96)..(99): Xaa can be any naturally occurring amino acid
  misc_feature (103)..(104): Xaa can be any naturally occurring amino acid
  misc_feature (108)..(108): Xaa can be any naturally occurring amino acid
  misc_feature (120)..(120): Xaa can be any naturally occurring amino acid
  misc_feature (123)..(125): Xaa can be any naturally occurring amino acid
  misc_feature (135)..(135): Xaa can be any naturally occurring amino acid
  misc_feature (141)..(141): Xaa can be any naturally occurring amino acid
  misc_feature (144)..(144): Xaa can be any naturally occurring amino acid
  misc_feature (148)..(149): Xaa can be any naturally occurring amino acid
  misc_feature (151)..(151): Xaa can be any naturally occurring amino acid
  misc_feature (153)..(153): Xaa can be any naturally occurring amino acid
  misc_feature (156)..(157): Xaa can be any naturally occurring amino acid
  unsure (1)..(160): unsure at all Xaa locations
PPPPPPPFTPAAELLPSPASGSGRRRKRWLFRVLHLVRSFLXFLPEXQSAXXNIPFREKVIXTVISLFIXRGGSXLPLYGIHSTTGADPFXWMRVXXXXNRGXXGELXITPIGTSGMKMXLLXXXKIIEVDNSGXEDRALXNGXKKLXXIXIXIGXXKML

SEQ ID NO: 36146 - protein, 151 aa, Pneumocystis carinii
MSNEQNLTEEQISEFKEAFSLFDKDGDGSITTKELGIVMRSLGQNPTEAELQDMVNEVDADGNGTIDFPEFLAMMARKMKDVDSEEEIREAFKVFDKDGNGIISAAELRHVMTNLGEKLTDEEVDEMIREADVDGDGVIDYSEFVKMMLSK

SEQ ID NO: 36147 - protein, 109 aa, Oryza sativa
MVFMAELVGPRVYSCCNCRNHVCLHDDIISKAFQGRNGRAFLFSHAMNVVVGAKEDRQLMTGLHTVADIYCNDCREVLGWKYERAYEETQKYKEGKFIFEKSKIVKENW

SEQ ID NO: 36148 - protein, 208 aa, Isochrysis galbana
AGGIAEMAELPSSVRDTTDALDAVGNTTKAVTKGYAIGSAGLGALVLFAAYNEDLKYFAATAAEGSFFDGIGVVNFSIANPYVVVGLLFGGLLPFLFGGMSMMAVGRAAQAVVEEVRSQFKNDPGIMEGTSKPNYGKAVDILTSAAIKEMIVPSLLPVLSPIVLFLLIWGIAGPSAALASVGAMLLGVIVTGLFVAISMSSGGAWDNA

SEQ ID NO: 36149 - protein, 305 aa, Neisseria meningitidis MC58
MKKTKVHLISGFLGTGKTTALKSLMAQKDPNEKWVIIVNEFGEIGIDGAVLSDNGIPVAEIAGGCLCCTAGPQMGVTVQKMLRDAKPDRLMIEASGLAHAASVIDELKTKPLDSLLEIGAVFTVVDPRQFINPDYAQQALYKDQIGICDVLVASKTDLCTPEQLAEFHDKAAKLFPPKAKVVEVQNAQLDIQWLDIPVIEKSRYRLKALPDNTMGFQSQGFTFPAGRDFDGEKLTNFFNDLPNMTEGLVRAKGVFQVLGTWVWLNWVDGQWGANQVSWRRDSRFELIAKSFDADLIEQKLKDALE

SEQ ID NO: 36150 - protein, 533 aa, Toxicodendron vernicifluum
VDVHNYTFVLQEKNFTKWCSTKSMLVVNGSFPGPTITARKGDTIFVNVINQGKYGLTIHWHGVKQPRNPWSDGPEYITQCPIKPGTNFIYEVILSTEEGTLWWHAHSDWTRATVHGALVILPANGTTYPFPPPYQEQTIVLASWFKGDVMEVITSSEETGVFPAAADGFTINGELGDLYNCSKETTYRLSVQPNKTYLLRIVNAVLNEEKFFGIAKHTLTVVAQDASYIKPINTSYIMITPGQTMDVLFTTDQTPSHYYMVASPFHDALDTFANFSTNAIIQYNGSYKAPKSPFVKPLPVYNDIKAADKFTGKLRSLANEKFPVNVPKVNVRRIFMAVSLNIVKCANKSCNNNIGHSTSASLNNISFALPQTDVLQAYYRNISGVFGRDFPTVQKKANFSLNTAQGTQVLMIEYGEAVEIVYQGTNLGAATSHPMHLHGFNFYLVGTGAGTFNNVTDPPKYNLVDPPELNTINLPRIGWAAIRFVADNPGVWFLHCHFERHTTEGMATVVIVKDGGTTNTSMLPSPAYMPPCS

SEQ ID NO: 36151 - protein, 600 aa, Mycoplasma mobile 163K
MFKFKFADIGEGLHEGLVAEIYKKEGDMVKEGEALFSVETDKVTSDIPSPATGKIVKVAMAQGDTIHVGQEIYYIDDGSSSQSIEVKPAEIKAEAPKKAGGGASVVGEVAVSDEVMSFGKKTSSTPTSSTSIQPTSFNGKITDKYDVIVLGSGPGGYLAAEEAGKNGKKTLIIEKEYWGGVCLNVGCIPTKALLKSTEVFEQLSHASDYGLDIDVSKLKMNWKKMQERKQKVVNTLVGGVLALMKGNKVKTINGEAKFLAPKVVQVNGEIYEAENIIIATGSKNRKLTLPGFEEAYKSGFAITAEEAIQIESLPKELVIIGGGVIGIEFAQIFAASGSKVTVIQNAPTIIPALDEDVIKVLSDKLISSGIQIVYNAETVKIEKDTLHYKVNGEAKTIKASKIMVSVGRIPVIANAKEVGYQIGEKGEIVINEFCQTNIPGAYAIGDVTFKTMLAHVAYQHAHIAIKHLLGNGDLSYTGKTVPACIYTHPEIASVGMSERQAKESGRAYISEKHQMKFIGKAIASDQTMGFSKLIIDKETHEILGAHIIGAHATDLISELVVAIDLETTVHEIANAIHPHPTFSEIIWENARTASHKLKKK

SEQ ID NO: 36152 - protein, 370 aa, Mycoplasma mobile 163K
MKYKYVKPGHVMTDPSWDSIIRYLDKKGDLIDKKYKRVDTLTDEKILKAYRYMVLSREQDDYMSQLQLQGKMLTFAPNYGEEALQAAAAMPMKKGDWFVPAFRSNVTMLYLGVPLKNQLLYWNGNENGNKMPKDVNVLPVNIPIGTQTSHATGLAFGMRHKGNKNVSVSFIGNGGTSEGEYFEAMNFASIHKLPTVFCVNNNQWSISTPSHLERASSTIASDGYAMGIPGLRVDGNDLLASYEVMEEALEYARSGNGPVLVEFVTWRQGKHTTSDDPTVYRTREVEKKHEEWEPFHRIEKYILDNKIASKKDLEKIAEDVKPEVRKAYEESLVNIDETIDEIFDYTYATLSKDLLKQKAEAEAFFKKGSK

SEQ ID NO: 36153 - protein, 473 aa, Glycine max
MAIIMQALHSPTLRTSPLDPLRGPNNAAAKRRASSAKRVFFVSATVAPKVSAPQRQKDSKKRVVITGMGLASVFGNDVEGYYEKLLAGESGITPIDRFDASKFPTRFGGQIRGFSAEGYIDGKNDRRLDDCLRYCIVAGKKALENADLAPDNHSKIDKERAGVLVGSGMGGLTVFSDGVQALIEKGHRKITPFFIPYAITNMGSALLGIDLGFMGPNYSISTACATSNYCFYAAANHIRRGEADLMIAGGTEAAIIPIGLGGFVACRALSQRNDDPKTASRPWDKDRDGFVMGEGAGVLVMESLEHAMKRGAPIIAEYLGGAVNCDAYHMTDPRSDGLGVSTCIQSSLEDAGVSPEEVNYINAHATSTLAGDLAEINAIKKVFKDTSGIKINATKSMIGHCLGAAGGLEAIATVKAITTGWLHPTINQFNPEPAVDFDTVANVKQQHEINVAISNSFGFGGHNSVVAFSAFRP

SEQ ID NO: 36154 - protein, 323 aa, Pyrobaculum aerophilum str. IM2
MPCIFVSREGFPESMYKKLEEVGRVEVYRHGGSPWSTRGVPKEVLIDAARRCEALVIFIGDVIDKEVLDAGEKLKIVSTASVGVDHIDVEYAKRKGVVVAHTPYVLVDAVADLAVGLLIAVTRKIALGDRLIRSGAADAVWGSLMGVNLRGKRAGIVGLGNIGVAIARRLKAFDIEVAYWSRRRKPEVEFALGIEYMELDSLLSSSDFIFLTMALTPETRWFFNRERFAKVKRGAYFINVARGGLVDTDALIEALEAGVLAGAALDVFDVEPLPARHKLASMDNVVLTPHIGSATVETRRRMAELAAENVVSFFRTGRPIYAV

SEQ ID NO: 36155 - protein, 305 aa, Streptococcus suis
PCYPGSELGIVSDDVFAWEEYPLSVAVIGAGYIAVEMAGLIHGLGVQTDLFVRGNRPLRSFDTYIVDALMEEMQRTNLPLHTGKTPVSLEKTDDGQIQINFADGSNHIAQKVLWAIGRKPNIDKLNLKATSVQLTSSGHISVNEYQETAVPGIYALGDVTGEKELTPVAIKAGRLLAERLFNNKPTAKMDYTTIPTVVFSHPAIGTVGLTEDEAITQYGQDNVKVYTSAFTSMYTALENNRQMAKFKLVTVGENEKVVGLHGIGYGVDEMIQGFSVAIKMGATKEEFDAVVAIHPTGSEEFVTMR

SEQ ID NO: 36156 - protein, 543 aa, Methanococcus maripaludis S2
MSQQPGVLPENMKRYMGRDAQRMNILAGRIIAETVRSTLGPKGMDKMLVDDLGDVVVTNDGVTILREMSVEHPAAKMLIEVAKTQEKEVGDGTTTAVVVAGELLRKAEELLDQNVHPTIVVKGYQAAAQKAQELLKTIACEVGAQDKEILTKIAMTSITGKGAEKAKEKLAEIIVEAVSAVVDDEGKVDKDLIKIEKKSGASIDDTELIKGVLVDKERVSAQMPKKVTDAKIALLNCAIEIKETETDAEIRITDPAKLMEFIEQEEKMLKDMVAEIKASGANVLFCQKGIDDLAQHYLAKEGIVAARRVKKSDMEKLAKATGANVITNIKDLSAQDLGDAGLVEERKISGDSMIFVEECKHPKAVTMLIRGTTEHVIEEVARAVDDAVGVVGCTIEDGRIVSGGGSTEVELSMKLREYAEGISGREQLAVRAFADALEVIPRTLAENAGLDAIEILVKVRAAHASNGNKCAGLNVFTGAVEDMCENGVVEPLRVKTQAIQSAAESTEMLLRIDDVIAAEKLRGAPDMGDMGGMPGMGGMPGMM

SEQ ID NO: 36157 - protein, 259 aa, Triticum aestivum
MEDERSTQSYQGGEAAEQVEVTDRGLLGNLLGKKKAEEDKEKQEELVTGMEKVSVEEPEVKKEEHEDGEKKETLFSKLHRSSSSSSSSSDEEEEEVIDDNGEVIKRKKKKGLKEKLKEKLPGHKDTEGEHVTGLPAPAAPASVQTHHDTDVVVEKIDGDVKTEAAPAVPEEEKKGFLEKIKEKLPGGHKKPEDAAPVPVTHAAPAPVHAPAPPAEEVSSPDAKGKKGLLGKIMDKLPGYHKTGEEDKAAAATGEHKPSA

SEQ ID NO: 36158 - protein, 397 aa, Frankia sp. EAN1pec
MRDAVVVEAVRSPIGRGRASGSLAPVHPIDLLAHSISAAVERSGVDPALIDDVIAGCVTQSGEQAANIARWATLAAGLPESVPGTTVDRQCGSSQQAVHFAAQGVIAGAYDMVLACGVESMGRVPMGSATLPGDSHGTRINARYPDGLISQGISAELIGARRGLGRAEMDEFALASHQRAATAARDGLFTPEIAPVKVTGPDGSVVEFSADEGIRPASSTQALAGLRPAFYDEATAARFPEIGWNVTAGNASQISDGSAALLITTSERARELGLRPLARLHSFAVVGDDPFLMLRGVIPATRRVLERSGLSLDDIDLFEVNEAFAAVVLDWRAEIGASAEKVNARGGAIALGHPLGASGARIMTTLVHALHQTGGRFGLQTMCEAGGLANATIIERL

SEQ ID NO: 36159 - protein, 683 aa, Mesorhizobium loti MAFF303099
MSRTFSRALPSPQTPTFGGTMTSREQHDRMANAIRFLSMDAVEKAQSGHPGLPMGCADIATVLFTRFLKYDPKAPHWPDRDRFILSAGHGSMLLYSLLHLTGYEDMTIDQIKHFRQLGSKTAGHPEYGHATGIETTTGPLGQGLANSVGFALGERIMNAAFGNDLVSHYTYVLAGDGCLMEGVSQEAIALAGHLKLNKLIVFWDNNNISIDGPVSLADNTDQVARFQASGWNASHIDGTDPEAIAYAIEAARHSDKPTMIACKTTIGFGAPTKAGTNKAHGSPLGADEIAGARKFFNWESPPFEIPADILDAWRTAGKAGAKPRADWEGRLAKAEPKLKAEFERRLAGKLPSNFDAVIADYKKKLSADKPKVATRKSSEMALEVINGAVPETIGGSADLTGSNNTKTSQTKNITPDDYGQRYVHYGIREHGMAAAINGLTLHGGLIAYGGTFMCFSDYARPSMRLSSLMGIRSIFVMTHDSIGLGEDGPTHQPVEHLAALRAIPNHNVFRPADAVETAECWQIALESEKTPSTLALTRQNLPTVRIEHSAKNLSSQGAYELAAASGEAAVTIFATGSEVEIALGARDLLEKHGHPTRVVSVPCFELFDKQSDDYRKKTIGNAPIKMAIEAGIRQGWDHLIGSDGIFVGMTGFGASGTIEQLYPHFGITAEAAAKAAEARLHAK

SEQ ID NO: 36160 - protein, 584 aa, Yarrowia lipolytica CLIB122
MRLSLSVVASLAMSVMAQTYTDCNPLHETCPADKALGTSKSFDFTQGPSDDFPPSFKPHRITYSNDTGVSLAVVEQGDNPTIQSDFYIMFGRVEAVVQAAPGQGIISSVVLQSDDLDEIDLEWIGGDANNVQTNFYIQGNTTTYDRGAIHPVANSNSEFHTYTVEWTKDDLTWFIDGEAVRTVPSTFSQGYPQSPMNIRIGVWAGGDPTNNAGVIEWAGGETDYTKSPYPMYVKSVNVQDYSTGSEYSYSDHSGTWESIVAKDGEVNANAPVEEVPEETTSAVESSIPVETSAAVESSAVESSAVESSAVESSAPITSAPAPVSSAPAFTNSTISTGVSSGAVVTVEATEHVESTLTKTVTHCEDNKCVSKPQPTVTVTKHCTLDKCVSKTIPVEYVTVTATTTKVVTEICPEAKCHKISSVPVRPAPTEAPLKPTNLKTTQTVTKTGTVVVKTDTPKSEPASEVSKPTTESKPTAESKPTAESKPVAKPTGSSPVEVPAEGKSTQTIHLTQIVTIGTQTVQTVIPQSDIPTAAPQTSPVVQVNNGTVPQVPQAPNTFPAQANGAASKAVSVVAAMVAMVALLI

SEQ ID NO: 36161 - protein, 364 aa, Vibrio parahaemolyticus RIMD 2210633
MNVQALPMHRFIDHDGNLVGQLPNWADIETLVGFYRDMVLTRTYDQKAVALQRTGKLGTYPSHLGSEAIGIAVGRALKTDDVFVPYYRDMPAMWCRGIGMEKNLQYWGGDERGSDFAPEGSPIPSRDLPFCVPIATQCTHAVGVASALKIQGNHEAALVMCGDGGTSKGDFLESINCAGTWNIPLVFVVNNNQWAISVPRSLQCAAEFLSEKAKGAGIPGITVDGNDVVAMYDATMTALERARKGKGATLIEAVSYRLSDHTTADDATRYRNADDVQTAWQFEPVSRLKTFLINQGAWSDEQEQQWQSDCKEQVELAVERYLNLPQQAPETGFDYLYESLPQELHAQRDELINKAMRMQGGKHG

SEQ ID NO: 36162 - protein, 196 aa, Pseudomonas aeruginosa PAO1
MNPREHGKRSIDNETRSALKRQRPAVIWLTGLSGAGKSTIASALELALFEQKKHTFLLDGDDLRLGLCRNLGYSDEDRTENIRRIAEVAKILLEAGLIVIVATISPFSRDRRLSRELIGIEHFIEVFVDTPLSECERRDPKGLYRKARSGKIENFTGIDSIYETPAQPNITIDTLSEDPDLAVKRIISYLETNQPA

SEQ ID NO: 36163 - protein, 336 aa, Oryza sativa
MAPLGDGAAAAAAAEPNLVVSFGEMLIDFVPDVAGVSLAESGGFVKAPGGAPANVACAISKLGGSSAFVGKFGDDEFGHMLVDILKKNGVNAEGCLFDEHARTALAFVTLKSNGEREFMFYRNPSADMLLTEAELNLDLIRRAKIFHYGSISLITEPCRSAHVAAMRAAKSAGILCSYDPNVRLPLWPSEDAARAGILSIWKEADFIKVSDDEVAFLTQGDANDEKNVLSLWFDGLKLLIVTDGEKGCRYFTKDFKGSVPGFSVNTVDTTGAGDAFVGSLLVNVAKDDSIFHNEEKLREALKFSNACGAICTTKKGAIPALPTVAVAQELISKAAN

SEQ ID NO: 36164 - protein, 342 aa, Mesorhizobium loti MAFF303099
MMSERLEDIAAAIVANGKGLLAADESSGTIKKRFDVIGVESTADSRRDYREMMFRARDAMTKYISGVILYDETIRQKAADGTPLVDIIKASGAIPGIKVDAGAKPLAGFPGDTVTEGLDGLRERLADYYKLGARFAKWRAVIDIDTGKGVPSANSINSNTHALARYAALCQEAGIVPIVEPEVLMDGAHDIGTCYDVSKATLIKLYDELHAARVVLEGTILKPNMVLSGKKSGTVDSPEKVAEMTIKLFRETVPAAVPGIAFLSGGQEDEEATANLNAINAIGPHPWKLTFSYGRALQAAPQKAWSGKASNVAAGQAAFTHRAHMNYLAALGKWKASLEQAA

SEQ ID NO: 36165 - protein, 372 aa, Pyrobaculum aerophilum str. IM2
MLEISLEIPTQFKTEVKEPQVFRVLGQDGSPLETYEVGYKPSEGELAKAYRWMVLGRVLDRYALMYHRMGKVKSTYGPHEGHEAADAGTALALRPEDWVAPYYRNLTLLIARGVPLEVIWAKFFAKLGDPDKGRNLTIEWGGFKQWRILSIGAPIGHQYIYAAGFAYALKYLKKKEVVAAYIGDGGTSTNGFHTGLNFAGVFKVPAAFFIYNNQYAISVPVSIQTAVSRLSTKAAAYGLVGVSADGMDLLAVVKTAMWAVEKARRGEPTLVEYVMYRFGPHTTADDPLTKYRDPKEVEEYRRWDPLARLEKFLIRQGIYSEGDVKTIWEEAEREVKEAAKEAEALPDVPAEELINDVYSFVPKSLREWLEWL

SEQ ID NO: 36166 - protein, 597 aa, Symbiobacterium thermophilum IAM 14863
MRVFARLRRFFVPYIGWGLGSVLAMACLTAVGLVRPWLLEQLIDRVIREQRFAELPYWTAAVLAVALVRAVFNFLRQYLGHSFGQNATLDLRNALYDKLQYLHFKYYDNAYTGDLMSRVTADVEAFRMFLSFGWVHLMDILFMTLFSLVVMLSMSVRLTLVTLLAMPFLLAVVLRFERRVHPAFRRVREALAGLSTAAQENLNGMRTVKSFAREDFEVRKFAAHNQEYLEANLATTGLWARYFPVMELLSNLALTLMLAYGGLLVLRGELSLGELVAFNSLIWYWIWPMREVGYRINELTQAIASGERLLEVLEHPVAVQSPPEPVRLPEMKGHVRFEGVWFQYDSPRPGTGEISPHPALADIHLDAPPGSVIGLIGATGSGKSTLVALIPRFYDVTRGRVTIDGIDVRDLDLDDLRRQIGIVQQETFLWSASIRENIAYGRRTATMEEIIAAAKLARAHDFIMETPAGYDTIIGERGLGLSGGQRQRIAIARAILNNPRILILDDATASVDMETEHEIQVALQNAMRGRTTFIIAHRLSSVKHADEILVLDQGRIVERGTHEELLARGGVYRAIYDIQFRDFEEQRAAEAGKGGSR

SEQ ID NO: 36167 - protein, 232 aa, Streptomyces avermitilis MA-4680
MAIKGVLFDFSGTLFRIESTESWLRAALTAAEVPLPEPELIRTAEELESVGALPGGALPSQPLPARLAELWEVRDRSAAQHRAAYTGIARQVPLPDPRLHDALYDRHMAPAAWSPYPDAAEVLGALRERGVAVGVVSNIGWDLRPVFRAHGLAPHVGAYVLSYKHGIQKPDTRLFALACEALGVAPQDTLMVGDDRRADGGAAALGCGVHFVDHLPAPERPDGLRPVLELVG

SEQ ID NO: 36168 - protein, 189 aa, Nannochloropsis oculata
AGGIAEMALQDYPEVREKTDALDAAGNTTAAIGKGFAIGSAALVSLALYGAFAVRVGIRNGVNILSPVTFAFLLIGSNLPYWFSALTMKSVGTAAMEMVMEVERQFRECPELLNEGTTLRPDYTRCVDISTKAALREMVPPAALVMLSPLIAGTFFGKYAVAGVLTGGLVSGVQLAVSMCNTGGAWDNA

SEQ ID NO: 36169 - protein, 203 aa, Nannochloropsis oculata
AGGIAEMSQQPEFVRESTDRLDAAGNVTKAITKGYSIGSASLACFLLFGAFMDEFSQFSGKPFRTVDIAVPEVLIGGLIGTMMVFYFVGLTVAAVGKTAGEVVKEVRRQFRDNPDIMTFKARPDYRSCVALVTRAALQEMVWPGLLATGLPVVVGLVFRGVGAFTDRPLLGAEVLAGYLMFGTVTGIMMALFNRTMGGAWDNA

SEQ ID NO: 36170 - protein, 121 aa, Triticum aestivum
MHLRQQQQQHHRAEMVAPKGCVTVRVGAEGEEQRRFAVPLDHLKHPLFGALLDEAEREYGFRHQGAIAIPCRVDRFVHVERLIDRDLGAHGHQLVDLDCGAATAHGHGHIHLPRFVGCFRA

SEQ ID NO: 36171 - protein, 203 aa, Nannochloropsis salina
AGGEISEMSQQPEFVRESTDRLDAAGNVTKAITKGYSIGSASLACFLLFGAFMDEFSQFSGKPFRVVDIAVPEVLIGGIIGTMMVFYFVGLTVAAVGKTAGEVVKEVRRQFRDNPEIMTFKARPDYRSCVALVTHAALKEMVWPGLLATGLPIVVGVVFRGVGAITDRSLLGAEVLAGYLMFGTETGIMMALFLTAGGAWDNA

SEQ ID NO: 36172 - protein, 519 aa, Oryza sativa (japonica cultivar-group)
MQGIGRRYGRIKVYAVLGDDEAQHAKNNMRGALFHVDNPGPMAPIAKGNFLDVNQALEVVRFGIQYCDWRARQDLLTIMVLHNKVVEVLKSLAIEFKSNGTLRKELAELQEELAKAHNQVHLSETRASSALDKLAQADNLVNDRLLQDGGSSASIDNYVSLASRTSSASRFVNKKTLRPSLDVSGPVQPYNPNLKNFWYPVVFSGDLKDDTMVPIDCFEEQWVIFRGKDGRPGCVQNTCAHRACPLHLGSVSEGRIQCPFHGWEYSTDGKCEKMPATKLLNVRIRSLPCFEQEGMVWIWPGDGTPESTIPSLQPPSGFTIHAEMVMELPVEHGLLLDNLLDIAHAPFAHTSTFAKGWSVPSLVKFLTPASGLQGYWDPYPIDMEFRPPCMVLSTTGISKPGKLEGKSIKQCSTHLHQLHICLPSSRNKTRMLYQMSLNFAPWLKHIPFMHILWSHFGEKVLNEDLRLVLGQQERMINGANVWNWPVSYDKLGIRYRLWRDAIERGANRLPFNNQSESGS

SEQ ID NO: 36173 - protein, 261 aa, Wolinella succinogenes
MRRIVIKVGSALLSRGHEMAMDRMESLCRFIAELKQKGDEVILVTSAAVAAGYTALALDKRQLPNRQALAAIGQPLLMNLYHQTLAPLGILPAQMLLSAYDFDSRKRTENARNTIEVLLSHGVLPIINENDAVATKELDMLAVFGDNDRLSAHVAHYFSAEILLILSDIDGYYDKNPCEFPDAKIRRVVNFLTPEELEAEVSPNNAFATGGIVTKLQAADFLMKRGQKMFLANGFNLGDARSFLLEGIHCQGTLFVQGGES

SEQ ID NO: 36174 - protein, 442 aa, Sinorhizobium meliloti
MSNRLNTTPNDLSAFWMPFTANRQFKKEPRLFVGAKDMYYTTHDGRTVLDGTAGLWCVNAGHCRPKITEAIREQAGELDYAPAFQLGHPKAFELANRLVDIAPEGMNHVLYTNSGSESVDTALKVALAYHRAKGNGSRFRLIGRERGYHGVNFGGISVGGIVANRKMFGTLLTGVDHLPHTHLPAKNAFSRGEPEHGADLAAELERIVTLHDASTVAAVIVEPVAGSTGVLIPPKGYLQKLREICTKHGILLIFDEVITGYGRLGTPFAAQYFDVKPDIITTAKGLTNGVIPMGAVFVTSEIHDAFMTGPEHLIEFFHGYTYSGNPIASAAALGTLDTYREEGLLTRAAELAPYWEEALHSLKDCPHVIDIRNIGLIGAVELEPIAGEPTKRAFSAFLKAYEKGLLIRTTGDIIALSPPLIIEKRQIDELFDKLRDVLKNNI

SEQ ID NO: 36175 - protein, 451 aa, Streptomyces avermitilis MA-4680
MATTASVHPVDEVPPIRQLAAFGLQHVLAMYAGAVAVPLIVGSAMKLSAADLAYLITADLLVCGIATLIQCVGFWRFGVRLPIMQGCTFAAVSPMVLIGTTGGGLPAIYGSVIVAGLAIALLAPVFGKLLRFFPPLVTGTVILIIGVSLLPVAGNWAAGGQGAKGFGEPKNLALAGFVLLVVLGVQRFAPAFLSRIAVLIGIVVGLAVAVPFGFTDFGGVGDADWLGISTPFHFGTPTFHASAIASMLVVALVTMTETTGDLIAVGEMTDRGVEPRMLADGLRADGLSTVLGGVFNTFPYTAYAQNVGLVGMTRVRSRWVVAAAGGMLVLLGLLPKLGAVVAAIPAPVLGGAGLVMFGTVAASGLKTLARVDFKDNDNLTVVAVSVAVGMLPVGVPTIYAQFPDWFQTVMNSGISAGCLTAIVLNLLFNHLPGKAGSPAKAAEPDEASGTA

SEQ ID NO: 36176 - protein, 189 aa, Skeletonema costatum
AGGISEMAELGPETRAITDGLDEVGNTTAAIGKGFAIGAAGLAALAIIAAFIQVISSQVEGFSLDIGNPKVLMGMFLGGIFPFIVSAMTMRAVGDAAFDMIKEIRRQFKEIPGLMEGKAKPDSKKCVDIATKAALRRMMGPGALAVLAPVVVGFGLGADSLGGMLGGALITCVLLAITMQAGGGAWDNA

SEQ ID NO: 36177 - protein, 547 aa, Sinorhizobium meliloti
MPAASGSDENWWRGAVIYQVYPRSFQDTDGDGMGDLRGVTRRLPHIASLGVDAIWLSPFFTSPQADMGYDVSDYCDVDPMFGTLADFDEMLAEAHRLGLKVIIDQVISHTSDRHPWFVESRSSRTNAKADWYVWADPKPDGTAPNNWLSIFGGPGWEWDGVRRQYYLHNFLSSQPDLNFHNPEVQEAVLATVRFWLDRGVDGFRLDTANFYFHDRLLRDNPPLVPDPDATSRDAPEVNPYGMQDHLYDKTQPENLDFLRRFRAVLDEYGGRATVGEVGDGSRSLQTVAAYTSGGDKLHMCYTFDLLGPEFTARHFRRCVENFQSTVTDGWVCWAFSNHDVMRHVSRFALREADRERVAKLAISLLASLRGTICLYQGEELGLPEAELAFEELRDPYGIRFWPAFAGRDGCRTPMVWERELSNAGFSAGTPWLPVRDGHRMLAVDAQEGVEGAVLEHYRQTLGFRRAQSALVDGDMVFLGTNQDLLVFTREKDDERLLFVFNLTQEPQTFHLPATLVAEPHPMPGFAPVFADNAIKLAALDVFCGRLR

SEQ ID NO: 36178 - protein, 210 aa, Tetraselmis chuii
AGGIAEMAELPSSVRDTTDALDAVGNTTKAVTKGYAIGSAGLGALVLFAAYNEDLKYFIANATEGSFFYGMGAVDFSIANPYVVVGLLFGGLLPFLFGGMSMMAVGRAAQAVVEEVRRQFREKPGIMTYDEKPDYGRAVDILTSAAIKEMIVPSLLPVLSPIVPVLCDLGYCWTHLLHLRTVGAMLLGVIVTGLFVAISNDSVGGAWDNA

SEQ ID NO: 36179 - protein, 477 aa, Vitis labrusca
MSHKGLDYETLNENVKKVQYAVRGELYLRASELQKEGKKIIFTNVGNPHALGQKPLTFPRQVVALCQAPFLLDDPNVGLVFPADAIARAKHYLSLTTGGLGAYSDSRGLPGIRKEVAEFIGRRDGYPSDPELIFLTDGASKGVMQILNTIIRGERDGILVPVPQYPLYSAAISLYGGSLVPYYLEETANWGLDVNNLHSSVAAARSKGITVRAMVIINPGNPTGQCLSEANLKEILHFCNQENLVLLGDEVYQQNIYQDERPFISARKALMDMGPPISKELQLVSFHTVSKGYWGECGQRGGYFEMTNIPPQTVDEIYKVASISLSPNVPGQIFLGVMVNPPTPGDISYLQFMRESKGILESLRRRAQIMTDGFNSCRNVVCNFTEGAMYSFPQIRLPPKAIEAAKKAGKVADVFYCLKLLEATGISTVPGSGFGQKEGVFHLRTTILPAEEDMPAIMESFKKFNDEFMEQYEDHRG

SEQ ID NO: 36180 - protein, 373 aa, Arabidopsis thaliana
PRVREQQKKNQSEQWSQTETRPNNQAVSYNGREQRKGEDGYNWRKYGQKQVKGSENPRSYYKCTFPNCPTKKKVERSLEGQITEIVYKGSHNHPKPQSTRRSSSSSSTFHSAVYNASLDHNRQASSDQPNSNNSFHQSDSFGMQQEDNTTSDSVGDDEFEQGSSIVSRDEEDCGSEPEAKRWKGDNETNGGNGGGSKTVREPRIVVQTTSDIDILDDGYRWRKYGQKVVKGNPNPRSYYKCTTIGCPVRKHVERASHDMRAVITTYEGKHNHDVPAARGSGYATNRAPQDSSSVPIRPAAIAGHSNYTTSSQAPYTLQMLHNNNTNTGPFGYAMNNNNNNSNLQTQQNFVGGGFSRAKEEPNEETSFFDSFMP

SEQ ID NO: 36181 - protein, 405 aa, Oryza sativa
MGFLCRRRSSAAPAESFSLLCEEDSESVFGSDDDGVEETATMAPELGKMMSLGFSASHHLGDGGGGGEELVGSFMEKEVEQMVETARGEYLTKLSNGGIELSCRIAAIDWICKVQAYYSFGPLCAYLAVNYLDRFLSSVEFSVTNDMPWMQQLLIVACLSLAAKMEETAAPGTLDLQVCNPEYVFDAETIHRMEIIVLTTLKWRMQAVTPFTYIGHFLDKINEGNRITSELISRCTEIILSTMKATVFLRFRPSEIATAVALSVVADGGRVLDFGGVLESSKLPVDKDNVGRCHQAMQEMALVMQNSTASPSDSLCYDMTNPVLDCHILRRRECVSLQSGPRDELEMGWAPFAITVSEKEESERRCDDGWRRGGEAAQYCEQADEQRRSTDGRAGVRLEEQAGGE

SEQ ID NO: 36182 - protein, 484 aa, Vitis vinifera
MSHKGLDYETLNENVKKVQYAVRGELYLRASELQKEGKKIIFTNVGNPHALGQKPLTFPRQVVALCQAPFLLDDPNVGLVFPADAIARAKHYLSLTSGGLGAYSDSRGLPGIRKEVAEFIGRRDGYPSDPELIFLTDGASKGVMQILNTIIRGERDGILVPVPQYPLYSAAISLFGGSLVPYYLEETANWGLDVNNLHSSVAAARSKGITVRAMVIINPGNPTGQCLSEANLKEILHFCYQENLVLLGDEVYQQNIYQDERPFISARKVLMDMGPPISKELQLVSFHTVSKGYWGECGQRGGYFEMTNIPPQTVDEIYKVASISLSPNVPGQIFLGVMVNPPTPGDISYLQFMRESKGILESLRRRAQIMTDGFNSCRNVVCNFTEGAMYSFPQIRLPPKAIEAAKKAGKVADVFYCLKLLEATGISTVPGSGFGQKEGVFHLRTTILPAEEEMPAIMESFKKFNDEFMEQYEDHRGYSRMKNH

SEQ ID NO: 36183 - protein, 286 aa, Populus tomentosa
MALPVVDTEYLKEIEKARRDLRALIAYKNCAPIMLRLAWHDAGTYDKNTKTGGANGSIRNEEECSHGSNNGLKIAIDFCEEVKVKHPKITYADLYQLAGVVAVEVTGGPTIDFVPGRRDSNTCPKEGRLPNAKLGSPHLRDIFYRMGLSDKDIVALSGGHTLGRAHPERSGFDGPWTQEPLKFDNSYFVELLKGQTEGLLKLPTDNALLDDPDFRPYVELYGKDEEAFFRDYAASHKKLSELGFTPRSSVVKVKDSTVLAQSAVGVAVAAAVVILGYLYEVRKKMN

SEQ ID NO: 36184 - protein, 449 aa, Lactobacillus gasseri
MDEKEKLKLKRSLKSRHVTMIAIGGAIGTGLFLGSGTAIQSAGPSIILSYLIVGIISFFMMRALGELILAEPDQHSFIESVKKYLGNRMEFVAGWTYWLCWLSLAMADLTATGIYLKYWFKDLPQWVGPLVIVVLLMLVNMVNVGLFGELESWFSMIKVLAILALIVTGLILLVMHSKIDSRTVSLSNLINYGGFFPTGSWGFLKSFQMVVFAFVGIEIVGLTAGETANPDKDIPKAINTLPVRIGLFYVGSMIAIMAVYPWNKIVTTTSPFVQVFGAIGIPAAAGILNFVVLTAAMSATNSAIFSTSRSLYALSRGNNAPKRFGKLSRKAVPNNALTFSSLILFIVVILNYIMPAQVFDIISSVSTINFIMVWIIIMWTHLKYRAENKGKLGSFRMPGFPITSWVTIIFYLVILIILALIPATRLPLLISIIFILALALSYTLLERKN

SEQ ID NO: 36185 - protein, 780 aa, Frankia sp. EAN1pec
MVEPILAIDYGTYSASAALVVDGKVATVREPASGAAGWPASVFADGEVLVVGTLAERRKRIWPAAYRGGVKRDLTRNAAVTLDGRAHQPAALVTAVLAALRAEAEVQLAGEALRRAVVTVPASYDPAGPLRRTMIRAAEEAGFVDVDLLAEPVAAAWAPMGPAGPQPGNLVLVYDLGGGTFEAALVVVGEDGRHELLGHASLHDCGGRDFDQLLFDEILGHYGPGLEPLLNPTGVGEVFQTAASRTRHELLDFARAVKHQLTDVAFVEDVFSPAGLLVSLERDRFDKLASPTLARTMACCQHLLESTGISPEQLDGVLPVGGSSRMPVVTEILAGRLGVGTDWPHQHVFTAPEPDQAVVLGAASWAATVSTRRTVAARPDPVVRPARWDIPGGRATMVRWLVEPGARFDAGAVLARVRLTDGALFDLASEGPGSLVETHAEPGSAVRDVDWLATTLPSGPAPAGSARPADLRGFERSNRPSRNVEVTTRVALTGHERDVTSAAFSPDGRLLATTSKDGTRLWDTTTGRTVGRLSGRKISAVHGCAFSPDGDLLATTGSDKTARIWEIATERLALTLAGHKGPVYGCAFSPDGRLLATVSTDRTVKLWGVSTGTNIATLTGHRGSVYGCAFSPDGRLLVTAGAESTLLWDVTIGETITSLAGHTNFANGCSFSPDGLLLATTSNDGTRLTDTPTGTTTLTLPGSAQSCAFSPDGVLLATASTDDTARLWDVATGTAVATLTGHSSTVMACAFAPYGLLLATTSTDKTARLWDITYTPDSAR

SEQ ID NO: 36186 - protein, 452 aa, Pyrobaculum aerophilum str. IM2
MKVVVVGGGPAGYVAAIRARQLGLDVTLVEAERLGGECTNYACIPSKALLHAAEAYRRAVSSPWITGTVSFRWKEAVQWKEKVVEKLRRGIEFLLSAAGVEVVRGLAKPGPGKTVEIDGRRLQYDFLILATGSEPVGLKELPFGRRVIGTREIFSLEEPPASVAIIGGGASGVEIASLFSMIGAEVHVVEAMERILPGLDPEISRQMERALSSRGVKIYTSSRVVKGEEGEGSVKLRISSPGGEREIEAELAVVAVGRRPRPGPFSAMGLEVDGRGAVRVDESMRTSVPWVFAAGDVTGPPYFAHKAYAQAKVAAEAIAGLKSAYSPRSVPAVIFSDPEVVSVGMTEEEAVAKGYRPKAVRMSLSALGKAVAAESEGGFAKLIYDAESRIILGVHIVGRGVSELAGEASALVEFYATVDDLALTIHPHPTLSELFAELAEAALGKPVHIAKL

SEQ ID NO: 36187 - protein, 433 aa, Brucella suis 1330
MLITGRNKQTALVASLPALFALAGTAMAQDTAPAPTLDTGDTAWMLTSTALVLMMTIPGLALFYGGMVRKKNVLSTVMQSFAITCLMSILWMIAGYSLAFTDGGSLHSYIGGFSKVFFSGVTMESLTGTIPEYLFITFQMTFAIITPALITGSFAERMKFSSMLVFLTLWLFIVYVPVAHWVWGGGFMASDGVLDFAGGTVVHINAGVAGLVAALVIGKRDGYGHTNMAPHNLVLSVIGAALLWVGWFGFNAGSAAGANALAGVAMLNTQVATAGAALAWMFVEWAISGKPSVLGIISGAVAGLVAVTPAAGFVNPTGALIIGIVAGAVCYVAAVKIKHVLGYDDSLDAFGVHGVGGFVGAVLTGFFADATINPASEGATIGKQFFGAAITIIYTAIATVIILYVVKAIMGLRPGKQAEIEGLDIALHGEAVQ

SEQ ID NO: 36188 - protein, 262 aa, Bacillus anthracis str. A2012
LVRLGVFKVEEGPELVEAVKSAIKAGYRSIDTAAIYGNEKAVGEGIRAGIEATGISREDLFITSKVWNADQGYEETIAAYEESLKKLELDYLDLYLVHWPVEGKYKDTWRALETLYKEKRVRAIGVSNFQVHHLQDVMKDAEIKPMINQVEYHPRLTQKEVQAFCKEQGIQMEAWSPLMQGQLLDNETLQEIAEKHGKTTAQVILRWDLQNGVITIPKSTKEHRIIANADVFNFELTKEDMEKIDALNQNHRVGPDPDNFDF

SEQ ID NO: 36189 - protein, 178 aa, Triticum aestivum
MSLIRRSNVFDPFSLDFFDPFDGFPFGSGSNSSGSLIPRTSSDTAAFAGARIDWKETPEAHVFKADVPGLKKEEVKVEVEDGNILQISGERNKEQEEKTDTWHRVERSSGKFLRRFRLPENAKAEQVKASMENGVLTVTVPKVEAKKPEVKSIQISGQSDEVECRAVAWSLAPVVVIK

SEQ ID NO: 36190 - protein, 210 aa, Phaeodactylum tricornutum
AGGIAEMAECEPEVRERTDKLDAVGNTTAAIGKGFAIASAALTALALFSAFMKVANVSSIDVSQPKIMAGLLVGAMLPFVFSALSMNAVGRAAMAMIEEVRRQFRDIPQLKAALEVMRAVDSDMSKATPAQREIFDAADGYAEYDKCVDISTKASIREMVLPGLLAIVVPVAVGFIGGAEMLGGLLAGVTSAGVLMAIFQSNAGGAWDNA

SEQ ID NO: 36191 - protein, 587 aa, Streptomyces avermitilis MA-4680
MHPCSPRLVGVPAPDRFGVLMGTQWNAVDGRIRTTARGHAVLNSPRLNRGTAFTRQERQELGLVGLVPPQVLTQDQQAARAYTQFRSQPNDLAKNVYLTALRDRNEVLFHRLLGDHLAEMLPIVYTPTVGTAIERYSYEYRRPRGVYLSVDAPEDIERTLRASGLGADDVDLIVATDGEAILGIGDWGVGGIDIAVGKLAVYTAAAGVDPARTLAVMLDVGTNRQELLDDPLYLGNRHPRVDRESYDAFIDAYVTAATELFPDALLHWEDFGPANARRILDRYREKVRTFNDDIQGTGAVNLAAVLSGVRAGGVPLRDHRVVLFGAGTAGIGIADQLRDALIADGLTPQEATDRIWAVDRHGLLAEDQQGLHDFQLRYVRRGAEIAGWRRDDALGGVPLAEVVDRVRPSVLIGASGQGGAFTEDIVRAMAAHTDRPIILPMSNPTRLAEAVPADLLTWTDGQALIATGSPFDPVEVDGVTHHIGQANNALVFPGLGLGAVVARAERITDGMLVASARAVAEQTDATAPGVPVLPLIDRLRDTSAAVAVAVARAAVEDGVARETVDDAVEERVRAAMWQPEYPPIEAV

SEQ ID NO: 36192 - protein, 76 aa, Brassica napus
MEQGGRGSGGGEQGKYRGVRRRPWGKYAAEIRDSRKHGERVWLGTFDTAEEAARAYDPAAYSMRGQAAPTRPRTRG

SEQ ID NO: 36193 - protein, 284 aa, Archaeoglobus fulgidus DSM 4304
MFSAHAPALVDYIYLIDRYPQRGGHSIILSTRKSPGGAGANVAHNLASLGVESTLFTTLGRDEDGIYFVENTLAKVKAEITDEKTGKVHVFVDGEGERTFFVEPNAAGKPFVEVDGGDYLYLDPFPSEHSFEVQRKEAERFDGFVILNPGFPYSSLGFERLKQILQHVDMLIMSADEFSLLGVETADVLRFVDYLIVTQGKLGSACYTKKGSFQSPAFPAKVADTTGAGDAFAAGFIYGFIKNYPLEVCLTLGNFCGAYNVERVGARNFPSKSTIDEFLARVLR

SEQ ID NO: 36194 - protein, 417 aa, Glycine max
MGSSDMDKTPKEKESKTPPATSQEQSSTTAMPTTNPDWSNFQTYSPIPPHGFLASSPQAHPYMWGVQHYMPPYGTPPHPYVAMYPHGGIYAHPSIPPGSYPFSPFAMASPNGIADASGNAPGRIEVGGKPPEVKEKLPIKRSKGSASGGNLNMWITGKNNEPGKIPGESANGIHSKSGESASDGTSEGSDENSQNDSQLKSRERQDSFEDEPSQNGSSVHAPQNGVHNRPQTVVNQTMSILPISTTSAPGAVPGPTTNLNIGMDYWGTPTSSTIPALHGKVPSTAVAGGMIAAGSRDGVQSQVWLQDERELKRQRRKQSNRESARRSRLRKQAECDELAQRAEALKEENATLRSEVSQIRSEYEQLRSENAALKERLGDIPGVATPGKEDLRSGQNDQHVSNDTQQSGQTEVVQGVH

SEQ ID NO: 36195 - protein, 146 aa, Arabidopsis thaliana
STCIFQANGMLCDEETCFSCNSIKETRSQIVRGTILIPCRTAMRGSFPLNGTYFQVNEVFADHASSLNPINVPRELIWELPRRTVYFGTSVPTIFKGLSTEKIQACFWKGYVCVRGFDRKTRGPKPLIARLHFPASKLKGQQANLA

SEQ ID NO: 36196 - protein, 158 aa, Brassica napus
KIPKKEEPLPNLGLFELVRIPNVSVWYWTAPTDFVSFGEMLIDFVPTESGVSLAEAPGFLKAPGGTPAIVAIAVSRLGGRSAFVRKLGDDEFGHMLAGILRKNGVADQGINFDTGARTALAFVTLKANGDREFMFYRNHSADMLLRPDELNLELIRSL

SEQ ID NO: 36197 - protein, 475 aa, Mycoplasma pulmonis UAB CTIP
MYSIKKKSKLIATIGPSSDNYEVLKELVENGVTCVRANFSHGDYQEQKRKFDLAKKVSHDLNTPLSLMLDTKGPEIRIGKMKDGVQKIEANQSLKIWVSEEKYKNLLGTSEDISVSYNMSQDLKKGNQVLLDDGKLDTIVEKVTPEYVQVRALNSHNLKTNKRINLPGVAFSLPFLSEKDKKDIAFGVENDINYVAASFVNSKENVLELRAILKSLNAEHVQIISKIESTLGIENIDEIIEHSDGIMIARGDLGLEIPYYEVPYWQKTIIRKCRNVGKVVIVATQMLDSMEHNTNPTRAEVTDVYFATELGADTTMLSGETAQGSFPVEAVKVMSKINQRAEKEFYSKLYYNAQLESNAKLATTKRAKIAYEVAKQTQSGDFKYTVVLSASGNLLKKVANFRPNTSIIGFVEDKKLINAFGIVSSVFVSLESVQKYFELKNNPLAAISTLKNYDARPGDRFLIVHNEKITQHVVE

SEQ ID NO: 36198 - protein, 129 aa, Zea mays
MGRLFLMHLDGNVYSCKHCRTHLGVASDIISKAFHCRHGKAYLFHKVANATSGVKEDRMMMTGMHTVSDIFCVGCGSIVGWKYEAAHEKSQRYKEGKFILERYKVSGPDGSQYWIPQDPHLGGSDADDI

SEQ ID NO: 36199 - protein, 351 aa, Glycine max
  misc_feature (197)..(197): Xaa can be any naturally occurring amino acid
  unsure (1)..(351): unsure at all Xaa locations
MPSQSVLVTGGAGYIGSHTVLQLLLSGYHVFAVDNFDNSSETAINRVKELAGEFANNLSFSKLDLRDRAALEKIFSTNKFDAVIHFAGLKAVGESVDKPLLYFDNNLIGTIVLFEVMAAHGCKKLVFSSSATVYGWPKEVPCTEEFPLSATNPYGRTKLIIEEICRDIYRADSDWKVILLRYFNPVGAHPSGYIGEXIPRGIPNNLMPFVQQVAVGRRPALTVFGNDYKTTDGTGVRDYIHVLDLADGHIAALRKLNDPKIGCEVYNLGTGKGTSVLEMVNAFEQASGKKIPLAMAGRRPGDAEIVYASTEKAERELNWKTKYSIDDMCRDQWNWASKNPYGYGASADSSN

SEQ ID NO: 36200 - protein, 714 aa, Botryotinia fuckeliana
MYLATVLSLVGLVTAQCPYGMDKQPQKREPKDSQTSSSNFLDQFTLNDTNTYFTTDAGGPIQEDTSLKAGARGPTLLEDFIFRQKIQHFDHERVPERAVHARGAGAHGIFTSYGNYSNITAASFLNQEGKETPVFVRFSTVAESRGSADTARDVHGFATRFYTDEGNFDIVGNNIPVFFIQDAILFPDLIHAVKPSPDNEIPQAATAHDSAWDFFSQQPSSLHTLFWAMAGNGIPRSFRHMDGFGIHTFRLVTDSGTSKLVKWHWKSKQGKASLVWEEAQVLAGKNADFHRKDLWDAIESGNGPEWELGIQIVEEEDVLKFGFDLLDPTKILPEELVPVQKIGVMRLNANPRNYFAETEQVMFQPGHIVRGIDFTDDPLLQGRIFSYLDTQLNRHGGPNFEQLPINRPIVPVHNNNRDGAAHNYIPLNTAAYSPNTLNDAAPKQANQTVGRGFFTAPGRTVSGHLVREVSSTFSDVWSQPRLFYNSLIPVEQQFLINAIRFETSQLTSSVVKSNVLIQLNRVSHDLAARVASVLNLPVPEADNTYYNDNKTSSITIFGNELPTIATLNVGVLVSVKNNATLTQAANLATSFSTSGVNVKVIGEILTNGVDATYSASDATLFDGIIVTDGAENLFTNGSKSTYFPADRPRQILLDAYNWGKPVGTLGNARTSLNVASISTTPGVYSNSTSVSGLVKEFEAGLKTFRFVDRFALDD

SEQ ID NO: 36201 - protein, 462 aa, Mesorhizobium sp. BNC1
MATPTDLVAASFRPPAPSPRQTPPSTLQMMRIVYRNPLELWGEPSYNEPWVQLTGGIGGPLLIANDPGLIRHVLVDNARNYKMARVRQKILRPILRDGLLTAEGEVWRRSRKAMAPVFTPRHISGFAGPMLQKAEAFAERYEQAIGGTVDVSRDMTMLTFDILSETLFSGEVAGDPGGFAHQVDRLFETMGRVDPLDLLGAPDWLPRITRILGRNSLAFFRNIVARTMEMRKEKLAGGDAEVPEDFLTLLLRAEGPQGLSRGEIEDNIITFIGAGHETTARALGWTLYCLANLPEERERIEAEIDSVLSSEPDPVKWLDAMPLTRAAFEEAMRLYPPAPSINREAIENDSYSDLKIAAGTQVLVMPWTVHRHRKLWDDPDAYRPSRFHPENREKINRFQYLPFGAGPRVCIGATFAMQEAVIALAVLMSRYRFDLLPETKPWPVQKLTTQPQGGLPMGVSRR

SEQ ID NO: 36202 - protein, 561 aa, Botryotinia fuckeliana
MKNSFFSSLAKFASLSLAFALPTAEVIPSALEERQSCANTATTRSCWGQYSASTNSYTTVPKTGYWLVVQNTTLSADGVSRPTLNFNGTIPGPQITADWGDDVIVHVTNKLTSNGTSIHWHGIRQLNNAQYDGVPGITQCPIAPGGTLTYKFHADNYGSSWYHSHFILQYGDGLFGPLVINGPATANYDVDLGMLFLNDWNHVPVQSLWDKAKTGAPPTLLTGLMNGTNTYNGAGKKFQTTFTPGLKYRIRVVNTAVDGHFQFSIDGHSFQVIAMDFVPIVPYNATSILVSIAQRYDIIVTANAAVGNYWIRAGWQTACSGNTNAANITGILRYTGSSSTADPTTTSTVTASTSCLDEPLASLVPFVPINPVASSIMKTTLTTGGGQWLFNGSSLLLNWTDPTLLTVLNSGNIWPTEYNVIPIESTTANKGWAVLAISGPNGPNHPIHLHGHDFWTLSQGTGAYTATTALNLVNPPRRDVMTLPTGGHLVIAFQIDNPGSWLMHCHIAWHASEGLALQFVESESSILPTIGTADVSTFQNTCAAWKAWTPTEPFPQDDSGI

SEQ ID NO: 36203 - protein, 581 aa, Botryotinia fuckeliana
MKYSTVFTALTALFAQASATAIPAVRSPLAPRQSTTASCANSATSRSCWGEYSIDTNWYDVTPNTGVTREYWLSVENSTITPDGYTRSAMTFNGTVPGPAITADWGDNLIIHVTNNLQHNGTSIHWHGIRQLGSLEYDGVPGVTQCPIAPGDTLTYKFQATQYGTTWYHSHFSLQYADGLFGPLIINGPATADYDEDVGAIFLQDWAHKSVFEIWDSARQGAPPALENTLMNGTNIYDCSASTDANCVGGGKKFELTFVEGTKYRLRLINVGIDSHFEFAIDNHTLTVIANDLVPIVPYTTDTLLIGIGQRYDVIVEANAAADNYWIRGNWGTTCSSNSEAANATGILRYDSSSTVDPTSVGVTPRGTCADEPVASLVPHLALDVGGYSLVDEQVSFAFTNYFTWTINSSSLLLDWSSPTTLKIFNNETIFPTDYNVVALNQTDANEEWVVYVIEDLTGFGIWHPIHLHGHDFYVVAQETDVFSATKSPANFNLVNPPRRDVAALPGNGYLAIAFKLDNPGSWLLHCHIAWHASEGLAMQFVESQSSIAIGMSDTDIFEDTCANWNAYTPTELFAEDDSGI

SEQ ID NO: 36204 - protein, 60 aa, Pirellula sp. 1
MSFIRLLLVFFLPPVAVYMQFGVGHYFWISVILTLLGFVPGLLYSLYIMAARPPGLSRLS

SEQ ID NO: 36205 - protein, 342 aa, Candida albicans SC5314
MTTGTSKPKVLLVGEFIYSKQKWSELEEIAEVIQSESTTREQFIQDLKTKYNDITCIARTFYSINETGRFDADLAQHMPKTLKSVSHCGAGYDQVDVEPFTRLGVQVSNVTEPVERPTADVAVFLVLACMRNFLQGRQILMNGEWPSNGDKEAAGAPLGHTPQGKVVGILGMGGIGRAIRDRLKPFGFDGIVYYNRKQLSPELEKGAEYVTMDELFKQSDVIIIGVPLNAKTRHLIDKEAIQKMKDGVVLVNIARGAIIDEKHLPELIKSGKIGAFGADVFEHEPEVSAELVNLPNVVALPHMGTHSVEALTNMEEWVVCNVETFIKTGKLKTIVPEQQGIF

SEQ ID NO: 36206 - protein, 427 aa, Streptococcus thermophilus LMG 18311
MILFNIKIISFDWSGFMDTGSTAFILICSAMVCLMTPALAFFYGGLGRRKNVINTMMMSVLPLAIASLLWVVAGYSLSFGGQGYFFGNISHLFLHGVSETTSSRGLAITDLLFSAFQMMFSIICVAILTGSVVGRMRFTPLVIFIVFWLLLVYYPFAHMVWGDGILVKWGTIDFAGGDVVHITSGVSALVLAIVVGKRRDYGILEHRPHNVPFVLLGASLLWFGWFGFNAGSALAPNGLAVHALVTTHFSAAAAMFSWLALEKYVTGHPTLVGASTGLVAGLVAITPGAGFVSIWSSILIGAMVSPVCFYAISVLKKRTNYDDALDVFGCHGVGGIFGGLCTAVFTTPNLALDKANFGLIYGNARLFVVTVLAIVFTVTWSGLVTYGIIKVIGHYIPLRVSDRDEAIGLDDCEHKETAYPTFMGMDS

SEQ ID NO: 36207 - protein, 547 aa, Pasteurella multocida subsp. multocida str. Pm70
MAAKDVKFGNDARVKMLAGVNILADAVKVTLGPKGRNVVLDKSFGAPTITKDGVSVAREIELEDKFENMGAQMVKEVASKANDAAGDGTTTATVLAQAIVNEGLKAVAAGMNPMDLKRGIDKAVTAVVTELKALSKPCETSKEIEQVGTISANSDSIVGQIIAQAMDKVGKEGVITVEDGTGLEDELAVVEGMQFDRGYLSPYFINKPETATVELDNPFILLVDKKVSNIRELLPVLEGVAKAGKPLLIIAEDVEGEALATLVVNTMRGIVKVAAVKAPGFGDRRKAMLQDIAILTAGTVISEEIGMELEKATLEDLGQAKRVVINKDNTTIIDGIGDEAQIQGRVAQIRQQIEESTSDYDKEKLQERVAKLAGGVAVIKVGAATEVEMKEKKARVEDALHATRAAVEEGIVAGGGVALIRAASKVAGLQGDNEEQNVGIKLALRAMEAPLRQIVANAGEEASIVASAVKNGEGNFGYNAGTEQYGDMIEMGILDPTKVTRSALQFAASVAGLMITTECMVTDLPKEDKADLGAAGMGGMGGMGGMM

SEQ ID NO: 36208 - protein, 545 aa, Nostoc punctiforme PCC 73102
MTKFIFVTGGVVSSIGKGIVAASLGRLLKSRGYSVSILKLDPYINIDPGTMSPFQHGEVFVTQDGAETDLDLGHYERFTDTSMSRLNCVTTGSIYQAVINKERRGDYNGGTVQVIPHITNEIKERILRVAKSTNPSVVITEIGGTVGDIESLPFLEAIRQFRKEVGRQHVLYMHVTLVPWIASAGEMKTKPTQHSVKELRSIGIQPDILVCRSDRPLPKGLKQKLSGFCDVPEECVITSQDAKSIYEVPLNLEREGMAEQVLNLLQMEQRQPDLTQWQTLVQRLHTPKHELEIAIVGKYVQLSDAYLSVVEALNHAAISTYGKLRLRWVNSEDLENESAETHLGGVDGVVVPGGFGVRGVDGKIAAIKYARDRQIPFLGLCLGMQCSVIEWARNIGGLTDANSAEFDPHTTNPVINLLPGQQEVVDLGGTMRLGLYPCRVLPDTLAFKLYQEDVIYERHRHRYEFNNAYRDLLLKSGYAISGTSPDGQLVEIVELPKHPFFLACQFHPEFQSRPSSPHPLFKGFIQAAIALSLSTSTTPTPLEVS

SEQ ID NO: 36209 - protein, 613 aa, Brucella suis 1330
MASAVNNAAPAAASKYTYVDYKFDVVVVGAGGAGLRATLGMAEQGLKTACITKVFPTRSHTVAAQGGIAASLKNMGPDSWQWHMYDTVKGSDWLGDTDAMEYLTREAPAAVYELEHYGVPFSRTEEGKIYQRPFGGHMQNFGDGPPVQRTCAAADRTGHAILHTLYGQSLKNNAQFFIEYFALDLIMTDGVCTGVVAWNLDDGTIHRFSAKMVVLATGGYGRAYFSATSAHTCTGDGGGMVARAGLPLQDMEFVQFHPTGIYGAGCLITEGARGEGGYLVNSEGERFMERYAPSAKDLASRDVVSRCMTMEIRAGRGVGKNKDHIYLHLDHLDPAVLHERLPGISESAKIFAGVDVTKEPIPVLPTVHYNMGGIPTNYWGEVLNPTKEDPDRVQPGLMAVGEAGCASVHGANRLGSNSLIDLVVFGRAAAIRAGQVIDRKSKIPDIDIAACDKIMERFDRLRFANGSTPTAVLREKMQRTMQEDAAVFRTEESLKQGVERMEKLWHELPDIKVTDRSMIWNSDLVETLELENLMANALTTVVSAEARQESRGAHAREDFPDRNDAEWRKHTLSRLSPDGKVTLDYRSVHLDPLTTEEEGGISLAKIAPKKRVY

SEQ ID NO: 36210 - protein, 237 aa, Zea mays
  misc_feature (224)..(224): Xaa can be any naturally occurring amino acid
  unsure (1)..(237): unsure at all Xaa locations
MLAVFSGEVVEVPAELVAAGSRTPSAKTKASELVARFLGTSCPAAVSVRLADLGHLAYSHANQALLRPRSFAAKDEVFCLFEGVLDNLGRLSQQYGLSKGANEVLLVIEAYKALRDRAPYPASLMLAQLAGAYAFVLFDASTNSLLVASGGDVPLFWGVTADGCVAFSDDIDVLKGSCGKSLAPFPQGCFYSNALGGLKCYENPKNKVTAVPANEEEICGAPFXWKELRCSQRCIRR

SEQ ID NO: 36211 - protein, 416 aa, Thermotoga maritima MSB8
MPEKSLYEMAVEQFNRAASLMDLESDLAEVLRRPKRVLIVEFPVRMDDGHVEVFTGYRVQHNVARGPAKGGIRYHPDVTLDEVKALAFWMTWKTAVMNLPFGGGKGGVRVDPKKLSRNELERLSRRFFSEIQVIIGPYNDIPAPDVNTNADVMAWYMDTYSMNVGHTVLGIVTGKPVELGGSKGREEATGRGVKVCAGLAMDVLGIDPKKATVAVQGFGNVGQFAALLISQELGSKVVAVSDSRGGIYNPEGFDVEELIRYKKEHGTVVTYPKGERITNEELLELDVDILVPAALEGAIHAGNAERIKAKAVVEGANGPTTPEADEILSRRGILVVPDILANAGGVTVSYFEWVQDLQSFFWDLDQVRNALEKMMKGAFNDVMKVKEKYNVDMRTAAYILAIDRVAYATKKRGIYP

SEQ ID NO: 36212 - protein, 805 aa, Solanum tuberosum
MAERVLTRVHSLRERVDATLAAHRNEILLFLSRIESHGKGILKPHELLAEFDAIRQDDKNKLNEHAFEELLKSTQEAIVLPPWVALAIRLRPGVWEYIRVNVNALVVEELSVPEYLQFKEELVDGASNGNFVLELDFEPFTASFPKPTLTKSIGNGVEFLNRHLSAKMFHDKESMTPLLEFLRAHHYKGKTMMLNDRIQNSNTLQNVLRKAEEYLIMLPPDTPYFEFEHKFQEIGLEKGWGDTAERVLEMVCMLLDLLEAPDSCTLEKFLGRIPMVFNVVILSPHGYFAQENVLGYPDTGGQVVYILDQVPALEREMLKRIKEQGLDIIPRILIVTRLLPDAVGTTCGQRIEKVYGAEHSHILRVPFRTEKGIVRKWISRFEVWPYMETFIEDVAKEISAELQAKPDLIIGNYSEGNLAASLLAHKLGVTQCTIAHALEKTKYPDSDIYWKKFDEKYHFSSQFTADLIAMNHTDFIITSTFQEIAGSKDTVGQYESHMAFTMPGLYRVVHGINVFDPKFNIVSPGADINLYFSYSETEKRLTAFHPEIDELLYSDVENDEHLCVLKDRTKPILFTMARLDRVKNLTGLVEWYAKNPRLRGLVNLVVVGGDRRKESKDLEEQAEMKKMYELIETHNLNGQFRWISSQMNRVRNGELYRYIADTKGAFVQPAFYEAFGLTVVEAMTCGLPTFATNHGGPAEIIVHGKSGFHIDPYHGEQAADLLADFFEKCKREPSHWETISTGGLKRIQEKYTWQIYSERLLTLAAVYGFWKHVSKLDRLEIRRYLEMFYALKYRKMAEAVPLAAE

SEQ ID NO: 36213 - protein, 342 aa, Escherichia coli O157:H7
MERIMRVLVTGGSGYIGSHTCVQLLQNGHDVIILDNLCNSKRSVLPVIERLGGKHPTFVEGDIRNEALMTEILHDHAIDTVIHFAGLKAVGESVQKPLEYYDNNVNGTLRLISAMRAANVKNFIFSSSATVYGDQPKIPYVESFPTGTPQSPYGKSKLMVEQILTDLQKAQPDWSIALLRYFNPVGAHPSGDMGEDPQGIPNNLMPYIAQVAVGRRDSLAIFGNDYPTEDGTGVRDYIHVMDLADGHVVAMEKLANKPGVHIYNLGAGVGSSVLDVVNAFSKACGKPVNYHFAPRREGDLPAYWADASKADRELNWRVTRTLDEMAQDTWHWQSRHPQGYPD

SEQ ID NO: 36214 - protein, 181 aa, Gluconobacter oxydans 621H
MTTQQSSILLGAGCFWCVEAVFSGLRGIISAEPGYAGGSVDNPSYEAVCTGRTGHAEVVKVVFDPAEIGLEDVLRVFFTTHDPTQLNRQGNDVGTQYRSVIFGDATQQETARRVRAEIESEGIWPDPIVTSIEGPAHFWPAEEKHHDYFARNPQTAYCAAVVAPKVAKARKLYRDRLKQPD

SEQ ID NO: 36215 - protein, 301 aa, Deinococcus radiodurans R1
MAHPFRAYSPADFHFPLPEGHRFPYYKYEGVRARLTGLLPILPTPQLRWADAGRAHDPLWLRRWRRGEVDRREQREFGLPWSPEVVTRALRAAGGSLAALHDAQSTGWGANLAGGTHHAFHDRAEGFCLVNDAAILTRIALDRGLARRVATLDLDVHQGNGTASLLTPEMAAGTAFTLSIHGERNYPFRKERSSLDLGLGDGVTDAEYLAVLTGQALPALDAYRPDLLLYLAGADVLAGDRFGRFALTLSGVSARNRAVFRWAQAAGVPIVTMMAGGYNSDHALTVEAHASVVLDGLDVLG

SEQ ID NO: 36216 - protein, 786 aa, Mesorhizobium loti MAFF303099
MLGLRMPEYSSFIRFVRVRYLSGLLIFALASTAIMVALNRVNSFRHEIDALSSNLVVFTRDLRNATSFAETTGSAWRNETRDALTASARDHSERLTSEIDTLSAQFAALRSRLSAKTLNELETASVNGDLFWSAHDMVRNFNLMSVAQKADEWSYREIRNQNDLFVQPMLVRVRTAMDEERHLADASSDRLLLWASGLLFGVLAIVAFWIFRPMEQAIRRAFAQSAESLFKAEAADRAKSEFLANMSHEIRTPMNGVLGMAELLAKTELTPRQKTFTDVIVKSGNALLTIINDILDFSKINAGQLTLDPAPFRLTEAVEDVATLVSARVAEKNLELIVRVDPRLPAHVVGDAGRFRQIVTNLVGNAVKFTEKGHVLIDVGGETVNDVVQLRLRVEDTGIGIPAEKLQNVFEKFAQVDGSSTRRHEGTGLGLAIAARLVDLMAGKIGVESEIGRGSVFWFAVPLPVHHAEAREAIVPVDVTGARVLVIDDNPVNREILLEQLRSWSFDCAAAESGAVGLAFLDRACQLGASVDCIILDYQMPGMNGADVARAIAADSRLSAIPIVILTSVDQVDFGKMIIDFGISAHLTKPARSAVLLGTVISVIQKARSQGGKAQFIREPVQPKPVPQAAPPAFTVIRGPAVPVMAVPESTAMPNGPIDILIAEDNEVNQLVFGQILNGLGLSYRIAGNGRTAVEMYRSLHPKLILMDVSMPEMNGYEATRAIRAIETSSGGHIPIIGVTAHALKGDRDKCIEAGMDDYLPKPVSPDRLGTKIGTWLSETVVAKTA

SEQ ID NO: 36217 - protein, 440 aa, Glycine max
MMGEKSNSNSGDAINSTLLHGKYELGRLLGHGSFAKVYHARHLNTGKSVAMKVVGKEKVVKVGMMEQIKREISAMNMVKHPNIVQLHEVMASKSKIYIAMELVRGGELFNKIARGRLREETARLYFQQLISAVDFCHSRGVFHRDLKPENLLLDDDGNLKVTDFGLSTFSEHLRHDGLLHTTCGTPAYVAPEVIGKRGYDGAKADIWSCGVILYVLLAGFLPFQDENLVALYKKIYRGDFKCPPWFSSEARRLITKLLDPNPNTRITISKIMDSSWFKKPVPKNLVGKKREELNLEEKIKHQEQEVSTTMNAFHIISLSEGFDLSPLFEEKKREEKELRFATTRPASSVISRLEDLAKAVKFDVKKSETKVRLQGQENGRKGKLAIAADLYAVTPSFLVVEVKKDNGDTLEYNQFCSKELRPALKDIVWRTSPAENPTLA

SEQ ID NO: 36218 - protein, 118 aa, Triticum aestivum
  misc_feature (83)..(83): Xaa can be any naturally occurring amino acid
  misc_feature (94)..(94): Xaa can be any naturally occurring amino acid
  misc_feature (99)..(99): Xaa can be any naturally occurring amino acid
  misc_feature (103)..(103): Xaa can be any naturally occurring amino acid
  misc_feature (107)..(107): Xaa can be any naturally occurring amino acid
  unsure (1)..(118): unsure at all Xaa locations
FERDDGIFTVLSERATALHKAFSQMEGVECAEPQGSMYLFPTINLPAKAAEAAKAEGRSADEFYCMRLLEATGICVVPGSGFXQKENTLHFRTXFLAPXTERXGRIXKFHNEFLDKYR

SEQ ID NO: 36219 - protein, 463 aa, Triticum aestivum
MSSSTGSLDHAGFTFTPPHFITSFTELLSGSGAGDAERSPRGFNRGGRAGAPKFKSAQPPSLPISSPFSCFSIPAGLSPAELLDSPVLLNYSHILASPTTGAIPARRYDWQASADLNTFQQDEPCRGDSGLFGFSFHAVKSNATVNAQANCLPLFKEQQQQQQQVVEVSNKSSSGGGNNKQVEDGYNWRKYGQKQVKGSENPRSYYKCTYNNCSMKKKVERSLADGRITQIVYKGAHDHPKPLSTRRNSSGCAAVVAEDHANGSEHSGPTPENSSVTFGDDEADNGLQLSDGAEPVTKRRKEHADNEGSSGGTGGCGKPVREPRLVVQTLSDIDILDDGFRWRKYGQKVVKGNPNPRSYYKCTTVGCPVRKHVERASHDNRAVITTYEGKHSHDVPVGRGRALPATSSSDSSGVIWPAAVPAPYTLEMLTNPAAGHRGYAAGGAFQRTKDEPRDDMFVESLLC

SEQ ID NO: 36220 - protein, 220 aa, Retama raetam
MGKSYPTVSGDYQKAVEKAKKKLRGFIAEKSCAPLILRLAWHSAGTFDVKTKTGGPFGTIKNPAELAHGANNGLDIAVRLLEPIKEQFPILSYADFYQLGGVVAVEITGGPEVPFHPGREDKPEPPPEGRLPDATKGSDHLRDVFGKAMGLSDQDIVALSGGHTIGAAHKERSGFEGPWTSNPLIFDNSYFTELLSGEKEGLLKLPSDTALLSDPVFALC

SEQ ID NO: 36221 - protein, 152 aa, Triticum aestivum
MSIVRRSNVFDPFADLWADPFDAFRSIVPAISGGSSSETAAFASARVDWKETPEAHVFKADLPGVKKEEVKVEVEDGNVLVVSGERSREKEDKNDKWHRVERSSGKFARRFRLPEDAKVEEVKAGLENGVLTVTVPKAHVKKPEVKAIEISG

SEQ ID NO: 36222 - protein, 201 aa, Glycine max
  misc_feature (19)..(19): Xaa can be any naturally occurring amino acid
  misc_feature (101)..(101): Xaa can be any naturally occurring amino acid
  misc_feature (106)..(106): Xaa can be any naturally occurring amino acid
  misc_feature (181)..(181): Xaa can be any naturally occurring amino acid
  misc_feature (187)..(187): Xaa can be any naturally occurring amino acid
  misc_feature (198)..(198): Xaa can be any naturally occurring amino acid
  unsure (1)..(201): unsure at all Xaa locations
CGSDVIELGVPYSDPLAGXPVIQASATRALAKGTTFEDVISMVKGVIPDLSCPVALFTYYNPILKRGVPNFMSIVKEAGVHGLVVPDVPLEETDVLRSEAXKNNLXLVLLTTPTTPNERMEKIAQASEGFIYLVSTVGVTGTCANVSGKVQSLLQDIKKVTEKPVAVGFGVSTPEHVRQIXGWGADXVIIGSAVMKTXEEA

SEQ ID NO: 36223 - protein, 452 aa, Oryza sativa (japonica cultivar-group)
MKEKDVMKIIPCKPGHINRMTRPKAPVVVCLVDYIHESPASALEKKHNFGRQVIKPLATCVGISFTVIMNNGLKRNKTIIQGEEAAAAAAAAVRDEIVESGTPPPSFASHEKEGRKMSSESEAAPGTGKLVCVTGASGYIASWLVRLLLARGYTVRATIRDTSDPKKTLHLRALDGANERLHLFEANLLEEGSFDAAVNGCDCVFHTASPFYHNVKDPKAELLDPAVKGTLNVLGSCKKASIRRVIVTSSMAAVAYNGKPRTPDVVVDETWFSVPEICEKHQQWYVLSKTLAEEAAWKFSKDNGFEIVTVNPAMVIGPLLQPSLNTSAEAILKLINGSSSTYPNFSFGWINVKDVALAHILAYEVPSANGRYCMVERVAHYSELVQIIREMYPNIPLPDKCADDKPSVPIYQVSKEKIKSLGLELTPLHTSIKETIESLKEKGFVTFDSSNL

SEQ ID NO: 36224 - protein, 229 aa, Chromobacterium violaceum ATCC 12472
MKSYGAEFLGTFWLVLGGCGSAVLAAGFPNLGIGFAGVALAFGLTVVTMAYAIGHISGCHLNPAVSIGLWAGGRFPAGQLAPYIVAQVLGAIAAGAVLYVIASGGAGFDVAKGFASNGYAEHSPGGYSLLAALVCEVVMTMFFLLVIMGATDKRAPAGFAPLAIGLALTLIHLISIPVTNTSVNPARSTGVALFVGGWAVQQLWLFWLAPIIGAVLGAKVYRLIAGESE

SEQ ID NO: 36225 - protein, 111 aa, Brassica napus
MALEEEEETQNAPFCMLFCEEESISVFEEDESVVKSPSFHLGFPDHDMLWDDDELLGLISKQDELKPCLSDKALDEFKSLCRENALGWIFRVKGYYGFSSLTALLAVNYFD

SEQ ID NO: 36226 - protein, 48 aa, Panus sp. HKUCC 4062
HWHGFFQKTTAWADGPAFVTQCPIISGDSFLYDFNVPDQAGTFWYHSH

SEQ ID NO: 36227 - protein, 497 aa, Vibrio vulnificus CMCP6
MGLASISVHAQTLTRDNGAPVGDNQNSITAGENGSVLLQDVHLIQKLQRFARERIPERVVHARGTGAHGEFVVSGDFSDLTLSSPFAQSGKVTPVFVRFSTVIHSKGSPETLRDPRGFATKFYTDQGNWDLVGNNLPVFFIRDSIKFPDMVHSLKPSPVTNLQDPNRFFDFFSSQPSATNMLTWVYTNLGTPASYRTMDGFGVHAYKWINRKGEVNYVKFHWKSQQGVKSLRPAEVTKVQGEDFNHLTNDLYTQINAGNFPKWDLYVKVLSPKALSKLDYNGLDATKVWLDVPEKKVGTMTLNRVPDNFFLETEQSAFAPSNIIPGIEPSEDRLLQGRLFAYADTQLYRLGANLFQLPVNSPKSPVANHNQDGPSNNSTGLGNVDSLDVNYEPSRLVNLTVDKQARAVETPLSGHVQQQAIRNPRDFFQAGVLYRSLSEQDKADLIHNLSGDLNKVNDAEVKAIMVSYFYRADKEYGTRLAKATDVNLKQVTKLASM

SEQ ID NO: 36228 - protein, 129 aa, Triticum aestivum
  misc_feature (69)..(69): Xaa can be any naturally occurring amino acid
  unsure (1)..(129): unsure at all Xaa locations
LRYIPELPHATDERGQVANLLDVHDYVPESLDSVAEFEAPPSPEHSYDLQYPGDEEFAKEPPTLPPQLXMSVLGDTDNTDNQASKPQHVVLNHLFIEKGWGSQSLLALGVTHRFESKYVSFVLYKPLKR

SEQ ID NO: 36229 - protein, 48 aa, Cyathus sp. HKUCC 4069
HWHGFFQHGTNWADGPAFVNQCPIASGNSFLYDFTVPDQAGTFWYHSH

SEQ ID NO: 36230 - protein, 177 aa, Oryza sativa
MASSPTSTAPHDRKLDPAASPAARWRTRREQESYSSKLLDALRLVRAASGRPSPASSREVRHAADRALAVAARGRSRWSRAILASRARACALRRVRLGAPPPPPAARPAPRSRPPLASKAKVLGRLVPGCRKLAFPALLAEASDYIAALEMQVRAMAALAQALQSVAPAPPPPPSSS

SEQ ID NO: 36231 - protein, 540 aa, Frankia sp. EAN1pec
MGVARGEAGWDFFISYTAVDTAWAEWIAWQLEDAGYRVLIQAWDSVPGSNWAVRIQQGTTESDRTIAVLSASYLRSVYGQNEWHAAHAADPGGFARTLLPIRVEDCPRPGLLGQIVSIDLFGHPADVARQHLLDAISTARAGRAKPTAAPAFPPRPALPPQQPSARTAPPFPGPDPTASLDQPALRTHARSDRLLHGPQRRVSLAVVLLVITGTVFLASSARDRNPSATSAHSAAPPTSAPTPSLSGSPLRDHTDSVRSVAFSRDGRTLASASQDGTARLWDIAERTSQPLTGRIAVWSVAFSPDKHTLASANGDSTVQLWDVAEGTLPHPVASLPGHSDAVGSVAFSPDGRTLASASDDHTVRLWDVATGTTTHTLTDHTGPVNSVAFSRDGRTLASASDDHTVRLWDVAEGTLLRTLPGHTEPVMSVAFSPDRRTLASASQDNTVRLWDVAARTAPRLVGSLSDHTHWVMSVAFSPDGRILASASQDRTVRLWDVAARTTTHTLTGHTGPVFSVAFSLDGRTLASASDDNTVRLWDMS

SEQ ID NO: 36232 - protein, 917 aa, Neisseria gonorrhoeae FA 1090
MRHLRYIYSIYGNERKIMQLHILNNPKDAALAADAEFLKQSLFNLLHEEASPLVVETVKLLSTSDDSAALIEKVLPQLDERQTYDLTLACGLFAQILNIAEDVHHERRRQIHEDAGHNAAEGSLTETVRRLKAGKADGKSVQRQLDNTSVTAVLTAHPTEVQRQTVLNFNRRIRALLPQRERCTNADALARLRREIDTVLLGLWQTSETRRHKLSVNDEINNGVSIFPMSFFEALPKLYRKMEHDFQTAYPDVRVPNILKIGGWIGGDRDGNPFVSGETLRFAFRRHADAVFRFYRSELDKLYRELPLSIRRVKVNDDVMALAALSPDEEIARTEEPYRRAIAYIMARAMGKARSLGLGMGCKFGFLEPYASAQKFLDDLKKLQRSLIDNGSRLLAEGRLADLIRSVSVFGFHMMPLDLRQHAGKHADVVAELFQHAGLEDYNSLNEEQKQAALLRELGHQRPLYSPFITYSDHTRRELAIFNEARKIKDEFGEDAVTQSIISNCEQPGDLLALALLLKESGLLAVENGKPHSRINIVPLFETIEALENACPVMETMFRLDWYDALLESRGNIQEIMLGYSDSNKDGGYVTSSWCLHQAELGLVELFKKYDVRMRLFHGRGGSVGRGGGPSYQAILAQPAGSVAGQIRITEQGEVITAKYADPGNAQRNLETLVAATLEASILPDKKDPDAKLMQALSDVSFKYYRELITHPDFIDYFLQTSPIQEIATLNLGSRPASRKTLARIQDLRAIPWVFSWMQNRLMLPAWYGFGSAVETLCEGSPETLAALRGHAQNNPFFQAMLSNMEQVMAKTDITLAENYAGLSESPEKAKVIFGMIKEEYRRSRKALLDLLQTEELLRDNRSLARSLALRIPYLNALNGLQVAMLKRLRKEPDNPHALLMVHLTINGVAQGLRNTG

SEQ ID NO: 36233 - protein, 188 aa, Yarrowia lipolytica CLIB122
MANLKTTKRLAASVLGVGKRKIWLDPQELTDIANANSRQQVRKLVSDGLIVRKPNAMHSRSRTRALAEAKRAGRHTGFGKRKGTANARMPEQVLWMRRQRVIRRLLSKYREQGKIDKHLYHELYKLAKGNTFKHKRAVVEHVIKAKAEATREKALKDEAEARRVKNRAARERRAARIAEKREQLLAEN

SEQ ID NO: 36234 - protein, 99 aa, Saccharomyces cerevisiae
  misc_feature (23)..(23): Xaa can be any naturally occurring amino acid
  misc_feature (42)..(43): Xaa can be any naturally occurring amino acid
  unsure (1)..(99): unsure at all Xaa locations
LQGRRTALVHDGLARGLRESRKXYIYSQALLVVLVSSVTEAXXLSSWLKGLANDPENKVPLIKVADAKQLGEWAGLGQDDREGNARKVVGASVVVVKNW

SEQ ID NO: 36235 - protein, 381 aa, Zea mays
MQIFVKTLTGKTITLEVESSDTIDNVKAKIQDKEGIPPDQQRLIFAGKQLEDGRTLADYNIQKESTLHLVLRLRGGMQIFVKTLTGKTITLEVESSDTIDNVKAKIQDKEGIPPDQQRLIFAGKQLEDGRTLADYNIQKESTLHLVLRLRGGMQIFVKTLTGKTITLEVESSDTIDNVKAKIQDKEGIPPDQQRLIFAGKQLEDGRTLADYNIQKESTLHLVLRLRGGMQIFVKTLTGKTITLEVESSDTIDNVKAKIQDKEGIPPDQQRLIFAGKQLEDGRTLADYNIQKESTLHLVVRLRGGMQIFVKTLTGKTITLEVESSDTIDNVKAKIQDKEGIPPDQQRLIFAGKQLEDGRTLADYNIQKESTLHLVLRLRGGQ

SEQ ID NO: 36236 - protein, 310 aa, Zea mays
HISSQSRSVGSHRISSLTQHLKDFMMKLRSSENVPRRSLMIILFVWLDMITEEALPTYQTMLNTLDGVRDETGASPTAWAVWTRAWTAEENRHGDLLNKYMYLTGRVDMRQIEKTIQYLIGSGMDPRTENNPYLGFIYTSFQERATFISHGNTARHAKDFGDLKLAQICGIIASDEKRHETAYTKIVEKLFEIDPDGTVVALADMMKKKISMPAHLMFDGQDDKLFEHFSMVAQRLGVYTARDYADILEFLVDRWKVADLTGLSGEGNKAQDYLCTLASRIRRLDERAQSRAKKAGTLPFSWVYGREVQL

SEQ ID NO: 36237 - protein, 467 aa, Brucella suis 1330
MSYDVVVIGTGPGGYVAAIKAAQLGLKVAVVEKRKTFGGTCLNIGCIPSKALLHASEVFAEAGHSFDTLGVEVTPKLNLTKMLAHKDTTVKANVSGVEFLFKKNKITPYIGTGKIVGKGKVSVTSEDGKVEEIEAKNIIIATGSDVAGIPGVKVDIDEKVIVSSTGALSFDKVPGSLIVVGGGVIGLELGSVWARLGAKVTVVEYLDKVLGPMDGEVSKQFQRLLEKQGIAFKLGAKVTGVEKVGKGAKVTFEPVKGGDAETLEADAVLIATGRRPYTDGLGLQEAGVAVDERGRVAIDDHWRTNVEGIYAIGDVVQGPMLAHKAEDEGIAVAEIIAGQAGHVNFDVIPSVVYTQPEVASVGKTEEELKAAGIDYKVGKFPFTANGRARAMLHTDGFVKILADKATDRVLGAHILGYNAGEMIHELAVLMEFGGSSEDLARTCHAHPTMSETVRESALATFAKPIHM

SEQ ID NO: 36238 - protein, 167 aa, Atriplex nummularia
MSSARTVRKDKPRGRHHGLTQQKRQEIKEAFELFDTDGSGTIDAKELNVAMRALGFEMTEEQINQMIADVDKDGSGAIDFDEFCHMMTAKIGERDTKEELMKAFRIIDQDNNGKISPEDIQRIAKELGENFTVKDIQDMIEEADRDRDGEVNVEEFLRMMKRTSYAY

SEQ ID NO: 36239 - protein, 384 aa, Brassica napus
FWKTIPPTEPYRVILGDVRDKLYHTRERSRQLLSNGISDIPEEATFTNVEQFLEPLELCYRSLCSCGDRPIADGTLLDFLRQVSTFGLSLVRLDIRQESERHTDVLDAITKHLDGSSYRDWSEERRQEWLLSELSGKRPLFGPDLPKTEEIADVLDTFKVISELPSDCFGAYIISMATSPSDVLAVELLQRECHVKTPLRVVPLFEKLADLEAAPAAVSRLFSLDWYKNRINGKQEVMIGYSDSGKDAGRLSAAWELYKAQEELVKVAKKYGVKLTMFHGRGGTVGRGGGPTHLAILSQPPDTVNGSLRVTVQGEVIEQSFGEEHLCFRTLQRFTAATLEHGMNPPVSPKPEWRALLDAMAVVATEEYRSVVFQEPRFVEYFRL

SEQ ID NO: 36240 - protein, 328 aa, Glycine max
  misc_feature (112)..(112): Xaa can be any naturally occurring amino acid
  misc_feature (126)..(126): Xaa can be any naturally occurring amino acid
  misc_feature (229)..(229): Xaa can be any naturally occurring amino acid
  misc_feature (239)..(239): Xaa can be any naturally occurring amino acid
  misc_feature (248)..(249): Xaa can be any naturally occurring amino acid
  misc_feature (254)..(254): Xaa can be any naturally occurring amino acid
  misc_feature (256)..(256): Xaa can be any naturally occurring amino acid
  misc_feature (259)..(261): Xaa can be any naturally occurring amino acid
  misc_feature (267)..(267): Xaa can be any naturally occurring amino acid
  misc_feature (270)..(270): Xaa can be any naturally occurring amino acid
  misc_feature (275)..(277): Xaa can be any naturally occurring amino acid
  misc_feature (280)..(280): Xaa can be any naturally occurring amino acid
  misc_feature (283)..(283): Xaa can be any naturally occurring amino acid
  misc_feature (287)..(287): Xaa can be any naturally occurring amino acid
  misc_feature (294)..(294): Xaa can be any naturally occurring amino acid
  misc_feature (300)..(300): Xaa can be any naturally occurring amino acid
  misc_feature (302)..(302): Xaa can be any naturally occurring amino acid
  misc_feature (306)..(306): Xaa can be any naturally occurring amino acid
  misc_feature (315)..(315): Xaa can be any naturally occurring amino acid
  misc_feature (318)..(318): Xaa can be any naturally occurring amino acid
  misc_feature (322)..(323): Xaa can be any naturally occurring amino acid
  unsure (1)..(328): unsure at all Xaa locations
MGIYLSTPKTEKASEDGENDKLRFGLSSMQGCRYFMDLSYAADPYLDVFPFYFGVYQGPGGELNHWVRAPLFQLRRPPPQAYLAGDLGTSLQKSFLRMDEMMRGQRGWRELXVLGDKIEKLSGMLXGFIWSPRSSEANDRVNDWAFEEGPHSDFTGPNSGSTACVAVIRGNKLVVANAGDSRCVLSRKGQAHNLSKDHKPELEAEKDRILKAGGFIQVGRVNGSLNLAXAIGDMGIKQXNKYLPVEKXXFVTAXPXITXXXLLDDDXVSXNTLCXXXIWXLVXSSQXLWGTSYXNRLKDXEXPFLXVGKKVFYRXLCXTNLXXEGITW

SEQ ID NO: 36241 - protein, 141 aa, Neisseria meningitidis MC58
MAIERTISIIKPDAVGKNVIGKIYSRFEENGLKIVAAKMKQLTLKEAQEFYAVHKDRPFYAGLVEFMTGGPVMIQVLEGENAVLKNRELMGATNPSEAAEGTIRADFATSVSINAVHGSDSVENAALEIAYFFSQTEICPR

SEQ ID NO: 36242 - protein, 378 aa, Sulfolobus tokodaii str. 7
MSVEVSRGLENVIIKTTGLTYIDGINGILRYRGYDINDLVNYASYEELIHLMLYGELPNRQQLNQIKGIINESFEVPEQVISTIFSMPRNCDAIGMMETAFGILASIYDPKWNRATNKELAVQIIAKTATITANIYRAKEGLKPKIPEPSESYAESFLAATFGKKPTQEEIKAMDASLILYTDHEVPASTTAALVASSTLSDMYSCIVAALAALKGPLHGGAAEEAFKQFVEIGSVENADKWFEEKIIKGKSRLMGFGHRVYKTYDPRAKIFKTLAKSFAEKNENVKKYYEIAERIEKLGVDTFGSKHIYPNTDFYSGIVFYALGFPIYMFTSLFALSRVLGWLAHIIEYVEEQHRLIRPRALYIGPEKREFKPIELR

SEQ ID NO: 36243 - protein, 245 aa, Oryza sativa (japonica cultivar-group)
MAAATSSSALSKLAPLEAILFDIDGTLCDSDPIHFCAFRELLQQVGFNNGVPISEEFYSANISGGHNDDLARALFPDLDHDKAMKFMDDKEALYRRLAPEQLVAVEGLHDLCRWIKDHKLKRAAVTNAPRSNAELMLSLLGLTEFFPVLVIGSECDRAKPFPDPYLKALELIGASPDHTFIFEDSASGIRAGVAANVPVVGLTTRNPEKVLQDAGASLLIKDFQDPKLLSILEEIEPTVAAVEQV

SEQ ID NO: 36244 - protein, 101 aa, Pisum sativum
AQVVGWPPIRSFRKNSLTTASKNTEEADGKLGLGGAVFVKVSMDGAPYLRKVDLKNYTAYSELSSSLEKMFSCFTIGQCESHGNQMLNETKLRDLLHGSEY

SEQ ID NO: 36245 - protein, 306 aa, Haemophilus influenzae Rd KW20
MRKTLTVLGSINADHVISVPYFTKPGETLTGQNYQIAYGGKGANQAVAAARLGAKVAFISCIGSDSIGKTMKNAFAQEGIDTTHINTVSQEMTGMAFIQVAKSSENSIVLASGANSHLSEMVVRQSEAQIAQSDCLLMQLETPLSGVELAAQIAKKNGVKVVLNPAPAQILSDELLSLIDIITPNETEAEILTGVEVADEQSAVKAASVFHDKGIETVMITLGAKGVFVSRKGKSRIIKGFCVQAIDTTAAGDTFNGGFVTALLEEKSFDEAIRFGQAAAAISVTKKGAQSSIPTRQETLEFLEHA

SEQ ID NO: 36246 - protein, 142 aa, Thermotoga maritima
MLLGRREDIFRPFRELQREIDRLFDDFFRTEVRPAPDMDVFETDDEVVIEVEIPGIDRKDVQITVEENILKISGEKKLEREQKGKNYYYVERSAGKFERAIRLPDYVDVEKIKAEYKNGVLTIRVPKKEERKKKVIEVEVQE

SEQ ID NO: 36247 - protein, 522 aa, Yarrowia lipolytica CLIB122
MYLENLKRQESLGHVISNRTFGTRTRTQTLRHSNPLKLTHSLITPRDTLSHVHHCLEADTRRPAETQTQTAKKKKLPYHMSAPPLLPPKRPVGARMKLPVLQIPTTSTESPSDQQRPQRPSLMLNTGNGNNGNNNGSAHNTHVVDSNLEPPSMLGNNRSVSPQSAAFSAEILAAVGSPAPDKHVTHEYPVHPSSHSNNSGDDDGMDETQDLTGLDVDDLDEEKWHSVARTGGIVELGKLGEGAGGSVTLCRLRTGSTVFALKSITANPNPELQKQIVRELRFNRTCSSPHIVKYYGTFLNDEAASIFIAMEYCGGGSLDAIYKRVKDRGGRIGEKVLGKVAEGVLKGLSYLHERRIIHRDIKPQNILLDKEGQVKLCDFGVSGEVVNSLATTFTGTSYYMAPERILGQPYSVTSDVWSLGLTIMEVAQHRFPFISAEQEAREEPITPIELLSIIVNAPAPELKDEPEEGIKWSNAFRHFLLCCLEKDQSKRASPRQMLKHPWMLGQMQKQVKMDKFVKEVWN

SEQ ID NO: 36248 - protein, 805 aa, Oryza sativa
  misc_feature (682)..(682): Xaa can be any naturally occurring amino acid
  unsure (1)..(805): unsure at all Xaa locations
MSFGGLFDGGGGGGMQFPFASGFASSPALSLALDNAGGGIGGRMLGGGAGAGSSAGGAMTRDTEAENDSRSGSDHLDAISAAGEDDVEDAEPSNSRKRKKRYHRHTPQQIQELEALFKECPHPDEKQRAELSRRLSLDARQVKFWFQNRRTQMKTQLERHENALLKQENDKLRAENMTIREAMRSPMCGSCGSPAMLGEVSLEEQHLRIENARLKDELNRVCALATKFLGKPISLLSPPPLLQPHLSLPMPNSSLELAIGGIGGLGSLGTLPGCMNEFAGGVSSPMGTVITPARATGAAIPSLVGNIDRSVFLELAISAMDELVKMAQMDDPLWVPALPGSPSKEVLNFDEYVRSFLPCIGMKPAGYVSEASRESGLVIIDNSLALVETLMDERRWSDMFSCMIAKATVLEEVSTGIAGSRNGALLLMKAELQVLSPLVPIREVTFLRFCKQLAEGAWAVVDVSIDGLVRDHNSGTAPTGGNVKCRRVPSGCVMQDTPNGYCKVTWVEHTEYDEASVHQLYRPLLRSGLAFGARRWLATLQRQCECLAILMSSATVTANDSTAISQEGKRSMLKLARRMTENFCAGVSASSAREWSKLDGATGSIGEDVRVMARKSVSEPGEPPGVVLSAATSVWVPVAPEKLFNFLRDEQLRAEWDILSNGGPMQEMTQIAKGQRDGNSVXSLLRASAVSANQSSMLILQETCTDASGSIVVYAPVDIPAMQLVMNGGDSTYVALLPSGFAILPDGPRIGATGYETGGSLLTVAFQILVNNQPTAKLTVESVETVNNLISCTIKKIKTALQCDA

SEQ ID NO: 36249 - protein, 396 aa, Nostoc punctiforme PCC 73102
MTHSEVLLSKNLVNEFKTCTQLQYNGKLNIKSSKGSQWTFYYRLGRIVWATGGTHPFRRWRRHMAQNCPQIDVDKLLLRSQDVSIDYWDYRLLEIFYKKQKIQREQIQSIAESTIAELLFDLALQGNFASITCNRSQEVILETPMSFTSAEMSVKHMQDSWKTWSAAGLANFSPNLAPILRRPEQLQQMVSLSVYKNFVNLINGKFTLLDLAVKMKQSVLPLTRSLLPYILKGIIELVEVPDMPLVVTEVNNKPATTQPKKLNAPLVACVDDSPQVCKMLEDIITSNGLRFIKIQDAVQALPTLIQDKPDLIFLDLIMPVASGYEICTQLRRISAFANTPVIILTGSDGLLDRVRAKVVGSTDFITKPVAPDKVMSIIRKYLPTLSVPIEKNKANV

SEQ ID NO: 36250 - protein, 544 aa, Acinetobacter sp. ADP1
MSAKDVKFGDSARSKMIAGVNVLADAVKVTLGPKGRNVVIDRSFGAPHITKDGVTVAKEITLKDKFENMGAQLVREVSSKTNDIAGDGTTTATVLAQAILNEGIKSVTAGMNPMDLKRGIDIAVRAVVENIRATAKPADDFKAIEQVGSISANSDETVGKLIAQAMEKVGKEGVITVEEGSGFEDALDVVEGMQFDRGYISPYFANKQDTLTAELENPFILLVDKKISNIRELITTLEAVAKTGKPLLIIAEDVEGEALATLVVNNMRGIIKVCAVKAPGFGDRRKAMLQDIAILTGATVISEEVGMSLEQASLQDLGTAHKITVSKENTVIVDGAGDANAIAERVQQIRAQIEESTSEYDKEKLQERVAKLAGGVAVIKIGAATEVEMKEKKDRVDDALHATRAAVEEGVVAGGGVALVRAVNSLDGLTGANDDQTVGINILRRAIEAPLRQIVSNAGDEPSVVINAVKAGEGNYGYNAATGVYGDMLEMGILDPAKVTRSALEHAASVAGLMLTTEAMITDIPEDKPAMPDMGGMGGMGGMM

SEQ ID NO: 36251 - protein, 96 aa, Acinetobacter sp. ADP1
MSNIRPLHDRVVIRRVEEETKTAGGILLPGSAAEKPAQGEVIAVGNGQITENGVRALDVKAGDKVLFGTYAGTTVKVNGEEFLIMKESDILAVLEG

SEQ ID NO: 36252 - protein, 997 aa, Synechococcus sp. CC9605
MPESTTPVSEQETARMSGGGSGAGQLLQHRLDLIEDLWKSVLRSECPPEQSERLLRLKQLSDPVSLEGRDGNSTSEAIVELIKAMDLSEAISAARAFSLYFQLINILEQRIEEDSYLDSLRPNPSADAAHRDAFDPFAPPLANQTDPATFGEVFERLRRMNVPPAQVEHLLRELDIRLVFTAHPTEIVRHTVRHKIRRVANLLQQLQSDAPLAHQMREECRGQLEEEIRLWWRTDELHQFKPTVIDEVDSTLHYFQQVLFDAMPTLRRRLITALHRHYPDVQVPQASFCTFGSWVGSDRDGNPSVTPEITWRTACYQRQLMLELYISSVQSLRQQLSISMQWSQVAPSLLESLEMDRLRFPEIYERRAARYRLEPYRLKLCYVLEKLERTLARNNQLSEAGWQMPCEALADPQAGLSGAEVLHYTSVDQFRSDLELVRNSLVSTELSCEQLDTLLHQVHIFGFSLASLDIRQESTRHSDAIDELTRNLDLPQAYGDMDEAERMAWLLQELQTRRPLIPPAASWSAATAETLAVFRMLQRLQEEFGPRICNSYVISMSHTASDLLEVLLLAKEAGLVDPPNKRASLLVVPLFETVEDLQRAPEVMEGLFKTPLYRELLPVVGQQKQPLQELMLGYSDSNKDSGFLSSNWEIHQAQIALQELASRQDVALRLFHGRGGSVSRGGGPAYQAILAQPSGTLQGRIKITEQGEVLASKYSLPELALYNLETVTTAVVQNSLVTNQLDATPSWNQLMSRLATRSRDHYRALVHDNPDLVAFFQQVTPIEEISKLQISSRPARRKTGAKDLSSLRAIPWVFGWTQSRFLLPSWFGFGTALTEEVGGDSEQLDLLRRLHQRWPFFRMLISKVEMTLSKVDLDLAHHYMNSLGHPEQREAFEAIFQVIAKEYELTRKLVLEITGQNRLLGADQGLQLSVDLRNRTIVPLGFLQVALLKRLRDQNRQPPMSETPGAPEDTRTYSRSELLRGALLTLNGIAAGMRNTG

SEQ ID NO: 36253 - protein, 751 aa, Acetabularia mediterranea
MGQTITYAIPVFGVLALLYTFWRSSWVSKQEVGTERMGRIAKNITDGAMAFLKAEYRVLAIFVIAVAILLGISGNREGTSPLIAVSFILGAICSALAGYIGMIVATKANVRTTNAARSSLGRALEVAFAGGSVMGLGVVGLGVLGLGTLFLAYSNIGWDINRVITVITGFSFGASSIALFARVGGGIYTKAADVAADLVGKVEAGIPEDHPLNPATIADNVGDNVGDVAGMGADLFESYVGSIIGTMVLGATFIGVAGFQETNDFNGLNAVLLPLVLAGTGIITSIVGTFFVKVKEGGNPQKALNTGEFLASGIMLVLTYLIVDWMLPSTWTSATGVSYSSFGVFMAVIFGLVAGLLIGMITEFYTGTGTRPVKGIVSQSLTGSATNIIAGLGVGMQSTAIPIVILAAAIIGAHEFAGLYGIAIAAVGMLSNTGIQLAVDAYGPISDNAGGIAEMGELPKEVRGRTDKLDAVGNTTAAIGKGFAIGSAALTALALFAAFMETAKITEINVADPLVMAGLFLGGMLPFLFSSLAMNAVGRAAMDMIQEVRRQFKTIPELKAALDTMRKNDGKEFAEWSEADQTIFNAADGKAEYSKCVEISTKASIREMVLPGLIAVLTPVVIGFAGGAEMLGGLLAGVTVSGVLMAIFQSNSGGAWDNAKKMFEEGVEIDGQMHYKGSDAHKAAVVGDTVGDPFKDTSGPSPNILLKLMSVVALVIAPFLDQSTKNTLQVLEPHRHIGGAFLLDVRPHSKI

SEQ ID NO: 36254 - protein, 48 aa, Hypoxylon sp. HKUCC 3196
HWHGFFQEGTNWADGPAFVTQCPIASGDSFLYDFRVPDQAGTFWYHSH

SEQ ID NO: 36255 - protein, 343 aa, Vibrio vulnificus CMCP6
MKIKALSKLKPEEGIWMTEVDKPVLGHNDLLIKIKKTAICGTDVHIYNWDEWSQKTIPVPMVVGHEYVGEVVGIGQEVRGFEIGDRVSGEGHITCGHCRNCRGGRTHLCRNTIGVGVNRTGCFSEYLVIPAFNAFKIPANISDDLASIFDPFGNAVHTALSFDLVGEDVLITGAGPIGIMAAAVAKHVGARHVVITDVNEYRLDLARKMGVTRAVNVAEQKLDDVMAELGMTEGFDVGLEMSGNPSAFNSMLKTMNHGGRIALLGIPPSDMGIDWNQVIFKGLVIKGIYGREMFETWYKMASLIQSGLDLTPIITHHFKVDDFQQGFDIMRSGMSGKVILDWE

SEQ ID NO: 36256 - protein, 144 aa, Humulus lupulus
WLTFLLFPFGIHSSDPKSLLLISFFLLHYFNRTVFFPLRLLRQKNPGDFPVAIAATAFGFNLLNAYLQARSVSHYSDYDGDEWFWWRFFAGAVVFLAGMAINVASDRVLVRLKESGGGYKVPRGGWFERVSCPNYFGEAVEWLG

SEQ ID NO: 36257 - protein, 610 aa, Kluyveromyces lactis NRRL Y-1140
MGDNSDSKVNLYPLALLMDELKHDDISNRVEAMKKLDTIALALGVQRTRDELIPFLTEVAQDDEDEVFAVLAEQLGNFVPFVGGRKYATLLLPALEILASTEETLVREKAVDSLNMVAEQLTEEQLLHDFVPLIENLATNEWFSSKVSACGLFKAVFVRIQDDKFRKDLLSLFLQLIQDDTPMVRRAAGRNLPTLVDQLTEHPELSTDDEWDYISSMFQRLVNDSQDSVKFLAVDVLISILKFFNKKKDFTHTKDLLQSSIQLIGDEAWRVRYMAADRFEELASQFVSNPQYVSELLEPFLALCQDNESDVRKAIAKQIPGYAKLLNDPSVILNRIIPAAQNLSIDETECVRASLALEITNLAPLLPKQDSMDSLVPILLHMLKDEFPDVRLNIIAKLKIVNESVGIEFLSENLLPAITELAKDPNWRVRLAIIEYIPLLAEQLGMEFFDSKLSDLCLSWLWDGVYSIRSAAITNLSKLTEIFGSDWAQEEIISRLLKSDTQLLENFNYRITLLFALTGLVPVVSTDVVVEKILPFVNHLSTDNVPNIRFNVAKFYAVIVEALTKNTNKNHIELINNTIIPTLEKLCQDPDVDVRFFSAQSLEKCKSFLS

SEQ ID NO: 36258 - protein, 402 aa, Oryza sativa
MADYVYGPGRNHLFVPGPVNIPDQVIRAMSRQNEDYRSPAVPALTKTLLEDVKQIFKTTTGTPFLFPTTGTGAWESALTNTLSPGDKIVSFLIGQFSLLWIDQQQRLNFNVDVVESDWGYGADLAALDYKLRQDPSHSIKAICIVHNETATGVTNDLSAVRKILDKHRHPALLLVDGVSSICALDFRMDEWGVDVALTGSQKALSLPTGLGIVCASPKALEASKTAKSVRVFFDWKDYLKFYKMGTYWPYTPSIQLLYGLRTALDLIFEEGLENVIKRHNRLGTATRLAVEAWGLKNCTQKEEWFSDTVTAVVVPPYIDSAEIVKHAWKRYNLSLGLGLNKVAGKVFRIGHLGHLNELQLMGALSGVEMVLKDIGYPVKLGSGVAAAAAYLSNSTPLIPSRI

SEQ ID NO: 36259 - protein, 1370 aa, ASPERGILLUS NIDULANS FGSC A4
MSGVQPVAVYALRVPADGALVPAVPDAAAMVLEQFRVSMAAIDPDEAPEFDDDSSRRPRATLRIIRAPPGLDEEDSDDDYEDEDDSEDDSEDDEEVNGGPSDKEKARKLKEAAYLKELEDAMSEDDESDEGEEFDLKAAISKLVKGKAPATDDDDEDAESDEGLDLDEMVVCTLDPERNYQQPLDITVAEGERVFFKVTGTHTIYLTGNYVMPIDEPRDDYDEDDDEDEEDYDLSPDEDELDMDELMMGEDDESDDLDGLENPRITEIDTDEEEAPKLVDAKGKKKRGADEAALEAKDDKAKSAANGESKKQQKKLKKNNGEASAVEAKPEQKETKKVQFAKNLEQGPTPSKERKPDEKKPADKAEKTTGTLGVKEVKGVIIDDKKLGKGPAAASGNTVAMRYIGKLENGKVFDSNKKGKPFTFKLGKGEVIKGWDIGVAGMAVGGERRITIPSHLAYGKKGVPGIPAFACASTFRVIKYLANICTMSEDQGQQGQRLSTARGSTCLKQTMTEPALSAGLGTDGPVGAAKDNIRVRIQSRRRSRLLSRLGRKIPTQAVEPVKSHETHSHSSDAEGTSHQDVSDRRNHPCHTPRPSSHSQADSFESVARGQQKEQSRTMREDAVSPVLLDVKRSQSTPVELAKLVSLKLSTSFGSRTVIRRSQPGVRQSVRAAQLQRMMLDRGNPKRERSSGSSTPSSKSSPVDSVSTAPTSVSPGSLAPSGSTNNDPASGFKHIDSQADLPERPLSPVRESPMVSPTIQTTEATAIVKVFLETHFHTLLSGLDARTQRRLELDQYIETFPLSPEEVVRVRKHWVTQERDYLRQYRVLKSRPQDKTSRAGTASLAGFEPLKILGRGSFGVVRLVREKRTDEQTQSGRVPLAPKTNHRQAMTGVKKDVFAMKVIRKSVMIRNCQEAHLRAERDFLVASAKSRWVVPLIASFQDQKHLYLVMDYMVGGDFLGLLIRHNILRESIARWYVAEMILCIEEAHRLRCIHRDVKPDNFLISESGHLKISDFGLAFDGHWAHDQWYFTYQRHSLLKRLGIQIDGDAEDQKLSHDANIQSLGTTREDGSMEDDWIHPPTNGLLHWRDKNQTRTMARSVVGTSQYMAPEVIRGHPYDGRCDWWSLGVILYECLYGFTPFASEDRHQTKLKIHRHLQTLYFPVHRPTDKLVSADAIDVINSLLQEKEFRLSSPKYKQNDAISSKPAKCSFYKPDSSNPSYQGHYVYPDDATDIKSHRFFRGINWEQIHRTSPPFIPMVRGWEDTRYFDDGEHPSDREDDSSDSELDGVQDKWHPLGGKGGLHKPDKPLKADVKPSSYPKGNDGAKDTAIASLKHKKRLKEAKRARDKILRDKRLRRTVLEMLRCLVVVAAT

SEQ ID NO: 36260 - protein, 173 aa, Oryza sativa
VPILNGHVYSINDNATVEDAATDYEFVIRQLVKVRTIGVSESNDCPKFDLILLSMGSDGHVASLFPNHPSLELKDDWITYITDSPQPPPERITFTLPVINSASNIAIVTTGDDKSEAVHLAISDNADGPEAPSSLPARMVQPTDGKLVWFLDKSAASSLDAENDDAFEQHREY

SEQ ID NO: 36261 - protein, 342 aa, Xanthomonas axonopodis pv. citri str. 306
MTKLLPTSTAGSLPKPSWLAQPETLWSPWKLQDAELIEGKQDALRLSLQEQQHAGIDIVSDGEQTRQHFVTTFIEHLSGVDFEKRETVRIRDRYDASVPTVVGAVSRPRSVFVDDAKFLRQQTRQPIKWALPGPMTMIDTLFDAHYKSREKLAWEFAKILNQEARELEAAGVDIIQFDEPAFNVFFDEVNDWGVATLERAVEGLKCETAVHICYGYGIKANTDWKQTLGSEWRQYEESFPKLQTSSLDIISLECHNSHVPIDLIELVRGKKVMVGAIDVASTTIETPQEVAETLRKALRFVDADKLYPSTNCGMAPLARHVARGKLSALSAGAQIVRGELSA

SEQ ID NO: 36262 - protein, 336 aa, Triticum aestivum
  misc_feature (236)..(236): Xaa can be any naturally occurring amino acid
  misc_feature (251)..(251): Xaa can be any naturally occurring amino acid
  misc_feature (278)..(278): Xaa can be any naturally occurring amino acid
  unsure (1)..(336): unsure at all Xaa locations
LYRTSLYKKAGWYRSGIPGISSTHASAPPKASKPPEQEQPPATTSGTTAPVYPEWPGFQGYPAMPPHGFFPPPVAAGQAHPYMWGAQGVHPFHYPMQTNGNLEPAGAAPGAAETNGKNEPGKTSGPSANGVTSNSESGSDSESEGSDANSQNDSHSKENDVNENGSAQNGVSHSSSHGTFNKPMPLVPVQSGAVIGGVAGPATNLNIGMDYWGATGSSPVPAMRGKAPSGSARGEXWDERELKRQSARRSXRGSARRSRLRKQAECEELGQRPEALKXENSSLRIELDRIKKEYEELLSKNTSLKAKLGETGGGGDAVPDMNERGDTNGGSHQKEP

SEQ ID NO: 36263 - protein, 568 aa, Xanthomonas campestris pv. campestris str. ATCC 33913
MPHAPARSGDAMSAAAPPCCTSLLGLSLSMFVAPCALAATPLEGAVVSAPAPTPPTPDLAYPELFQAVQRGELFDDQKHFVDFLPLRDPALINADYLAQHEHAGFDLRKFVDANFEESPPVQTDAIRQDTALREHIDALWPKLVRSQTNVPAHSSLLALPHPYVVPGGRFREVYYWDSYFTMLGLVKSGETTLSRQMLDNFAYLIDTYGHIPNGNRTYYLSRSQPPLFSYMVELQAGVEGEAVYQRYLPQLQKEYAYWMQGGDDLQPGQAARHVVRLADGSVLNRYWDERDTPRPEAWLHDTRTAAEAHDRPAADVYRDLRAGAESGWDYTSRWLADGKTLSTIRTTAIVPIDLNSLLYHLERTLAQACAHTGTACSQDYAALAQQRKQAIDAHLWNAAGYYADYDWQTRTLSNQVTAAALYPLFAGLASDDHAKRTATSVRARLLRPGGLATTALKTGQQWDEPNGWAPLQWVAVDGLRRYGEDGLARTIGERFLTQVQALFAREHKLVEKYGLDADAAGGGGGEYALQDGFGWTNGVTLMLLNLYPSQGATQAPAKTKRKPEPAAP

SEQ ID NO: 36264 - protein, 275 aa, Arabidopsis thaliana
MNGEARSRVVDQEAGSTPSTLRDEDHPSRQRLFGCLPYDIDLNPLRIVMAELVGTFILMFSVCGVISSTQLSGGHVGLLEYAVTAGLSVVVVVYSIGHISGAHLNPSITIAFAVFGGFPWSQVPLYITAQTLGATAATLVGVSVYGVNADIMATKPALSCVSAFFVELIATSIVVFLASALHCGPHQNLGNLTGFVIGTVISLGVLITGPISGGSMNPARSLGPAVVAWDFEDLWIYMTAPVIGAIIGVLTYRSISLKTRPCPSPVSPSVSSFLR

SEQ ID NO: 36265 - protein, 615 aa, Wolinella succinogenes
MVDYGINFWSDNDFIIEDGQVKINYKTKPAIIDIVKKVREEGYRGPLLLRFPHLIKKQVDKIFTHFETSIKQYHYKGQFKAVFPLKVNQFPNFVLPLVELSQNRCYGLEAGSKAELIIAMAYTNKGSPITVNGFKDKEMISLGFIAANMGHEITLTIEGLNELETIIEVAEEMGKPCPNIGLRIRLHSSGIGIWAKSGGINSKFGLTSTELLEGIRLLEKHKLIEKFTMIHFHIGSQISDISPLKKAMREAGNIYAELRKMGAKNLKSVNIGGGLAVEYTQHEGSPNRNYTLDEFAGDVVFSLKEIAKNKKEPEPDIYIESGRYIAASHALLVAPVLELFSQEYDEKALHLKDKNPQLIEELNELYNTVNEKYAIEYLHDSLDHMESLLTLFDLGYIDLQDRSNTEILVHLIIKKVIKILKHKNHSDIIRIQEQVQERYLLNCSFFQSLPDYWGLEQSFPVMPLDRLNKRPTRSASLWDITCDSDGEIGFDLNKPLFLHDVDVTTEEYFLGFFLVGAYQEVLGMRHNLFTHPTELSVEFEEDGTHSVTNLLEAQTILDVLDDLDYDTKEIERRLKQRIEDSELIDDETRKEVLGQLYVMLSENGYLRTITNGERK

SEQ ID NO: 36266 - protein, 626 aa, Chromobacterium violaceum ATCC 12472
MAWSVADSRSLYGIRHWGAGYFDVGDSGNIVVRPNVRQRKEIDLYRLVRDLGGKGLDLPLLVRFPDILQDRVTRLCGAFDKAIAEQGYGNRYTAIYPIKVNQQEAVVKSIIATQDVSIGLEAGSKPELMAVLALAPKGCTIVCNGYKDREFIRLALIGERLGHQVFIVIEKESEVDLVIEESRKLEVRPNIGLRVRLSSLASSKWSDTGGEKGKFGLSAGQLISATDKLIAAGLGDCVRLMHFHMGSQIANIADYRLGFREAIRYFAELRALGLPVDHVDVGGGLGVDYDGTHSRNDSSINYDMAEYAHVIVSMLSEFCAENGIPHPRILSESGRAMTAHHAVLLMNVTDVERLPDTVAPIDKAEELSLPLRKLVELANLNDEELVTEIYYRASHCVSEVSEMYAEGRLSLQEKALAEDLHATLCRRLHNQLQASQRSQRQVYDELTDRLADKYFCNFSVFQSLPDTWAIDQVLPIMPVHRLAEQPTRRAVLQDLTCDSDGKLKQYVDQQSIESSMSVHEVKQGDEYLIAVFLVGAYQEILGDMHNLFGDTDSVNVYVREGGELEISGIEEHDTIEDMLRYVHLSPEDLLNRYEAKTRECDLNPEERSLYFAEFCRGLKQSSYLAV

SEQ ID NO: 36267 - protein, 132 aa, Dechloromonas aromatica RCB
MPKIEKTDAEWRAQLDENEYRVTRQKGTERAFTGKYWDTHDDGTYRCICCGAPLFRSETKFDSGCGWPSFHTPNDEKLIDEHVDQSFGMIRTEVTCHDCGAHLGHVFDDGPAPTGLRYCINSASLKLEKDGK

SEQ ID NO: 36268 - protein, 432 aa, Arabidopsis thaliana
MVIKGMRVGKYELGRTLGEGNSAKVKFAIDTLTGESFAIKIIEKSCITRLNVSFQIKREIRTLKVLKHPNIVRLHEVLASKTKIYMVLECVTGGDLFDRIVSKGKLSETQGRKMFQQLIDGVSYCHNKGVFHRDLKLENVLLDAKGHIKITDFGLSALSQHYREDGLLHTTCGSPNYVAPEVLANEGYDGAASDIWSCGVILYVILTGCLPFDDANLAVICRKIFKGDPPIPRWISLGAKTMIKRMLDPNPVTRVTIAGIKAHDWFKHDYTPSNYDDDDDVYLIQEDVFMMKEYEEEKSPDSPTIINAFQLIGMSSFLDLSGFFETEKLSERQIRFTSNSLAKDLLENIETIFTEMGFCLQKKHAKLKAIKEESTQKRQCGLSVTAEVFEISPSLNVVELRKSHGDSSLYKQLYERLLNELGSSSQVQELLA

SEQ ID NO: 36269 - protein, 142 aa, Zea mays
  misc_feature (115)..(115): Xaa can be any naturally occurring amino acid
  unsure (1)..(142): unsure at all Xaa locations
MMASPPTPSTVSTTVTTSPSSTGGSELGPDPQLAAERKRKRKESNRLSAQRSRARKQRQLDDLTAQVAALRARNGAMDAAARDAARRCVAVQAENAMLHARTVELSARLQSLVDXIQCMQAGDAMYQYQQLPLVDATIYNYY

SEQ ID NO: 36270 - protein, 382 aa, Arabidopsis thaliana
MPINDQFPSGLRILVVDDDTSCLFILEKMLLRLMYQVTICSQADVALTILRERKDSFDLVLSDVHMPGMNGYNLLQQVGLLEMDLPVIMMSVDGRTTTVMTGINHGACDYLIKPIRPEELKNIWQHVVRRKCVMKKELRSSQALEDNKNSGSLETVVVSVSECSEESLMKCRNKKKKKKRSVDRDDNEDDLLLDPGNSKKSRVVWSIELHQQFVNAVNKLGIDKAVPKRILELMNVPGLSRENVASHLQKFRLYLKRLSGEASQSNDSESTKRYENIQALVSSGQLHPQTLAALFGQPIDNHHSASFGVWIPNDNLGRSQNEHFSVDVSSASNRPVSVAVHGLSSSANFRQRGNVNNNRIRQGYGSNVNEESWILERSSRQR

SEQ ID NO: 36271 - protein, 148 aa, Brassica napus
KNLIDQTHQARHKSLRLLSLLAASDSAPVLSSPRLFSSSSDMSGSGSDSSSSSLPVTLDSLNPKVLKCEYAVRGEIVNIAQKLQEDLKINKDAYPFDEIIYCNIGNPQSLGQQPITFFREVLALCSHTALLDESATHGLFSSDSIERA

SEQ ID NO: 36272 - protein, 158 aa, Brassica napus
  misc_feature (155)..(155): Xaa can be any naturally occurring amino acid
  unsure (1)..(158): unsure at all Xaa locations
MRCYKGSSILATGHHPFVYKRPISSLPASFPSTTLSYPTRNRFLSTRIQARLIHDDPVKQSEDLSFYDLLGVTESVSLPEIKQAYKQLARKYHPDVSPPDRVEEYTDRFIRVQEAYETLSDPSRRVLYDRDLSMGFSFSFSGRRRNRYHEEVVEXKSE

SEQ ID NO: 36273 - protein, 696 aa, Rhodospirillum rubrum
MATKATNTAEAVNTQEEGGDSPLLDSMNAAVKKLVNRGKDRGYITYDELNNALPPDDVSSEQIEDTMAMLSDMGINVVEDEEEGEASAAPPAEAGEEEPGREVAATGNVSEDDIGRTDDPVRMYLREMGSVELLSREGEIAIAKRIEAGREMMIGGICESPLTIRALLQWHDALVDGRMLLRDIIDLDATYGSGAGPDVVAEGLEDSVVPLSPLALSPARALPKEADEAEEAVTPGRDDDSEDEDEGDDAKPADGAGDEEAAPSGEDEGDGSENNVSLAAMEQELMPRVLETFEHIATTYGKLKKAQDQRIAALQKGEEPGAALERKYDKLKLELVGLMEDVHLNNARIEQLVEQLNALNKGLITQEGKLLRLAERAKIRRDEFLDHYFGREMDPSWREDVAALPGKGWRDFTTRFADEIKDIRGSIAEIAERSLLPIPEFRRIVSTVQKGEREASRAKKEMIEANLRLVISIAKKYTNRGLQFLDLIQEGNIGLMKAVDKFEYRRGYKFSTYATWWIRQAITRSIADQARTIRIPVHMIETINKLVRTSRQMLHEIGREPTPEELAEKLQMPLEKVRKVLKIAKEPISLETPIGDEEDSHLGDFIEDKNAVQPLDAAINSNLRETCTRVLASLTPREERVLRMRFGIGMNTDHTLEEVGQQFSVTRERIRQIEAKALRKLKHPSRSRKLRSFLDN

SEQ ID NO: 36274 - protein, 478 aa, Mesorhizobium loti MAFF303099
MRRSRKVKILATIGPASSSEEMLQKLFEAGADVFRINMSHTDHELMRTLVGRIRAVEEKVGRPIGILADLQGPKLRVGKFANGKEVLTPGQTFTLDDNPEPGTSSRVYLPHPEILSSVEPGHRLLIDDGKLELKAVKSDGKSIVCTVVAGTTISDKKGVSLPDTDLPVGALTEKDRKDLDAVLATGVDWIALSFVQRPEDLAEARKIARGRALIMAKIEKPQAVARLAEIIELSDALMVARGDLGVEMPLEAVPGIQKQITRAARRAGKPVVVATQMLESMITAPVPTRAEVSDVSIAVFEGADAIMLSAESAAGAYPVEAVAMMDRIATKVETDPTYAGIINAQRSEPEATGADAISLAAREIAETLKLSAIITYTASGTTGLRAARERPQVPIIALSPILNTARRLSLLWGTHCVVSPDATDLDDMVNRACRIALEEEFGKPGDRVIITAGVPLRTPGSTNMLRIAYVGSEKQGSR

SEQ ID NO: 36275 - protein, 423 aa, Haemophilus influenzae R2846
MNLDLNQLVKWRREFHRFPEIGWSEFWTTSRIADYLEDLDCFEIFLGKQIINPDFVRGRKQAVVDKGLANAKAYGANEKWLEKMEGYTGCVALFDSGKPGKTIALRFDIDCVNVTETRSSEHIPNKEGFASINDGFMHACGHDSHITIGLGVALWIAQNKDKLTGKVKIVFQPAEEGVRGAAAIAQSGIIDDADYFASSHISFCANTGTVIANPRNFLSTTKIDIRYKGKPAHAGAAPHLGRNALLAAAHTVTQLHGIARHGEGMTRINVGVLKAGEGRNVIPSSAELQLEVRGENKAINEYMTEQVMQIAKGISISFDVAYETEIVGEAVDMNNDVELIKLIEEISLEQPQINNVNSDYAFNASEDATILGRRVQEHGGKAIYFILGADRTAGHHEAEFDFDENQLLTGVNIYTSLVQKLLS

SEQ ID NO: 36276 - protein, 172 aa, Magnaporthe grisea 70-15
MKVEPRNQSENNDLLGYRADPHFPHIKHLQQPAQSTEDKHAQPPVTFRGFDVEPAAALDISIMGLAYNTYLNSNKIFGCKNCKAHLSNHEDIISRNFRGQHGKAYLFSMVVNVETGEPNERNMTTGRHIVRDIMCKQCKEIVGWKYDKAFEATEKYKEGKFILEAELLCSVS

SEQ ID NO: 36277 - protein, 386 aa, ASPERGILLUS NIDULANS FGSC A4
MVTVMSAVNGIDIPKNMQVSLQTSNKRDAVLGVSTASETTEAEPTAIDAHPSPLWTRIRAYCREAFSEFFGTLILVLFGNGVVAQVVLSNNQKGDYQSISWGWGLGVMLGVYVSGISGSHLNPAVTFAMCVLRKFPWRKWPVYAISQLLGGMSAAAIVYGNYKSAIDTYEGGPGIRTVPGYSDTASAGIFCTYPAEFMTRTGQFFSEFVASSILMFVIFALIDKGNMGAGPFMPLGMFFTIFGIGACFGWETGYAINLARDFGPRLVSYMLGYGTEVWKAGNYYFWRSNNPSLQRYQLWPPSSGGSVAWSDRTLRNTMKPIAVPEQIRNRHPYTYKSHMRPEVSMSLNNQKVALQQRLVDHDLCPSGGFILDNGGTTINTYMSLNG

SEQ ID NO: 36278 - protein, 593 aa, Ralstonia eutropha JMP134
MSVIEVKVPDIGDFDAVELIEVLIKPGDTVEQEQSLIVLESDKASMEVPSPVAGKVVDVRVNVGDKVGQGTVICTVEAEAAAAAPAPAPAPAPAAAPAPAAAPAPAPAAASHAGGADIQCEMLVLGAGPGGYSAAFRAADLGMNTVLVERYATLGGVCLNVGCIPSKALLHNAAVIDEAKALAAHGILFGEAKIDLDGLRHYKNQVVGKLTGGLAGMAKARKVQVVRGIGTFLDPHHLEVDATEGEGKQTTGKKTVIRFEKAIIAAGSQAVKLPFIPEDPRIVDSTGALELPEVPNKMLVVGGGIIGLEMATVYSTLGADIDVVEMLPGLMSGADRDLVKVWEKKNKDRFGKVMLNTKTVAVEAKPDGIYVKFEGEQAPAEPQRYDLVLVSVGRSPNGKRIGAEKAGVAVTDRGFINVDSQMRTNVPNIFAIGDVVGQPMLAHKAVHEAHVAAEAAHGEKAYFDAKQIPSVAFTDPEVAWAGLTEDQCKEQGIKYSKGVFPWAASGRAIANGRDEGFTKLIFDEETHRIIGGGIVGTHAGDLISEVCLAIEMGADAVDIGKTIHPHPTLGESIGMAAEIYEGTCTDVPPPRKR

SEQ ID NO: 36279 - protein, 436 aa, Xanthomonas axonopodis pv. citri str. 306
MRQHTASFGHFVLERMTPFQWRAVAVCVLLTMLDGFDVMAMAFTAPHVSADWQLSGKLLGMLFSAGLIGMALGALGLAPLADRIGRRALTLACLAILTIGMGMSALASTAWQLGALRLLTGLGIGGMLACVAVTAGEFSSPRWRNTAIVLQVTGYPVGATLGGMIAELLMQQWSWPAVFVLGAVASLLCVPLVLAFLPESLEFLIMRRPPDALARFNAVLARMGLPPHDALPPLPPQSATQPQGYSALFDVAMRRHTLLIALGFFSLMFAFYFVISWTPKLLVTAGSSATEGVTGGVLLNLGGICGGLLFSGLASCVRLSRLTVGSLLLMGLAMLASGLCSTQLSWALAVALLTGAAMFAAVGGMYAIVPIVFNAAVRSTALGWAIGVGRFGAILSPFCAGALLDAGWSPAMLYLACSVPLLFAVVAVLGMRLPNR

SEQ ID NO: 36280 - protein, 611 aa, Geobacter sulfurreducens PCA
MCGIVGKYYFNKNAGDSSDIDAMMQAIYHRGPDSSGKYINGRAALGFQRLSIIDTVSGHQPLYNETKTIVLLANGEIYNYKEFVPFLESKGHVFSTRSDCEVIIHLYEEYGIEFISKLNGMFAFCLYDTRNDVMFIARDRVGIKPLYYHLNKEAIIFGSEIKGILASGEVVTEEANDCLAEYLCFRYVANFRTFFSSVNALEPGTYIKISPNGCTFEKFWDLSKYVLNYAQDGDLVETVDAALTASVQRQMMTDVPLGTQLSGGVDSSLVSKLAAGYSPGLKTFTVSFFESAYDESAYARLLADSAGLEYHQIRVDGKTFADTLPKVIWYHDEPLCHANSVHMYLLCTYARQFVTVLLTGEGADELFAGYPRYQICRFGDAYNKLNPSVASLVKSVLKGVPARKIVKIVDNLGLGARELALWNSSFTTKEKVSWLLDSGDVTLDARSALVDSVWNDELSLFDNLLLYEQKSYLQPILMRQDKMSMAASVESRVPVLDNEMLDVANTIPYQYKVRHFTPKHVFKKVAERHISRKIVYKKKVGFGVPVDEWLRDHSGLGRYLDLLLDTARGINGVSRPRIEQLIAEHASRRYNHGDVLWPLVNYAIWREQFFK

SEQ ID NO: 36281 - protein, 651 aa, Wolinella succinogenes
MNALLQEQDLPVLELMAKTVRFLAADMVQAANSGHPGAPMGLADVVSVLSFHLRHSPKNPQWLNRDRLVFSGGHASAMIYSLLHLWGYDLPLEELKRFRQKDSKTPGHPEFGHTAGVEITTGPLGQGVANAVGFAMASKYAAHLLNSEETTLIDHKVYCLCGDGDLEEGISYEACSLAGHHQLDNLILIYDSNNITIEGELSLAFSEDVKGRFEAQGWEVFEVCGHDVLAIHKVFSEAKRADKPVLIIAKTTIAKGCKTMEGYAKTHGAPLGEEEIRASKEKNGFDPSEKFYIPEAALLRFRNALEMGETMENLWNEKLQKAPKEKKQLLEQLLSPDFSAVDFPVFEEGKKIATRSSNGEILNRLSSALPGFIGGSADLAPSNNTDLKGAGNFPMGKNFHFGIREHSMAAITNAIANYGLFMPFCATFFVFSDYMAPSVRVASIMGAKNYFIWTHDSIGVGEDGATHQPIEQLTHFRAMPGLYLFRPADANENVACWQVALRLKAPCAFVLSRQNLPVLPRVESEKVAKGAYTIRACENPAIVLLATGSEVSLALETAEVLAKEGVSVNVVSAPCFDLLVAQDKRYLRSLFPEGAKVIAIEASRGLEWYRFADEVIGMDSFGASAPGDELFAHFGFTVENLLSKAKELLGR

SEQ ID NO: 36282 - protein, 524 aa, Mesorhizobium sp. BNC1
MSTLGAYLRLARAGWILLREGVIAAFPGDQFEGMPRFGWRLARLLSRRRSSHRARTERLAIAVDRLGPSYVKLGQFLATRPDVVGHELARDLASLQDRMDTFPQERAVMAIEASLGAPVGTLYREFGAPVAAASIAQVHPAKIIREGEIQKVAVKVIRPGVRRRFYNDLESFFLAARLQERFIASSRRLRPVEVTQTLAQTTKIEMDLRLEAAAISEIHENSKEDPGFRVPWVDWQRTGRDVLTLEWIDGIKMSDTEALRAAGHDLERLATTLIQSFLRHTLRDGFFHADMHPGNLFVEANGTIVAVDFGIVGRIGRKERRFLAEILYGFITRDFRRVAEVHFEAGYVPSHHDVAAFAQALRAIGEPIHGQPAETISMARLLTLLFEVTELFDMQTRPELLLLQKTMVVVEGVSRTLDPHFNMWRAAEPVVSEWIEKNLGPQGLFMDAREGAHALMMLVRQAPELAIRLDHVSRGMEAFLNSGLRLETETTRAIGRARARYERAGHLALWVIALLLFFFALRLL

SEQ ID NO: 36283 - protein, 584 aa, Candida albicans SC5314
MSSSYSLDKINPKLLRRIYRACRPTNDEPNLALNLEICDYVNAKKGSAPRDAAIAVVKLISQRDPQTSELAIALLDNLVKNCGYPFHLQISRKEFLNELVKRFPERPPLRYTRVHRLILAQIEEWYQTICRTSKYKDDFGYIKDMHRLLSNKGYVFPEVKVEDVAVLNPNDNLKSLEELQQEESIVHSAKLQELIRRGRPQDLQEANKLMKIMAGFKDDNVKENKKQIKQDITRLTRKVEILGEMLTSIESQGGKIDDSSDEAIIELYSSVKSSQPIINKMIEQSSDHDDNEEDVNKLLALNESANNVINKFQLLKGGNVSEASKIKTGSASQELNLIDFDDAPEDVSASKEQGYTDLLSDLSNLTFSENNNATTASSSTNVNPLNLYGAGGSISLGGGSGFPTISNTPSIYQPTPSAAQGKQTSSSNFDLLADLNSPSPQLQSNTNSSSLDPFGLQFPATTPSQVTGQGEGYIRMIPINQTSNLKIEIGVKSSSANSLKGKILFSNLQTSTISNLKFLIAVPKSCKLELRPQTSDKIFGFNNHGIQQDFNIENPLSKQLKIKWKVEYHINGSANEETGVSVLE

SEQ ID NO: 36284 - protein, 400 aa, Rhodobacter sphaeroides 2.4.1
MSLAHGRPYLAIPGPSAMPDRVLNAMHRAAPNIYEGALHEMVASLWPDLKRIAGTEHQVALYIANGHGAWEAANANLFSRGDRALVLATGRFGHGWAESARALGVDVQLIDFGRAAPADPARLEEALRADPGHRIKAVLVTHVDTATSIRNDVAALRAAIDAVGHPALLAVDCIASLACDEYRMDEWGADVTVGASQKGLMTPPGLGFVWYSDRALERCRASDLRTPYWDWTPRSFGTEFWQHFCGTAPTHHLYGLRAALDMILDEGLPAVWARHEALARAVWTAFDHWGAGNPEIALNVADAACRGRSVTAARMGAPHATRLREWTETRAGVTLGIGLGMALPSEPAYHGFLRVAHMGHVNAHMTLGALAVMEAGLAALEIPHGEGALAAAAASLGAAA

SEQ ID NO: 36285 - protein, 507 aa, Methanococcus maripaludis S2
MKDIKCFQKTGNILKFEELRAKLKINDKNDVSPLEIKVIDENSEQYGISKETLMENAGRAVYEEIVNLNVDFSKTYLFCGTGNNGGDGFVIARHLANNFATFVVLIGNERKIKTSETQRNFNTVKNMEFFGNLDYANILDDERAVELLKTIEKELENKQNDHILIIDAMLGTGITGILKNPYSTIVDYLNVLKSKYSKKLKMVSVDIQTGNLNADLEVILHKRKFENKNKNFVVKDIGIPKYIENMVGKGDFYLLNERKQNSHKGQNGNVLVIGGSKEYHGAPVFSALAASKFADIVTVASVSNVMNTVSNYPELMPYELTGDYIVQNHVDELLELSKNYDCVVLGSGISVNSDTKEFVNSYLNETNGKVVIDADAIKLIDYSNFKFKNNFIFTPHKKEFEYIENYIESSGFKSTVVLKGSLDIIFNSNNIKMNITGNQGMTVGGTGDILCGIIGAIYACNDAFPSACCGTYINGYCGDLLEKEYGYYYNSTDIIKILPKALKELLY

SEQ ID NO: 36286 - protein, 158 aa, Zea mays
MSLIRRSNVFDPFSLDLWDPFEGFPFGSGNSSSLFPSFPRTSSETAAFAGARIDWKETPEAHVFKADVPGLKKEEVKVEVEDGNVLQISGERNKEQEEKTDTWHRVERSSGRFLRRFRLPENAKTEQITAAMENGVLTVTVPKEDAKKPEVKSIQISG

SEQ ID NO: 36287 - protein, 489 aa, Dechloromonas aromatica RCB
MKLKPLKMTVAAIAVAAALGGAYSLGQYAPFASANATTQPAASSVAPAAAPVSTPNGLPDMRSIVANNAQAVVNISVTGTRKTGANLPGMPQLDPDDPLYQFFRRFGGQMPQDNEPTHGLGSGFIVTPDGTVLTNAHVVDGAEEVTVKLNDKREFKAKVLGLDKASDVAVLRIDAKNLPTVKIGSSTQTAVGEWVLAIGSPFGFESSASAGIVSAKSRNLPDGSYVPFIQTDVAVNPGNSGGPLFNMNGEVIGINSQIYSRSGGYQGLSFAIPIEVAMNVEKQIVTHGKVQRGKLGVTIQEVNQSLADSFGLPKPAGALVAAVEKGSPAAKAGLEPGDVILGIDGKTVETPGELPAAIATKLPGESARLQIWRKGGTQNIDVKVGSFGDEKVAANDTQPATKGRLGVAVRPLTPEERRQAEIKGGVLVEQADGAAGRAGIRPGDIIVSVNGQPIGDVEQLRSLIAKSGKKAAILIERGDSRLFVPVDLG

SEQ ID NO: 36288 - protein, 243 aa, Anaeromyces sp. W-98
MKSILSLTLSFLGLISKMTTTLAAPAPASAWNGSHVAMDFNYPDSNPFEMSSWSNGGMFNCVWSPNNDRFENGKLKLTIDRNGSGYTCGEYRTKNYYGFGMYQVNMKPIKNPGVVSSFFTYTGPSDGTKWDEIDIEFLGYDTTKVQFNYYTNGVGNHEHVHYLGFDASQGFHTYGFFWSRNSITWYVDGTAVYTAYSNIPDTPGKIMMNAWCGTGVNDWLRAYNGRTPISAYYDWISYDAPRN

SEQ ID NO: 36289 - protein, 584 aa, Saccharomyces pastorianus
MTISDHPETEPKWWKEATIYQIYPASFKDSNNDGWGDLKGITSKLQYIKDLGVDAIWVCPFYDSPQQDMGYDISNYEKVWPTYGTNEDCFELIDKTHKLGMKFITDLVINHCSTEHEWFKESRSSKTNPKRDWFFWRPPKGYDAEGKPIPPNNWKSFFGGSAWTFDETTNEFYLRLFASRQVDLNWENEDCRRAIFESAVGFWLDHGVDGFRIDTAGLYSKRPGLPDSPIFDKTSKLQHPNWGSHNGPRIHEYHQELHRFMKNRVKDGREIMRVGEVAHGSDNALYTSAARYEVSEVFSFTHVEVGTSPFFRYNIVPFTLKQWKEAIASNFLFINGTDSWATTYIENHDQARSITRFADDSPKYRKISGKLLTLLECSLTGTLYVYQGQEIGQINFKEWPIEKYEDVDVKNNYEIIKKSFGKNSKEMKDFFKGIALLSRDHSRTPMPWTKDKPNAGFTGPDVKPWFFLNESFEQGINVEQESRDDDSVLNFWKRALQARKKYKELMIYGYDFQFIDLDSDQIFSFTKEYEDKTLFAALNFSGEEIEFSLPREGASLSFILGNYDDTDVSSRVLKPWEGRIYLVK

SEQ ID NO: 36290 - protein, 153 aa, Streptococcus pyogenes
SMAYVLWNHFMNINPKTSRNWSNRDRFILSAGHGSAMLYSLLHLAGYDLSVEDLKNFRQWGSKTPGHPEVNHTDGVEATTGPLGQGIANAVGMAMAEAHLAAKFNKPGFDIVDHYTFALNGDGDLMEGVSQEAASMAGHLKLGKLVLLYDSND

SEQ ID NO: 36291 - protein, 426 aa, Escherichia coli
ADTKAKLTLNGDTAVELDVLKGTLGQDVIDIRTLGSKGVFTFDPGFTSTASCESKITFIDGDEGILLHRGFPIDQLATDSNYLEVCYILLNGEKPTQEQYDEFKTTVTRHTMIHEQITRLFHAFRRDSHPMAVMCGITGALAAFYHDSLDVNNPRHREIAAFRLLSKMPTMAAMCYKYSIGQPFVYPRNDLSYAGNFLNMMFSTPCEPYEVNPILERAMDRILILHADHEQNASTSTVRTAGSSGANPFACIAAGIASLWGPAHGGANEAALKMLEEISSVKHIPEFFRRAKDKNDSFRLMGFGHRVYKNYDPRATVMRETCHEVLKELGTKDDLLEVAMELENIALNDPYFIEKKLYPNVDFYSGIILKAMGIPSSMFTVIFAMARTVGWIAHWSEMHSDGMKIARPRQLYTGYEKRDFKSDIKR

SEQ ID NO: 36292 - protein, 295 aa, Oryza sativa
MGNASGREEDPAAAAGEGDVEDSSVRSSERGFPPYGGGGNHVRRACSVGVVGGGGGAGSPPGSPGRSLSPRMFVPQTPVPPLQRAADVTPVFNRILMNEQEEEFDGPPQKEIPVLIVWTLGGKNVSVEGSWDNWKSRKPMQKSGKDHSLLLILPSGVYRYRFVVDGERKCLPDLPCETDIMGNAVNLLDVHDFVPESVESVAEFEPPPSPDSSYSIQAPEEKDFSKEPPVLPSQLHLGVLNSQNSDESCARPQHIVLNHLFIEKGWGAHPLVALGLTHRFESKYVTVVLYKPIER

SEQ ID NO: 36293 - protein, 277 aa, Triticum aestivum
  misc_feature (227)..(227): Xaa can be any naturally occurring amino acid
  misc_feature (235)..(235): Xaa can be any naturally occurring amino acid
  misc_feature (255)..(255): Xaa can be any naturally occurring amino acid
  unsure (1)..(277): unsure at all Xaa locations
AYLGDTSEQVCTKKQAGTGPEFPGYRRPTRPHTVRTFSFTAPPKPGPDVPFKFGLIGDLGQTFDSNSTLSHYEANGGDAVLFVGDLSYADAYPLHDNRRWDSWARFVERSVAYQPWIWTAGNHELDYAPEIGETVPFKPFTRRYRTPYRAAGSTEPLWYSVKVASAHIIVLSSYSSYGKYTPQWTWLSDELGRVDRKATPWLIVLIHSPWYNSNNYHYMEGETMRVXFQSWLVGXQVDLRLAGHVNSYEGSRRFXNVALQIRNGKGTAVGGHGTRPV

SEQ ID NO: 36294 - protein, 187 aa, Scenedesmus vacuolatus
AGGIAEMAGMGEDIRERTDALDAAGNTTAAIGKGFAIGSAALVSLALFGAYITRAKIDLIQSSILDPKVFAGLLVGAMLPYWFSAMTMKSVGKAALAMVEEVRRQFNTINGLMEGTARPDYSRCVKISTDSSLREMIAPGALVMLSPIIVGMLFGTRTLAGMLAGGLVSGVQMAVSMSNTGGAWDNA

SEQ ID NO: 36295 - protein, 664 aa, Erwinia carotovora subsp. atroseptica SCRI1043
MSSRKELANAIRALSMDGVQKAKSGHPGAPMGMADIAEVLWRDYLNHNPANPNWANRDRFVLSNGHASMLIYSLLHLSGYDLPIEELKNFRQMHSKTPGHPEYGYTAGVETTTGPLGQGVANAVGMAIAERTLAAQFNRPGHDIVNHHTYTFLGDGCMMEGISHEVCSLAGTMKLGKLTAFYDDNGISIDGHVEGWFTDDTAARFEAYGWHVVRGVDGHDADAIKRAIGEAQLVTDKPSLLMCKTVIGFGSPNKAGTHDSHGAPLGQAEVAASREQLGWTHAPFDIPADIYAAWDAKPAGQRKEAAWDEAFSAYASAYPELAAEFTRRTGGELPTHWQADAQKFIEDLQANPAKIASRKASQNALEAYGKLLPEFLGGSADLAPSNLTIWSGSVSLDKDHAGNYIHYGVREFGMTAIANGIALHGGFVPYTATFLMFVEYARNAVRMAALMKIRSIYVYTHDSIGLGEDGPTHQPVEQLASLRVTPNMSNWRPADQVETAVAWKYAIERQDGPTSLILSRQNLAQQTRTAEQLANVVKGGYVLKDSDGQPELILIATGSEVELAVGAYDKLTAAGRKVRVVSMPSTDAFDKQDAAYREAVLPKAVSARVAIEAGIADYWFKYVGLNGAIVGMTSFGESAPAELLFEAFGFTVDNVVEKAQALLK

SEQ ID NO: 36296 - protein, 237 aa, Zea mays
MAPRVADKSPLPPATGLGLGVGGGVGGVGMGPHYRGVRKRPWGRYAAEIRDPAKKSRVWLGTYDTAEEAAKAYDSAAREFRGAKAKTNFPFPSQCSVASGAAGSASSNSTVDSSGGGSGCGIQAPMQAMPLPPALDLDLFHRAAAVNAVSTGMRFPFKGYPVACPTPQQYFFYEQAAAAASGYRMLKVAPPAVTVAAVAQSDSDSSSVVDHSPSPPAVTANKVGFELDLNWPPPAEN

SEQ ID NO: 36297 - protein, 230 aa, Glycine max
MANLGGRTNNGISTNHVEIPIHISNGVELKPIQEVALAESSSIIDYSQRAQWLRAAVLGANDGLVSVASLMMGVGAVKKDISAMLLAGFAGLVAGACSMAIGEFVSVYTQYDIEMTQIKREREANNNRGVNEETQREKLPNPFQAALASALAFSVGALVPLIAAVFIRNHKIRMGVVAAAVSLALLVFGGVGAVLGKTPVTRSCLRVLVGGWMAMAITFGLTKLIGSADL

SEQ ID NO: 36298 - protein, 393 aa, Triticum aestivum
  misc_feature (258)..(258): Xaa can be any naturally occurring amino acid
  misc_feature (346)..(346): Xaa can be any naturally occurring amino acid
  misc_feature (367)..(367): Xaa can be any naturally occurring amino acid
  misc_feature (374)..(374): Xaa can be any naturally occurring amino acid
  unsure (1)..(393): unsure at all Xaa locations
NKFVQKSRLVPVRNSRDIVDPRVRFLYLIMEYLPGGDMMTLLMRKDALTEDEAKFYIAETVLAIESIHKHNYIHRDIKPDNLLLDLSGHLKLSDFGLCKPLDSSNFPNLNEPDYTPGKGAKPLPDNTSRLTNSSAPKRTQQEQLSHWQKNRRMLAYSTVGTPDYIAPEVLLKKGYGMECDWWSLGAIMYEMLVGYPPFYSEDPMSTCRKIVNWRSHLKFPEEAKLSSETKDLISKLLCNVEQRLGTKGAHEIKAHTWXFRGVPWGKLYQMKAAFIPEVNGELDTQNFEKFEETGAQVQSSSKAGPWRKMLPSKDANFVGYTYKNFEIVNDDEVAGIAELKKKSPNXKTATIKTLFENMDEDEPVTGXLNMLPIXENFTKRQQTYNSTNRYELK

SEQ ID NO: 36299 - protein, 300 aa, Magnaporthe grisea 70-15
MASKPGDFDAVRKDIVSLLDQPEYDDGSAGPVLVRLAWHSAGTYDKSTDTGGSNGAGMRYEAEGGDPANAGLQNARQFLEPVKARHPWITYADLRTLAGVVAVRAMGGPEIPWRAGRTDFADDSRVPPRGRLPDATQGAAHVRDIFYRMGFDDREIVALSGAHSLGRCHPANSGFEGKWVNNPTRFSNQYFRLLLSEDWREKTVAGTGLKQFVAVDEVTGDELMMLPTDLSLTSDPVFARWVKVYRDDQDLFFADFAKVFDKLMELGIKRDAEGKVINKENVEGGYVSAPKKQGKIASKL

SEQ ID NO: 36300 - protein, 473 aa, Pyrus communis
MCMLSRNATFNSHGQDSSYFLGWQEYEKTPYHEVHNTNGIIQMGLAENQLCFDLLESWLAKNPEAAAFKKNGESIFAELALFQDYHGLPAFKKAMVDFMAEIRGNKVTFDPNHLVLTAGATSANETFIFCLADPGEVLLIPTPYYPGFDRDSKWRTGVAIVPIHCTSSNGFQITETALEEAYQEAEKRNLRVKGVLVTNPSNPLGTTMTRNELYLLLSFVEDKGIHLISDEIYSGTAFSTPSFRSVMEVLKDRNCDENSEVWQRVHVVYSLSKDLGLPGFRVGAIYSNDDMVVAAATKMSSFGLVSSQTQHLLSAMLSDRKLTKNYIAENHKRLKQRQKNLVSGLQKAGISCLNGNAGLFCWVDMRHLLRSNTFEAEMELWKKIVYEVHLNISPGSSCHCTEPGWFRVCFANLPERTLDLAMQRLKAFVGEYYNVPEVNGRSQSSHLSHSRGQSLRKWVSRLSFDDRCPIHGR

SEQ ID NO: 36301 - protein, 273 aa, Xanthomonas axonopodis pv. citri str. 306
MSRQLVGELISEAVAMFIIIALGDSVAAMYILYDPSPYQNAYWGVCIAWGLAVTLAIYVTGSVSGTHANPAVTLALALFRGFSWKKVLPYWVAQVIGAFLGAAIVYQLYGPVIDHFNQLHQLTREAGGAAGVFFTAPGLAVTPMHALVDQIIITAFLIFGIFAITEQFNEAAPTANSGALMIGLLVATLGASMGYLEAWAMNPARDFGPRLFAYFAGWGEAALPAKDNYWWIPIVGPLIGGPIGALAYQWLILPFLPARVRHLQGGPKPLDPL

SEQ ID NO: 36302 - protein, 766 aa, Zea mays
MASHIVGYPRMGPKRELKFALESFWDGKSTAEDLEKVATDLRASIWKQMADAGIKYIPSNTFSYYDQVLDTTAMLGAVPERYSWTGGEIGFDTYFSMARGNATVPAMEMTKWFDTNYHFIVPELGPNTKFSYASHKAVNEYKEAKALGVDTVPVLVGPVSYLLLSKPAKGVEKGFPLLSLLSSILPVYKEVIAELKAAGASWIQFDEPTLVLDLDSDKLAAFSAAYAELESVLSGLNVLVETYFADVPAESYKTLTSLSSVTAYGFDLVRGTQTLGLVTSAGFPAGKYLFAGVVDGRNIWADDLATSLSTLQSLEAVVGKDKLVVSTSCSLMHTAVDLVNETKLDSEIKSWLAFAAQKVVEVDALAKALAGQKDEAYFAANAAAQASRKSSPRVTNEEVQKAAAALKGSDHRRGTNVSARLDAQQKKLNLPILPTTTIGSFPQTVELRRVRREYKAKKISEEEYVTAIKEEINKVVKLQEELDIDVLVHGEPERNDMVEYFGEQLSGFAFTANGWVQSYGSRCVKPPIIYGDVSRPNPMTVFWSKTAQSMTSRPMKGMLTGPVTILNWSFVRNDQPRFETCYQIALAIKKEVEDLEAGGIQVIQIDEAALREGLPLRKAEHAFYLDWAVHSFRITNCEIQDTTQIHTHMCYSNFNDIIHSIIDMDADVITIENSRSDEKLLSVFREGVKYGAGIGPGVYDIHSPRIPSAEEIADRIDKMLAVLDTNILWVNPDCGLKTRKYTEVKPALTNMVSAAKLIRTQLASAK

SEQ ID NO: 36303 - protein, 298 aa, Agrobacterium tumefaciens str. C58
MATKMSTPSASSLEWMYKIMTVRMDKRFADLRAENRPALITYFMGGDPDFQTSLGIMKALPEAGADVIELGMPFSDPMADGPAIQLAGQRALKGGQTLKTTLDLAREFRKQDNATPIVMMGYYNPIYIYGVEKFLDDAIASGIDGLIVVDLPPEMDDELCIPALARGINFIRLATPTTDGKRLPAVLKNTSGFVYYVSMNGITGSALPDPSLISGAVGRIKAHTELPVCVGFGVKTADHAKAIGAVADGVVVGSAIVNQIAGSLTKDGQATADTVPAVTTLVKGLSTGVRASRLAAAE

SEQ ID NO: 36304 - protein, 354 aa, Triticum aestivum
MASLADLVNLDLSDCTDKIIVEYLWVGGSGIDIRSKARTVNGPITDASQLPKWNYDGSSTGQAPGEDSEVILYPQAIFKDPFRRGDNLLVMCDCYTPQGVPIPTNKRHNAAKIFNTPNVAAEETWYGIEQEYTLLQKDVNWPLGWPIGGYPGPQGPYYCAAGADKAFGRDIVDAHYKACLYAGINISGINGEVMPGQWEFQVGPSVGIAASDQLWVARYILERITEVAGVVLSLDPKPIPGDWNGAGAHTNYSTKSMREAGGYGVIKTAIEKLGKRHAQHIAAYGEGNERRLTGHHETADINTFKWGVADRGASIRVGRDTEKDGKGYFEDRRPASNMDPYVVTSMIAETTLLL

SEQ ID NO: 36305 - protein, 213 aa, Methanococcus maripaludis S2
MDSEKILNAVKEARTLAKPRNFTQSVDLIVNLKELDLSRPENRLKEQIVLPSGRGKDVAIAVIAKGDLAAQAEDMGLTVIRQEELEELGKNKKTAKKIANAHGFFIAQADMMPLVGKSLGPVLGPRGKMPQPVPANANLAPLVARFQKTVAINTRDKALFQVYIGTESMSDDELAANAEAILNVVSKKYEKGLYHVKNAFTKLTMGAAAPIEK

SEQ ID NO: 36306 - protein, 629 aa, Haemophilus influenzae Rd KW20
MEKNQQSTAEQYSEQIEQLMELGRTQGYLTFAEINDLLPEDAIDPEYYDKLLQTLQNDAGIPVLDEAPESDDMMLSDTIPDEDAVEEATQILSNVESEIGRTTDPVRMYMREMGTVDLLTREDEISIAKRIEGGIDEVQTSISAYPEALNGLLKNYDDVEKGNFRLTDLITGFVDPNAEIEEHNGLDEDFSDEDDEEESSNADVEDNEDEEDNESESTSDSSDSDNSIDPEVAREKFQQLREQHSKTLAVIEKHGRSGKRAQDQIALLGEIFKQFRLVPKQFDLLVLSMKEMMKRVRYQERQLQKILVDIAGMPKDDFEKIITTNGSNSEWVAKALKSSKPWAKRLIKYEDRIYEALNNLAITEENTKLTITQMRDICDAVARGEQKARRAKKEMVEANLRLVISIAKKYTNRGLQFLDLIQEGNIGLMKAVDKFEYRRGYKFSTYATWWIRQAITRSIADQARTIRIPVHMIETINKLNRISRQLLQEMGREATPEELAERMGMPEDKIRKVLKIAKEPISMETPIGDDDDSHLGDFIEDSTLELPLDSATAQSLKVATHEVLEGLTPREAKVLRMRFGIDMNTDHTLEEVGKQFDVTRERIRQIEAKALRKLRHPSRSETLRSFLDE

SEQ ID NO: 36307 - protein, 510 aa, Zea mays
MATAMGAMAATCMASIPAAATFPGDLGVGRRRAVVPGWRAGGRRLRATPPARRPFLFSPKGVSDSRSSQTCLDPDASTSVLGIILGGGAGTRLYPLTKKRAKPAVPLGANYRLIDIPVSNCLNSNVSKIYVLTQFNSASLNRHLSRAYGNNIAGYKNEGFVEVLAAQQSPENPNWFQGTADAVRQYMWLFEEHNIMEFLILAGDHLYRMDYQKFIQAHRETDADITVAALPMDEQRATAFGLMKIDDEGRIVEFAEKPKGEKLRSMMVDTTILGLDPERAKELPYIASMGIYVFSKDVMLRLLRENFPAANDFGSEVIPGATEIGLRVQAYLYDGYWEDIGTIEAFYNANLGITKKPVPDFSFYDRSAPIYTQPRYLPPSKVLDADVTDSVIGEGCVIKHCTINHSVVGLRSCISEGAVIEDSLLMGADYYETENDKNVLSETGGIPIGIGKNSHIRKAIIDKNARIGENVKIINFDNVQEAVRETEGYFIKSGIVTVIKDALIPSGTII

SEQ ID NO: 36308 - protein, 358 aa, Xanthomonas axonopodis pv. citri str. 306
MSQSKPLFPLNAWYAVAWDHEIKHVLSPRKLCNLDVVVYRTTSGAVVALEDACWHRLVPLSMGKLRGDDVVCGYHGLVYNTQGRCVHMPSQDTINPSACVRSFPVAEKHRYVWIWPGDPAKADTRLIPDLHWSHDPAWAGDGRTIHAKCDYRLVLDNLMDLTHETFVHGSSIGQDEVAEAPFDVVHGDRSVVVSRWMRNIDPPPFWASQIARHLDYRGKVDRWQIIRFEAPSTIAIDVGVAITGTGAPEGDRSQGVNGYVLNTITPETDTTCHYFWAFMRNYALHDQSLTTLTRAGVTGVFGEDEAVLEAQQRAIDAHPDHTFYNLNVDAGGMWARRVIDRLIAQEQRAQDLSLRMVG

SEQ ID NO: 36309 - protein, 433 aa, Alternaria alternata
MTKQALPAVSEVTKDTLEEFKTADKVVLVAYFAADDKASNETFTSVANGLRDNFLFGATNDAALAKAEGVKQPGLVCTSPSTTARTSSPRPSMRTYPRLRKVASTPLIGEVGPETYAGYMAAGIPLAYIFAETPEEREEFAKELKPLALKHKGEINFATIDAKSFGQHAGNLNLKVGTWPAFAIQRTEKNEKFPTNQEAKITEKEIGKFVDDFLAGKIDPSIKSEPIPESNDGPVTVVVAHNYKDVVIDNDKDVLVEFYAPWCGHCKALAPKYEELGQLYASDELSKLVTIAKVDATLNDVPDEIQGFLPSSLFPLARRMPQSTTLVPHCRGSRPVHRRERLTQASASVGEAVEDATESAKASASSATDSAASAVSEGTETVKSGASVASDSASSAASEATKSVKSAASEVTNSASSAASEASASASSVKDEL

SEQ ID NO: 36310 - protein, 476 aa, Geobacter sulfurreducens PCA
MTSDIKAILEQVVISPDVPIAEAIAQLDRAGTGSLVVCSADKKLYGLLTDGDVRRALLKAVDMGAPCGDIANRKPVITFVPLLPIEALRLMNHHDINHLPVLDAEGRVVDFLLRRDLVAEDELAARARRRLDSVVIPCSASIAEAIAQLDRAGTGALVLCSEGDRLHGLLTDGDIRRAVLRGISLDAPCQDVASRRPVTVEPSFSAAQALHLMNQHDINHLPVVDDTGRVVDFLLRRDLIADDQLNLSAVVMAGGYGKRLLPLTEQVPKPMLPVGDRPLLERTIDQLRRSGIREVNLTTHYLPDSIVEHFGDGDSFGVKLNYLKEDHPLGTAGGLKLMKKASDPFLVMNGDILTGVPFQEMFAYHRKNGAEITVGVRKYEVQVPFGVVECDDVRITGLKEKPSLTFFINAGIYLLEPSVCDLIPEGERFDMTDLIQKLLDEGRSVVSFPIMEYWLDVGRHEDYQKAQEDVRSGKIQ

SEQ ID NO: 36311 - protein, 364 aa, Zea mays
MGSTAGDVAAVVDEEACMYAMQLASSSILPMTLKNAIELGLLEVLQKEAGGGKAALAPEEVVARMPAAPSDPAAAAAMVDRMLRLLASYDVVRCQMEDRDGRYERRYSAAPVCKWLTPNEDGVSMAALALMNQDKVLMESWYYLKDAVLDGGIPFNKAYGMTAFEYHGTDPRFNRVFNEGMKNHSVIITKKLLDFYTGFEGVSTLVDVGGGVGATLHAITSRHPHISGVNFDLPHVISEAPPFPGVRHVGGDMFASVPAGDAILMKWILHDWSDAHCATLLKNCYDALPENGKVIVVECVLPVNTEATPKAQGVFHVDMIMLAHNPGGKERYEREFRELAKGAGFSGFKATYIYANAWAIEFIK

SEQ ID NO: 36312 - protein, 153 aa, Streptococcus pyogenes
PMAYVLWNHFMNINPKTSRNWSNRDRFILSAGHGSAMLYSLLHLAGYDLSVEDLKNFRQWASKTPGHPEVNHTDGVEATTGPLGQGIANAVGMAMAEAHLAAKFNKPGFDIVDHYTFALNGDGDLMEGVSQEAASMAGHLKLGKLVLLYDSND

SEQ ID NO: 36313 - protein, 573 aa, Saccharomyces cerevisiae; identical to SEQ ID NO: 747

SEQ ID NO: 36314 - protein, 153 aa, Streptococcus pyogenes
PMAYVLWNHFMNINPKTSRNWSNRDRFILSAGHGSAMLYSLLHLAGYDLSVEDLKNFRQWGSKTPGHPEVNHTDGVETTTGPLGQGIANAVGMAMAEAHLAAKFNKPGFDIVDHYTFALNGDGDLMEGVSQEAASMAGHLKLGKLVLLYDSND

SEQ ID NO: 36315 - protein, 88 aa, Bacillus sp.
DRVVIEQVETEEKTASGIVLPDTAKEKPQEGRVVAVGTGRVTENGEKIALEVKEGDSVIFSKYAGTEVKYDGKEYLILRESDILAIIG

SEQ ID NO: 36316 - protein, 544 aa, Bacillus sp.
MAKDIKFSEDARRSMLRGVDKLADAVKVTLGPKGRNVVLEKKFGSPLITNDGVTIAKEIELEDAFENMGAKLVAEVASKTNDIAGDGTTTATVLAQAMIREGLKNVTSGANPMVIRKGIEKATQVAVEELSKISKPIEGKDSIAQVAAISSADDEVGKIIAEAMERVGNDGVITIEESKGFSTELEVVEGMQFDRGYASPYMVTDSDKMEAVLDNPYVLITDKKISNIQEVLPVLEQVVQQGKPILIIAEDVEGEALATLVVNKLRGTFNAVAVKAPGFGDRRKAMLEDIAILTGGEVITEDLGLDLKSANITQLGRASKVVVTKENTTIVEGAGESDKIAARVNQIKAQIEETTSDFDKEKLQERLAKLAGGVAVLKVGAATETEMKERKLRIEDALNSTRAAVEVKGIVAGGGTALVNVKAVSSIGAEGDEATGVNIVLRALEEPVRQIAHNAGLEGSVIVERLKKEEAGFGFNAATGEWVNMVEAGIVDPTKVTRSVPLQHAASVSAMFTTEAVIADKPEENEGGGGMPDMGGMGGMGGMM

SEQ ID NO: 36317 - protein, 153 aa, Streptococcus pyogenes
PMAYVLWNHFMNINPKTSRNWSNRDRFILSAGHGSAMLYSLLHLAGYDLSVEDLKNFRQWRSKTPGHPEVNHTDGVEATTGPLGQGIANAVGMAMAEAHLAAKFNKPGFDIVDHYTFALNGDGDLMEGVSQEAASMAGHLKLGKLVLLYDSND

SEQ ID NO: 36318 - protein, 242 aa, Neisseria gonorrhoeae FA 1090
MQENPTVWLFDLDNTLHDADAGIFHLINRAMTRYMARRLKLSESAASDLRQDYWHRYGATLAGLQIHHPEIDIAEFLRESHPIDAILTRLHGMADTENTLCRLNGRKAVFSNGPSFYVRAVAGALGLENCFDALFGTDDFGLLYKPNPQAYLNVCRLLDVPPECCIMVDDSADNLHQAKALGMKTVRFGAKSHAPPFIDASVSDMAQLARYAETLSERRQNHYNTRTPRKYERMLCVKPSLS

SEQ ID NO: 36319 - protein, 316 aa, Erwinia carotovora subsp. atroseptica SCRI1043
MNQLEALKQFTVVVADSGDIDSIRQFSPQDATTNPSLILKAATLPQYQPLFDDAIAYANLQGGSPETRLINASDRLAVNIGAEVLKSIPGRISTEVDARLSFDRGMCVAKARKLIGMYQEKDIPRSRILIKLAATWEGIRAAEELEKEGINCNLTLLFSFAQARACAEAGVFLISPFVGRIYDWYQEKQPTSDYQAESDPGVISVRDIYDYYKRHRYQTVIMGASFRKVEQILALAGCDRLTISPALLEQLKNSSDPVERQLTPSTEAFHPPSPLSEAEFRWEHHQDAMAVDKLAEGIRLFAADQQKLEALLAAKL

SEQ ID NO: 36320 - protein, 539 aa, Magnaporthe grisea
MPSLGFLKKKRTRDGNNDNSSQPASPVTPTAAQSFEQAQVLGAPSAINNSHAHTQQQSYLVPQPGYSVGTEVQAQQPQMNSISQQQQQAFAPPAHTPSPGTIDPQQSLPSISNLMNPAVQQQNSQPSANFQPQSQSQSQSQSQFPLPPSHGNGDQSQQQNFQVQQQIQSQQDAMDIQPSQVQDQSHSQQAQPQHQPQHHVQHHVNHAHQGSQDQQTRVTKGKYSLTDFEILRTLGTGSFGRVHLVQSRHNQRFYAVKVLKKAQVVKMKQVEHTNDERKMLGEVKNPFLITLWGTFQDCRNLYMVMDFVEGGELFSLLRKSGRFPNPVAKFYAAEVTLALEYLHAKNIIYRDLKPENLLLDRHGHLKITDFGFAKRVPDKTWTLCGTPDYLAPEVVSNKGYNKSVDWWSLGILIYEMLCGYPPFWDSGSPMKIYENILKGKVRYPAYINPDAQDLLQRLITADLTKRLGNLYGGSQDVRNHPWFAEVTWDRLARKDIDAPYTPPVKAGAGDASQFDRYPEETERYGQTGHDEYGNLFPGF

SEQ ID NO: 36321 - protein, 478 aa, Rhodospirillum rubrum
MTIPVLVWFRDDLRLADNPALCAALDSGAPVIPFYLLDDSTSDGHRPLGGATRWWLGRSLTSLAESIAQRGGRLVLRRGEALSAVPELAAETDAAALFANRLYGMDSLRDDDLFMVLRVAGLTVRLFDSGLLHRPEAVTTKTGRPFRVFTPFWKTLSATLDPGLPLAAPDSFPPVDDPPPASDSLADWSLEPTTPDWAGGLRDTWQPGEAGAQARLEAFFNGPVADYASGRDRPDKPLTSKLSPHLRFGEISPRQVWTAARHHPPGGGMDAFLRELGWREFCHHLLFQAPTMAEEPLKAEFLAFPWTEAKEIGPALAAWQSGETGYPIVDAGMRELWHTGWMHNRVRMIAASFLIKDLLIPWQHGERWFWDTLVDACPANNAAGWQWVAGCGADAAPFFRIFNPVTQGERFDPEGAYVRRWLPELADLPSSLIHRPWEAPPLILRQAGVTLGKTYPPPLIDHAHARVRALEALAVVNR

SEQ ID NO: 36322 - protein, 522 aa, Neisseria gonorrhoeae FA 1090
MKHRTFFSLCAKFGCLLALGACSPKIVDAGTATVPHTLSTLKTADNRPASVYLKKDKPTLIKFWASWCPLCLSELGQAEKWAQDAKFSSANLITVASPGFLHEKKDGEFQKWYAGLNYPKLPVVTDNGGTIAQNLNISVYPSWALIGKDGDVQRIVKGSINEAQALALIRNPNADLGSLKHSFYKPDTQKKDSAIMNTRTIYLAGGCFWGLEAYFQRIDGVVDAVSGYANGNTENPSYEDVSYRHTGHAETVKVTYDADKLSLDDILQYYFRVVDPTSLNKQGNDTGTQYRSGVYYTDPAEKAVIAAALKREQQKYQLPLVVENEPLKNFYDAEEYHQDYLIKNPNGYCHIDIRKADEPLPGKTKAAPQGKGFDAATYKKPSDAELKRTLTEEQYQVTQNSATEYAFSHEYDHLFKPGIYVDVVSGEPLFSSADKYDSGCGWPSFTRPIDAKSVTEHDDFSFNMRRTEVRSRAADSHLGHVFPDGPRDKGRLRYCINGASLKFIPLEQMDAAGYGALKGKVK

SEQ ID NO: 36323 - protein, 393 aa, Yarrowia lipolytica CLIB122
MKLSLLTIALYALGARADVTVTVTATVTADPVISSTLAVNIAESDSPKAGPIVAPLNNEQTFYTTELELGSPGQKFRLLLDTGSSDTWVISKEDTYDCGYGSCDYTGQFTKNQSSSYHEIDEDFAFYYLGGNAKGKWAKDTLSISGKAIPSFQFGLADDAFGVDPLTGIVGVGPKSLEFTKNKYPNLPEALKEAGLIKKVAYSLYLDDDNGHIIFGGYDKAKYEGDLVEHKMTNEKRIQVDYSDVRVSGTLCSPDEDTVQPALLDTGSTLSYLDDKTLNRVFMKLPVFVGDYLEDQGAYQISCMPPQFDVSFKFGDQDLHINGSDLIIPVSRNWSELDKGCYFGITTSNNSNHRTILGGTFLRSVYAVVDLEDKTVSMAPIKKTGDSDVKELS

SEQ ID NO: 36324 - protein, 253 aa, Glycine max
MSLLAKLRCVTIDVTGTLMAYKGELGDYYCMAAKAAGKPCPDYKRMHEGFKLAYKEMAKNYPCFGHAAKMPNIVWWKTCVRDSFVRAGYEYDEETFEKIFRRIYASFGSSAPYTVFPDSQPFLRWLRGEGLKVGIVSNAEYRYQDVILPALGLNEGSEWDFGVFSGLEGVEKPNPKIYEIALERAGNIAPEEALHIGDSMRKDYEPAKSIGMHALLLDRFKTPDAVEWRKSGAVVLPDLLAAKEWLSSDKSNC

SEQ ID NO: 36325 - protein, 144 aa, Glycine max
MSLIPSLLSNRNIMDPFSTNIWAPSDSDSEVSAFVNARVDWKETPESHVFKADLPGLKKEEVKVEVEEGRVLNISGERSVEKEDKNEKWHRVERGRGKFQRKFWLPEDAKVDEVKASMENGVLTVIVPKVPDKKPEVKTIEISG

SEQ ID NO: 36326 - protein, 414 aa, Crocosphaera watsonii WH 8501
MKNHSLNQSYTSAKMSNSQSSILQKPITYISLILLGMGVGIGGTIAFSYPHVFRQQAEAIAPSATPEVPPEWSSLPPITSENFVTDVVKKVGPAVVRIDASRTVKTEVPPMFKDPFFRRFFGSQVPNVPEEEVQRGTGSGFILSEDGKIVTNAHVIAGSQEVSVTLKDGRTFTGKVLGTDPITDVAVIDIEADKLPTVKAGNSDNLNVGEWAIAIGNPLGLNNTVTTGIVSATGRSSSQIGVGDKRVDFIQTDAAINPGNSGGPLLNARGEVIGVNTAIFRNAQGIGFSIPINKAQEIASELIAKGSVDHPYLGIQMVEITPEIKQKIQASGELNINAYSGVLIVQVVPNSPAAASGLKSGDIIQSINQQSLNTPSQVQQAVEQVEVGSVIPVEVERNGKALNLNVKVGVLPNG

SEQ ID NO: 36327 - protein, 402 aa, Xanthomonas axonopodis pv. citri str. 306
MNEVYLIDGIRTPIGRYAGALSSVRADDLGAVPIAALLARQSQLEPAAIDDVCLGCANQAGEDNRNVARMSLLLAGLPPSVPGSTLNRLCGSGLDAIGTVARGIRAGELDLAIAGGVESMSRAPWVMGKADSAFARTQQLEDTTMGWRFINPRLQAVYGTELMGETAENVAQRYAIAREDQDAFALRSQQRVAAAQAAGFFDAEIAPVAVAGRKGGDASTVEHDEAPRPNTTAEMLAKLKPVFRQPGTVTAGNASGLNDGAAALLLASAQAVQTHRLTPRARVLGFASAGVEPAYMGIGPVPAAQRLMARLHLRIAQFDAIELNEAFAAQALACTRAFGLADDAAHVNANGGAIALGHPLGMSGARLALTLLRQLEAGNGRFGLASMCIGVGQGVALAIERL

SEQ ID NO: 36328 - protein, 669 aa, Kluyveromyces lactis NRRL Y-1140
MMRGFKQKLIKKTTGSTSSSSNQKRKDKEKEEKKEKEHSKRSPSTSGSSSARSSLDKTSHRSGSTGSNAGSSRRVDSKSGSNNHNNHGSSNSNASGSGSSANNNQNDGVPRTPSVNITKADSNAVGKPTLIGAAAQVTPPPTSPKAQPASLNTPSSATGSTTVLKDSQRSPTSIEIPRSSHSFERLPTPTKLNADSDLEMIKTPQRHSSSRFEPSRYTQIVKLPRFEEVLPEEQIPLFITKVDQCNTMFDFNDPSFDIQGKEIKRVTLQELIEFIVTNRFTYTEEMYEHVVNMFKINLFRPIPPQVNPVGDVFDPDEDEPVNELAWPHMQYVYEFFLRFVESPDFNHQIAKQYIDQNFILKLLELFSSEDIRERDCLKTTLHRIYGKFLSLRSFIRRSINNIFLQFTYETERFNGIAELLEIMGSIINGFALPLKEEHKVFLVRVLIPLHKVRCLSLYHPQLAYCIVQFLEKEPLLTEEVIMGLLRYWPKINSTKEIMFLNEIEDIFEVIEPLEFIKVEVPLFVQLAKCISSPHFQVAEKVLSYWNNEYFLNLCIENAEVILPIIFPPLYKLTSQLDKNDPLSLEDGDNGEDPYLMVEQAINSGSWNRAIHAMAFKALKIFLETNNVLYENCNALYISSLKENNRRQKEREMNWKQLEDYVSKLKIAES

SEQ ID NO: 36329 - protein, 453 aa, Brucella melitensis
MNLFTSQFRNSQLLASKAHALIPGGCHTYAKGDDQYPVLAPGFIQRGSGAHVFDVDGHEYIEYGMGNRAVGLGHAYPPVVRAVREALQDGCNFTRPSAIELDCAESFLELIEGAEMVKFCKDGSDATSGALRLARAYTGRDMVACCADHPFFSTDDWFIGTTKMSAGIPASVSALTATFRYNDIASVEALFEDYPGCIAAIIMEPARADEPQDNFLHEAMRIAQENGALFILDEMITGFRWHMRGAQKLYGIVPDLSCFGKALGNGFAISALAGKAEYMRLGGLHHTDFPRVFLLSTTHGAETHAMAAAIATMAIYRDEPVIERLYEQGAKLAAGINEAIAGHRLQDHVRLSGRPCCLTYSTLDGNGMPSQAFRTLFLQETIRRGVLMPSLVVSYTHSDADIARTIDAVHGALGIYVRALNDGVESCLVGRPSQVVYRRFNEDPASSCPPPRL

SEQ ID NO: 36330 - protein, 534 aa, Pseudomonas fluorescens PfO-1
MKLLAVRRLLRIQRVVIRYRLDDLLFDLPLPWFLLALRYVLPWRWFPRKPLELSRGARLRLALQDLGPIFIKFGQILSTRRDLLPEDIADELMRLQDRVPPFDSQLSVKLIEEQLGKKISEVFSRFDVEPLASASVAQVHAAQLKTGEEVVVKVIRPGLKPIIAQDLAWLFILARAAEKVSADARLLHPVDVVSDYEKTIYDELDLLREAANASQLKRNFEGSPLLYVPQVYWDWCRPKVLVMERIYGIQVTDLATLADQRTDMKMLAERGVEIFFTQVFRDSFFHADMHPGNIFVSTVNPWSPQYIAIDCGIVGSLTPEDQDYLARNLFAFFKRDYRRVAQLHIDSGWVPAETKLNEFEAAIRTVCEPIFEKPLKDISFGQVLMRLFQTARRFNMEVQPQLVLLQKTLLNIEGLGRQLYPDLDLWNTAQPFLERWMRERVSPKALLGNVQSQFEQLPHLANMARDLLERMSQPHANDPPPPWKKRKDDWFLRLLGSAHLAGGTILAAGGPLHELGHWPAGIMVAVGLYLVVRR

SEQ ID NO: 36331 - protein, 335 aa, Triticum aestivum
  misc_feature (83)..(83): Xaa can be any naturally occurring amino acid
  unsure (1)..(335): unsure at all Xaa locations
AYLGDTIEQVCTKKQAGTGPEFPGYRRPTRPANYLGTMHHEFTFTVQDGIDAIEDVIYHTETYDVTTIRASTPMFLMSSKIKXLGVKMVISGEGSDEIFGGYLYFHKAPNKEELHRETCQKIKALHQYDCLRANKATSAWGLEARVPFLDKEFINEAMSIDPEWKMIRPDLGRIEKWVLRKAFDDGEQPFLPKHILYRQKEQFSDGVGYSWIDGLKAHAESNVTDRMMSNAKFIYPHNTPTTKEAYCYRMIFERFLPQNSAILTVPGGPSVACSTAKAVEWDAQWSGNLDPSGRAALGVHLSAYEQEHLPATILTGTSKKPRMIEVAAPGVAIES

SEQ ID NO: 36332 - protein, 1015 aa, Synechococcus elongatus PCC 7942
MKADTAAIAALVTLLRRQTEVDLQPHWRLAPATVQAEGCLIAQGFETWSIAERNEKQHIAWPRGQKTLWLACCWTIPDRCDRWPVADMALRLALTWWAEAAEVYVDGQLVQTGDLFDCSSRVLLRDMAQPGDRLQLLLRLVSPGHDDGALVRSQLIFESSTDLPELSFLGQELAVVNSFAEQLQPELLPKLEAIAQSFADLDCSQADTADRLARLRDQLAAIAAPIRQRRVSLLGHAHLDLAWLWPVAETWEAAQRTFESVLQLQAAFPELTFGHSTPALYEWIERNRPDLFVAIQAQIAAGRWEVNAGPWVEPELNLVSAESLVRQLLYGQRYSTETLGVQNRVAWLPDSFGFCWQLPQLLQQAGIDTFVTQKLRWNDSTQFPHGLFRWRSPDGSEVLALMSAPIGTGIDPEAIANYSWEWEQQTGSQESLWLPGVGDHGGGPTRDMLEQARRWQQSPCFPQLQFETLTAYLERLGDRDRLPVWNNELYLEFHRGCYTSHADQKAYNRQAETALYSAEVWASFASLLTGADYPKVNLEAAWKATLFNQFHDILPGSAIPEVYADADPEWQQAIATAHQVKSEALTAIAAHIAWTAPPSSTAQPWLIFNDLPGDRSTVIAIDGHWRIFDLSGQELPSQFTPTETLVAVTVSGMGWLGLWREAAIATIQAIDPTAPLHLSNDWLSAEIDPETGDLLQLRDRQGRELLDGQGNQFQRFQDQGQYWDAWNIDPAYEQHPLPSPELQSLTWLEQGPLRWRLRRILSCDRSTITQDYVLTVADPWLKLETTIDWQQRHELLKVAFPTTVSAPVATYEMAAGAIARPTQPQTPAEAAQWEVPALRWADLSDLQGGLAILNDCKYGYDCRDRQLRLTLLRGSTWPDPQADLGQHQFAYAIYPHPDSWQAAGVAPLARRLNQPLTGQPAPFAQGALQPSQTLLNWNADQLLPLALKRSETGDRWLLRCYEAIGQTAELVLTGDRTWQIGARLDGLEQPLSSSSTEVQPWQIASFELLQPTQEN

SEQ ID NO: 36333 - protein, 245 aa, Oryza sativa
MDSDHWISRLMAAKRQYALQRAQNHHHATATATATAASHSHLDRYGYDDVEPEDEVRPDFPCPYCYEDHDITSLCAHLEDEHPFESKVVACPVCSARISKDLLDHITLQHSYLFRLQRHHRLRRVAVPSNHALSLGGRDLQETYLKVLLGNSSRSSGTNAASSVTDSLLSSLVLNLSSSEAEDTAKFSALAVVENNWFKRTLPSKTWKASSDSNLSQEERERRRRRAAVRSSFVQHLLVSTLFDD

SEQ ID NO: 36334 - protein, 96 aa, Haemophilus influenzae Rd KW20
MNIRPLHDRVIIKREEVETRSAGGIVLTGSAATKSTRAKVLAVGKGRILENGTVQPLDVKVGDIVIFNDGYGVKSEKIDGEEVLIISENDILAIVE

SEQ ID NO: 36335 - protein, 548 aa, Haemophilus influenzae Rd KW20
MAAKDVKFGNDARVKMLKGVNVLADAVKVTLGPKGRHVILDKSFGAPTITKDGVSVAREIELEDKFENMGAQMVKEVASKANDAAGDGTTTATVLAQAIVNEGLKAVAAGMNPMDLKRGIDKAVSAVVSELKNLSKPCETAKEIEQVGTISANSDSIVGQLISQAMEKVGKEGVITVEDGTGLEDELDVVEGMQFDRGYLSPYFINKPETATVELDNPYLLLVDKKISNIRELLPVLEGVAKAGKPLLIIAEDVEGEALATLVVNTMRGIVKVAAVKAPGFGDRRKAMLQDIAILTAGTVISEEIGMELEKATLEDLGQAKRVVINKDNTTIIDGIGDEAQIKGRVAQIRQQIEESTSDYDKEKLQERVAKLAGGVAVIKVGAATEVEMKEKKDRVDDALHATRAAVEEGIVAGGGVALVRAAAKVAASLKGDNEEQNVGIKLALRAMEAPLRQIVTNAGEEASVVASAVKNGEGNFGYNAGTEQYGDMIEMGILDPTKVTRSALQFAASVAGLMITTECMVTDLPKDDKADLGAAGMGGMGGMGGMM

SEQ ID NO: 36336 - protein, 426 aa, Brucella melitensis
MGYFPSWRLTSNAVVLPDERLPAAAAVPMGIQHLLAMSGSTIVAPLLMGFDPNVAVFFSGIGTLLFFLITAGRVPSYLGSSFAFIAVVIAATGYSGSGPNPNIAIALGGIIACGALYSLIGLIVMFLGTGWVEKLMPPAVTGAIGVSIGLNLAPVAIGQLKGTGAHTSIALLTVLCMAMISAYGPRGTRRLSVLFALLFGYLLVLIAGNGLGIVPGIDFTAVKNAAWFGLPHFTTPAFNWQAVTLIAPVAIVLVAENLGHIKALGSITGRNMDGYIGRGFFSDGLATMISGAGGGTGVTTYAENIGVMAMTKVYSTLIFVIAAIMALILGMSPKFGAILQTIPAPVLAGLAVSVFGLIASAMARIWIVNKVDFADSRNLFTVGVALIFGAGDFTLNIGNFALGGIATSTLAALVLYQLLGIGRSDS

SEQ ID NO: 36337 - protein, 487 aa, Anaplasma marginale str. St. Maries
MKRFLSLFLLIASLCSIHSGGSALSSVAGSKTAVPDSRRGFSGLAAKLLPAVVNISTEQTVDSDASSMGQGFRFPGIPKGIFEEFFNNLEPLLVDPLKPRKVVSLGSGFIVDKSGLIVTNYHVIANAKEIHVKFSDNSTAKATVLGKDPKTDLAVLKVKTKKDLQPVTLGNSDEVLVGEWVLAIGNPFGLGGSVSVGIISGRARDINIGTASEFLQTDAAINRGHSGGPLFNADGEVIGINTAIMSPQGGGNVGVAFAIPSNNAARVIRVLSKGGRVEHGWLGVVIQHVTDDMTDSLGLESARGALISGVAKDSPAEKAGLKVGDVILEFNGQKIENMPQLTHLITKAAVNEKAKITVQRDGRALNVMVTIGKLPDDAVPGGADQEATDDSVGLTVGNLPKNSKKQQEGVLILRVDHRSDAFSEGVRKGDILLGINSATINSVSDFNKEMSKIKSGSGGKGSLLLLVKKGGGDAPPIYIPVKLNKNA

SEQ ID NO: 36338 - protein, 153 aa, Streptococcus pyogenes
PMAYVLWNHFMNINPKTSRNWSNRDRFILSAGHGSAMLYSLLHLAGYDLSVEDLKNFRQWGSKTPGHPEVNHTDGVEATTGPLGQGIANAVGMAMAEAHLAAKFNKPGFDIVDHYTFALSGDGDLMEGVSQEAASMAGHLKLGKLVLLYDSND

SEQ ID NO: 36339 - protein, 420 aa, Triticum aestivum
  misc_feature (395)..(395): Xaa can be any naturally occurring amino acid
  unsure (1)..(420): unsure at all Xaa locations
NKFVQKSRLVPVRNSRDIVDPRVRERVGSTMKLIRHPNVIRMYEVMASRTKIYIVMELVTGGELFDKIASRGRLKEDDARKYFQQLINAVDYCHSRGVYHRDLKPENLLLDANGTLKVSDFGLSALSQQVREDGLLHTTCGTPNYVAPEVINNKGYDGAKADLWSCGVILFVLMAGYLPFEDSNLMALYKKIYKADFSCPSWFSTSAKKLIKKILDPNPNSRITIAEVINNEWFKKGYQPPRFETAEVNLDDINSIFNESGDPAQLVVERREERPAVMNAFELISTSQGLNLGTLFEKQTDSVKRETRFASRLPANEILSKIEAAAGPMGFNVPRPRPRLKLQGENPGRKGQLAIATEVFEVTPSLYMVELRKSNGDTLEFHKFYHSISNGLKDXMWKPEGSIAEGDETRHRSLRDISKC

SEQ ID NO: 36340 - protein, 306 aa, Solanum tuberosum
MDPTNEGNNLNNNPSLASKQRLRWTHELHERFVDAVAQLGGPDRATPKGVLRVMGVQGLTIYHVKSHLQKYRLAKYLPDSSSDGKQSDKKESGDMLSSLDGSSTGVQINEALKLQMEVQKRLHEQLEVQRQLQLRIEAQGKYLKKIIEEQQRLSGVLSEVPVSGVTPSAAGDNGVDSDNRTDPGTPAPTSESPHIDTSVQEHARSKSLSIDQSFSSQHEPLTPDSGCRETSPINSSEGERSSKKQRVGTSATFTKADMLLPHQILESSLGSPYEQPNPVFLASDQFNLSSGLSLGNEGPNVSGSNV

SEQ ID NO: 36341 - protein, 153 aa, Streptococcus pyogenes
PMAYVLWNHFMNINPKTSRNWSNRDRFILSAGHGSAMLYSLLHLAGYDLTVEDLKNFRQWGSKTPGHPEVNHTDGVEATTGPLGQGIANAVGMAMAEAHLAAKFNKPGFDIVDHYTFALNGDGDLMEGVSQEAASMAGHLKLGKLVLLYDSND

SEQ ID NO: 36342 - protein, 205 aa, Glycine max
MTNYGTIPTSSTPSTNLEFISRAKQRVKEGLGTRRPWKLMFNFRSFALPAGVGDAVSRVRENISYFQMNYAIVVLIVLFLSLLWHPISLIVFVVLMAAWLFLYFLRDEPLIIFGRLISDRVVLIVMAVLTVVLLLLTGAIGNILVALLIGAVLVVAHAALRKTDDLFFDEEEATRLSPPGAPLSGSPNLLLLLLSVNFLFGQFSK

SEQ ID NO: 36343 - protein, 192 aa, Yarrowia lipolytica CLIB122
MQSIKCVVTGDGAVGKTCMLISYTTNAFPGEYIPTVFDNYSANVMVDNKPINLGLWDTAGQEDYDRLRPLSYPQTGVFLICFSLVSPPSFENVKAKWHPEISHHAPNTPIILVGTKLDLRNDSETLARLAEKRQAPITYAEGAKCARDIGAVKYFECSALTQKGLKTVFDEAIHAVLSPPQPKKKKKNCVIL

SEQ ID NO: 36344 - protein, 390 aa, Neurospora crassa
MATKGMWEIDPETKSKLAAMQKENNNNICCDCGAPSPQWCSPKFGIFICLSCAGVHRGLGVHISFVRSVSMDAFKQAEIERMRLGGNDTWRTFFENHSDTKLRGISWDDATIAERYSGDVGEEYKERLSAKVEGREYVPGEKKPLAQQQETSQSPSSVAGGVPLSGTSSRTASPKPGTTIKVDDKYFAKLGAANASRPDNLPPSQGGKYQGFGNTVSSQPKNDGGASLPGLDELQKDPVAALSKGFGWFTKTVTQTAKTVNEGYIQPTAKQIAESELAAKARVAAAQAAVSAQTVAQAGAKTATESFNRFVEGGPSNSAGGGYRSVPSGGGGSNFDESKRSFWDDFSSAADQRKPAGSSIGTAVMGKGGSSGSSTAPPPAASKKDEWDDW

SEQ ID NO: 36345 - protein, 72 aa, Mimulus guttatus
MSSGCSCGSGCKCGDNCSCSMYPDMETNTTVTMIEGVAPLKMYSEGSEKSFGAEGGNGCKCGSNCKCDPCNC

SEQ ID NO: 36346 - protein, 295 aa, Ashbya gossypii ATCC 10895
MSDLTNYKRLEKVGEGTYGVVYKAVDLRHGQRIVALKKIRLESEDEGVPSTAIREISLLKELKDDNIVRLYDIVHSDAHKLYLVFEFLELDLKRYMESVPKDQPLGDKIIKKFMMQLCKGIAYCHAHRIIHRDLKPQNLLINRNGNLKLGDFGLARAFGVPLRAYTHEIVTLWYRAPEVLLGGKQYSTGVDVWSIGCIFAEMCNRKPLFSGDSEIDQIFKIFRLLGTPNESVWPDIVYLPDFKPTFPKWQRRDLAQVVPSLNEHGLDLLDKLVTYDPIHRISAKRAVTHPYFKDE

SEQ ID NO: 36347 - protein, 534 aa, Zea mays
MGDWVPRGRPGSSDLLLSSRTRQIYRQRTAKARGPQPLSPKGEDEMALSTTNTNAAESQLHCSTFASRYVRTALPRFKIPEQSIPKEAAYQIINDELMLDGNPRLNLASFVTTWMEPECDKLIQSSINKNYVDMDEYPVTTELQNRCVNMIAHLFNAPIGDDETAVGVGTVGSSEAIMLAGLAFKRKWQNKMKAAGKPYDKPNIVTGANVQVCWEKFARYFEVELKEVKLKEGYYVMDPEKAAEMVDENTICVAAILGSTLNGEFEDVKLLSDLLTAKNAETGWDTPIHVDAASGGFIAPFLYPELEWDFRLPLVKSINVSGHKYGLVYAGVGWVIWRSKEDLPDELIFHINYLGADQPTFTLNFSKGSSQIIAQYYQLIRLGFEGYKDVMQNCRDNAAVLREGINKMGYFDVVSKDSGVPLVAFSLKDSSKYTVFEVAESLRRFGWIVPAYTMPADAEHVAVMRVVIREDFSRGLAERLIADLGKTMADMDAHAGRKQAPEQPKKSVHDIEKEVTTFWRRLVANSKKKSSMVC

SEQ ID NO: 36348 - protein, 364 aa, Zea mays
MDRAALTVGPGMDMPIMHDGDRYELVRDIGSGNFGVARLMRNRADGQLVAVKYIDRGEKIDENVQREIINHRSLRHPNIIRFKEVILTPTHLAIVMEYASGGELFERICNAGRFSEDEARFFFQQLISGVSYCHSMQVCHRDLKLENTLLDGSTAPRVKICDFGYSKSSVLHSQPKSTVGTPAYIAPEVLLKKEYDGKVADVWSCGVTLYVMLVGAYPFEDPDEPKNFRKTIQRILGVQYSVPDYVHISPECQDLISRIFVANPSTRITMPEIRSHPWFLKNLPADLVDDSATTTSKQYEEPEQPMQGMDEIMQILGEATIPAAGSRGLNQFLNDGLDLDDDMEDLDSDADLDLESSGEIVYAM

SEQ ID NO: 36349 - protein, 309 aa, Sinorhizobium meliloti 1021
MPVPEAANARDIVLLVDDSPEALGFLTEALEQSGFSVLIATSGNAALNIADRITPDIILLDAVMPGMDGFDTCTRLKANASVAQVPVVFMTGLTETEHVVRALEAGGVDYLTKPINIDELRARIRVHLSNARSAQSARVALDAAGRHLLAVRGDGTVRWSTPQATRLVNAATGSDDGLAFVAGRIAEWMRERENSPGERQGTFTLQRASQTGLQISYLGAIGANEYLFRLTAENGMSDDETLRQHFRLTQRESEVLLWIAKGKSNRDIGEILGLSARTVTKHLEQIYVKLGVENRASAAVKATQVLHGI

SEQ ID NO: 36350 - protein, 512 aa, Arabidopsis thaliana
MDGSGTGSRSGVESILPNYKLGRTLGIGSFGRVKIAEHALTGHKVAIKILNRRKIKNMEMEEKVRREIKILRLFMHPHIIRLYEVIETPTDIYLVMEYVNSGELFDYIVEKGRLQEDEARNFFQQIISGVEYCHRNMVVHRDLKPENLLLDSKCNVKIADFGLSNIMRDGHFLKTSCGSPNYAAPEVISGKLYAGPEVDVWSCGVILYALLCGTLPFDDENIPNLFKKIKGGIYTLPSHLSPGARDLIPRMLVVDPMKRVTIPEIRQHPWFQAHLPRYLAVPPPDTVQQAKKIDEEILQEVINMGFDRNHLIESLRNRTQNDGTVTYYLILDNRFRASSGYLGAEFQETMEGTPRMHPAESVASPVSHRLPGLMEYQGVGLRSQYPVERKWALGLQSRAHPREIMTEVLKALQDLNVCWKKIGHYNMKCRWVPNSSADGMLSNSMHDNNYFGDESSIIENEAAVKSPNVVKFEIQLYKTRDDKYLLDLQRVQGPQFLFLDLCAAFLAQLRVL

SEQ ID NO: 36351 - protein, 80 aa, Arabidopsis thaliana
  misc_feature (68)..(68): Xaa can be any naturally occurring amino acid
  unsure (1)..(80): unsure at all Xaa locations
MAKAFSSICFTTLLLVVLFISTEIPKSEAHCDHFLGEAPVYPCKEKACKSVCKEHYHHACKGECEYHXREVHCHCYGDYH

SEQ ID NO: 36352 - protein, 838 aa, Kluyveromyces lactis NRRL Y-1140
MDTDRSSVGISPAEHSVPLEASKRDADATGTIVPEEDLKLEHIPDNLEHADFSKLLELDEKNDDDLFHGIDILDQQMKSDQGKEDIELRVEEPKREMKEDESSNVRNEDKQKLEAPESPKSMPAIHNDEKSVKQVYPLVKHEENTPAAIIQERLAHNLQRHNSLTPMMFPLKQLNELKSDMQNLKLKTEDGAKNSPQSDQNTSQKNAESPENGQQVTQLHPQLLQAADVNTPTSNTVPGASDEQSKISAYARLDFQDFTFYVQTLQVIIGRRSENDYSHKVDVNLGPSKSISRRHAQIFYNFGTGRFELSIMGKNGAFVDDNFVERGSTVPLKNKTKIQIGQIPFQFVLPDHEGNISKELASKSKNSTANASQPPKKKNKKEKEVKEVKEKKAPKPPKPPKKVYTLQEIPPEYRTKPTCSYSNLITSCLRKFSTEKGMSLSEIYSGIRELFPYYKYCPDGWQSSVRHNLSLNKSFCKVSKEGKGWLWGLDEEYIAERERQKKKQAEAQAAKAKVAELKQQQQQEQRLKKQQQQSSNSKQPNMAQTLAANRSDKKTTSMDDNQRTMKYLQEQLMILTKDRKGLDKSLMAQILTQALAMTINQVTQAAKQKGISGNPLTALIDKNPQHLNLILAAAVNAATAKVTKGKVNQLVNMPPPTVKDQQPSAKKEIPIKRAVTPKPPTPSVVNPVHANSSNKDQSFDPTSLSKFFQPKQQQGSRPSSGMAKTPTPPVTVGTPKSGVVSNGSSVPATSPQATSTVVPKKRPASDTESSDSDDSNSSDSDEQNKNGDSSGESSGDSSSSSDSDGDSGSESETDGSDSDSNSDDSDNNGHDNDDGQSD

SEQ ID NO: 36353 - protein, 1142 aa, Synechococcus elongatus PCC 7942
MDGNPWPLWLVEPQTLRILDRNAAATAWGNVAYLQELAPRSQLLKQWAENPDALRLSLDLKIPNGQLRSVELQRCAYPDPGAWLIAARDCGDLQSWQQLTQVGYWELDVQSQLVQTSPLVNRLLGKPSDQCLFSWQQWLEHFQLSDRLRLEQAIDTGMQTGRPIQATYALASDSQDRQLVELRAVIVRDLAGNVRSLRGVLEPKHQAPLTSLEPLPLSLDHPAVLRRILEAIPDPIYIKDYRGEILLQNRACLDLQPFVMPEVIKQEDINDLATIASGLPIINEEWTINPENWPSQHFLISKVPLRNELGQILGLLGIRRNVTRWRRAEQARNALSDQLEQTLAAVSDGVVVLDQNFVVRALNSQAAQQLKKTSEQIIGRVFWDLFPVELGATLQSELQPLQHQSSTRTFELWIDPLSTCWEVNVHRSTAEISLYFRDISDRVMSRQLLEEMAERFQLVTRATNDAVWDRNLLTNEIWYSANYSRLFGGEEKEITQKLVQTVDLQWRDRLDPDQRERIMASLSGAIANGFSTWSEQYRFLRQDGTYAHVLDRGYIVRDENGRAIRAVGAMQDISAIVAANEQLRLWLRAIESTGNSIIIADAQQPDMPIIYVNPAFEKITGFSAAEVIGRNFRFLQGLETQQAELEEMRRALEEGTYCEVTLRSYRKDGSLFWNQISLAPVRDQKGHLTHMVASQTDVSESKAFEEMLLQQATHDALTGLPNRLLFLDRLDQAAARARGGGSPIAVLFIDLDNFKAINDGFSHSEGDAVLQIAAGRLQQCIQEHETVARLSSDEFVILLIDLDVQSKARVKAAMIQSLMAKPFEVMGNPIELTASIGVATFPHDGQSGSELLQAADLAVCAAKQQGKNLWCSFSEAMREQLRSRIDIEKDLRQALIDNSLELYFQPQVDLVTHRLLGFETLVRWNHPERGLVAPGEFIPIAEESDLIDAIGLWVMRAAGLTLRRWIDHEGFTGSLSFNISARQFIRQNIFLKLFDVLQEFQIPPHQLEIELTESSLIESPERFVQWLQEARSMGFQVALDDFGTGYSSLGYLKRLPINALKIDRSFIRDLPHDHDDQAIVQAIVAMAKVLKLRTIAEGVERLEQAAFLEAIGCDAVQGFFYGPPLPEAEALAFLHRSASPGV

SEQ ID NO: 36354 - protein, 357 aa, Zea mays
MASLTDLVNLDLSDCTDRIIAEYIWIGGTGIDLRSKARTVKGPITDPIQLPKWNYDGSSTGQAPGEDSEVILYPQAIFKDPFRKGNHILVMCDCYTPQGEPIPTNKRYSAAKVFSHPDVAAEVPWYGIEQEYTLLQKDVSWPLGWPVGGYPGPQGPYYCAAGADKAFGRDVVDAHYKACLYAGINISGINGEVMPGQWEFQVGPSVGISAGDEIWVARYILERITEMAGIVLSLDPKPIKGDWNGAGAHTNYSTKSMREAGGYEVIKAAIDKLGKRHKEHIAAYGEGNERRLTGRHETADINTFKWGVANRGASIRVGRDTEREGKGYFEDRRPASNMDPYVVTGMIAETTILWNGN

SEQ ID NO: 36355 - protein, 489 aa, Escherichia coli O157:H7
MVSETKTTEAPGLRRELKARHLTMIAIGGSIGTGLFVASGATISQAGPGGALLSYMLIGLMVYFLMTSLGELAAYMPVSGSFATYGQNYVEEGFGFALGWNYWYNWAVTIAVDLVAAQLVMSWWFPDTPGWIWSALFLGVIFLLNYISVRGFGEAEYWFSLIKVTTVIVFIIVGVLMIIGIFKGAQPAGWSNWTIGEAPFAGGFAAMIGVAMIVGFSFQGTELIGIAAGESEDPGKNIPRAVRQVFWRILLFYVFAILIISLIIPYTDPSLLRNDVKDISVSPFTLVFQHAGLLSAAAVMNAVILTAVLSAGNSGMYASTRMLYTLACDGKAPRIFAKLSRGGVPRNALYATTVIAGLCFLTSMFGNQTVYLWLLNTSGMTGFIAWLGIAISHYRFRRGYVLQGHDINDLPYRSGFFPLGPIFAFILCLIITLGQNYEAFLKDTIDWGGVAATYIGIPLFLIIWFGYKLIKGTHFVRYSEMKFPQNDKK

SEQ ID NO: 36356 - protein, 230 aa, Amycolatopsis mediterranei
MQMTEENLRGLFGRMTGDEKHGWAAASTLHAIWVLYERVLNVSPSNIDDPGRDRFYLSKGHGPMAYYAVLAAKGFIEPETLDTWRQWGSPLGMHPDRNLAPGVEISSGSLGHGLPLGVGTALGLRAQGRDARVVVLMGDGEFDEGSNHETMAIAGRLGLGSLTAVVIDNKTASLGWPGGIAGRFEQEGWAATTVDGRDHDALEKALTGETDGRPRAVIAEILPIEEGSTA

SEQ ID NO: 36357 - protein, 390 aa, Monoblepharis insignis
IEKFEKEAAELGKGSFKYAWVLDKLKAERERGITIDIALWRFETPKYNVTVIDAPGHRDFIKNMITGTSQADCAILIIAGGTGEFEAGISKDGQTREHALLSFTLGVRQLIVAVNKMDSTGYSEERFNEIVREVSNFVKKVGYNPKTVAFVPISGWNGDNMIEATTNMPWYKGWEKETKSGKATGKTLVDAIDAIEPPTRPTDKPLRLPLQDVYKIGGIGTVPVGRVETGVIKPGMVVTFAPSNVTTEVKSVEMHHESLAEGLPGDNVGFNVKNVSVKDIRRGNVASDSKNDPAQESASFNAQVIVMNHPGQISNGYSPVLDCHTAHIACRFNNILQKIDRRSGKVLEENPKFIKSGDAAMVEMIPTKPMCVESFNEYPPLGRFAVRDMR

SEQ ID NO: 36358 - protein, 89 aa, Arabidopsis thaliana
  misc_feature (24)..(24): Xaa can be any naturally occurring amino acid
  misc_feature (31)..(31): Xaa can be any naturally occurring amino acid
  misc_feature (70)..(70): Xaa can be any naturally occurring amino acid
  unsure (1)..(89): unsure at all Xaa locations
LPLYLIYSTTNSYPGCFIRMSWGXQPFNYHXLIITSIVTSLLVMQLFSVSNIIDVDNNVLDDLALLNCAXNLLCFLIAHFYAFAYVLST

SEQ ID NO: 36359 - protein, 519 aa, Solanum tuberosum
MTTSFTDLLASDDYPTKGLGDRIAERTGSGVPKFKSLSPPSLPLSPPPFSPSSYFAIPPGLSPTELLDSPVLLSSSNLLPSPTTGSFPAHAFNWKSSSHQDVKQEDKNYSDFSFQPQVGTAASISQSQTNHVPLGQQAWNYQEPTKQNDQNANGRSEFNTIQSFMQNNNDQNNSGNQYNQSTREQKRSDDGYNWRKYGQKQVKGSENPRSYYKCTYPNCPTKKKVERSLDGQITEIVYKGNHNHPKPQSTRRSSSSTASSAIQSYNTQTNEIPDHQSYGSNGQMDSVATPENSSISFGDDDHEHTSQKSSRSRGDDLDEEEPDSKRWKRENESEGLSALGGSRTVREPRVVVQTTSDIDILDDGYRWRKYGQKVVKGNPNPRSYYKCTSTGCPVRKHVERASQDIRSVITTYEGKHNHDVPAARGSGSHSINRPMAPTIRPTVTSHQSNYQVPLQSIRPQQSEMGAPFTLEMLQRPNNYGISGYAKSGDSYENQVQDNNVFSRTKDEPRDDMFMESLLC

SEQ ID NO: 36360 - protein, 513 aa, Zea mays
  misc_feature (256)..(256): Xaa can be any naturally occurring amino acid
  unsure (1)..(513): unsure at all Xaa locations
MSYNKAPSITAETINPRVKIIRYAPCGEIVKHAARLEQEIEENPASIPFQEIIYCNLGNPQVLGQPPLTFFREVLSLCDNPALMDRDEARALFSPCSIRRARRILNSIPSKDTGGYTDCRGIKCLRQVVADGITARDGFPSTADDIFLTDGATSAINLMMQILIRSHEDGILSPLPEYPLYSASIILHGGTMVPYNLTEDNGWGLEIFEVKRCLEEARSAGLTVRAMVVINPGNPTGQLRLYQSFSSSTHLIPLVXVLSVTNQEEIVEFCRKEGLVILADEVYQENIYAENKKFHSFKKVARSLAYDENDLTLVSLHSVSMSYGESGRRGGYMEVSGVAANVKDQIYKVASLTLCPNIAGQILVSLAMDPPKLGDESFESFDKEKEQIRSSFCKRAKTLEKAFSGLEGVTCNKLEGALYLFPRLHLPSAAIRAADFEGVSPDIFYAHRLLDATGIAVVPGSGFHQASGTIHIRCTILPDERKIEAMVARLRAFHKAFMNEFRGSQQVMNDLRR

SEQ ID NO: 36361 - protein, 391 aa, Staphylococcus aureus subsp. aureus COL
MLDWFQLANNKENKTIQLRRYLHQYPELSFEEFQTHDYIVNQLSQLSCDIETPIGRNGIKATFKGLGTGPTIALRADFDALPVEELNDVPYKSKNPGCMHACGHDGHTAILLTVAEILDEHKHLLEGNVVLIFQYGEEIMPGGSQEMIDAGCLENVDRIYGTHLWSGYPTGTIHSRAGAIMASPDEFSVTFKGRGGHGAKPHETIDPIVIMAEFILSAQKIISRTIDPVKQAVLSFGMIQAGTTDSVIPDQAFCKGTVRTFDSDIQNHVMDKMDKLLQGLAIANDINYDLNYIKGYLPVHNNEKAYQVIKEATNDLHVRFNESDLMMIGEDFSHYLKVRPGAFFLTGCGNESKGITAPHHNPKFDIDEKSLKYAVAVFLKIIELEQVFKTN

SEQ ID NO: 36362 - protein, 203 aa, Arabidopsis thaliana
MSTRRRTLLKVIILGDSGVGKTSLMNQYVNNKFSQQYKATIGADFVTKELQIDDRLVTLQIWDTAGQERFQSLGVAFYRGADCCVLVYDVNHLKSFESLDNWHNEFLTRASPRDPMAFPFILLGNKVDIDGGNSRVVSEKKAREWCAEKGNIVYFETSAKEDYNVDDSFLCITKLALANERDQDIYFQPDTGSVPEQRGGCAC

SEQ ID NO: 36363 - protein, 165 aa, Lavatera thuringiaca
MAEEHNKKIAECTVETQDRGTFDLSGNKKEDEKPQVQADVIANYVDKVKDEETKADKEHKEDEKSSSDKEEVESGEMKKEGDCEKKGVMEKIKEKLPGQHKKDEEVVTAPPPPAAVSSESIVVEHHEEESKEKKGIMEKIKEKLPGYHSKTEDEKEKETSTAANH

SEQ ID NO: 36364 - protein, 219 aa, Chromobacterium violaceum ATCC 12472
MNRSFDALLFDMDGLMLDTETLSCAATRRAGAELGIRIDEAMLMGMVGLSEARCTRYIAEYLADEEQAALLQRTSRACYRRMLEQEEIPLKPGIVELLDWAQSQDIPRAVATSTRRAIADVKLARSGLARYFRHTIAGDEVARTKPEPDIYLAAAALLGAAPERCIVLEDSPYGMQAGVAAGARVILVPDLIAPSQQQREQALATCPDLLQALALLREL

SEQ ID NO: 36365 - protein, 245 aa, Burkholderia vietnamiensis G4
MNLSQRLAAEAFGTFWLVLGGCGSAVLAAAFPGLGIGFAGVALAFGLTVLTMAFAIGHISGCHLNPAVSVGLTVAGRFPARDLVPYIVAQVVGATLGAFVLYLIATGKPGFDVVGSGFATNGFGERSPGHYSLGAAFICEVVMTGFFLFVILGATDKRAPAGFAPIAIGLCLTLIHLISIPVTNTSVNPARSTGPALFVGGEAIGQLWLFWIAPIIGAAIAGVVYPLIAGRDAAVLLPASARTVE

SEQ ID NO: 36366 - protein, 606 aa, Pseudomonas syringae pv. syringae B728a
MESRTSRRTFVKGLAAAGVLGGLGLWRSPSWAASGSAALSVLSGTEYDLSIGEMLVNITGKRRTAMAINGGLPGPLLRWKEGDTVTLRVRNRLDAATSIHWHGIILPPNMDGVPGLSFAGIEPGGVYVYQFKLQQNGTYWYHSHSGFQEQVGVYGPLVIEAKEPEPFKYDSEHVVMLTDWTDEDPVALMRTLKKQSDYYNFHKRTVGDFVNDVADKGWAATVADRKMWAEMKMNPTDLADVSGATYTYLLNGQAPNMNWTGLFRPGEKVRLRFINGSAMTYFDIRIPGLKMTVVASDGQYVNPVKVDELRIAVAETFDVIVEPTAEAYTVFAQSMDRTGYARGTLAVREGLVAQVPPLDARPLVTMDDMGMGGMDHGSMGSMDSGADDGMQTMSSMGGNSMPAMDHSKMSTMQGMDHGAMPGMDHDSMGGMVMQSHPASEKNNPLVDMQAMSPTAKLNDPGLGLRNNGRKVLTYADLKSTFEDPDGREPSRTIELHLTGHMEKFAWSFDGIKFADAQPLVLKYGERVRIVLVNDTMMTHPIHLHGMWSDLEDEDGNFRVRKHTIDMPPGSKRSYRVTADALGRWAYHCHLLYHMEMGMFREVRVEE

SEQ ID NO: 36367 - protein, 925 aa, Pseudomonas aeruginosa UCBPP-PA14
MFKDLGIKGRVLLLTLLPTSLLAMVLGGYFTWVQLSDMRAQLIERGQLIAEQLAPLAATALARKDTAVLNRIANEALDQPDVRAVTFLDARQERLAHAGPSMLTVAPAGDASHLSMSTELDTTHFLLPVLGRHHSLSGATEPDDERVLGWVELELSHHGTLLRGYRSLFTSLLLIAAGLGVTALLALRMSRAINAPLELISQGVAQLKEGRMETRLPPMGSNELDELASGINRMAETLQSAQEEMQHNIDQATEDVRQNLETIEIQNIELDLARKEALEASRIKSEFLANMSHEIRTPLNGILGFTNLLQKSELSPRQQDYLTTIQKSAESLLGIINEILDFSKIEAGKLVLENLPFNLRDLIQDALTMLAPAAHEKQLELVSLVYRDTPIQLQGDPQRLKQILTNLVGNAIKFTQGGTVAVRAMLEDESDDRAQLRISVQDTGIGLSEEDQQALFKAFSQADNSLSRQAGGTGLGLVISKRLIEQMGGEIGVDSTPGEGAEFWISLSLPKSRDDNEEPGASWAAGQRVALLEPQELTRRSLHHQLTDFGLEVSEFADLDSLQESLRNPPPGQLPISLAVLGVSAAIHPPEELSQSFWEFERLGCKTLVLCPTTEQAQYHATLPDEQVEAKPACTRKLQRKLQELLQVRPTRSDKPHAMVSGRPPRLLCVDDNPANLLLVQTLLSDLGAQVTAVDSGYAALEVVQRERFDLVFMDVQMPGMDGRQATEAIRRWEAEREVSPVPVIALTAHALSNEKRALLQAGMDDYLTKPIDEQQLAQVVLKWTGLSLGQSLASMSRAPQLGQLSVLDPEEGLRLAAGKADLAADMLAMLLASLAADRQAIRQARDNDDRTALLERVHRLHGATRYCGVPQLRAACQTSETLLKQNDPAAAAALDELDKAIEALADTASATTHLSSTSLDSSEL

SEQ ID NO: 36368 - protein, 332 aa, Glycine max
  misc_feature (53)..(53): Xaa can be any naturally occurring amino acid
  misc_feature (137)..(137): Xaa can be any naturally occurring amino acid
  unsure (1)..(332): unsure at all Xaa locations
MEVVSDEEAFLFGMELAGASAVSMVLKSALELGILETIAKAGPGAYLSPSHIXYNILTYSLHQLPHGKAERHYGLHPKAKYLVNNEGGVSVAAYFLMEHDKVLKDMWFHLTDSVKEGGHPFSNAYGMTAFEFHDTNXFNKLFNKGLSDISSITMKKILETYNGFEGVGSVVDVGGGTGAIINMVASKYPTTKCVNFDLPHVIKEAPAYTGVEHISGDMFVSVPKGDVIFMKWVCHDWNDEQCLKLLKNCYDSLPDDTGKVILAEGISPETPDSNLAARCEFQMDVIMLCHSPNGKEKTEKEYKALAKGAGFHGFRIASCVLNTHVMEFLKKA

SEQ ID NO: 36369 - protein, 591 aa, Magnaporthe grisea 70-15
MPSKFAHLPLSTSGPLDCALSGTAILNHPFFNKGSAFTAAERRDFGLLGLLPQNIQTLEQQANRAYAQYSSRPDDLAKNTFLTSLKEQNEVLFYRLLHDNLPEMFGVVYTPTEGDAIQNYSRLFRRPEGCFLNVNDVDRVREDLQRWGRPEDVDYIVVSDGEEILGIGDQGCGGILISIAKLVLTTLCAGLHPNRTLPVVLDCGTDNQGLLDDPLYLGLRERRVRGEKYDSLVREFVAAARDLFPRAVIHFEDFGVTNARRILDTYRPRAPVFNDDVQGTGCVVLAAIMAGMHVAGLKIQDLRMVVFGAGSAGTGIADMVRDAIAEESGCGKDCAAEQIWLVDKPGLLTTATQNDTAQTPYAKKPWGEGHGTDLLAVVDEVRPNVLIGTSTVPGAFTEEIVRAMAKHAPRPIIMPLSNPTRLHEAVPADLMAWTDGKALVATGSPFAPVKLDGGREVEIAECNNSVVFPGIALGSVLSRARLVTDSMLVGAVKAVAAMSPALKDPAGSLLPGVDEVRNVSVAVASGVIRAAVQEGVATEEGIPRGKDDGDLEEWVREQMWNPVYRELRKVGGGDATREAKGELKQAGTLEG

SEQ ID NO: 36370 - protein, 375 aa, Ashbya gossypii ATCC 10895
MYGARAGNENSGAGAAGSRAGRRGSGGSGGPRVALGDVTAQVNNRGPRAGGKDARAGKPQGDAAVQGGENVEETVRAVGPVWDAAAEAAVAAAAAEYGGAPDPADEDTWDAVMVAEYAPEIFAYLRGLEVRFAPAADYMRGQPELRWEYRATLVDWLVQVHCRFQLLPETLYLTVNIIDRFLSRKTVTLNRFQLVGAAALFIASKYEEINCPTLRELLYMLDNAYTADEVLKAERYMIDTLEFEFGWPGPMSFLRRVSKADNYEYDIRTLAKYLLETTIMDPRLVAAPPSWLAAGAYYLSRIIIGYNTWTRQHVFYSGYTAEQLVSLATVILENCRHAETRHQAIFEKYSKSRHRRSAQVVARWIAMAEENLQPA

SEQ ID NO: 36371 - protein, 138 aa, Candida glabrata CBS138
MAKDLVQSRDASQVFGVARIYASFNDTFVHVTDLSGRETISRVTGGMKVKADRDESSPYAAMLAAQDVAAKCLEVGITAVHVKIRATGGTRTKTPGPGGQAALRALARSGLRIGRIEDVTPVPSDSTRKKGGRRGRRL

SEQ ID NO: 36372 - protein, 309 aa, Escherichia coli K12
MQNAGSLVVLGSINADHILNLQSFPTPGETVTGNHYQVAFGGKGANQAVAAGRSGANIAFIACTGDDSIGESVRQQLATDNIDITPVSVIKGESTGVALIFVNGEGENVIGIHAGANAALSPALVEAQRERIANASALLMQLESPLESVMAAAKIAHQNKTIVALNPAPARELPDELLALVDIITPNETEAEKLTGIRVENDEDAAKAAQVLHEKGIRTVLITLGSRGVWASVNGEGQRVPGFRVQAVDTIAAGDTFNGALITALLEEKPLPEAIRFAHAAAAIAVTRKGAQPSVPWREEIDAFLDRQR

SEQ ID NO: 36373 - protein, 223 aa, Ralstonia eutropha JMP134
MSDAIAQLFRNNREWVDRVNAEDPTFFMRLANQQAPEYLWIGCSDSRVPANQILGLAPGEVFVHRNIANVIAHSDLNALSVIQFAVEVLKVRHITVVGHYGCGGVKVALKRERIGLADNWLRHVRDVADKHEAYLGTILREEDAHTRLCELNVIEQVSNICQTTVLQDAWSRGQAVTVHGWIYGVSDGLLRDLGMAASNNDELHEQLAAAYRQFGDPPQASIR

SEQ ID NO: 36374 - protein, 222 aa, Triticum aestivum
DITVVVGEQSFHLHKFPLLSKSGLLERLIREKIEKGEDSCAIDLSDIPGGAKAFELAAKFCYGVKFELTSSNVVHLRCASEYLEMAEEIAEGNLIAQTENFLTQTVLKSWKDSIKALHTCDDVIDLAEKLQVVKKCGDSVATKSSTDPDVFGWPVAQYGGPTQSPGGSFLWNGISTGARPRNCSSNWWYDDVSCLSLPLYKKVISAMEYRGVNQDIIVGSLN

SEQ ID NO: 36375 - protein, 563 aa, Prochlorococcus marinus subsp. marinus str. CCMP1375
MSKIIRSSDESRGALENGVNSLADAVKVTIGPKGRNVVLEKKFGAPDIVNDGVTIARDIELENPFENLGAKLIEQVASKTKDKAGDGTTTATVLAQVMVHEGLKNTAAGASPIEIRRGMEKAVSHIVDKLQQQSKKISGDKVLQVATVSSGGDEEIGAMVAEAMDKVSVDGVITVEESKSLNTELEITEGMAFDRGYSSPYFVTDAERQICEFENPLLLITDRKISSIADLVPVLETVQKSSSPLVILAEEVDGEALATLVVNKNRGVLQVASVRAPSFGERRKAALADIAVLTKGTLISEDKAMTLDKVSLADLGKARKITITKESTTIVANDDTKKEVASRVASIKRELDQTDSDYDKEKLNERIAKLAGGVAVIKVGAPTETELKNRKLRIEDALNATRAAVEEGIVAGGGSTLIKLGEELDSLSKSLDGDQATGVDIIKKALSAPAKQIALNAGENGDVVVSEIQRLGKGFNAATGQYEDLISAGIIDAVKVIRLALQDAVSIASLLITTEVIIADKPEPPSPAGGEGGGDPMGGMGGMGGMGGMGMPGMGGMGMPGMM

SEQ ID NO: 36376 - protein, 390 aa, Rhizophlyctis harderi
IEKFEKEAAEMGKGSFKYAWVLDKLKAERERGITIDIALWKFETPKYYVTVIDAPGHRDFIKNMITGTSQADCAILVIASGVGEFEAGISKDGQTREHALLANTLGVKQMIIAVNKMDTNKWSEARFNEIVKELSSFIKKVGFNPKAVPFIPISGWHGDNMLEPSENTPWFKGWTKETKAGALKGTTLLQAIDAIDLPTRPTDKPLRLPLQDVYKIGGIGTVPVGRVETGTIKAGMIVNFSPANVTTEVKSVEMHHETLEAGLPGDNVGFNIKNVSVKEIRRGMVCSDTKNDPAKEAASFNAQIIVLNHPGQISAGYSPVLDCHTAHIACKFAELLEKLDRRTSKKLEDNPKFIKSGDSAIVKMVPSKPMCVESFTEYPPLGRFAVRDMR

SEQ ID NO: 36377 - protein, 401 aa, Xanthomonas axonopodis pv. citri str. 306
MARPDLHERISSLRKLRVAQERVRVRRQVGRRDGVRLEIDGRWLTGFCSNDYLGLSQQFEVVAALQDAAARDGAGATASHLICGHHTAHETLEREIAEWLGYPSALLFGSGFIANLAVQQALLSEEDDVCVQDRLNHASLLDATRLAGCRLRRYPHLDVEGAMRQLKGAPEGAAMLATDGVFSMDGDVAPLRALSLVARMQQALFYVDDAHGVGVLGPQGRGCVADAGLGVAEVPLQLVTLGKALGGYGAVVVGEEALVRHLAETARPYIYTTALPPAQVAATLAAVRLARRDDWRRARLVELIGAFRDGARKHGFELMASDTPIQPLLCGEEATVMAMSAALEHAGFMVGAIRPPTVPEGKARLRVTLSALHTQQQVQALIEAIVQARDVVSRQPLRASA

SEQ ID NO: 36378 - protein, 390 aa, Rhizophydium sp. JEL136
IEKFEKEAAEMGKGSFKYAWVLDKLKAERERGITIDIALWKFETPKYYVTVIDAPGHRDFIKNMITGTSQADCAILIIGGGIGEFEAGISKDGQTREHALLANTLGVKQMIIAVNKMDTNKWSEDRFNEIVKELSSFIKKVGFNPKAVPFIPISGWHGDNMLEPSANMSWFKGWTKETKGGVLTGKTLLNAIDAIDLPSRPTDKPLRLPLQDVYKIGGIGTVPVGRVETGVIKAGMVVTFAPANVTTEVKSVEMHHETLEQGIPGDNVGFNIKNVSVKDIRRGMVCSDSKNDPAKEAASFQAQIIVLNHPGQISAGYSPVLDCHTAHIACKFSELQEKLDRRTSKKTEDNPKSIKSGDSAIVKMVPTKPMCVESFTEYPPLGRFAVRDMR

SEQ ID NO: 36379 - protein, 92 aa, Helianthus annuus
MASQQGQQTRKIPEQEKKDLDQRAAKGETVVPGGTRGKSLEAQERLAEGRSKGGQTRKDQLGTEGYKEMGKKGGQTTGDKSAGEREEEEEED

SEQ ID NO: 36380 - protein, 968 aa, Arabidopsis thaliana
MAGRNIEKMASIDAQLRQLVPAKVSEDDKLVEYDALLLDRFLDILQDLHGEDLRETVQELYELSAEYEGKREPSKLEELGSVLTSLDPGDSIVISKAFSHMLNLANLAEEVQIAHRRRIKKLKKGDFVDESSATTESDIEETFKRLVSDLGKSPEEIFDALKNQTVDLVLTAHPTQSVRRSLLQKHGRIRDCLAQLYAKDITPDDKQELDESLQREIQAAFRTDEIRRTPPTPQDEMRAGMSYFHETIWKGVPKFLRRVDTALKNIGIDERVPYNAPLIQFSSWMGGDRDGNPRVTPEVTRDVCLLARMMAANLYYNQIENLMFELSMWRCTDEFRVRADELHRNSRKDAAKHYIEFWKTIPPTEPYRVILGDVRDKLYHTRERSRQLLSNGISDIPEEATFTNVEQFLEPLELCYRSLCSCGDSPIADGSLLDFLRQVSTFGLSLVRLDIRQESERHTDVLDAITKHLDIGSSYRDWSEEGRQEWLLAELSGKRPLFGPDLPKTEEISDVLDTFKVISELPSDCFGAYIISMATSPSDVLAVELLQRECHVKNPLRVVPLFEKLADLEAAPAAVARLFSIDWYKNRINGKQEVMIGYSDSGKDAGRLSAAWELYKAQEELVKVAKKYGVKLTMFHGRGGTVGRGGGPTHLAILSQPPDTVNGSLRVTVQGEVIEQSFGEAHLCFRTLQRFTAATLEHGMNPPISPKPEWRALLDEMAVVATEEYRSVVFQEPRFVEYFRLATPELEYGRMNIGSRPSKRKPSGGIESLRAIPWIFAWTQTRFHLPVWLGFGAAFRYAIKKDVRNLHMLQDMYKQWPFFRVTIDLIEMVFAKGDPGIAALYDKLLVSEDLWAFGEKLRANFDETKNLVLQTAGHKDLLEGDPYLKQRLRLRDSYITTLNVCQAYTLKRIRDANYNVTLRPHISKEIMQSSKSAQELVKLNPTSEYAPGLEDTLILTMKGIAAGLQNTG

SEQ ID NO: 36381 - protein, 207 aa, Arabidopsis thaliana
MTGFSVSLFVSNLSNVASYLSPIFENIPSTKVVPAQIEKVVSLVSRTGRDLQRYDHAGYRQVVGCVPYRYKKQEVNGVETQVIQVLLVSAQKGKGMLFPKGGWETDESMEEAALRETIEEAGVTGELEEKLGKWQYKSKRHSIIHDGYMFALLVSQEFERWPEAEMRQRRWVSLDEAREVCQNWWMREALEAFINLKCLADDDESGN

SEQ ID NO: 36382 - protein, 320 aa, Synechococcus elongatus PCC 7942
MSTSSAQYSPDLVRAYLQEIGRVRLLTAEEELCFGRQVQRLMMLLDAQTELRDRLGHEPSKEEWAAAVDLNLEDLDRQIEQGQRAKRKMIEANLRLVVSIAKKYQKRHMEFLDLIQEGTLGLERGVEKFDPSKGYKFSTYAYWWIRQAITRAIAQQSRTIRLPIHITEKLNKLKKTQRELSQQLGRSATASELAEVLELPLEQVREYIQMNRQPVSLDVKVGDSQDTELQELLEDEQSSPSDYVEQESLRRDLRNLMAELTPQQQAVIALRYGLDEGDSLSLAKVGERLNISRERVRKLERQAMDHLRRRSRLLAEYAAS

SEQ ID NO: 36383 - protein, 528 aa, Triticum aestivum
  misc_feature (402)..(402): Xaa can be any naturally occurring amino acid
  unsure (1)..(528): unsure at all Xaa locations
MATEGLRMLLADAARSPWSLAGAAAAVALLWFAAWVLEWAWWTPRRLGRALRAQGIRGTRYRLFTGDIPENARCNAVARSRPMPRGDHDIAPRVLPMFSNAIKEHGKVSFTWFGPTPRVMIPDPELVREILSNKFGHFGKQRSTRIGKLLANGLANHEGEKWAKHRRILNPAFHHEKIKRMLPVFSACCEEMITRWENSMSADGSCEIDFCPEFQNLTGDVISRTAFGSNFQEGMKIFQLQGEMGERLIQAFRTFFIPGYWFFPTKNNRRMRAIDREIRMILRGIIGKKERAIKNGEASSDDLLGLLLESNMQQSNGKAKLGLSIEDIIQECKLFYFAGMETTSVLLTWTLIVLSMHPEWQEQAREEVLHHFGRTTPDFENLGRLKIVTMIFYEVLRLYPPXTFLTRRTYKAMELGGIKYPAGVNLMLPILFIHHDPDIWGKDAREFNPQRFADGISNAAKHPAAFFPFGGGPRICIGQNFALLEAKMALSIILQRFSFELSPSYVHAPYTVITLQPQHGAQIRLKKI

SEQ ID NO: 36384 - protein, 447 aa, Arabidopsis thaliana
MGLPLMMERSSNNNNVELSRVAVSDTHGEDSPYFAGWKAYDENPYDESHNPSGVIQMGLAENQVSFDLLETYLEKKNPEGSMWGSKGAPGFRENALFQDYHGLKTFRQAMASFMEQIRGGKARFDPDRIVLTAGATAANELLTFILADPNDALLVPTPYYPGFDRDLRWRTGVKIVPIHCDSSNHFQITPEALESAYQTARDANIRVRGVLITNPSNPLGATVQKKVLEDLLDFCVRKNIHLVSDEIYSGSVFHASEFTSVAEIVENIDDVSVKERVHIVYSLSKDLGLPGFRVGTIYSYNDNVVRTARRMSSFTLVSSQTQHMLASMLSDEEFTEKYIRINRERLRRRYDTIVEGLKKAGIECLKGNAGLFCWMNLGFLLEKKTKDGELQLWDVILKELNLNISPGSSCHCSEVGWFRVCFANMSENTLEIALKRIHEFMDRRRRF

SEQ ID NO: 36385 - protein, 279 aa, Triticum aestivum
MALEAVEFSQGHFGYGQAPGLGPWCDMVGAGGFFEDCWDQQLLAAPVAPNAEDQWEPVSSWDQSEASSEGKAAAPEPAMAAAATGRRKRRRTKIVKNKEEVESQRRTHIAVERNRRRQMNEYLAALRSLMPQSYAQRGDQASIVGGAINYVKELEQLLQSLEVQKSVKNRTGRSPFASSFTFPQYSTSCNATQATASDGGSGADSSGDKSEAGVADIEVTMVEGHASLKVLSRRRPRQLLRLVAGLQQLRIPPLHLNVTTVDAMVLYSFSLKVINLLLK

SEQ ID NO: 36386 - protein, 471 aa, Vibrio vulnificus CMCP6
MAMKLVWLRRDLRSVDNTALNHAIATSQEVVACFVATPLQWRDHHMAPMQADLIARRLAVLAEELNALNIPLLYDEVDDYAQSATRVANWAEQLAVSEVVLNREYEVNERVRDEQLVNQLASSEIGVLDVEDKCVQAPGCVLNKQGDYFKVFTPFKKAWLKSFVPPQIIKTSAAQPVVLPEALQSSLWHEQAPFSYPRQSSEEWSVDSQQIRETLRHFCHEEVDRYHEQRDFPATAGTSVLSPYLAIGAISVRQCIARLYWQQSYLSNGREVWLSELIWREFYHHLIHFEPKLVKGQGFVEWEKHLLWPAKPDWFDRWCRGETGYPIVDAAMRQLNQTGWMHNRLRMIVASFLTKDLHVNWRLGEQYFMQKLVDGDFAANNGGWQWCASTGCDGQPYFRIFNPITQGEKFDPNGEFVKHWLPELVEVPSKFVHQPWNWPGHMQLDYPAPMVDHKQEREITLSLYTQAKDCL

SEQ ID NO: 36387 - protein, 153 aa, Streptococcus pyogenes
PMAYVLWNHFMNINPKTSRNWSNRDRFILSAGHGSAMLYSLLHLAGYDLSVEDLKNFRQWGSKTPGHPEVNHTDGVEATTGPLGQGIANAVGMAMAEAHLAAKFNKPGFDIVNHYTFALNGDGDLMEGVSQEAASMAGHLKLGKLVLLYDSND

SEQ ID NO: 36388 - protein, 332 aa, Nostoc punctiforme PCC 73102
MNNLSHQYLEESNKKEKLLYTADTVRAYLREIGRIPLLTHEQEINFAKQVQKMMALLATKEKLAIQLKRQPTQKEWIENINIGEKSLLQQLHQGQKAKQKMIQANLRLVVSIAKKYQRHNLDFLDLIQEGSLGLERGVEKFDPTKGYKFSTYGYWWIRQAITRAIAEQGRTIRLPIHITEKLNKIKRIQRELTQKLGRTPTAVDIAEELSLDPKQIRDYLLLARQPVSLELRVGSDKDIELQDMLEDNGLSPELYADHKFLQQNIQNLLSKLNPQQRQILTFRFGLTDGNELSLAEIGQRMGISRERVRQIEQQALGSLRRHKDKIHSYLAS

SEQ ID NO: 36389 - protein, 221 aa, Glycine max
  misc_feature (192)..(192): Xaa can be any naturally occurring amino acid
  unsure (1)..(221): unsure at all Xaa locations
SCLHFFALPPFLVVVPPKMANATPNGSVPHNHVGAVLPTIPTIKIDEKQTLATSEDHTSIDYLQRAQWLRAAVLGANDGLVSVTSLMMGVGAVKKDAKAMLVAGFAGLVAGACGMAIGEFVAVCTQYEVELGQMKREMNMSEGGERDLETEKRTLPNPLQATWASALSFSIGALVPLLSAAFVADYRTRVIXVVVAMASLALVVFGSVGVQLGKTPKLNLV

SEQ ID NO: 36390 - protein, 153 aa, Streptococcus pyogenes
PMAYVLWNHFMNINPKTSRNWSNRDRFILSAGHGSAMLYSLLHLAGYDLSVEDLKNFRQWGSKTPGHPEVNHTDGVAATTGPLGQGIANAVGMAMAEAHLAAKFNKPGFDIVDHYTFALNGDGDLMEGVSQEAASMAGHLKLGKLVLLYDSND

SEQ ID NO: 36391 - protein, 142 aa, Brassica napus
  misc_feature (62)..(62): Xaa can be any naturally occurring amino acid
  unsure (1)..(142): unsure at all Xaa locations
EVVLTNYAGLYRYRLGDVVKIMSFYNKTPQLKFVCRRNLILSINIDKNTERDLQLSVESAAXRLSEEKIEVIDFSSHVDLSTEPGHYVIFWEISGETNEDVLQDCCNCLDKGFIDAGYMSSRKCKNIGALELRVLEKGTFKK

SEQ ID NO: 36392 - protein, 175 aa, Triticum aestivum
  misc_feature (166)..(166): Xaa can be any naturally occurring amino acid
  unsure (1)..(175): unsure at all Xaa locations
MAPTVMASSATSVAPFQGLKSTAGLPVSRRSNGASLGSVSNGGRIRCMQVWPIEGIKKFETLSYLPPLSTEALLKQVDYLIRSKWVPCLEFSKVGFIFREHNASPGYYDGRYWTMWKLPMFGCTDATQVINEVEEVKKEYPDAYVRIIGFDNMRQVQCVSFIAFKXPGCEESGKA

SEQ ID NO: 36393 - protein, 96 aa, Neisseria gonorrhoeae FA 1090
MTIRPLHDRVVVKRLEAEEKTASGIVLPGAAAEKPDMGEVIAVGAGKIGKDGARRPLDVKAGDKIIFGKYSGQTVKADGEELLVMREEDIFGIVEK

SEQ ID NO: 36394 - protein, 202 aa, Arabidopsis thaliana
  misc_feature (76)..(76): Xaa can be any naturally occurring amino acid
  misc_feature (83)..(83): Xaa can be any naturally occurring amino acid
  misc_feature (144)..(144): Xaa can be any naturally occurring amino acid
  misc_feature (180)..(180): Xaa can be any naturally occurring amino acid
  unsure (1)..(202): unsure at all Xaa locations
MDPYKRTTSSEYIAPFYTTNGGAAVYNNMFSLTMGERGPDLIEDHHSIENVAHLTRDRIPERVVHAERRSVLMGWXEVTHDMXNLTRGDSLRAAGVRTSGIGQFSTDGHERARTETMRDMRGFAAKLYTREGNWGLGGNNTGVXFIRDAIQGPDGVHPLNPNPKTDIQEDWKCLAYMVHXAWKIVTWRWPYDEVATYTDTGP

SEQ ID NO: 36395 - protein, 317 aa, Pseudomonas syringae pv. syringae B728a
MNAGSNFMNSNTSFTHEHVYLGSAHDENAKRTLWVVILTVVMMVGEITAGYLTGSMALLADGFHMATHAGALGIAAAAYAYAKRHASSTRFSFGTGKVGDLGGFASALILGLVSLGIGVESIIRLFQPTNVQFGTATLIAIVGLGVNIVSALLLGHGHRHDHGHGHHDHDHSPHGGDNNLRSAYIHVIADALTSVLAIAALLAGRYLGWVWLDPAMGIVGAIVIARWAWSLMGATAGVLLDQTDDHVADEIRELVEQAGDAKITDLHVWRVGPEAHAAIVSVLGASTTNADSIRDRLKPVHEVSHLTIEFRAALPAT

SEQ ID NO: 36396 - protein, 544 aa, Neisseria gonorrhoeae FA 1090
MAAKDVQFGNEVRQKMVNGVNILANAVRVTLGPKGRNVVVDRAFGGPHITKDGVTVAKEIELKDKFENMGAQMVKEVASKTNDVAGDGTTTATVLAQSIVAEGMKYVTAGMNPTDLKRGIDKAVAALVEELKNIAKPCDTSKEIAQVGSISANSDEQVGAIIAEAMEKVGKEGVITVEDGKSLENELDVVEGMQFDRGYLSPYFINDAEKQIAGLDNPFVLLFDKKISNIRDLLPVLEQVAKASRPLLIIAEDVEGEALATLVVNNIRGILKTVAVKAPGFGDRRKAMLQDIAILTGGVVISEEVGLSLEKATLDDLGQAKRIEIGKENTTVIDGFGDAAQIEARVAEIRQQIETATSDYDKEKLQERVAKLAGGVAVIKVGAATEVEMKEKKDRVEDALHATRAAVEEGVVAGGGVALLRARAALENLHTGNADQDAGVQIVLRAVESPLRQIVANAGGEPSVVVNKVLEGKGNYGYNAGSGEYGDMIGMGVLDPAKVTRSALQHAASIAGLMLTTDCMIAEIPEEKPAVPDMGGMGGMGGMM

SEQ ID NO: 36397 - protein, 580 aa, Rhodospirillum rubrum
MVTKLGRSVPEGLADRFAQKLAHRGPDGKGVFEAPGVLLVQARLAIIDLLTGDQPLHGPDGLVLVANGEVYNYRELRAELGEGVFLTRSDCEPPLHLYARRGLAGFDVLRGMYAIALWDPPRRRLVLCRDPFGIKPLYYVETNDGVAFASEPQALIGAGLLPAREDAAAVDELLQLQFTCGARTIFQGIRRVLPGETLVFEDAQLVERHRRPALPAVRERVSPADPLALLDHVLEDSLDLHQRADVPYGLFLSGGIDSSSVLAMMARLNERPVLAFTAGFPGTEVADERADARAATRAVGARHVEVAVSEGDFLEHLPAIAAAVDDPVADYAIVPTWLLAREAAKSVKVVLCGEGGDELLGGYGRYRSAMRPWPLARPLRRKGLLDGLGLLRGGGGRNWRAGIARAEVEARAQGGSRLIRAQRVDCADWLPHDLLNKLDRCLMAHGLEGRVPFVDVDVARFCLPLADGLKVRDGMGKWILRSWLERTLPEARPFAPKRGFSVPVGEWMSRHGDRLGPLVAASPAVAARCHGEAVRALFTHPRKETALAAWILLYYALWHRRHIVGLAPEGDVFHCLSTAA

SEQ ID NO: 36398 - protein, 205 aa, Aeropyrum pernix K1
MSAQVRETLVPSELYRKAGVIYGTQICTRYMRQFVHRILPEGYYQLDYLKIDERLAMAAKFLSTFEPEKIAVVSVRIYGQKPVRMMCERVGCKAITGRIIPGTFTNPNLEHYVEPDVVVVTDPRMDRQAVVEASKVGIPVVALVDTDNSIENIDLVIPANNRGRRSLALIYWILTREILRRRGVLKPDEDLDVSYEEFMARKVFK

SEQ ID NO: 36399 - protein, 592 aa, Saccharomyces cerevisiae
MLSLSAKNHFTVSNSITHVIKSYHIRTLTSSAEKMPHITTPFSTSASSTKLKAFRKVRPVLQRHSSSWIVAQNHRRSLSGQSSLNDLRHLNRFPHHTLKTSNNEFYPAEQLTLEDVNENVLKAKYAVRGAIPMRAEELKAQLEKDPQSLPFDRIINANIGNPQQLQQKPLTYYRQVLSLLQYPELLNQNEQQLVDSKLFKLDAIKRAKSLMEDIGGSVGAYSSSQGVEGIRKSVAEFITKRDEGEISYPEDIFLTAGASAAVNYLLSIFCRGPETGVLIPIPQYPLYTATLALNNSQALPYYLDENSGWSTNPEEIETVVKEAIQNEIKPTVLVVINPGNPTGAVLSPESIAQIFEVAAKYGTVVIADEVYQENIFPGTKFHSMKKILRHLQREHPGKFDNVQLASLHSTSKGVSGECGQRGGYMELTGFSHEMRQVILKLASISLCPVVTGQALVDLMVRPPVEGEESFESDQAERNSIHEKLITRAMTLYETFNSLEGIECQKPQGAMYLFPKIDLPFKAVQEARHLELTPDEFYCKKLLESTGICTVPGSGFGQEPGTYHLRTTFLAPGLEWIKKWESFHKEFFDQYRD

SEQ ID NO: 36400 - protein, 408 aa, Ralstonia eutropha JMP134
MLLEQLRRAADERQARALTRRRRIAHTACAPHQAVGPVDAPAPQPLLTFCSNDYMGLASHPDVVAALADGARLYGAGSGASHLVSGHSLAHARLEEELARWFAPHIPQARTLYFCTGYMANMAVLTALGTAGATLFCETLNHASLIDGARLARADVQRYPHCDAAALDALLAASTSPLKLIVTDSVFSMDGDVAPLAELLALAERHDAWIIVDDAHGFGVLGDDGHGVLQALGLNSERFIYIGTLGKAAGVAGAFVAAHETIIEHLVNTARPYIYTTAAPPAVAHALMASLAIIEGEEGRQRRANLNQLIADLRAGLAPLAAAAGWELGDSATAVQPLIVGDNAVSLALSARLEAEGIRVGAIRPPTVPEGTARLRITLSATHTAADVQRLVGVLADAVPPEAKREAA

SEQ ID NO: 36401 - protein, 437 aa, Kluyveromyces lactis NRRL Y-1140
MVVTAELNLSSAKTIEYEQEYSAHNYHPLPVVFSRASGAHVWDPEGKEYLDFLSAYSAVNQGHCHPHIIQALVDQASKLTLSSRAFSNDCFASFSKFVTEFFGYESVLPMNTGAEAVESALKLARRWGYMVKKIQPNEAIILGARGNFHGRTFGAISLSTDEEDSRMNFGPFLENVTAKIPGGSDDEFIRYGEIDDYKRAFESHGDKICAVIVEPIQGEAGIVVPRADFLTDLQELCKKHQVLLICDEIQTGIARTGKLLCYEHSPNCKPDIILLGKAISGGVLPVSCVLSSREIMDCFTPGSHGSTYGGNPLASRVAIAALEVVQNENLVERSARLGKFLQDELVKLQHESNGVISEVRGKGLLTAIVINPEKANGRTAWDLCLLMKDQGVLAKPTHEHIIRLAPPLVISEEDLLKGVDSIRVSLSKLPNVPKSHH

SEQ ID NO: 36402 - protein, 491 aa, Escherichia coli K12
MANYFNTLNLRQQLAQLGKCRFMGRDEFADGASYLQGKKVVIVGCGAQGLNQGLNMRDSGLDISYALRKEAIAEKRASWRKATENGFKVGTYEELIPQADLVINLTPDKQHSDVVRTVQPLMKDGAALGYSHGFNIVEVGEQIRKDITVVMVAPKCPGTEVREEYKRGFGVPTLIAVHPENDPKGEGMAIAKAWAAATGGHRAGVLESSFVAEVKSDLMGEQTILCGMLQAGSLLCFDKLVEEGTDPAYAEKLIQFGWETITEALKQGGITLMMDRLSNPAKLRAYALSEQLKEIMAPLFQKHMDDIISGEFSSGMMADWANDDKKLLTWREETGKTAFETAPQYEGKIGEQEYFDKGVLMIAMVKAGVELAFETMVDSGIIEESAYYESLHELPLIANTIARKRLYEMNVVISDTAEYGNYLFSYACVPLLKPFMAELQPGDLGKAIPEGAVDNGQLRDVNEAIRSHAIEQVGKKLRGYMTDMKRIAVAG

SEQ ID NO: 36403 - protein, 606 aa, Rhodospirillum rubrum
MMTTRTAREAGEAEAAGPSTLRLVGRLIKDHLAQQWGLIALAVLCMLAVAASTSAIAWLMKPAVNDVFARHDRDVLMLIALAFPVAFVLKGLANYGQRTLMNRVGLRVVQRCREALYDHLQGMDIAFFAQQQTAALVSRFTVDLTLLKNTITSGIMVVGRDAVTMVSLVVSLFLLDIELALIAVTVFPAAVLPIALLGKRVRKAARGMQAQSGQLDALLLQVFQAIRVVKVYNAGEHERARVAATVDRIYRHLMRSERIGAAISMVVEILSGFAFAAVVIYGGQRVTAGDLDPGTFFAFITSLFLLYQPIKRIGGVNVVAQEGMAAVERMYGVIDTPPALREGKDAPALVVGGGEIVFDDVRLTYPTQEGPALDGLSFRAPAGATVALVGRSGAGKSTALQLVPRFYDADGGRVLIDGQDVRAVTFRSLWAAIAMVTQEIILFDDSVRANIAYGRPGASQAEIEDAARHAAAHDFILALPEGYDTVIGEQGTRLSGGQRQRLVIARAMLKNAPILLLDEATSALDTESERHVRQAFERLRQGRTCIVVAHRLSTVMNADIIHVIDAGRIVESGSHAALLAEGGLYADLCATDLSDEPAEDPEVVPA

SEQ ID NO: 36404 - protein, 195 aa, Glycine max
MATCFAPFSVSGGSHELWLTKRVGPKLTVQRRSNLVIKRNHTSSISAEYRDNRGGGGGDFVAGFLLGGAVFGTLAYIFAPQIRRSLLNEDEYGFRKAKRPIYYDEGLERTRQTLNEKIGQLNSAIDNVSSRLRGGNNVPAAKIESDPEVEATTVRRIQFDTVVDDVLNWWKYNELKMKSLLFFDGLKDKILLGLM

SEQ ID NO: 36405 - protein, 447 aa, Zea mays
MDAAATAVSSSGDAPVLLLALAVSLLLLAAAVWSSRRRGQGHGNGNGAPSPPSRPLLGHLHLLGQPLHRSLAALAAAHGAGGQLAPLLSLRLGARRALVVSERGVAEECFTAHDAALAGRPRVLAGDRLGYGYTMLVWASHGDHWRALRRLLAAEIFSAARVAARAADRRSEVAALVTSLAALHLHCGGGAVSLRPRLFELVLGVMLRALTGERAHGGDVRTFQGIVEETFAVSGAPSVGDFFPALRWVDRLRGVDAALVRLQARRDAFVGGLVQDQRRRRRDAGDGRGRHAAEKQSIVDELLSLQETDPEYYTDTIIKGVVLMLLTAGTDTSALTTEWAMALLLTHPEAMRKARAEIETSVGTARLVEESDIANLPYLQCVVKETLRLRPVGPVIPAHEAMEDCTVGGFHVERGTMVLVNAWAIHQDPKLWDAPEEFRPERFLDAA

SEQ ID NO: 36406 - protein, 480 aa, Arthrobacter aurescens
MPEAAPDFDLAVIGSGGGAFAAAIRATNLGKRVVMIERSTVGGTCVNTGCVPSKALLAAADARHVALDGTGRFPGISTTAAPVDMGALIDGKRSLVEGMRSDKYVDLAAEYGWDLRQGSAVFAGTPQEPALEITRPDGGRDSLTAAHYLVATGSAPWAPPVPGLEEVDYLTSTTAMELGEVPESLIVFGGGYVALEQAQLFARLGSKVTLLARSRLASHEEPEASRALMGVFADEGIRVIRRATVTSIRANASGEEVTVTATVAGGHEEFRAAKLLVATGRRAVTNGLNLDAVGVKTGNTGQILVENTLASSNPRIWAAGDVTGHREFVYVASAHGTLMVENAFNDAGREVDYRHLPRVTFTSPALAAVGMTDKEANEAGIRCECRVLPLEYVPRALVNRDTRGFIKIVANNSTGRIVGITAVGKEAGDLAAAGVYILEAGMTVDQVANLWSPYLTMAEGIKIAAQSFTTDVSKLSCCAS

SEQ ID NO: 36407 - protein, 688 aa, Kluyveromyces lactis NRRL Y-1140
MSEDKYCLVTGGAGYIGSHTVVELCEAGYKCIVVDNLSNSSYESVARMELLTGQEIKFAKIDLCELEPLNKLFDDYKIDSVLHFAGLKAVGESTQIPLTYYFNNIVGTINLLECMKSHDVKKLVFSSSATVYGDATRFENMIPIPETCPTGPTNPYGKTKLTIEDMMRDLHFSDKSFSFAILRYFNPIGAHPSGVIGEDPLGIPNNLLPFMAQVAIGRRPKLYVFGDDYDSVDGTPIRDYIHVVDLAKGHLAALKYLEKYAGTCREWNLGTGHGTTVLQMYRAFCDAIGFNFEYVVTARRDGDVLNLTAKCDRATNELEWKTELDVNKACVDLWKWTQDNPFGYQIKGVDSKFFGDKGDFSSRVVSLGKGTSFEVKLANLGATIVDIVVNGCSVVASLDNETEYKDQSNPFFGATVGPYANRIANGTFEINGKRIQLTVSKEDGNVVHSGINSYHSKKFLGPIVKNPEAHIWTADFKYVDEETEFPARLSTLVRYKVDSEKKTLTVEYESKVAGQGSTGANITNHTYFNLNKFNEATIKGSKVQLIDNTGLEVNNKLLPTGNLKKYTQVATFNDSPTEITEKEPVLDFCFVSGLPAKLDTRSSPLTPVFKLSNEDAKLEVEVATTEPTFQVYTGDYVDVKDKYENRAGICCEPGRYIDAVNNPEWKSSVVLPAGETYGHKLSYTFRTL

SEQ ID NO: 36408 - protein, 180 aa, Glycine max
FTPDGRWVVSGGFDNVVKVWDLTAGKLLHDFKFHEGHIRSIDFHPLEFLLATGSADRTVKFWDLETFELIGSARPEATGVRSIAFHPDGRALFTGHEDGLKVYSWEPVICHDTIDMGWTTLGDLCIHDGKLLGCSFYRNSVGVWVADISLIEPYGTGLDPKKNESTGTKTWSSRKVNWRK

SEQ ID NO: 36409 - protein, 361 aa, Crocosphaera watsonii WH 8501
MKDHNERKRLTTPLKIILMTLVVLGQGWILPSYAQLIRQQREALSEQKIPVVNLGIRFKHRLTGHTTPIRSLAFSPNGRTVISAGSTNEPFLKFWSIEDGHEIDTLRTQSSAILTLAVSPNGKTLISSGEDADIHFWVWPNPDSKVTSFEHYSHVLDLVVTPDSQLVVTGSLDGIRVWTLEPPRSLYQLEGFGTPAFALAMHPNGFLVASGDNQGIVRFWNLRDQTVVSQFSAHSQTISGLAITLDQKRLITASHDRTIKIWDLATGELLDTWTGHRGRIQAIALSPNGQVLASAGHDGVRLWNAQTGRLLRHFKEHSDLVNVVAFSPDGKYFASGGFDRVVNLWEISPAFYESLKLRRSF

SEQ ID NO: 36410 - protein, 415 aa, Prochlorococcus marinus str. MIT 9313
MMEDLHRVVITGLGAVTPIGNTVADYLEGLKTANNGVGAISLFDASAHACRFAAEVKDFDPTGFLEAKESKRWDRFSKFGVVAAKQAVADAGLSIEEENSSRIGVIIGSGVGGLLTMETQAHVLNEKGPGRVSPFTVPMMIPNMATGLAAIALGAKGPSSAVATACAAGSNAIGDAFRLLQLGKADVMVCGGAEASITPLGVAGFASAKALSFRNDDPTTASRPFDAERDGFVIGEGSGVLVLETLEHAKNRDATIHAEIVGYGMTCDAHHITAPTPGGVGGAEAIRLALKDGKLEPTSVDYINAHGTSTPANDSNETAAIKNALGERASQIPVSSTKSMTGHLLGGSGGIEAVACVLALQHDMVPPTINYLNPDPQCDLDYVPNMAREHRLSVVLSNSFGFGGHNVCLAFRQMP

SEQ ID NO: 36411 - protein, 183 aa, Prochlorococcus marinus subsp. marinus str. CCMP1375
MRRLFSILLSAFLLLGLAPIVNAAGEAVNADRAATDFTASALTTCSENTRFNERASQATTPKDIARFERYSKASCGDDGLPHLVIAATIEPWGALANRHHEGDILIPGHIFIYVAGIIGWSGREYLRASKKTKNPAENEIIIDFALARQCLIKGAAWPVEANKQGRSGDLREKDENISLNGPR

SEQ ID NO: 36412 - protein, 669 aa, Prochlorococcus marinus str. MIT 9313
MVAATASLDTLCINSIRMLAVDAVNKANSGHPGLPMGCAPMGYTLWDQFLHHNPKNPQWFNRDRFVLSAGHGCMLVYALLHLTGYDSVSIEDIKQFRQWGSRTPGHPETFETPGVEVTAGPLGAGISNAVGLAIAEAHLAAKFNKPEAKIVDHYTYVVMGDGCNQEGIASEACSLAGHLKLGKLIALYDDNHITIDGRTDVSFTEDVLKRYEAYGWHVQHVANGDTDVNAIAKAIAAAKAVTDKPSIIKVTTTIGYGSPNKSDTAGVHGAPLGEEEATLTRQQLGWNYGPFEIPQEAYDQYRKAIDQGARLESEWNQALANYRSQYPNEAAEFERMLRGELPKGWEKDLPTYTPADSGLATRKHSQICLGALGPNLPELIGGSADLTHSNYTDIKGETGSFQPETPEKRYLHFGVREHAMAAILNGIAYHNSGLIPYGGTFLVFADYMRGSMRLSALSELGVIYVLTHDSIGVGEDGPTHQPVETIPSLRAMPNMLVFRPGDGNETSGAYKVAIQNRKRPSSLCLSRQGMANQANSSIENVALGGYVLEDCEGTADLILIGTGTELDLCVQAAKQLSAEGHKIRVVSMPCVELFEEQSSAYKQEVLPNAVRKRIVVEAAESFGWYKYIGLDGDSVTMNSFGASAPGGTCMEKFGFTVENVVAKSKALLN

SEQ ID NO: 36413 - protein, 363 aa, Rhodobacter sphaeroides 2.4.1
MNAPAGGLSPALTPEAVADTTAMATETHILNPRFYTTDFDELDRVDVTPVRKDWDALIAEMKADPNKAHFKKTEAWDRIDWDGMDPALRVEFIDFLVSSCTAEFSGCVLYKEMKRRGSNPDIRELFNYMARDEARHAGFINDALREAGVAVNLGFLTKAKKYTYFRPKFIYYATYLSEKIGYARYITIYRHLEANPEHRFHPIFKWFKEWCNDEFRHGEAFALLMKTDPKLTDTTVNRLWIRFFLTAVYSTMWVRDHARPEFHKALGVDIDWYDQEVYRKTSEIARQIFPVELDIDHPRWKPALRRMNEAFLRIDRGTRRGGIAGRLEKALGGAQALAAFVSLYTIPVRTHTLPENVRLEPSY

SEQ ID NO: 36414 - protein, 309 aa, Prochlorococcus marinus subsp. marinus str. CCMP1375
MIAFLLPIVSLLVLSLIFLWLFNDRKYKSSESVSSAYDSWTNDRLLEKLWGEHIHLGYYENSYKTKDFRQAKIDFVHKLAHWSGLSTLPKGSRIIDIGCGIGGSSRILAKDYGFDVVGITISSEQVKRANQLTPKELKCHFEIMNALNLKFEDGSFDGVWSVEAGPHILNKQLFADEMLRVLRPGGVLAVADWNRRDYAKKEIGFLNSLVLKQLLNQWSHPDFATIYGFRNNLSDSIYSAGRVETDDWTKYTIPSWNDSIIEGIRRPNVFFDLGLGSFFKAIREVPTIVLMRWAFHTGLMQFGVFRSRG

SEQ ID NO: 36415 - protein, 637 aa, Arabidopsis thaliana
MATGQNRTTVPENLKKHLAVSVRNIQWSYGIFWSVSASQSGVLEWGDGYYNGDIKTRKTIQASEIKADQLGLRRSEQLSELYESLSVAESSSSGVAAGSQVTRRASAAALSPEDLADTEWYYLVCMSFVFNIGEGMPGRTFANGEPIWLCNAHTADSKVFSRSLLAKSAAVKTVVCFPFLGGVVEIGTTEHITEDMNVIQCVKTSFLEAPDPYATILPARSDYHIDNVLDPQQILGDEIYAPMFSTEPFPTASPSRTTNGFDQEHEQVADDHDSFMTERITGGASQVQSWQLMDDELSNCVHQSLNSSDCVSQTFVEGAAGRVAYGARKSRVQRLGQIQEQQRNVKTLSFDPRNDDVHYQSVISTIFKTNHQLILGPQFRNCDKQSSFTRWKKSSSSSSGTATVTAPSQGMLKKIIFDVPRVHQKEKLMLDSPEARDETGNHAVLEKKRREKLNERFMTLRKIIPSINKIDKVSILDDTIEYLQELERRVQELESCRESTDTETRGTMTMKRKKPCDAGERTSANCANNETGNGKKVSVNNVGEAEPADTGFTGLTDNLRIGSFGNEVVIELRCAWREGVLLEIMDVISDLHLDSHSVQSSTGDGLLCLTVNCKHKGSKIATPGMIKEALQRVAWIC

SEQ ID NO: 36416 - protein, 399 aa, Glycine max
MEDQNGSGKLSQGLRKVKPYLAILSLQFGYSGMYIITMVSFKHGMSHWILSVYRHVVAAIIIVPFALVLERKIRPKMTLPIFLRIVALGFLEPVLDQNLYNMGMKMTSTTFASATVNVLPAITFVMALIFRLEKVNLRKFHSVAKVIGTLITVSGAMVMTLYKGPAFQIIKGGGAISNHSNSSSTSTTEPSDQHWIVGTVYLISSCASWAGFFILQSFTLKKYPAELSLTAWICVMGIIEGSIASLIFERDFSVWAIGWDSRLLACVYSGVICSGMAYYVQGVVTRERGPVFVTSFSPLCMIITAALGSLVLAEQVHLGSIFGAILIVCGLYTVVWGKSKDRKSTTEIEKGESQELPIKNGTKSASDIFDGIEINVPSEVLKKGGGKNVPPATTTTTTS

SEQ ID NO: 36417 - protein, 471 aa, Saccharomyces cerevisiae
MSRSLLVENSRTINSNEEKGVNESQYILQKRNVPRTILGNVTNNANILQEISMNRKIGMKNFSKLNNFFPLKDDVSRADDFTSSFNDSRQGVKQEVLNNKENIPEYGYSEQEKQQCSNDDSFHTNSTALSCNRLIYSENKSISTQMEWQKKIMREDSKKKRPISTLVEQDDQKKFKLHELTTEEEVLEEYEWDDLDEEDCDDPLMVSEEVNDIFDYLHHLEIITLPNKANLYKHKNIKQNRDILVNWIIKIHNKFGLLPETLYLAINIMDRFLCEEVVQLNRLQLVGTSCLFIASKYEEIYSPSIKHFAYETDGACSVEDIKEGERFILEKLDFQISFANPMNFLRRISKADDYDIQSRTLAKFLMEISIVDFKFIGILPSLCASAAMFLSRKMLGKGTWDGNLIHYSGGYTKAKLYPVCQLLMDYLVGSTIHDEFLKKYQSRRFLKASIISIEWALKVRKNGYDIMTLHE

SEQ ID NO: 36418 - protein, 131 aa, Arabidopsis thaliana
MDQGGRGVGAEHGKYRGVRRRPWGKYAAEIRDSRKHGERVWLGTFDTAEEAARAYDQAAYSMRGQAAILNFPHEYNMGSGVSSSTAMAGSSSASASASSSSRQVFEFEYLDDSVLEELLEEGEKPNKGKKK

SEQ ID NO: 36419 - protein, 153 aa, Streptococcus pyogenes
PMAYVLWNHFMNINPKTSRNWSNRDRFILSAGHGSAMLYSLLHLAGYDLSVEDLKNFRQWGSKTPGHPEVNHTDGVEATTGPLGQGIANAVGMAMAEAHLAAEFNKPGFDIVDHYTFALNGDGDLMEGVSQEAASMAGHLKLGKLVLLYDSND

SEQ ID NO: 36420 - protein, 153 aa, Streptococcus pyogenes
PMAYVLWNHFMNINPKTSRNWSNRDRFILSAGHGSAMLYSLLHLAGYDLTVEDLKNFRQWGSKTPGHPEVNHTGGVEATTGPLGQGIANAVGMAMAEAHLAAKFNKPGFDIVDHYTFALNGDGDLMEGVSQEAACMAGHLKLGKLVLLYDSND

SEQ ID NO: 36421 - protein, 390 aa, Arabidopsis thaliana
MYMIESKGGAIACMLLALLFLGTWPAIMTLTERRGRLPQHTYLDYTLTNLLAAVIIALTLGEIGPSRPNFFTQLSQDNWQSVMFAMAGGIVLSLGNLATQYAWAYVGLSVTEVITASITVVIGTTLNYFLDDRINRAEVLFPGVACFLIAVCFGSAVHKSNAADNKTKLQNFKSLETTSSFEMETISASNGLTKGKAKEGTAAFLIELEKQRAIKVFGKSTIIGLVITFFAGICFSLFSPAFNLATNDQWHTLKHGVPKLNVYTAFFYFSISAFVVALILNIRFLYWPILGLPRSSFKAYLNDWNGRGWSFLAGFLCGFGNGLQFMGGQAAGYAAADAVQALPLVSTFWGILLFGEYRRSSRKTYTLLISMLLMFIVAVAVLMASSGHRK

SEQ ID NO: 36422 - protein, 229 aa, Debaryomyces hansenii CBS767
MSFFDKYNRLLKTHPFRVNMVTTGLLFGVGDGVAQKLFPLNHDHLDEEKPKYNVYRTMRAMIYGSCFFAPCGVLWYGKRLPLIKNPFVSVKNRETWSKNRVHLYDTLYRVAIDQIFIPGLFWIPMYNIVMSTLSGYENPLEVAFHKLQHNWWNVLTTNWMVWPGFQLISFFYIPVHLRIVAANICSVGWNCFLSYLYNGKAHGDHQKEEILDHLVDPDEEIEETTMVVY

SEQ ID NO: 36423 - protein, 206 aa, Debaryomyces hansenii CBS767
MASIYQKYSQLIAKRPLITNIITTGFLFGSGDYLAQTLYPSSSKYDYKRTLRATFYGSIIFAPIGDKWYRLLHKINFPFPKTKVSPTVSKVLNTLTKVGVDQLVFAPFIGIPLYYSVMSVLEFHDNPLQVAREKLHAHWFNTLKTNWVVWPTFQLFNFALIPVQFRLLVVNIFSIGWNCYLSSVLNHKHDFLIENITDVDKDEILI

SEQ ID NO: 36424 - protein, 472 aa, Anabaena variabilis ATCC 29413
MRILFVAAEAAPIAKVGGMGDVVGALPKVLRKMGHDVRIFLPYYGFLPDKMEIPKDPIWKGYAMFQDFTVHEAVLPGTDVPLYLFGHPAFNPRRIYSGDDEDWRFTLFSNGAAEFCWNYWKPEIIHCHDWHTGMIPVWMNQSPDITTVFTIHNLAYQGPWRWYLDKITWCPWYMQGHNTMAAAVQFADRVNTVSPTYAEQIKTPAYGEKIEGLLSFISGKLSGIVNGIDTEVYDPANDKFIAQTFTADTLDKRKANKIALQEEVGLEVNSNAFLIGMVTRLVEQKGLDLVIQMLDRFMAYTDAQFVLLGTGDRYYETQMWQLASRYPGRMATYLLYNDALSRRIYAGSDAFLMPSRFEPCGISQMMALRYGSIPIVRRTGGLVDTVSHHDPVNEAGTGYCFDRYEPLDLFTCMIRAWEGFRYKPQWQELQKRGMSQDFSWYKSAKEYDRLYRSIYGLPEAEETQPELILANQ

SEQ ID NO: 36425 - protein, 163 aa, Brassica napus
MAESNGRRIGVAVDFSECSKKALNWAIENVVRDGDYLILITVAHDMHYEDGEMQLWETVGSPLIPLSEFSEAAVMKKYGVKPDAETLDIANTAARQKSITVVMKIYWGDPREKICEAAEHIPLSSLVIGNRGLGGLKRMIMGSVSNHVVNNVACPVTVVKAHH

SEQ ID NO: 36426 - protein, 358 aa, Anabaena variabilis ATCC 29413
MVNSLTTPEPQTLKPGVKAPVQETLLTPRFYTTDFDAVANLDISANEAEIRAVVEELRADYNRHHFVRDEEFKQSWDHITGEKRRAFIDFLERSCTSEFSGFLLFKELSRRIKSRNPLLAEAFEFMARDEARHAGFLNKSMSDLNLSLDLNYLTKNRTYTFFPPEWVIYTVYLSEKIGYWRYILVHQHMQEHPEYQFYPLFRKFESWCQDENRHGDFFKALLRSQPQLWKNWKARLWVRFFLLTVFVTHTMTVFERASFYESIGIHPRKYNNRVIQETNNTSARAFPLILNTNHPLFFWRLEQCWENNMKLAAIKNNKLPNFVKFFQRIPPATAIFWNMLRLFLIKPIDTEATRGTVL

SEQ ID NO: 36427 - protein, 153 aa, Glycine max
MDKYEAVKDLGAGNFGVARLMRNKVTKELVAMKYIERGPKIDENVAREIMNHRSLRHPNIIRYKEVVLTPTHLAIVMEYAAGGELFERICSAGRFSEDEARYFFQQLISGVHFCHTMQICHRDLKLENTLLDGSPAPRLKICDFGYSKSSLLH

SEQ ID NO: 36428 - protein, 109 aa, Synechococcus elongatus PCC 6301
SMKTLPKERRFETFSYLPPLSDRQIAAQIEYMIEQGFHPLIEFNEHSNPEEFYWTMWKLPLFACAAPQQVLDEVRECRSEYGDCYIRVAGFDNIKECQTSSFIVHRPGR

SEQ ID NO: 36429 - protein, 605 aa, Neurospora crassa
MRFLPLLGGLLPLLGLVGAAPSCNHECNRACWTSRFNVNTDYENEWPVTGVTRKVSTCSHGTPQFDFEITEVDEWVGPDGHIKKGAMLINGGYPGPLIKADWGDRIEVTVTNKLKTNGTSMHWHGFHQLNSNNQDGVAGVTECLIVPGASKVYSFLATQHGTSWYHSHISSQYANGIVGPIQINGPSSYPYDTDLGVFPISDWYYDSAEHIVDRMMDPNDPFLKGVPGSPPPSNNILFNGMNIAPNGTGGEYARLKFTKNKRHRLRLVNTSADNTFVVSIVGHNMTVIETDFVPVEPYAVHQLYLTVGQRYDVVIKADQEVDNYWINATLSSTPLCGVSLNPYPAAIVSYEGSDESRLPTNRGPRAIDQFCEDDVSSKPLTSRTAPKADFSDTKVDTLSVTLDVKEVNKGISKVLWSVDGSAIDVQWDKPTLEYVVEGNFTFPRQANIIQLPEAVKWSFWVIQNNSPSPHPMHLHGHDFLILGRSRFPANPLVDPGQPILFDPVVDGPHLKFDNPTRRDTTVVPSFGWLVIAFEAGRNPGSWVFHCHIPWHMSQGLSVQFLERVDRINDGAIPNLMPDLQEKCDEWRRYADNDPEFRMKKVDSGI

SEQ ID NO: 36430 - protein, 294 aa, Arabidopsis thaliana
MDQYEKVEKIGEGTYGVVYKARDKVTNETIALKKIRLEQEDEGVPSTAIREISLLKEMQHSNIVKYDDVVHSEKRLYLVFEYLDLDLKKHMDSTPDFSKDLHMIKTYLYQILRGIAYCHSHRVLHRDLKPQNLLIDRRTNSLKLADFGLARAFGIPVRTFTHEVVTLWYRAPEILLGSHHYSTPVDIWSVGCIFAEMISQKPLFPGDSEIDQLFKIFRIMGTPYEDTWRGVTSLPDYKSAFPKWKPTDLETFVPNLDPDGVDLLSKMLLMDPTKRINARAALEHEYFKDLGGMP

SEQ ID NO: 36431 - protein, 680 aa, Anabaena variabilis ATCC 29413
MQPEPKVNILLVDDKVENLLALEAILERLGANLVRATSGEEALRCLLHQDFAVILLDVQMPGMDGFETATLIRNRGRSRQTPIIFLTAFSTSDQMLFKGYALGAVDYLLKPIDANILTSKVTVFVELFKKTQAIQRQAAQLAAINAELRQSEERFRSLSTCSPIGIFETDTAGCCKYTNPRYQAICGLDATESLDKRWLESVHPEDQERAIASWSTYIDQGGDYSDEFRFQTVDGSLRWVQVRSSPMLSGNGELLGHVGTLEDITARKQSEEIRAQVIREQTARQEAEAANRMKDEFLAVLSHELRTPLTSMLGWSKILRAKKLDEKATARALEAIERNANSQVQLIEDILDVSRIIRGQLRLNLSPVNLTTVVEAALEAVRPLADTKSMTINTALDYTLSPVSGDSARLQQIVWNLLTNAIKFTPKEGKVEIRLEGISGGLSDDLTHAQIQVIDTGIGIEREFLPKVFERFRQADSTTTRSHNGLGLGLAIVRHLVELHKGTILAESPGVGKGATFTVRFPLIQENREPRPAPTENFSGDGANSSPLAGLKVLIVDDETDTRNFLGFLFEEYGAISSTSASVETALAVIDQLKPDILISDIGMAEQDGYTLIRKLRSLPPEQGGEIPAIALTAYSREEDRQQIIEAGFQYHLCKPIDPNQLISVVASIFRLSPALSKLG

SEQ ID NO: 36432 - protein, 280 aa, Glycine max
MGSHNALAATFGILGNIISVMVYLAPVPTFYRIYKKKCTDGFHSLPYLLSLMSSMLWLYYAFLKIHDGVVPLITINSIGCVIELIYILTYIKYAHKDARNLTYTLFAAMNIGFLALVLSSRFALNGSHRVKVIGWICDAVSLSVFASPLSIMAKVIRTKSVQFMPFYLSFFLTLNAITWFVYGLSMQDKCIYIPNVGGFALGLVQMVLYGIYRKGSESEKEQGLGEGVINIVVVNPLGPAEVFPIAVDDNKVKDLVVVDDVTVSQQEKEKNVEAKDDCPV

SEQ ID NO: 36433 - protein, 153 aa, Arabidopsis thaliana
  misc_feature (38)..(38): Xaa can be any naturally occurring amino acid
  misc_feature (75)..(75): Xaa can be any naturally occurring amino acid
  misc_feature (94)..(94): Xaa can be any naturally occurring amino acid
  misc_feature (120)..(120): Xaa can be any naturally occurring amino acid
  unsure (1)..(153): unsure at all Xaa locations
GDLRDSTNVNILNRAIHDHYTTRNDQNACINILADALXDVFCDKEGGLAKACFAYLAKGGFFSRGPVQLLSGVSXSQTLLLFHFFSVALYAVYXMLSPFPTPSRIYTCVMVISQTVGIIXPRGGREKRPGPGGIVQLKREMGGGGRGKRNFQI

SEQ ID NO: 36434 - protein, 1147 aa, Saccharomyces cerevisiae
MPNPNTADYLVNPNFRTSKGGSLSPTPEAFNDTRVAAPATLRMMGKQSGPRNDQQQAPLMPPADIKQGKEQAAQRQNDASRPNGAVELRQFHRRSLGDWEFLETVGAGSMGKVKLVKHRQTKEICVIKIVNRASKAYLHKQHSLPSPKNESEILERQKRLEKEIARDKRTVREASLGQILYHPHICRLFEMCTMSNHFYMLFEYVSGGQLLDYIIQHGSLKEHHARKFARGIASALQYLHANNIVHRDLKIENIMISSSGEIKIIDFGLSNIFDYRKQLHTFCGSLYFAAPELLKAQPYTGPEVDIWSFGIVLYVLVCGKVPFDDENSSILHEKIKKGKVDYPSHLSIEVISLLTRMIVVDPLRRATLKNVVEHPWMNRGYDFKAPSYVPNRVPLTPEMIDSQVLKEMYRLEFIDDIEDTRRSLIRLVTEKEYIQLSQEYWDKLSNAKGLSSSLNNNYLNSTAQQTLIQNHITSNPSQSGYNEPDSNFEDPTLAYHPLLSIYHLVSEMVARKLAKLQRRQALALQAQAQQRQQQQQVALGTKVALNNNSPDIMTKMRSPQKEVVPNPGIFQVPAIGTSGTSNNTNTSNKPPLHVMVPPKLTIPEQAHTSPTSRKSSDIHTELNGVLKSTPVPVSGEYQQRSASPVVGEHQEKNTIGGIFRRISQSGQSQHPTRQQEPLPEREPPTYMSKSNEISIKVPKSHSRTISDYIPSARRYPSYVPNSVDVKQKPAKNTTIAPPIRSVSQKQNSDLPALPQNAELIVQKQRQKLLQENLDKLQINDNDNNNVNAVVDGINNDNSDHYLSVPKGRKLHPSARAKSVGHARRESLKFTRPPIPAALPPSDMTNDNGFLGEANKERYNPVSSNFSTVPEDSTTYSNDTNNRLTSVYSQELTEKQILEEASKAPPGSMPSIDYPKSMFLKGFFSVQTTSSKPLPIVRHNIISVLTRMNIDFKEVKGGFICVQQRPSIETAAVPVITTTGVGLDSGKAMDLQNSLDSQLSSSYHSTASSASRNSSIKRQGSYKRGQNNIPLTPLATNTHQRNSSIPMSPNYGNQSNGTSGELSSMSLDYVQQQDDILTTSRAQNINNVNGQTEQTNTSGIKERPPIKFEIHIVKVRIVGLAGVHFKKVSGNTWLYKELASYILKELNL

SEQ ID NO: 36435 - protein, 400 aa, Ralstonia eutropha JMP134
MADRLPITVLSGYTGAGKTTLLQHVLAATVGKRVGVAGSLQQAGELAVRGGFDHLLLEPAGTDDPMAIAEAVLFEDEHGGRATLSLDTLVTVVDASTFLRDVNDAEFLHGSDDVHDNGIEEDDRTVVDVLIAQVEFADVIVLNKSDLVDASALAQLEAILRALNPRADIVAASFGKIAAERVLGTGRFDFEDTASATGWLALQRGETLPEAHGISGFLYRRRRPFHPARFAELIHTEWMREHGSVLRSKGLFWLASRMGIAGDWAQAGGVCRPAAAGAWWAALDASEWPTDAADLAALEADMLDEGQPAAYGDRRQEIALIGADLDRSALEACLDACLLTDAEMAAGPEAWAAYADPFPAWEDAFDDEDHDHDHDHDHGRHHGHDHHHGGDCDCGHPHDH

SEQ ID NO: 36436 - protein, 588 aa, Colwellia psychrerythraea 34H
MSVPIREFDAIVIGAGGAGMRAALAISESGKSCALISKVFPTRSHTVSAQGGITVALGNAHEDHWEQHMYDTVKGSDYIGDQDAIEYMCKTGPESIIELEKMGLPFSRTEEGKIYQRPFGGQSKNFGGEQAARTAAAADRTGHALLHCLYQQNVKNKTNVYSEWYALDLVKNSDGAVVGTTAICIETGEIVYFKARATVLATGGAGRIFASTTNAHINTGDGVGMSLRAGIQMQDMEMWQFHPTGIAGAGVLVTEGCRGEGGYLLNKDGERFMERYAPNAKDLAGRDVVARSMMTEIREGRGCDGPWGPHIKLKLDHLGRETLYKRLPGVCDLSKTFAHVDPAEEPIPVIPTCHYQMGGVPCNVNGQALNIGSDGKETIVEGLFAVGEIACVSVHGANRLGGNSLLDLVVFGRAAGNFLGTYLNETQTATEASESDLEAALARTNRWESSTKGEDPVQIRKDLQMCMQMNFSVFREGEAMAQGMKELTEIRERLSDARLDDKSSEFNTQRIECLELDNLMETAFCSAKAANFRTESRGAHARQDFTERDDVNWLCHSVYTPETEEMTKRDVNMKPVHREAFPPKARVY

SEQ ID NO: 36437 - protein, 343 aa, Methanocaldococcus jannaschii DSM 2661
MVSIMPKILYNPEVLGHKPKSYHVENPERVLTILNSLKSNGFDDIVLIEGKSTINEILEIHSRDYVYSIINLSKSFNYYDGDTYLCDRTLDAALTAFKLAKEAVKLALKDRDLYFALTRPPGHHAGISGRALGAMSNGFCIFNNIAGAARLAKNYMKKVIIIDFDVHHGNGTQEIFWNDNRVIHIDFHQRGIYPGTGDILDIGGEEAKGTKINLPFPAHSTDADYIFAWNEIVEPILNYFSPDTVLVSAGFDAFINDGLASMDLTETFYRFVGAKLSGYSVTAVLEGGYSIGLKYAPPAFLDGYVDAKDVLDNLEDYTVINSNEVKSMVKNVKKIIGEYLDIF

SEQ ID NO: 36438 - protein, 357 aa, Ralstonia eutropha JMP134
MSKLIPVTILTGFLGSGKTTLLKRILNEQHGMKIAVIENEFGEENIDNEILVQDGREQIVQMSNGCICCTIRGDLVQALSTLMTRRDAGEIEFDRVVIETTGVANPGPVAQTFFMDDEIASRYLLDAVITLVDAKHAHLQLDKQEEAQRQVGFADAIFITKSDLVSEAEVAELRHRLLHMNPRAPIRQANFGETPIDTIFDLRGFNLNAKLEIDPEFLSADDHDHGHGHDHEHEHEHGEHCGTECGHDHSHDHHHHHHHTDRIASFVFRSDKPFHYGKLEEFLSGILAVYGEKLLRYKGVLYMEGVDRKVVFQGVHQLMGSDVGAKWEEETPGTKMVFIGVDLPRDAILKGLGNCLA

SEQ ID NO: 36439 - protein, 346 aa, Bifidobacterium longum DJO10A
MKAVVLEEQGVINVREVPDVKDPGPGELRIAPHTVGVCGSDLHYYTHGRVGKYVVEQPMILGHEAAGTVLEVGPGVTDFKPGDRVALEPGIPDMTSRASRLGMYNVDPAVRFFATPPIDGCLCEEVIHPAAFTYHLPDSMSFGEGALLEPTAVGMWAATKARIKPGDVCVVTGSGTVGMLTASAALAGGASKVLVSDVSSIKLGIIGQIPGVIPVDLTTEDLVERVREETAGWGADVAFECSGAPKAYETFWKLIAPGGCAVLVGIPVNPVPIDVTELQATEVRIENIFRYANVYQKAIDLVDSGRLNLKPFITDTFAMKDAKAAFDRMDEGRPGDIKLQITVNRD

SEQ ID NO: 36440 - protein, 239 aa, Trichodesmium erythraeum IMS101
MNLNLATQLREGTKKAHTNAENVSFVKCFLKGVVEKTSYRNLVKNFYFVYSAMEEEIQRHREHPVISKINFPELNRKQSLEQDLKFYYGNGWREQVAPSPAGKAYVQRIRDISEKQPELLVAHSYTRYLGDLSGGQILKKIAQRGMNLTDGEGTAFYEFPDILDEKAFKNNYRQAMNDLPIDQATASRIVDEANAAFGMNMKMFNELEGNLIKAIGTLLFNTLTRKRTAGSTELATAAE

SEQ ID NO: 36441 - protein, 127 aa, Dechloromonas aromatica RCB
MSYSVKVIDHYENPRNVGSFAKEDDGVGTGMVGAPACGDVMKLQIKVNKSGVIEDAKFKTYGCGSAIASSSLVTEWVKGKTVDQALSIKNTEIAEELALPPVKIHCSILAEDAIKAAVADYKKKHGE

SEQ ID NO: 36442 - protein, 619 aa, Magnetospirillum magnetotacticum MS-1
MKIVVVGHVDHGKSTLVGRILNETGALPEGKVEYLKEVCDKRGMPFEWAFVMDALQAERDQGITIDTAQIRFRSEARPYVIIDAPGHKEFLKNMVSGAASAEAAVLVIDAHEGVQEQSRRHGYLLHLLGLRQIAVAVNKMDLVDFSQARFEEVKAEIVAYLNSIGVEPTYVIPVAARSGANIASVAAETPWYKGPSVLGALDLFEPAKPLTDLALRFPVQDVYKFDERRIIAGRIESGRLKVGDTLVFAPSGKMAKIATIETWGNVASAVSAGAGQSVGITLDEQIFVERGNVASLELHAPNQSHDLKARVFWLGKGPLKVGSRYKLKLATAEHVVDVVAIERVIDVEDLANHQGSEVARNAVAEVVFRGKSPIAHDSFIDNPRLGRFVLVEGYDIVGGGVIAEASSDEARNRSTHVTEVPHKVDAETRAIANGHRGGVVWLTGLSGAGKSTIAMEVERQLFLKGWQVTVLDGDNVRTGLCGDLGFSDSDRVENIRRVGEVAHLFAEAGMVVVTSFISPFRADREKVRAINPDAFHEIHVTTGLDECERRDPKGLYKKARAGEINDFTGVSSAYEAPALPELALATEGKSVDESVADLLRYIDNAFSLSAREQANGWGL

SEQ ID NO: 36443 - protein, 619 aa, Synechococcus elongatus PCC 7942
MHGVPIARRLMTEDGSLVYDPEAIARYYLNRPFAVWSRFLEILWPLFSFIFGLWFDARTGASRRNQNQRAVQLRDLLTELGPAFIKVGQALSTRPDLVPPAYLEELTRLQDQLPAFPNAIAFEFIEAELGVPPEAIFAELSDNPVSAASLGQVYRGRLHTGEEVAVKVQRPGLAERIALDLYILRGLAAWAMRNVRRVKSNLVAIADEFGLRIFEELDYRQEADNAERFAELYGQLPDIYVPSIYRQYTSRRVLTMEWIQGTKLTELQAIRNQGIDPAYLIERGVQCSLRQLLEYGFFHADPHPGNLLATPDGQLAYLDFGMMSQVEDYQRYGLIEAVVHLVNRDFQGLARDYVKLEFLTPDTDLTPIIPALAGVFKDAMGASVADLNFKSITDQLSQVMYDYPFRVPAYYALIIRSLVTLEGIAINVDPNFKVLSKAYPFIARQILTDPSPDLRASLRELLFNGGQLRWNRLENLLRNASNSSDYDSEHLIQQTVDFLLSESGQDLRDRLVEELVNSLDRLGRGALPLLRNQIRQRLGMDPEPDSTLTDLQPLLRVLSLLQQGQRFEPQRFIPLIPVLGRPEVQQMGQQVVTGLAQKALVRFIREVVVGDRRNNAIAA

SEQ ID NO: 36444 - protein, 360 aa, Bacteroides fragilis YCH46
MKKEFTRIAIKVGSNVLTRQDGTLDVTRMSALTDQIAALHKAGVEVILISSGAVASGRSEIRTPRKLDSVDQRQLFSAVGQAKLINRYYELFRDHGIAVGQVLTTKENFGTRRHYLNQKNCMTVMLENGVIPIVNENDTISVTELMFTDNDELSGLIASMMNAQALIILSNIDGIYNGSPSDPDSLVIREIGQGKDLSNYIQTSKSSFGRGGMLTKTNIARKVADEGITVIIANGKRDNILINLIEHPEETVCTRFIPASQPVSSIKKWIAHSEGFAKGEIHINEQATEVLNSDKAVSILPVGITRIEGEFEKDDIVRIIDYRGTPVGVGKVNCDSMQARDSIGKHGKKAVVHYDYLYIE

SEQ ID NO: 36445 - protein, 269 aa, Haemophilus somnus 129PT
MVNGKAIRVTSERDPANLKWNELGVDVAVEATGLFLDDATARKHITAGAKKVVLTGPSKDATPMFVNGVNFDAYAGQDIVSNASCTTNCLAPLAKVINDKFGIKDGLMTTVHATTATQKTVDGPSAKDWRGGRGAAQNIIPSSTGAAKAVGKVIPALNGKLTGMAFRVPTPNVSVVDLTVNLEKPATYAEICAEIKRASENEMKGVLGYTEDAVVSTDFNGCSLTSVFDAAAGIALTDTFVKLVSWYDNETGYSNKVLDLVAHVHNYKG

SEQ ID NO: 36446 - protein, 470 aa, Cytophaga hutchinsonii
MVNKKTKIIATVGPACNTKEKLWELVQAGANIFRLNFSHGTHDVHQGVINAIRELRKEHNVNIAILQDLQGPKIRTDEVENNGVELVAGAQIVITKEKMLGTKDKISTSYKMLTSDVKKGDAILIDDGNIELKVLETGNGEVTCVVIYGGILKSRKGINLPNTIVSEPSLTDKDKEDLLFGLKNEVDWIALSFVRSAVDLNELKAIIAEHGKSCKVIAKVEKPEAVKDIDAIIEASDAIMVARGDLGVELQMEDVPMIQKMIIKKCNQLAKPVIVATQMMESMITNARPTRAEASDVANAIIDGTDTIMLSAETASGNYPVITVKAMTRICQAVEKEADIYNKSTLDDITNTSDSVIASACELADKVNAKAIIGLSQSGYSAFRIASHRPKASIYIATHDEQLMNQMNLVWGVQAFRFEKFTTTDESIEAVKKSLVEKGLLKKGDIYVTTASMPMADIQLANSLKLGIVE

SEQ ID NO: 36447 - protein, 261 aa, Capsella bursa-pastoris
MAEENKNNVPEHETPKVATTEEPSTTTTTPEVTDRGMFDFLSKKKEEVKPQETTTLESEFDHKAQISEPALAAEHEEVKENKITLLEELQEKTEEDEENKPSVIEKLHRSNSSSSSSSDEEGEEKKKKKTVEGEEEKKGAMDKIKEKLPGHHDKETEDHDVPVVSTIQVPVSESVVEHHETEGEEKKGVMDKIKEKLPGRNDKETEDSPVPTSTPLVVTEHPVGHSTEQPAEKKGIIEKIKEKLPGYHAKTEEEKKEKESA

SEQ ID NO: 36448 - protein, 594 aa, Neisseria meningitidis
MALVELKVPDIGGHENVDIIAVEVNVGDTIAVDDTLITLETDKATMDVPAEVAGVVKEVKVKVGDKISEGGLIVVVEAEGTAAAPKAEAAAAPAQEAPKAAAPAPQAAQFGGSADAEYDVVVLGGGPGGYSAAFAAADEGLKVAIVERYKTLGGVCLNVGCIPSKALLHNAAVIDEVRHLAANGIKYPEPELDIDMLRAYKDGVVSRLTGGLAGMAKSRKVDVIQGDGQFLDPHHLEVSLTAGDAYEQAAPTGEKKIVAFKNCIIAAGSRVTKLPFIPEDPRIIDSSGALALKEVPGKLLIIGGGIIGLEMGTVYSTLGSRLDVVGMMDGLMQGADRDLVKVWQKQNEYRFDNIMVNTKTVAVEPKEDGVYVTFEGANAPKEPQRYDAVLVAAGRAPNGKLISAEKAGVAVTDRGFIEVDKQMRTNVPHIYAIGDIVGQPMLAHKAVHEGHVAAENCVGHKAYFDARVIPGVAYTSPEVAWVGETELSAKASGRKITKANFPWAASGRAIANGCDNGFTKLIFDAETGRIIGGGIVGPNGGDMIGEVCLAIEMGCDAADIGKTIHPHPTLGESIGMAAEVALGTCTDLPPQKKK

SEQ ID NO: 36449 - protein, 670 aa, Debaryomyces hansenii CBS767
MMKGFKNRLSRNKGQSTGKKGEKKLDKDKDSKSDSSSRKASSSSSIASKLSGSGSNAKSSSPSISRHNSGNSIKSSSSGGSATAMGQTSHLPQLPNQSQQDSPRILINDSENNDSPTMVTTAGSNTQPVTPTPTSPTTVTNTSPNASNSPFDQVQIKPGHVPHSQTGSAIHPHGYPLNTNILSPTRDNFDIDLIVTPKRHSSSRFEPSTSDRYQEIVKLPNFDEILPEEQISLFIQKIDQCNIMFDFSDPTYDGRGKEIKRITLQELIHFILNNRFTYTDEMYKHVVGMFKKNLFRPIPPPVNPIGDIYDPDEDEPVSELAWPHMQAIYEFFLRFIESPDFTHQIAKQYIDHEFILKILELFDSEDPRERDCLKTTLHRIYGKFLSLRSFIRKSINNVFLQFVYETERFNGIGELLEILGSIINGFALPLKDEHKIFLVRILIPLHKVKSLSLYHPQLAYCIVQFLEKDPMLTEDVIMGLLRFWPKINSPKEPGITNGTVQQRLLENPESPTDANGNLIDRGLILNDLNNHSIDHNTNVNDSLNPNMHDITDEEYYDSFSSPQQVQGDLDEFGTPNQIPPHNSATSNWNRSIHLLAFGALKVFMDHNPILYDHCTMLYHQSLEEQRAREVARKDGWKKVEEYVNLLRLQQSSLALSGKNSNDNGASVASH

SEQ ID NO: 36450 - protein, 271 aa, Glycine max; identical to SEQ ID NO: 1144

SEQ ID NO: 36451 - protein, 415 aa, Cytophaga hutchinsonii
MNLKRVVVTGLGSLTPIGNTVPEYWDSLIKGVSGAALITKFNPEKHKTKFACEVKNFNVEDFIEKKEARKMDPFTQYAVVVADEAIKDAGITADLDHDRIGVIWGAGIGGLKTFEDEVSAFSKGDGTPRFNPFFIPKMIIDISAGYISIRNGFRGPNFSTVSACASSSNAILDAFNYIRLNKANIIIAGGSEAAVVESGIGGFNACRALSERNDDPATASRPFDKDRDGFVMGEGAGALVLEEYEHAKARGAKIYCEVIGGGMSADAYHLTAPHPEGLGAKNVMLNAISDAEIAKEDVDYINVHGTSTPLGDIAEVTAIQAVFGEQAYKLNISSTKSMTGHLLGAAGAIESIATILAIKNQIIPPTINNHNRDEAFDARLKLTLNKAEKREVNVAMCNTFGFGGHNCSIVFRKID

SEQ ID NO: 36452 - protein, 500 aa, Arabidopsis thaliana
  misc_feature (91)..(91): Xaa can be any naturally occurring amino acid
  unsure (1)..(500): unsure at all Xaa locations
MATRLLRTNFIRRSYRLPAFSPVGPPTVTASTAVVPEILSFGQQAPEPPLHHPKPTEQSHDGLDLSDQARLFSSIPTSDLLRSTAVLHAAXAIGPMVDLGTWVMSSKLMDASVTRGMVLGLVKSTFYDHFCAGEDADAAAERVRSVYEATGLKGMLVYGVEHADDAVSCDDNMQQFIRTIEAAKSLPTSHFSSVVVKITAICPISLLKRVSDLLRWEYKSPNFKLSWKLKSFPVFSESSPLYHTNSEPEPLTAEEERELEAAHGRIQEICRKCQESNVPLLIDAEDTILQPAIDYMAYSSAIMFNADKDRPIVYNTIQAYLRDAGERLHLAVQNAEKENVPMGFKLVRGAYMSSEASLADSLGCKSPVHDTIQDTHSCYNDCMTFLMEKASNGSGFGVVLATHNADSGRLASRKASDLGIDKQNGKIEFAQLYGMSDALSFGLKRAGFNVSKYMPFGPVATAIPYLLRRAYENRGMMATGAHDRQLMRMELKRRLIAGIA

SEQ ID NO: 36453 - protein, 207 aa, Zea mays
APSHYSLACASASRVAPPSPSPPLHPPRRPCTTAIALPSLALFLCPHLAHDFTVKDASGKDVGLSTYKGKVLLIVNVASQCGLTNSNYTELSQLYEKYKDQGFEILAFPCNQFGGQEPGTNEEIVQFACTRFKAEYPIFDKVDVNGDNTAPIYKFLKSSKGSLFGDNIKWNFSKFLVDNEGRVVERYAPTTSPLSIEKDIKKLLGSS

SEQ ID NO: 36454 - protein, 396 aa, Vibrio vulnificus YJ016
MIVKTSSLFLCFISEDIMTTNQQSVAASQPKTIVVKLGTSVLTGGTLALDRAHMVELARQCAELKKQGHSVVVVSSGAIAAGREHLGYPALPNAMASKQLLAAVGQSQLIQTWESLFALYGIKIGQMLLTRADLEDRERFLNARDTINALVDNGIIPVVNENDAVATSEIKVGDNDNLSALVGILCGADKLLLLTDQKGLYTADPRKDPNAELIKEVKVIDDTLRKIAGGSGTTLGTGGMATKLQAADIARRAGIEVIIAAGRGQNVIFDALSPAPQGTRFLPCEEALENRKRWILAGPAASGDIVIDQGAVKAVVEKGSSLLAKGVTKVLGEFSRGEVVRVTDAQGHLVARGIASYSNQDMAKIAGKHSKDIISILGYDYGSEVIHRDDMVVIQE

SEQ ID NO: 36455 - protein, 416 aa, Vibrio vulnificus YJ016
MDLITLGKAAKDAAFQLATASTAQKNKALAIIADELEANAADILAANSKDIELGRQAGLSEAMLDRLLLNESRLNGIANDVRNVISLTDPVGSEIDSKVLENGMQLSRRRVPLGVVGVIYEARPNVTIDIAALCLKTGNASILRGGKETFFSNMELVKVIQSALAKAGLPAASVQYIEKPDRELVTQLLKLDDYVDMIIPRGGAGLHKMCKENSTIPVIIGGFGISHIFVDETADLAKSVDVVENAKAQRPSACNALDTLLVHERIAEQFLPMLVAKLNGKVTFVVEPKAKAYMTKAEQVRDASEGDFDTEWLSYTLGVKVVADVQEAIDHMREHNASHSDAIMTNHLQNAELFINSAGSAAVYVNASTRFTDGAQFGLGAEVAVSTQKLHARGPMGLEELTSYKWVGKANYLSRA

SEQ ID NO: 36456 - protein, 339 aa, Arabidopsis thaliana
LLESKCYCDDSVCFSSFSSSATTTPFLSSLPIRQNLFFFLFLIFLSISDSCKTEPTMSGLYNYNNFSPSRAASPQIRTPSSDVDSQYISQLLAEHQKLGPFMQVLPICSRLLNQEIFRITGMMPNQGFTDFDRLRHRSPSPMASPNLMSNVSGGGLGGWNGLPPERIGGPHGMAMEWQGAPASPSSYPVKRILRLDLPVDTYPNFNFVGRLLGPRGNSLKRVEATTGCRVYIRGKGSIKDPEKEEKLKGKPGYEHLNEQLHILIEADLPIDIVDIKLRQAQEIIEELVKPVDESQDYIKRQQLRELALLNSNLRENSPGPSGSVSPFNSNAMKRPKTGR

SEQ ID NO: 36457 - protein, 301 aa, Oryza sativa (japonica cultivar-group)
MPCSGERCRRVWWSAAAAVVAFFFVVFVAAAAAAATASMYDDVEVVWGGDHSFFFMDGDGDALALCLDETHGSGFRSRDAYLYARFDVDMMLVANNSAGTVTTLYLMPDDVPWEYHDEVDLEFLGNVTGEPYTLHTNIFANGVGGREQQFRLWFDPTADFHTYSIVWNPKHIIILVDGVPIRDYRNTAARGGPAFPTWQKMRAHGSLWNADDWATQGGRVKTDWSEAPFFAYYRGLRVTPCAPSPGVAWCGDEPPESPWFDQQEMDAAALSKARQEHLLYDYCEDTKRFKDTGLPVECTIN

SEQ ID NO: 36458 - protein, 474 aa, Ustilago maydis 521
MLSLTVPRLALRAAAPSRQFAAAAGVGAVRFASTKSLKDAVAEIIPAKQEQLKKLKAEHGESKLGEIQLQHLLGGMRGLKVMLWEGSVLDSETGITFHGKSIPDSQKVLPTAADLGLNGNEILPESMLWLLLTGNVPSKDEVKGLSAELAAKGALPAHVEKIIDSFPKTLHPMTQFAAAVAALNHDSKFAAAYAKGIKKTEYWAPVLEDSIDLIAKLPAVAARIYYNVFGRGDGKQAIDSNLDLIGNYSNMIGYGDNQGMTDYLRLYIAIHGDHEGGNVSAHTAHLVGSALSDPYLSYSAALLGLAGPLHGLANQEVLGWALSMQEAVGENASEEQIKEYLWSTLKSGRVVPGYGHAVLRQPDPRFTALSKFCDTRPELRDSSIVKLVQKVSQVAPGVLKEHGKTKNPFPNVDAASGCVLYQYGLTEFTYYTVIFGISRAIGALPQLVADRYLGMPIERPKSMSMDSLEAFLKK

SEQ ID NO: 36459 - protein, 223 aa, Clusia minor
  misc_feature (197)..(197): Xaa can be any naturally occurring amino acid
  unsure (1)..(223): unsure at all Xaa locations
QLEDGRTLADYNIQKESTLHLVLRLRGGMQIFVKTLTGKTITLEVESSDTIDNVKAKIQDKEGIPPDQQRLIFAGKQLEDGRTLADYNIQKESTLHLVLRLRGGMQIFVKTLTGKTITLEVESSDTIDNVKAKIQDKEGIPPDQQRLIFAGKQLEDGRTLADYNIQKESTLHLVLRLRGGMQIFVKTLTGKDHHFWXVRTPIPLIMVKAKIQDKEGIPQTNSG

SEQ ID NO: 36460 - protein, 340 aa, Erwinia carotovora subsp. atroseptica SCRI1043
MKSIVIQQPNSLVIEERSIPQPAAGEVRVKVKLAGICGSDSHIYRGHNPFAKYPRVIGHEFFGVIEAVGDGVDAARLGERVSVDPVVSCGHCYPCSIGKPNVCTSLVVLGVHRDGGFSEYAAVSAKNAHVIPDEIPDEFAVMVEPFTISANVTAQVKPTEQDIALIYGAGPMGLTSVQVLKGVFKVKEVIVVDRIPERLEMALRSGADRVINNASLSLKDELETLNIKPTLIIDAACHPSILQEAITIASPAARIAIMGFSSEPCQISQQGITSKEISIFSSRLNANKFPIVIEWLKEKRIDPAKLITHRFDYQQVVQAIEVFEKDQKRCCKVLLTFNEA

SEQ ID NO: 36461 - protein, 583 aa, Ustilago maydis 521
MSRPFDAENVEHRDTSHDSHDHTDQLADKQIGVVAAEAGRTVADWTLWMGILGIALVAYLYGLDNNTMWAWQTYATTSFNDYPAYTAVSVVQAVIIAVGKFPIAKLADVFGRAQAYALSVFLWVLGFVIIAIAQNTRYVAGGTVIYAFGNTGVQIMQQIVLADYISTKWRGAAIGLVSLPYVINFWASAQIYPKIVAVNWRWGPGFFSICAPVAAFSIIFALAINQRRARAMGLVPSRPYKHMSFLAAVYNFLIDIDALGLFLICVGFLLILLPVNLAKLQPNGWSTGWIIAMLVIGGVMLISFCVWECVAPKPILNRRWRLNHDVHFATAIGFFDFFSFYASWVPAYYWSLIVMGYDNTGATYFSNCQSLALTVFGIAAGFLSLGTKNYKWIMISGACIRLLGIGLMIKYRSSGSSNVQAVFPQVLQGMGGGFLGITLQVAAQVSVRHQDVATVTAYFLLLTEMGGACGNALVGAVQTNVLPGYYEKYLPMLNATQRAAIYASPFTAVSQYPIGTPERTGMINAYNDYMHILLIVAIVLAVPPIILGLVVNDRKLNDNQNCVSNELAGMRRMSSENESTDNK

SEQ ID NO: 36462 - protein, 174 aa, Methanocaldococcus jannaschii DSM 2661
MASLRPNRCYRDVDKPPYTRKEYVKGVPQPKVVHFIMGNLSAEFPVKVNLVATRPIQIRHNALEAARVAANKYLTKMCGRMGYKFQIRVYPHQILREHKMATGAGADRISDGMRLAFGKPIGTAARVKEGQAILTVWVNPDKFPAAKEALRRAAMKLPVPCRIVIEQGKELLKL

SEQ ID NO: 36463 - protein, 447 aa, Kluyveromyces lactis NRRL Y-1140
MIVTSKSVTSKRRPSINKTFSDVNFVNQVQIPFQENYRSHKHSTSFNEVRRLQNQTWKEQFVNLFPKDVQEYLPEVNVHISILCLIWYMTSSVSSNLSKAILSRFPHPVGLTELQFLLSASLCLAFVTFANYLHAPQVSSSKLKNTVLNFPEGILPTYLNGSFSRCILNTFLVPSKVIWYTTFPMGIFQFVGHITSHKSTSLIPVSLVHSVKALSPIATVCYYRFAKGRQYNNMTYYTLIPLILGVIITCWTSQNNKSKLTETDKTTFSMGLSFAFISMVIFVSQNIFAKGILTVKSKDVLPCKNKSQLNLVELKSQKDSPIQLDKITILFYCSCVGFILTFPIFVSNEVFSSSTSVFADLSPSVMTLVLIHGVAHFFQAMLAFQLIGMLSPVTYSIANIMKRIVIIGVAFIWESNLSINQLFGLILTISGLYGYDKWGNKKVNCSL

SEQ ID NO: 36464 - protein, 272 aa, Staphylococcus aureus subsp. aureus MSSA476
MNVYLAEFLGTAILILFGGGVCANVNLKRSAANGADWIVITAGWGLAVTMGVFAVGQFSGAHLNPAVSLALALDGSFDWSLVPGYIVAQMLGAIVGATIVWLMYLPHWKATEEAGAKLGVFSTAPAIKNYFANFLSEIIGTMALTLGILFIGVNKIADGLNPLIVGALIVAIGLSLGGATGYAINPARDLGPRIAHAILPIAGKGGSNWSYAIVPILGPIAGGLLGAVVYAVFYKHTFNIGCAIAIVVVIITLILGYILNKSSKKGDIESIY

SEQ ID NO: 36465 - protein, 433 aa, Prochlorococcus marinus subsp. marinus str. CCMP1375
MTNAFNTSNSQAVFHAAQELMPGGVSSPVRAFKSVNGDPIVFDRVKGAYAWDLDGNRFIDYVGSWGPAICGHSHPEVIASLQEALEKGTSFGAPCELENKLAEMVIEAVPSVEMVRFVNSGTEACMAVLRLMRAFTGRDKLIKFEGCYHGHADMFLVKAGSGVATLGLPDSPGVPRSTTSNTLTAPYNDLEAVKNLFAENPDAIAGVILEPIVGNAGFIQPEPGFLEGLRELTKENGSLLVFDEVMTGFRISYGGAQGRFGVTPDLTTMGKVIGGGLPVGAYGGRKDIMSMVAPAGPMYQAGTLSGNPLAMTAGIKTLEILQQEGTYERLASITNRLINGICESAKQAGIPITGSSISGMFGFYLCEGPVRNFEEAKQTNSDYFGKLHRAMLAKGVYLAPSAFEAGFTSLAHSEEDIDSTLKAFNECFNELSQ

SEQ ID NO: 36466 - protein, 400 aa, Arthrobacter aurescens
MAKMRKVTTVRGYGAFVGANHLEVEETTGTGQEKTGTKKVIAFKRAIIAAGSQAVRLPFMPNDPRVVDSTGALALSGVPKRMLILGGGIIGLEMGTVYSTLGARLDVVEMMDGLMQGADRDLVKIWQKMNAKRFDNIMLKTKTVGAEATPEGIKVTFAPAEEGGTTPEPQVYDLVLQAVGRTPNGKKIAAEKAGVSVTDRGFINVDIQMRTNVPHIFAIGDIVGQPMLAHKAVHEAHVAAEVIAGELQGNKELASAAFNARVIPSVAYTDPEVAWVGLTEDQAKAQGIKVKKGLFPWTASGRAIANGRDEGFTKLLFDDSPEAGSGDGHAGRGHGKILGGGMVGTHAGDMIGEIALAIEMGADAVDIGKTIHPHPTLGESIGMAAEVAHGSCTDVPPARK

SEQ ID NO: 36467 - protein, 147 aa, Glycine max
  misc_feature (104)..(104): Xaa can be any naturally occurring amino acid
  unsure (1)..(147): unsure at all Xaa locations
NEGLFFIFLCSFSDLQNPQGDLDGKACAAVGQSSLMALYDLMFSQLDVTSSQLLVNDGFFRDTAFRKQLSDTVSSLLDLRVIPIFNENDADSTRKAPYEGELSXDSSGIFWDNDSLAGLLALELKADLLVLLSDVDGLYSGPPSDPK

SEQ ID NO: 36468 - protein, 594 aa, Neisseria meningitidis
MALVELKVPDIGGHENVDIIAVEVNVGDTIAVDDTLITLETDKATMDVPAEVAGVVKEVKVKVGDKISEGGLIVVVEAEGTAASPKAEAPVAPAQEAPKAAAPAPQAAQFGGSADAEYDVVVLGGGPGGYSAAFAAADEGLKVAIVERYKTLGGVCLNVGCIPSKALLHNAGVIDEVRHLAANGIKYPEPELDIDMLRAYKDGVVSRLTGGLAGMAKSRKVDVIQGDGQFLDPHHLEVSLTAGDAYEQAAPTGEKKIVAVKNCIIAAGSRVTKLPFIPEDPRIIDSSGALALKEVPGKLLIIGGGIIGLEMGTVYSTLGSRLDVVEMMDGLMQGADRDLVKVWQKQNEYRFDNIMVNTKTVAVEPKEDGVYVTFEGANAPKEPQRYDAVLVAAGRAPNGKLISAEKAGVAVTDRGFIEVDKQMRTNVPHIYAIGDIVGQPMLAHKAVHEGHVAAENCAGHKAYFDARVIPGVAYTSPEVAWVGETELSAKASGRKITKANFPWAASGRAIANGCDNGFTKLIFDAETGRIIGGGIVGPNGGDMIGEVCLAIEMGCDAADIGKTIHPHPTLGESIGMAAEVALGTCTDLPPQKKK

SEQ ID NO: 36469 - protein, 213 aa, Methanothermococcus thermolithotrophicus
MDRENILKAVKEARSLAKPRNFTQSLDLIINLKELDLSRPENRLKEQVVLPNGRGKEPKIAVIAKGDLAAQAEEMGLTVIRQDELEELGKNKKMAKKIANEHDFFIAQADMMPLVGKTLGPVLGPRGKMPQPVPANANLTPLVERLKKTVLINTRDKPLFHVLVGNEKMSDEELAENIEAILNTVSRKYEKGLYHVKSAYTKLTMGPPAQIEK

SEQ ID NO: 36470 - protein, 183 aa, Escherichia coli
GKINLGIGVYKDETGKTPVLTSVKKAEQYLLENETTKNYLGIDGIPEFGRCTQELLFGKGSALINDKRARTAQTPGGTGALRVAADFLAKNTSVKRVWVSNPSWPNHKSVFNSAGLEVREYAYYDAENHTLDFDALINSLNEAQAGDVVLFHGCCHNPTGIDPTLEQWQTLAQLSVEKGWLPL

SEQ ID NO: 36471 - protein, 593 aa, Neisseria meningitidis
MALVELKVPDIGGHENVDIIAVEVNVGDTIPVDDTLITLETDKATMDVPAEVAGVVKEVKVKVGDKISEGGLIVVVEAERAASPKAAPVAAPAQEAPKAAAPAPQAAQFGGSADAEYDVVVLGGGPGGYSAAFAAADEGLKVAIVERYKTLGGVCLNVGCIPSKALLHNAAVIDEVRHLAANGIKYPEPELDIDMLRAYKNGVVSRLTGGLAGMAKGRKVDVIQGDGQFLDSHHLEVSLTAGDAYELAAPTGEKKIVAFKNCIIAAGSRVTKLPFIPEDPRIIDSSGALALKEVPGKLLIIGGGIIGLEMGTVYSTLGSRLDVVEMMDGLMQGADRDLVKVWQKQNEYRFDNIMVNTKTVAVEPKEDGVYVTFEGANAPKEPQRYDAVLVAAGRAPNGKLISAEKAGVAVTDRGFIEVDKQMRTNVPHIYAIGDIVGQPMLAHKAVHEGHVAAENCAGHKAYFDARVIPGVAYTSPEVAWVGETELSAKASGRKITKANFPWAASGRAIANGCDNGFTKLIFDAETGRIIGGGIVGPNGGDMIGEVCLAIEMGCDAADIGKTIHPHPTLGESIGMAAEVALGTCTDLPPQKKK

SEQ ID NO: 36472 - protein, 350 aa, Bifidobacterium longum DJO10A
MAAQIWYENDGDLSVLEGKKVAIIGYGSQGHAHALNLRDSGVDVVVGLRPTSKSVDFAKEQGLEVKSVAEASAEADVIMILAPDQYQRTIWANDIEPNIKPGAAVAFAHGFNIHYGYIKPSEDHPVFMVAPKGPGHIVRREYAAGRGVPVVVAVEQDPRGDGWALTLAYAKALGALRAGAIKTTFKEETETDLFGEQNVLMGGVNKLVEMGFEVLTDAGYQPEIAYFEVCHELKMLVDLMNEGGLNKARWSCSDTAQYGDYVNTVINEDCRKRMEYHLQRIQDGSFAKEFIDDQDAGAPHFKELQEKYSNERIETVGPKLRAMFSWNKDGVKDADEANSFTGKIARAQVQ

SEQ ID NO: 36473 - protein, 1430 aa, Cryptococcus neoformans var. neoformans B-3501A
MVPPARAHTHNTTNTKQAQLSSAYHELANELGTDNISVVGNYTLGRVIGQGTYGSVHLATHRLTGTRAAVKKVPKSFTPHLTRELHHHRRLHHPHIVHLHEIIATESHIWLVTELCSGGELFDYLVERGRILEGEARRLFGELTLAVGWLHMHGVVHRDLKLENVLLDGELRIKLGDLGFAREWQKGRLMDTYCGTTGYASPEMLACQKYLGVETDIWSLGIILYTLLCGGLPFDDDDERVMKELIQKGEYEEPDWLSQEARDLIRGMLQHDPSKRLSIREILTHPWFKMTIVDKVYPNGDVPSIPPSPNPTSPTAAGDDFFAESALRQQQQQQSRLTPHVAGRSPLSTHLPTTPRQNSGSSEAENGDSRTERKASNMQRLNSAEFSTTEKELEQLHLCTSRPAATATGSGAISPRSISSPSMRGKTLRTLPEGQVDVDETPAGLPPPLSLIDEHPHLPVALHSRTPSRTKRRSVSSTLSLERRLSHHSSHNSYITFPPEDYLSKLDPSLLPNPDSSSSSTTTPPARSFTTPSETRLLRQLDDLGLDVGQLKHSVETDACDASAGLWWLLRQKQEERGETDEVVRRREKEVVRREEKVAEYAKEERRKAREAERERERIPTSPMGILGTRPGKRDSIEKSSEGLRFKEEQPPSIPTTPSYTSVIDLGPPVLPVDVDVDVERTAVGRDAPREAAGEEMKSWKRVESPQSVAISSQSSLDPAPTLPPPAAAGGGGAAGAKTQKEDGRDQAGLDPVAVATPMSNANSSTGASTVAKPEPNVNASANANTSANPRLKAKSPSMNMLQRATSVLGGVGKKGDDKDKDKNGMNEKREESTNDSLHPKRGGSSSPNKLKKPMPAGMKGLTSTLSRSESESEGLLAGGGGGGGGGDSPAVSASGSKTVTPGSSPRRKGLTPQGTPRGGLRDAGAKDSSGERASGNGNGNAGGGNEKGKGGKKDSLWTTFRHLFYEDRRRRKRESVTPSASSPLLLPPSDIKLPAGAVVLSRGANSRTSQFKRSNVGYAPSTGSRRTSLDGNRPVYSRRSSSVHTTSRRSSVGSLHFQDHQAMISDLSRRASQRSHGSQTPTSDREYLDYPSAAAPISRPGSSHSIRGGVGGGSRRSSFSVRSPSLHPETFSASAGGPTSTRFKSSVPPPASPLLGYRRRPAGGNDSSRVRHIKVIPESQIMRSSSVASSIRSNASSRASSMDRDRDRDRESEYESGRDDVSLRSGKRQKRRSGSQRSLAQQIHRTRSPLALSLENTYGSNSVANVGLGIGGASRIPKKPLRDVFQKKGKRKDGGDDDWVSEDEDGFACGLGQGRGIAKSFSNANANGTVWMNVNAKTNPARSAAAFPTSKMVAQPTAQGGTSRRRERGRRSSLEEERGRPQEGKGKAKGETVAQGLMGIESLSGRSRRNLPDRSTAPGIIEEEEEDEE

SEQ ID NO: 36474 - protein, 594 aa, Neisseria meningitidis
MALVELKVPDIGGHENVDIIAVEVNVGGTIAVDDTLITLETDKATMDVPAEVAGVVKEVKVKVGDKISEAGLIVVVEAEGTAAAPKAEAAAASAQEAPKAAAPAPQAAQFGGSADAEYDVVVLGGGPGGYSAAFAAADEGLKVAIVERYKTLGGVCLNVGCIPSKALLHNAAVIDEVRHLAANGIKYPEPELDIDMLRAYKNGVVSRLTTGLAGMAKGRKVDVIQGDGQFLDPHHLEVSLTAGDAYEQATPTGEKKIVAFKNCIIAAGSCVTKLPFILEDPRIIDSSGALALKEVPGKLLIIGGGIIGLEMGTVYSTLGSRLDVVEMMDGLMQGADRDLVKVWQKQNEYRFDNIMVNTKTVAVEPKEDGVYVTFEGANAPKEPQRYDAVLVAAGRAPNGKLISAEKAGVAVTDRGFIEVDKQMRTNVPHIYAIGDIVGQPMLAHKAVHEGHVAAENCAGHKAYFDARVIPGVAYTSPEVAWVGETELSAKASGRKITKANFPWAASGRAIANGCDNGFTKLIFDAETGRIIGGGIVGPNGGDMIGEVCLAIEMGCDAADIGKTIHPHPTLGESIGMAAEVALGTCTDLPPQKKK

SEQ ID NO: 36475 - protein, 474 aa, Xanthomonas axonopodis pv. citri str. 306
MFVVSEMADFIKAGGLGDVAAALPRALRHRYDVRVLIPGYRAVLERAGKVEIVGRVLAHAALPACDIGRIVQSDGLPIYILLSKELFERDGSPYVSTSGSEFEDNAIRFATLSHAAAQIAAGHAGLGWKPRLLHLNDWPCALAAGYVRWSGGTTPCLLTIHNLAYQGLVPYSMAAALGIPAERVAELEFYGQMSFLRGGIVNADHVNTVSVSYAKQITGPAQGCGLDRLLAGRAAKGALTGIVNGIDASWDPRTDQYLDSHFSVNQWQGRQANAAQVRKAFGLRESAGPLFAVVSRLVHQKGLDLICEVAPQIVAAGGQIAVIGGGEPEIEQQVAELTRRYPGQVGAFIGFEEGLARRMFAGADFLLMPSRFEPCGLSQMYAQRFGCLPIAHATGGLIDTVDDGVTGFLFQHASVEALRRCLERAFRTFRLPSLLSAMRRAAMLRPSGWDVAGKKYLSLYEHTAATAPALATVP

SEQ ID NO: 36476 - protein, 196 aa, Vigna radiata
MSTARFIKCVTVGDGAVGKTCMLISYTSNTFPTDYVPTVFDNFSANVTVDGSTVNLGLWDTAGQEDYNRLRPLSYRGADVFLLCYSLISKASYENISKKWIPELRHYAPNVPIVLVGTKLDLRDDKQFLIDHPGGTRITTAQGEELKKMIGAVTYIECSSKTQQNVKTVFDAAIKVALRPPKPKKKPRKKRTCFFL

SEQ ID NO: 36477 - protein, 355 aa, Methanosarcina acetivorans C2A
MSKNICFIDGLEGVLKYREVDINELVKLPYDAVSYLLIRGRLPGEQELAEYSARLHAERRINKEVIDVIRMCNFNIDAMAALRTVISFISQFDPDLNDSSPEGNMRKAIRLIAIVPTIVATYYRMANGKEPLPPDPSLSHGANFLYMIKGSKPDPLDAEVMEKDFILSAEHELNASTFSSRVTASTMSDLYSAVVSGLCTLKGPLHGGARAEVMTMLDEVASPENAEKFVLEKISQREKIMGFGHRVYKTYDPRGVIFKQLSKKLAESKGDMHWYTTAEAVENVVVRELVEKRGKPIYPNVDFYSGVIYKYMEIPPQLATSIFAIGRVSGWIAHCFDQYERKKIIRPRAFMLDEC

SEQ ID NO: 36478 - protein, 551 aa, Spinacia oleracea
MQASTFMVKGNLGFEVQNRRVAGLAGLKGLSSIRSNNLSFVNVNDNNYKSNPCKLSCGSLSMGAGFARLGLDHVMKSSPKYRSVKAQAASGGDLEDATPVKYQGKSSASVLPYVGVACLGAILFGYHLGVVNGALDYLSADLAIAGNTVLQGWVVSILLAGATVGSFTGGSLADKFGRTKTFQLDAIPLAIGAYLCATAQNVQIMMIGRLLCGIGIGISSALVPLYISEISPTEIRGALGSVNQLFICIGILAALVAGLPLAGNPLWWRTMFGIATVPSVLLALGMGFCPESPRWLFQQGKIVEAEKAVAALYGKERVPEVINDLRASVQGSSEPEAGWFDLFSSRYRKVVSVGAALFLFQQMAGINAVVYYSTSVFRSAGIASDVAASALVGASNVIGTAVASSLMDKQGRKSLLMTSFSGMAASMLLLSLSFTWKALAPYSGTLAVVGTVLYVLSFSLGAGPVPALLLPEIFASRIRAKAVALSLGMHWASNFVIGLYFLSVVTKFGISKVYLGFASVCVLAVLYIAGNVVETKGRSLEEIELALSPAV

SEQ ID NO: 36479 - protein, 534 aa, Nicotiana tabacum
FGLQNRRILQGSGDLKRNTLLASRSLRMPERSSCFGVSMDSASMGIELGRARKTVQSVFGSSAKARSHRVRASGGDIEDATPLKVQGQSSGSVLPYVGVACLGAILFGYHLGVVNGALEYLAKDLGIVENTVIQGWIVSSVLAGATVGSFTGGALADKFGRTKTFVLDAIPLAVGAFLCTTAQSVQAMIIGRLLTGIGIGISSAIVPLYISEISPTEIRGTLGTVNQLFICIGILVALVAGLPLSGNPLWWRTMFGIALIPSVLLALGMAFSPESPRWLFQQGRISEAETSIKRLYGKERVAEVMGDLEASAQGSSEPDAGWLDLFSSRYWKVVSIGAALFLFQQFAGINAVVYYSTAVFRSAGISSDVAASALVGAANVFGTMVASSLMDKQGRKSLLLVSFTGMAASMMLLSLSFTWKVLTPYSGTLAVLGTVLYVLSFSLGAGPVPALLLPEIFASRIRAKAVALSLGMHWISNFFIGLYFLSIVTKFGISTVYLGFASVCLLAVMYIVGNVVETKGRSLEDIERELSPAI

SEQ ID NO: 36480 - protein, 202 aa, Triticum aestivum
MDAAVERLKTGFEKFKTEVYDKKPDFFEPLKAGQAPKYMVFACADSRVCPSVTLGLEPGEAFTIRNIANMVPSYCKNKYAGVGSAIEYAVCALKVEVIVVIGHSRCGGIKALLSLKDGADDSFHFVEDWVRIGFPAKKKVQTECASMPFDDQCTVLEKEAVNVSLQNLLTYPFVKEGVSNGTLKLVGGHYDFVSGKFETWEQ

SEQ ID NO: 36481 - protein, 424 aa, Triticum aestivum
  misc_feature (197)..(197): Xaa can be any naturally occurring amino acid
  misc_feature (223)..(223): Xaa can be any naturally occurring amino acid
  misc_feature (359)..(359): Xaa can be any naturally occurring amino acid
  misc_feature (374)..(374): Xaa can be any naturally occurring amino acid
  unsure (1)..(424): unsure at all Xaa locations
MDYMNGPGRNHLFVPGPVNIPDQVIRAMSRQNEDYRSPAIPALTKTLLEDVKKIFKTTTGTPFLFPTTGTGAWESALTNTLSPGDRIVSFSLGQFSLLWIDQQQRLGFSVDVVESDWGYGADLGALESKLRTDSQHTIKAICIVHNETATGVTNDLHAVRKLLDAYRHPALLLVDGVSSICALDFRMDEWGVDLEPXRGSQKALSLPTGLGHRVPASPKALEXAAKTAKSVRVSSDWKDYLKFYKMGTYWPYTPSIQLLYGLRAGLDNVIKRHTRLGTATRLAVAAWGLKNCTAKEENFSDTVTAVVVPPYIDSSEIVKHAWKRYNLSLGLGLNKVAGKVFRLGHLGHLNGLQLLGCLXSGVEMVLKDIGYPVXARQRAWRPPAAYLSDSTPLYPPPGSEQSPRTKARGPRNIMQCPASGAEQA

SEQ ID NO: 36482 - protein, 332 aa, Pinus pinaster
MAKEPARILVTGAAGQIGYALVPMIARGIMLGPDQPVILHMLDIPPAAEALNGVKMELIDAAFPLLKGIVATTDPVEACSGVNIAVMVGGFPRKEGMERKDVMSKNVSIYKSQASALEQHAAPNCKVLVVANPANTNALILKEFAPSIPEKNVTCLTRLDHNRALGQILERLHVPVSNVKNVIIWGNHSSSQYPDVYHASVVTGAGEKPVRELVADDAWLDGEFITTVQQRGAAIIKARKLSSALSAASSACDHIRDWVLGTPKGTFVSMGVYSDGSYDVPPGIIFSYPVTCENGSWSIVQGLPINEFSRKKLDATANELVEEKALAYSCLN

SEQ ID NO: 36483 - protein, 470 aa, Solanum tuberosum
CRSHRVRAAGEDIEDAAPLKVQGQSSGSVLPYVGVACLGAILFGYHLGVVNGALEYLAKDLGIAENTVIQGWIVSTVLAGAFVGSFTGGVLADKFGRTKTFILDAIPLSVGAFLCTTAQSVQAMIIGRLLTGIGIGISSAIVPLYISEISPTEIRGTLGTVNQLFICIGILVALVVGLPLSGNPSWWRTMFGLALIPSVLLAIGMAFSPESPRWLYQQGRISEAETSIKRLYGKEKVAEVMGDLEASARGSSEPDAGWLDLFSSRYRKVVSIGAAMFLLQQLAGINAVVYYSTAVFRSAGITSDVAASALVGAANVFGTTVASSLMDKQGRKSLLLISYTGMAASMMLLSLSFTWKVLTPYSGTLAVLGTVLYVLSFSLGAGPVPALLLPEIFASRIRAKAVALSLGVHWIMNFFIGLYFLSIVTKFGISTVYMGFALSCLVAVVYITGNVVETKGRSLEEIERELSPAI

SEQ ID NO: 36484 - protein, 484 aa, Glycine max
MEARSAFSIDRSNAKQLNNMGMSEAFPSSLPALPSPLEETYPKLSDSKPVFMEKELKTKPYTHSSHLTSSGAVGHMFSSSPGYSTDLHHSSFSSHEKQPRNTHFISQSLSNMASLPLSYSSNSEPIPSTTSTPYSNGNSVSWHTDSLPSFLDFPANTSIGNRQVKSSDCNIMATEEYSKRNDWQEWADQLISDVDPLTSNWNDLLADNIQDLEPKVAKSSSQLPIGHQSQSHQQLPASSGENRVGVAPTSSTNSAPAKPRMRWTPELHEAFVEAVNQLGGSERATPKGVLKLMKVDGLTIYHVKSHLQKYRTARYRPESSEGAAEKNLSRIEEMSSLDLKTGIEITEALRLQMEVQKRLHEQLEIQRNLQLRIEEQGRYLQMMFEKQCKPGIETFKASSSVIESQSGVSSDAIKDSPAKTESETIKVDHCKSGADLANGSTTVEESSLEVAEKQDAPEIQASDNPEQHASEDSGNASKRPRTEE

SEQ ID NO: 36485 - protein, 249 aa, Pinus pinaster
MVKAYPTVSEEYKAAIDKCKRKLRALIAEKNCAPIMVRIAWHSAGTYDVKTKTGGPFGTMRYGAELAHGANSGLDIAVRLLEPIKEQFPIISYADFYQLAGVVAVEVTGGPDIPFHPGREDKPEPPPEGRLPDATKGPDHLRDVFGHMGLNDKEIVALSGAHTLGRCHKERSGFEGPWTSNPLIFDNSYFTELVTGEKEGLLQLPSDKALLADPSFAVYVQKYAQDEDAFFADYAEAHLKLSELGFADA

SEQ ID NO: 36486 - protein, 604 aa, Neurospora crassa
MSLSRHVDPEEIIHHLKDIKLQEKGSGSQRQNHLTPYNSSYASQEDIPKYKIPENGTPGDTVYAMLRDELDLDGRPNLNMASFVNTYIEKDAQKLFVENLGKNLSDNDEYPAMISFSDRCVSILAHLWGVQKGEKAIGTATVGSSEAVHLGGLAMKRRWQEKRRAEGKDAYKPNIIMGANAQVALEKFARYFDVEARILPVSAQSNYCLDPALVKENLDENTIGVFVILGSTYTGHYEPVEEIHKILDDFESQTGIDIPIHVDAASGGFVAPFTYAKTGGHKWNFELPRVKSINVSGHKYGLVTPGVGWIVWRDESFLPKHLIFELHYLGGTEYSYTLNFSRPGAQVIVQYYNLIHLGFQGYRAVVENCLSNARLLSKALEATGWYTCVSDIHRPPQKQAGSVKSGSSGYDGENDQSCCSESQNDDQKAESEESKTHASSSSLSSSKDTPETDRNREETSADYTPGLPVVSFRFTDEFQQEYPHVKQETVSLLMRARQWIIPNYALPPNEDQTEILRVVIRESFSFDLIDRLVTDLVSVTETLMENDEVDLSLLQQHQGGRRRPLTKDEKRIEKEEREREERKGEERGEEKGKRMGEGIHRSVC

SEQ ID NO: 36487 - protein, 279 aa, Glycine max
MATVSYAVSGSACQSHRGASRTEAKVNYSAQVSLNCQGLRSLNKLHVRTTRAAKTKTLLSAKSNKSGREGVLGRIECGMNLIFVGTEVAPWSKTGGLGDVLGGLPPALAGNGHRVMTVSPRYDQYKDAWDTSVTVEVKIGDRIETVRFFHCYKRGVDRVFVDHPCFLEKVWGKTGSKLYGPSAGVDYEDNQLRFSLLCQAALEAPRVLNLNSSKYFSGPYGEDVIFIANDWHTALLPCYLKSMYQTKGIYKNAKVAYCIHNIAYQGRHSFADFSLLNLP

SEQ ID NO: 36488 - protein, 251 aa, Ustilago maydis 521
MRRDPERGCGTTLSYGLARLVAIKQLLASARHPDLPLSQRCLIHSSYVQRTFSRQRRPRGCRLNQSIIFAVAANPTRHRSHLGLFCSESWLALAPSSTSACNRGPSHQLELGTAVHLWDACQASYILVLEGPLAYAQLSCKMGMTHKQYLSGQRVFGCKECKTHLTTIENLVSRAFNGQHGRAYLFDLVTNINLGDPEDRHMTTGLHTVRDISCVKCKTTLGWKYDRAYVAAEKYKEGKFILEKELTVDVH

SEQ ID NO: 36489 - protein, 345 aa, Colwellia psychrerythraea 34H
MALFDLPDFDDHEQVVYCSDEASGLKAIIAVHSTKLGAAVGGCRMWDYADDDEALVDVLRLSKGMTYKNAMAGLSMGGGKSVIIGDAKKLKSKALFKAFGEALNRLNGRYLSAEDVNITTSDIDITNSVTPFVTGTEGKSGNPAPFTALGTFLGIKASVKHKLNRDDLTGLKVAIQGLGSVGYQLCEHLHKAGAELVITDINQTALDMAATEFNATIVGLDEIYDQDVDIYAPCALGATINDDTLSRLKAVIIAGCANNQLAEPRHDQALLERGILYAPDYVINAGGIINISFENNYDHEKATEKVGDIYHTLLDIYAKADAQARPTGIIADEMAREIIEKGGKD

SEQ ID NO: 36490 - protein, 393 aa, Trichodesmium erythraeum IMS101
MQNNPYSWIESSLSTIHKANWYRSVKTIESIPGAIIKLEGKKLINFASNDYLGLAGDERLIAAAIQATKEFGSGSTGSRLLTGHREIHQELEREIAKLKQTESALVFSSGYLANIGVISSVVSQRDLILSDEYNHSSLKNGAILSGAKIIEYSHNNIEYLKNKLEQKRENYRRSLIITDSVFSMDGDLCKLPLLLDLAEKYNSMLLVDEAHATGVFGINGGGCVEHFNCTGKQLIQIGTLSKALGSLGGYVAGSKNLIEFLRNRTPTWIYTTGLTPADTAAALTAIKIIKKEPERRMKLWQNLEIFINLLETESQLLHKGKKTSNYESPIICFPLKNAVEALKVGEKLKQEGIFAPAIRPPTVNTSRIRISLMSTHETSHLQQLIAALINLSQ

SEQ ID NO: 36491 - protein, 460 aa, Leptospira interrogans serovar lai str. 56601
MKEYDIIVIGTGGGTKLVTPPSKIGYKIAVIEKENPGGTCLNRGCIPSKMLIYPAEILSLTKHSEKFQISFPKKPEVDFKTLIERISKTVDDESASILPAYDKNPNITYISGTASFISDKVITVNGEQLTAKRIFIASGARPAIPDIPGLAGTPFMTSRETLRRTDLPKSMIVIGGGFIALELGFAYSSFGSEVTFLVRNRMLKNEDKDIVDEFERIFTKEHNVLLHTNIHKIEYNKNLFYVEAISQGKTILLQSEALLVATGIRPNTDLLNLQNTNIQTDKNGYIVVNEYLETTSPGVYALGDITGKYFYRHSVNFEGEFLFRTLYQEKKRTPIEYPPVPHAVFTHPQIAKVGKTEEELIQEGIDYVAAKNSYSASATGMARLSDSGFVKILIDKKSKKVLGAHVIGDEASNLIHLFILLMTMKGTLDDLLKMIYVHPALPEIARNAARKAKELLQSKK

SEQ ID NO: 36492 - protein, 152 aa, Arabidopsis thaliana
  misc_feature (101)..(101): Xaa can be any naturally occurring amino acid
  misc_feature (108)..(108): Xaa can be any naturally occurring amino acid
  misc_feature (120)..(120): Xaa can be any naturally occurring amino acid
  misc_feature (124)..(124): Xaa can be any naturally occurring amino acid
  misc_feature (129)..(129): Xaa can be any naturally occurring amino acid
  misc_feature (134)..(135): Xaa can be any naturally occurring amino acid
  misc_feature (137)..(138): Xaa can be any naturally occurring amino acid
  misc_feature (140)..(140): Xaa can be any naturally occurring amino acid
  misc_feature (145)..(146): Xaa can be any naturally occurring amino acid
  unsure (1)..(152): unsure at all Xaa locations
FVFRFVPTRPSKGTVEAAKYLSKVVNRRNVYIKIPATAPCIPSIRDVIAAGISVNVTLIFSIARYEAVIDAYLDGLEASGLDDLSRVTSVASFFVSRVDTXMDKMLEXIWTPEALDLRGXAAFXQGSIXFKVFXXEXXLXPNWEXXVKKKVP

SEQ ID NO: 36493 - protein, 569 aa, Carboxydothermus hydrogenoformans Z-2901
MLKYDVLVIGSGGAGMQAALVAAKSGELNVALMTKVFPTRSATCCAQGGTNAALRNVDKSDSIEKHAFDTIKGSDFLADQDAVEFFVSLLPETILELDYFGVPFSRLEDGTIAQRPFGGQSHPRTCYSADKIGAVVLHTLYEQCLKNQVNILTEWFLLDLVVENEQIIGVVAMNMKTGDIHPILAKAVVLATGGAGRVYWNRTTNPFASTGDGMAAAFRVGVALKDPEFVQFHPTGLAGTGILMSEACRGEGGYLLNNKGERFMQRYAPEKMELATRDLVSQAIETEIKEGRGFGEGINAYVLLDLRHLGREKILERLPQIRELAIQFEGIDPIEQPIPVRPSCHYSMGGIDVIDYKTCATVVKGLYAAGECSCISIHGANRLGGNSTAEAVAFGKVAGKAAAEYAQNVGFSSEKKVSECAKKWENEYNIAVSRTNGPSVASIRSRLAETMWLNVGVFRKEKEMLQAAKDVDALIEEYKYCVVGDKNRIYNTAFTQYIELGNMLTVAKAIVIGALNRRESRGSHKREDYPQRDDKNYLKHTIITLEGSEYKLSYRPVVITKYQPAERRY

SEQ ID NO: 36494 - protein, 464 aa, Trichodesmium erythraeum IMS101
MATLITQCNINNTQKNQQLISSYPQIHQSQDGILEIDLTANISQINLGNKQAYVLNYNGQIPGPRLEVKPRDTIRINFTNNLPQPTNIHYHGLHIPMTGNADNVFLNISPGDRLTYQFQIPENHHAGMFWYHPHLHGLVAEQIFGGLAGLFIVRGELDEIPEVKAASEQFLVLQDFALDQKGNILPSHELSIMTGRQGNLITANGQSNPKLTIPPQNLLRIRILNASSSRFYRLSLEEHPFYLIATDGGALAEPVEMSELLLTPGERADVLVQGNREPGKYRLLNLPYERVGIGMMGRNVSESQPQVLATVSYDQQSTAVPLPTKLIPVPALPEPQKVRRFQMNHGMIPGQGMAFLFNGQPYQPERIDTQVQLNTVEDWELINTGIMDHPFHIHSNAFQVLSRNGKPEPYRAWKDVVLVRQGETVLIRMPLQDFAGKTVYHCHILDHEDLGMIGNLEIKARLSI

SEQ ID NO: 36495 - protein, 513 aa, Brucella melitensis 16M
MSRARISNYRKGVAAVALSAALAGAFVVTGPLGALNEARAEAVHVTPPQQAGFADLVEKVRPAVVSVRVKKDVQETSNRGPQFFGPPGFDQLPDGHPLKRFFRDFGMEPRGDSRSDNRRGKANKPRPGHERPVAQGSGFVISEDGYVVTNNHVVSDGDAYTVVLDDGTELDAKLIGADPRTDLAVLKINAPKRKFVYVAFGDDNKVRVGDWVVAVGNPFGLGGTVTSGIVSARGRDIGAGPYDDFIQIDAAVNKGNSGGPAFDLSGEVIGINTAIFSPSGGSVGIAFAIPSSTAKQVVDQLIKKGSVERGWIGVQIQPVTKDIAASLGLAEEKGAIVASPQDDGPAAKAGIKAGDVITAVNGETVQDPRDLARKVANIAPGEKAALTVWRKNKAEEINVTIAAMPNDKGKSGSQSNDNDGGQGETLDSYGLTVVPSEDGKGVVVTDVDPDSDAADRGIRSGDVIVSVNNQTVKTAGDINKAITAAEKSGRKAVLLQLQSNDQSRFVALPINQE

SEQ ID NO: 36496 - protein, 526 aa, Ralstonia eutropha JMP134
MNTTRPHPSLAADDWTALTADSAEAIPLYDVDTIRRIENEAFARLPSFELMSRAGSAAAEWLAGHAPEGMLLFLAGPGNNGGDAMVAATRLHQAGRKVEVWLAGDPARMPGDATRAWQEATAAGVPMQAMPATAAWPEGMAAIVDGLLGIGLNRAASGSMATWIERLAQAPAAVFALDIPSGLFADTGAGEPAVRACRTLTFLGAKPGLLTLDGRDCAGVVDIAPLGLDYPPAQGPRALVNGPALFRHALPARRHATNKGTFGSLAIIGGSSGMTGAPLLGARAAQFLGAGKVHIGFLAPSTPAVDPIHPELMLHPLAGLALDAMSALVIGPGMGTDPAACKALAQILQDAARAPSPPSLVLDADALNLLAAEAGLAGTLTASVLPRIMTPHPLEAARLLGSTVAAVQCDRLAAAEALAARWQAIVVLKGSGSVIASPGISASTINPTGNAALASAGTGDVLAGMAGALLAQGMPPAEAAQAAVWIHGRAADVLVAQGMGPAGLTASELAIPARNVFNALLAGKAE

SEQ ID NO: 36497 - protein, 438 aa, Prochlorococcus marinus subsp. marinus str. CCMP1375
MTSATSSKSVTKQKSNVTKSKKTKSLLKEGSQKNQHSKNLSEKKSTSKKKAVTSITKKNNPTEPILSDENLEIAADQLLNATEMKNEESASLDIQNNDSLIGDLTDAEAREKALASIKLGPKGVYTEDSIRVYLQEIGRIRLLRPDEEIELARKIADLLHLEELAIQFESEHGNYPTKKEWAALVNMPMARFRRRLMLARRAKEKMVQSNLRLVVSIAKKYMNRGLSFQDLIQEGSLGLIRAAEKFDHEKGYKFSTYATWWIRQAITRAIADQSRTIRLPVHLYETISRIKKTTKVLSQEFGRKPSEEEIAESMEMTIEKLRFIAKSAQLPISLETPIGKEEDSRLGDFIESDSENPELDVAKTLLREDLEGVLATLSPRERDVLRLRYGLDDGRMKTLEEIGQIFDVTRERIRQIEAKALRKLRHPNRNGVLKEYIK

SEQ ID NO: 36498 - protein, 544 aa, Crocosphaera watsonii WH 8501
MLENATHSLQSLATMQHYLLRNNQESIAKIVPNVAKNFPPRQPLLPSILKQLGQKNHLTADEVLSLKTDLIEDALESYLWLREGEYHWRDDQPLSSHHTTIKGDDCFIISNLLDNLIIRMKAWQKLSAVISSPYQRLFCANPALIQQKVPSGNLNPTALEKLVKLMQGKTLRQISLFLKQDELKVAQLLFPYLQSNILQLKSPQPTLEKLPCIPPLKPTNTLNKNPNNPQPRNNYQPTQSQQKKTYKIVCIDDSPTILDMIKAYLEEAEYEVITIDNPTQSLTCLFKHKPDLVLIDFSMPGINGNKLCRIIKTSPLFKNTPLIMISGNSKMLTPENMKEAGAIDYLAKPFCKEQLHNIVNKYLSNNSKVNQRLTKGKNDTQSSFKPVEKPNIKQSEDLDRKPITITRNEQDIDPITGLANRQCLEQYLSGITKNTENTKSSFSLIFIKINNLIDIQDTLGETERDNTLRNVTKQMHSLVRANDVVGRWSDNEFVIVFNNIEHPKILAHISQRILNTIKQSPLLVENQLNLKLSHTVKINSLVGA

SEQ ID NO: 36499 - protein, 210 aa, Haemophilus somnus 129PT
MFTGWRDVNLTERGIEEAKAAGKKLLEAGYEFDIAFTSVLTRAIKTCNIVLEESNQLWIPQVKHWRLNERHYGALQGLDKKATAEQYGDEQVHIWRRSYDVSPPDLDPQDPNSAHNDRRYALLPKDVVPNAENLKITLERVLPFWEDQIAPALLSGKRVLVTAHGNSLRALAKHIIGISDEEIMAFEIPTGQPLVLKLDEQLNFVEKFYL

SEQ ID NO: 36500 - protein, 165 aa, Triticum aestivum
  misc_feature (63)..(63): Xaa can be any naturally occurring amino acid
  misc_feature (93)..(93): Xaa can be any naturally occurring amino acid
  misc_feature (114)..(115): Xaa can be any naturally occurring amino acid
  misc_feature (123)..(123): Xaa can be any naturally occurring amino acid
  misc_feature (137)..(137): Xaa can be any naturally occurring amino acid
  misc_feature (143)..(143): Xaa can be any naturally occurring amino acid
  unsure (1)..(165): unsure at all Xaa locations
LWLLLTGKVPTKEQVDALSKELLARSTVPAHVYKAIDALPVTAHPMTQFTTGVMALQVESEFXKAYDNGIAKIKVWGATYEDCLNMIAPVPTXGSYVYRRISKGGKSIRNWTFXXIMRNFSHXLGLDDPKMLELMRXLVTSHXHEGGSQSNGTGGKGLQILLLRV

SEQ ID NO: 36501 - protein, 519 aa, Oryza sativa
MTATPAVIGLSAGNRLLSASFGPTDLMPDKVSLGVGGGGGGGGGGGGGDAMSFAAAPATPKLTAVAAHRLKLSPHGRAQVMRALRHHSSAAAALAPPPPPPPPPTPSPASRAAHAHDLESSLEAIVLLQRSMLEKQWELPFDDDNHAMAIGLAEDDDDTSKATVVVARSSVSARQRRMSGRRRGRTKNGAAHFAVSPELIQSRNRIYLRGTVSKELLTHKQVVHLSHKIKDGIWLQQQRSKLKEKLGNEPSYKQLAHSLKISPPELRSRMHESFLAREMLTMSNLRLVISIAQKYDNLGVELADLIQGGLIGLLRGIEKFDASRGFRISTYVYWWIRQGVSRALAENSKTFRLPTYLHERLIAIRGAKYELEDQGIAPTIENIAGSLNISEKKVLNATEAVNKVLSLDQQAFPSLNGLPGETLHSYIEDQNVANDPWHGFEEWYLKEEVNKLLNSTLNERERDIIRLYHGIGKQCHTWEDISRQFGLSRERVRQVGLIAMEKLKHAARRKNLEALLEDY

SEQ ID NO: 36502 - protein, 434 aa, Cryptococcus neoformans var. neoformans B-3501A
MDLPLTLDDHTPFPHQVAGHPGVMSDSSGSLVIKPALPREIAFYQLLSNSDPEDIVWPLRKFVPKNYGTLRLEGRVGAGGGVETDLDVKDEMPESVVLENLAYAYTHPNIMDVKLGTVLYAPDATDEKRRRMERQARETTTYETGIRLTGCQTWHAPTQSYISTPKSFGKSITPPQLSLGMVRFFPLPTDCIPSLVTLPSPPPTAVEVVSTVSASHLPIPAENSCASVIQSSTSISIPPSTPIAPDPTTTVTTAPASTNPEKSPTYENHSIPAPTLARLLTLLLQKLDHLTAVLSTLEMRFVGASLLVVYEGDPARLEAALDREEANAQGESGEREKRNGERSMFSDDGSIDFSDSDEDSDEDGEGYDSEDELDGKKKDERRARKCPALTLKMIDFAHTWLAQGEGPDEGVLKGLKTFRSLVEGRLEEVERGCV

SEQ ID NO: 36503 - protein, 690 aa, Zea mays
MAAVAPPPAPAPAPVPAPAPATVPVADQTTDLLQKLSLDSQPKAADATQPAAATAKKQGAAASQPLSVAIPPEPSITPVIQDFTDPNLFYLPAYYYGGYDSSMSEWDDYPRYLNSDGVEIAPAVYGDIYGYGYAPYGAYSPATSPVPTVDGQMFGAQHYQYPAAYFQPPTPVPSTTQSDLQSSKNPEKPAAKADPAKTTNGVPNGTAHSNSGTVPLASSQQNSSLTPDGTYRAPLLGGVPSAGYLDTTYGYDSTGAHFAWYDGSAYANGQQRTTTNHFPSSTFGNGSPARYQNKSTTTPQMGMQNRRPTTTSPAPTYPNRMYPSSRPYTQYGNSIKTGLPYGSNGYDSRIYGRWGLGMDNRYRPRGRNGYYGYGNESQDGTIELNRGPRSGRFKNQKLYGHTVTIAVKGQSLPSGESKDDSAVPDRAQFNRDDFPVQYDAAKFFVIKSYSEDDIHKSVKYNVWASTTNGNKKLDAAYQEAQSKGSACPIFLFFSVNTSGQFVGVAEMTGAVNFEKTLGYWQQDKWNGSFSVKWHIVKDVPNNILKHIILENNENKPVTNSRDTQEIHLEQGLQMLKIFKEHVSKTSILDDFSFYESRQKLMQDKRSKQQQVQKQVWDSRTPISVTGSEQQQEAANGKPNPSVPNGVPAEVKAAKASAENGTATPAISYAAKVAQAATEKPVLANGVAKTG

SEQ ID NO: 36504 - protein, 136 aa, Ralstonia eutropha JMP134
MTTSKTEAEWREQLSDIEYRVTREAATERPFTGRYWDHWDNGIYKCVGCGTPLFESATKFDAGCGWPSYFRPINGEVIAEHADHTHGMVRVEVRCKECGSHLGHVFEDGPAPTGLRYCINSAALKFDDRDPAERDG

SEQ ID NO: 36505 - protein, 563 aa, Burkholderia fungorum LB400
MSNRKIAKASPADQGASIVSRRGFLKLAGASSLATAAGTLSSAARAANSAPDGTPEQIHLTWGSDPASEVTVSWASLAPALNPQVRFGGAGAAKHTVHGVQSTYTDGLNGEVVFAYHARLRDLKPDTSYEYQVSAENDSNAAQPFTASFRTAPRGRAPFRFTSYGDLATPNTGWVLSSPQSRFAVQAVERFQPLFHLLNGDLCYANLNPAHQPDVWRDFGNNCQTSASNRPWMPCPGNHELEFNNGEQGLASYLARYTLPDNHTRFQGRWYSFRVSSVLFVSLDADDVVYQDAAAFVAGPDALVPVASTGNPPIQPGTSLYVRGYSAGEQTRWLEKTLRRAAEDDEVDWIVVQMHQDALSSSKTGNGSDKGIREAWLPLFDRYGVDLVLCGHDHDYERSYPVRGCNHNKGTDIATGRPVDTLQPKPVMSAMSSGASTFDTSRGTIHLILGGGGTSAPLDVYGVDAGTGLPQARIFTRPNRPVAGTTAGTFVRAGADAVEDAIWSAQRDTGTGYGIAVFDHDPGHPGGETTITMNYYHAPGADQTPTQNYELFETIELKKTRHR

SEQ ID NO: 36506 - protein, 97 aa, Zea mays
KTQTPPQAPEEEKKGLLDKIKEKLPGGHKKPEDAAAAAAAPAVHAPPPPPPHAEVDVSSPDGKKGLLGKIMDKIPGYHKSSGEEDRKDAAGEHKTSS

SEQ ID NO: 36507 - protein, 347 aa, Psophocarpus tetragonolobus
GGELFDRIVQKGHYSERQAATLIKTIVEVVEACHSLGVMHRDLKPENFLFDTLHEDAKLKATDFGLSVFYKPGESFCDVVGSPYYVAPEVLRKLYGPESDVWSAGVILYILLSGVPPFWAETEPGIFRQILLGKIDFQSEPWHSISDSAKDLIRRMLDQNPKTRLTAHEVLRHPWIVDDNLAPDKPLDSAVLSRLKQFSAMNKLKKMALRVIAERLSEEEIGGLKELFKMIDTDNSGTITFDELKDGLKRVGSELMESEIKDLMDAADIDKSGTIDYGEFIAATVHLNKLEREENLVSAFSYFDKDGSGYITLDEIQQACKDFGLDDVHIDDMIKEIDQDNDGQIDY

SEQ ID NO: 36508 - protein, 159 aa, Saccharophagus degradans 2-40
MASIYDINIQSLQGQLIGFSDFKGKALLIVNTASKCGFTPQYEGLQQLHQQYASEGLVIIGCPCNQFGKQEPGDAKAISEGCLINYGVDFLITEKIHVNGANTHPLYRYLKTALPGFMGNNIKWNFTKFLIGKDGTPIKRFAPFTKPASMEGAVKKALG

SEQ ID NO: 36509 - protein, 175 aa, Cytophaga hutchinsonii
MQLTNRSKVVVDKKMTFMERIYIPSIVSGMMITLSHLFKKKATIQYPEVQREFAFVYRGKHILKRDEQGRENCTACGLCAVSCPAEAITIIADERKKGEEHLYKEEKYASLYEINMLRCIFCGLCEEACPKDAVYLTEELVPAQYNRKDFIYGKDKLVQPLGTSAHPKTYKPYKK

SEQ ID NO: 36510 - protein, 415 aa, Neurospora crassa
MAATVASSHPFGGGLHPLQAKGLLAAAQQRQQQQQTQSQPQLHPCMLSQHHSYQNDQRRNDPSQTQKNNDTSGGFEMATRKPRLSDFHRIRTLGTGTFARVVLVRPANGTEIDRQKVYALKILRKTEVIRLKQIDHVRHERQILQDVTGHPFITSLQASFSDHDFLYLLLDYIPGGELFTYLRKYRRFDEEMARFYAAEIVLVLEYLHEEQGGIAYRDMKPENLLLDADGHIKLVDFGFAKRLGYNDVERPVETYTLCGTPEYLAPEVIQNKGHTTAVDWWALGILIYEFLTGYPPRKSTVTKTQVRIVEKPVLFPSSTEISEEAKDIIRSFCTVDRTMRLGNMSGGAARVKAHPWFKGVDWEAVEQRRHKGPIIPHLSHPGDASCFDVYPEQDVHNEAYTEEMFEKYEKYFGDF

SEQ ID NO: 36511 - protein, 195 aa, Ustilago maydis 521
MVNLRTQKRLAASVLGCGKRKVWLDPAEQNDIGNANSRANIRKLIRDGQIIRKPVVGGSRSRARATAAAKRAGRGTGQGHRKGSSEARMPTKVMWMRRQRVLRRLLRKYRESGKIDKHLYHELYLKSKGNVFKNKRVLMEHIHKAKAEAARSKHLADQMEARRMRNKAMRERRAQRVLEKRAAIIAVENEAEEKK

SEQ ID NO: 36512 - protein, 354 aa, Debaryomyces hansenii CBS767
MKKEGGGLIITLAACILGLYASFLTWSVLQERISTKPYGSNPDTGSPDFFKAPLVINIIQAFFASIVGLIYSVVSSRSNPLSIFTQNEKPVALKFFKSFVIISLTSSLSSPLGYESLKHVDYLAYLLAKSCKLIPVMLVHFVLYRTKFPLYKCMVAGSVTVGVIIFTLSHSSTKSKADISDGKTALGMAQLIGSMLLDGLTNSTQDQLFKLRGTSPSNKHTKLTGAYLMCILNAFIFINTLAYALIFKYQSEITYTVNFVHHYPQVMMNILEFAILGSVGQVFVFIILEKFDSLILITSTVTRKMISMILSVVLFGHQLNGLQWGGVGLVFGGIGYEALVKMSMNKAPTTKKNQ

SEQ ID NO: 36513 - protein, 346 aa, Escherichia coli
MKSVVNDTDGIVRVAESVIPEIKHQDEVRVKIASSGLCGSDLPRIFKNGAHYYPITLGHEFSGYIDAVGSGVDDLHPGDAVACVPLLPCFTCPECLYGFYSQCAKYDFIGSRRDGGFAEYIVVKRKNVFALPTDMPIEDGAFIEPITVGLHAFHLAQGCENKNVIIIGAGTIGLLAIQCAVALGAKSVTAIDISSEKLALAKSFGAMQTFNSLEMSAPQMQGVLRDVRFNQLILETAGVPQTVELAVEIAGPHAQLALVGTLHQDLHLTSTTFGKILRKELTVIGSWMNYSSPWPGQEWETASRLLTERKLSLEPLIAHRGSFESFTQVVRDIARNAMPGKVLLIP

SEQ ID NO: 36514 - protein, 347 aa, Zea mays
  misc_feature (192)..(192): Xaa can be any naturally occurring amino acid
  unsure (1)..(347): unsure at all Xaa locations
MENPASVLVLPAQFTKLTFGNLYIRRAGPGSREITEEGRCDLDKRYVSDFPVYDGRGPDASLVARVQGITSEIGNAHQLFVVVFDTDRLKGSTLVTNGVITAGSDEWAIYGGTGVFAMARGVIRRRYLADRAGGNTDELNMDVFCRPFGSQSELQDKVVHHTNNQRRPFCRLELNMFCWIYNILLYESLRIXMQVQGQGSSVTKIGLWGGPGGSAQDITAERPPQRLHSVTVRAGVAVDSIEFTYTDSAGQRRAAGRWGGLGGNVRTIDLGNAEDVREVSGTYGAFEGATTLTSLRLVTSSRTWGPWGVENGTRFSVTAPIGSSIVGFYARAGTRLVDAIGVYLRQI

SEQ ID NO: 36515 - protein, 319 aa, Xerophyta viscosa
MAHAPCFADAKTQSFKLLSGHSIPAVGLGTWKSGDKAGNAVYTAITEGGYRHIDTAAQYGVHEEVGNALQSALKAGINRKALFVTSKVWCEDLSPERVRPALKNTLEELQLDYLDLYLIHWPIHLKKGAHMPPEAGEVLEFDIGGVWREMEKLVKVGLVRDIGISNFTVKKLEKLLNFAEIKPSVCQMEMHPGWRKHKMFEICRKYGIHTTAYSPLGSSERDLLSDPTVLKIANKLNKSPGQLLVRWAVQRGTSVIPKSTNPERIKENIQVFGWEIPAEDFQILSSLSEQKRVLDGEDLFVNKTHGPFRSAAELWDGEV

SEQ ID NO: 36516 - protein, 341 aa, Chlamydomonas reinhardtii
MSGKIKIGINGFGRIGRLVMRATMLRPDIEVVAINDPFIDAEYMAYMFKYDSVHKTWPGHVNGSKDGFLVEGRKIHTFTESDPSKINWGAAGADIVIESTGVFTDIAKATAHLTGGAKKVIITAPSNDAPMYVMGVNHEKYNPATDHIISNASCTTNCLAPLAKVVNSKFGIKEGLMTTVHATTATQKTVDGPSKKDWRGGRAVNGNIIPSSTGAAKAVGKVLPELKGKLTGMAFRVPTNDVSVVDLTVTLEKATTYEDIMKALKEASEGEMKGVLAYTDEDVVSSDFVTDPASCTVDAKAGIMLSPTFVKLVAWYDNEWGYSNRVVDLALHVAKKAAVKV

SEQ ID NO: 36517 - protein, 544 aa, Francisella tularensis subsp. tularensis
MAAKQVLFSDEARAKMLDGVNTLANAVKVTLGPKGRNVVLDKSFGTPTITKDGVSVAKEIELEDKFENMGAQIVKEVASKTADVAGDGTTTATVLAQALLTEGLKAVAAGMNPMDLKRGIDKATARLVEELKALSKPCSDPKSIEQVGTISANSDATVGKLIADAMAKVGKEGVITVEEGKGFEDELDVVEGMQFDRGYLSPYFATNQENMTTDLENPYILIVDKKISNIRDLLPILEGVSKSGRALLIIAEDVESEALATLVVNNMRGVVKVCAVKAPGFGDRRKAMLEDIATLTGATFVSEDLSMKLEETNMEHLGTASRVQVTKDNTTIIDGAGEKEAIAKRINVIKANIAEANSDYDREKLQERLAKLSGGVAVIKVGAVTEAEMKEKKDRVDDALHATRAAVEEGIVAGGGVALIRAQKALDGLTGENDDQNYGIALLRKAIEAPLRQIVSNAGGESSVVVNQVKANQGNYGYNAANDTYGDMVEMGILDPTKVTRSALQHAASIAGLMITTEAMIGEIKEAAPAMPMGGGMGGMPGMM

SEQ ID NO: 36518 - protein, 269 aa, Zea mays
MASCRMALLLGLLLLVVASPAIADDDSGIYYQLALMWPGAYCEQTSAGCCKPTTGVSPARDFYITGFTVLNATTDAAVTGCSNKVPYDPNLITGIQGLNQYWSNIRCPSNNGQSSWKNAWKKAGACSGLSEKDYFETALSFRRPINPLVRLKAKGIEPDFGLYGLKAITKVFKSGINATPVIQCSKGPFDKYMLFQLYFCAAGNGTFIDCPAPQQYTCSKEILFHPFKKWMLKQQLNQDDDPFQLPGVAWTTDTPYRRLCLRFCQVCME

SEQ ID NO: 36519 - protein, 736 aa, Lycopersicon esculentum
MDCNCFDPLLPADELLMKYQYISDFFIAVAYFSIPIELVYFVQKSAVFPYRWVLVQFGAFIVLCGATHLINLWTSTPHTRTVAMVMTTAKFSTAAVSCATAVMLVHIIPDLLSVKTRELFLKNKAAELDREMGLIRTQEETGRYVRMLTHEIRSTLDRHTILKTTLVELGRALQLEECALWMPTRTGVELQLSYTLHHQNPVGFTVPIQLPVINQVFSANCAVKISPNSAVARLRPTRKYIPGEVVAVRVPLLHLSNFQTNDWPELSPKSYALMVLMLPSNSARQWHVHELELVDVVADQVAVALSHAAILEESMRARDLLIEQNVALDLARREAETAVRARNDFLGVMNHEMRTPMHAVVALSSLLQESELIPEQRLMVETILKSSNLLATLINDVLDLSRLEDGSLQLDVGTFNLHALFREVLNLIKPVAAVKKLFVTLSLSSDFPEVAIGDEKRLMQILLNVVGNAVKFSEEGSVSVSAVNAKSESLIDPRAPEFFPVQSENHFYLRVQVKDTGSGINPQDFPKLFCKFAQNQEPATKNSAGTGLGLAICKRFVNLMEGHIWIESEGVGKGSTAIFIVKLGIPGRLNESKLPFTAGLPANHMQMTFQGLKVLVMDDNGFSRMVTKSLLVHLGCDVTTIGSGDECLRILTREHKVLIMDASITGMNCYDVAVSVHEKFGKRLERPLIVALTGNTDQVTKENCLRVGMDGVILKPVSIDKMRSVLSGLLEHGTVL

SEQ ID NO: 36520 - protein, 205 aa, Vibrio parahaemolyticus RIMD 2210633
MTAETPVKDENIVWHQHTVDKQFRAELKKQKPAVLWFTGLSGAGKSTVAGALENRLAELGYHTYLLDGDNVRHGLCSDLGFSEQDRRENIRRIGELAKLMADAGLIVLSAFISPHRAERQLVRDLLPEGEFIEVFVNASLEVCEGRDPKGLYKKARAGEIPNFTGIDSEYQAPINPEIDLPAGEKSVEELVELCLNELKQRRVIS

SEQ ID NO: 36521 - protein, 635 aa, Lycopersicon esculentum
MESCDCIEALLPTGDLLVKYQYLSDFFIAVAYFSIPLELIYFVHKSACFPYRWVLMQFGAFIVLCGATHFISLWTFFMHSKTVAVVMTISKMLTAAVSCITALMLVHIIPDLLSVKTRELFLKTRAEELDKEMGLIIRQEETGRHVRMLTHEIRSTLDRHTILKTTLVELGRTLDLAECALWMPCQGGLTLQLSHNLNNLIPLGSTVPINLPIINEIFSSPEAIQIPHTNPLARMRNTVGRYIPPEVVAVRVPLLHLSNFTNDWAELSTRSYAVMVLVLPMNGLRKWREHELELVQVVADQVAVALSHAAILEDSMRAHDQLMEQNIALDVARQEAEMAIRARNDFLAVMNHEMRTPMHAVIALCSLLLETDLTPEQRVMIETILKSSNLLATLINDVLDLSRLEDGILELENGTFNLHGILREAVNLIKPIASLKKLSITLALALDLPILAVGDAKRLIQTLLNVAGNAVKFTKEGHISIEASVAKPEYARDCHPPEMFPMPSDGQFYLRVQVRDTGCGISPQDIPLVFTKFAESRPTSNRSTGGEGLGLAICRRFIQLMKGNIWIESEGPGKGTTVTFVVKLGICHHPNALPLLPMPPRGRLNKGSDDLFRYRQFRGDDGGMSVNAQRYQRSL

SEQ ID NO: 36522 - protein, 338 aa, Zea mays
  misc_feature (35)..(35): Xaa can be any naturally occurring amino acid
  unsure (1)..(338): unsure at all Xaa locations
MGKIKIGINGFGRIGRLVARVALQSEDVELVAVNXDPFITTDYMTYMFKYDTVHGQWKHSDITLKDSKTLLFGEKPVTVFGIRNPEEIPWGEAGAEYVVESTGVFTDKDKAAAHLKGGAKKVVISAPSKDAPMFVVGVNEDKYTSDVNIVSNASCTTNCLAPLAKVIHDNFGIIEGLMTTVHAITATQKTVDGPSAKDWRGGRAASFNIIPSSTGAAKAVGKVLPELNGKLTGMSFRVPTVDVSVVDLTVRIEKGASYEEIKKAIKAASEGPLKGIMGYVEEDLVSTDFTGDSRSSIFDAKAGIALNDHFIKLVSWYDNEWGYSNRVVDLIRHMFKTQ

SEQ ID NO: 36523 - protein, 753 aa, Escherichia coli K12
MTILNHTLGFPRVGLRRELKKAQESYWAGNSTREELLAVGRELRARHWDQQKQAGIDLLPVGDFAWYDHVLTTSLLLGNVPARHQNKDGSVDIDTLFRIGRGRAPTGEPAAAAEMTKWFNTNYHYMVPEFVKGQQFKLTWTQLLDEVDEALALGHKVKPVLLGPVTWLWLGKVKGEQFDRLSLLNDILPVYQQVLAELAKRGIEWVQIDEPALVLELPQAWLDAYKPAYDALQGQVKLLLTTYFEGVTPNLDTITALPVQGLHVDLVHGKDDVAELHKRLPSDWLLSAGLINGRNVWRADLTEKYAQIKDIVGKRDLWVASSCSLLHSPIDLSVETRLDAEVKSWFAFALQKCHELALLRDALNSGDTAALAEWSAPIQARRHSTRVHNPAVEKRLAAITAQDSQRANVYEVRAEAQRARFKLPAWPTTTIGSFPQTTEIRTLRLDFKKGNLDANNYRTGIAEHIKQAIVEQERLGLDVLVHGEAERNDMVEYFGEHLDGFVFTQNGWVQSYGSRCVKPPIVIGDISRPAPITVEWAKYAQSLTDKPVKGMLTGPVTILCWSFPREDVSRETIAKQIALALRDEVADLEAAGIGIIQIDEPALREGLPLRRSDWDAYLQWGVEAFRINAAVAKDDTQIHTHMCYCEFNDIMDSIAALDADVITIETSRSDMELLESFEEFDYPNEIGPGVYDIHSPNVPSVEWIEALLKKAAKRIPAERLWVNPDCGLKTRGWPETRAALANMVQAAQNLRRG

SEQ ID NO: 36524 - protein, 761 aa, Lycopersicon esculentum
MLRTLASALLVLSFFVSLSAADNGFPRCNCDDEGFWSIESILECQKISDLFIAIAYFSIPIELLYFVSCSNFPFKWVLFQFIAFIVLCGMTHLLNFWTYYGQHPFQLMLALTIFKVLTALVSFATAITLITLFPMLLKVKVREFMLKKKTWDLGREVGLIKMQKEAGWHVRMLTQEIRKSLDRHTILYTTLVELSKTLDLHNCAVWKPNENKTEMNLIHELRDSSFNSAYNLPIPRSDPDVIQVKESDGVKILDADSPLAVASSGGSREPGAVAAIRMPMLKVSNFKGGTPELVPECYAILVLVLPSEQGRSWCSQEIEIVRVVADQVAVALSHAAILEESQHMRETLEEQNRALEQAKQDALRASQARNAFQMVMSHGLRRPMHSILGLLSLLQDEKLGNEQRLLVDSMVKTSNVVSTLIDDVMDTSTKDNGRFPLEMRYFQLHSMIKEAACLAKCLCAYRGYNISIEVDKSLPNHVLGDERRVFQVILHMVGNLLKDPNGGLLTFRVLPESVSREGIGGAWRTRRSNSSRDNAYIRFEVGTSNNHSQPEGTMLPHYRPKRCSKEMDEGLSFTVCRKLVQLMQGDIWVIPNPEGFDQSMAVVLGLQLRPSIAIGIPEYGESSDHSHPHSLLQGVKVLLADYDDVNRAVTSKLLEKLGCSVSAVSSGRDCIGVLSPAVSSFQIVLLDLHLPDLDGFEVTMRIRKFGSHNWPLIVGLTATADENVTGRCLQIGMNGLIRKPVLLPGIADELQRVLLRGSRMM

SEQ ID NO: 36525 - protein, 326 aa, Magnetospirillum magnetotacticum MS-1
MLLVTGGAGYVGSHTLHHLIRNGYSPESIIVVDNLCRGSRDAVPHGVHFAEVDLLDTEVLVELFRRHDVSAVIHFAGFAYVDESMADPTAYYRTNVVAGLSLLEAMVRVGCRAIVFSSTCATYGTPSSVPIAESEPQIPINPYGETKLVFERALEWYERCHGIRHVILRYFNAAGAAYGVGSYGNHDVRMIPAAVLAAMGRRPPVKIFGTDYETSDGTCVRDYVHVADLAEGHCLALEHLREDGASTALNLGSGRGSSVLNILEAVHRIGGRPVPNEKSPRRLCDPPTLIADTRLAQRILGWHPAYTLDDIISSVWHWHQSMVMAR

SEQ ID NO: 36526 - protein, 767 aa, Lycopersicon esculentum
MLAMLRLLFLVLLISLVIISVSANDGEFFNCCDEDGFWSIHTILDCQKVSDFFIAVAYFSIPLELLYFISRSNLPFKWVLVQFIAFIVLCGLTHLLNGWTYNPHPSFQLILSLTVAKILTALVSCATAITLLTLIPLLLKIKVRELFLAQNVLELDQEVGMMKKQTEASMHVRMLTHEIRKSLDKHTILYTTLVELSKTLKLQNCAVWMPNESRSQMNLTHELSPSSAAESHRSLSINDPDVLEITKNKGVRILRQDSVLAASSSGGSGEPCAVAAIRMPLLRASDFKGGTPELVDTRYAILVLVLSSVDERVWSYDEMEIVEVVADQVAVALSHATVLEESQTMREKLEMRNRVLQQAQENAMKASQARTSFQKVMNNGMRRPMHSILGLLSIFQDEKASSDQRMIVDTMVKTSTVLSTLINDAMEISAKDDGRFPVEMKPFQLHLLVREASCLVKCLCVYKGFGFSTDVPTSLPNQVMGDEKRTFQVLLHMVGHLLNVSIGKGSVIFRVVLETGAETGNDKVWGTRRPSTTDEYVTIKFEIEVSLEGSQSDSSISTIHFGGRRHNSKEVTEGLSFNMCKKLVQMMQGNIWMSSNAQGHAQGMTLILRFQKQSSFRKRMFEYRNPLEQPISSTMFRGLHVLLTDDDDVNRLVTRKLLEKLGCQVTAVSTGFQCLSALGPSLTTFQVLILDLQMPEMDGYEVALRVRKFRSRSWPLIIALTASSEEQVWEKCLQVGMNGLIRKPVLLQGLADELQRLLQRGGGGDGL

SEQ ID NO: 36527 - protein, 931 aa, Streptococcus agalactiae A909
MSHPKLESSSNKEIITEEVGLLKQLLDEATQKLIGSESFDKIEKIVSLSSTDDYTGLKETISALSNEEMVIVSRYFSILPLLINISEDVDLAYEINYKNNLNQDYLGKLSTTIDVVAGHENAKDILEHVNVVPVLTAHPTQVQRKTVLELTSKIHDLLRKYRDVKAGIVNQEKWYADLRRYIGIIMQTDTIREKKLKVKNEITNVMEYYNRSLIKAVTKLTAEYKALAAKKGIHLENPKPLTMGMWIGGDRDGNPFVTAETLRLSAMVQSEVIINHYIEQLNELYRNMSLSINLTEVSPELVTLANQSQDNSVYRENEPYRKAFNFIQDKLVQTLLNLKVGSSPKEKFVSRQESSDIVGRYIKSHIAQVASDIQTEELPAYATAEEFKQDLLLVKQSLVQYGQDSLVDGELACLIQAVDIFGFYLATIDMRQDSSINEACVAELLKSANIVDDYSSLSEEEKCQLLLKELTEDPRTLSSTHAPKSELLQKELAIFQTARELKDQLGEDIINQHIISHTESVSDMFELAIMLKEVGLIDANQARIQIVPLFETIEDLDNSRDIMTQYLHYELVKKWIATNNNYQEIMLGYSDSNKDGGYLSSGWTLYKAQNELTKIGEENGIKITFFHGRGGTVGRGGGPSYEAITSQPFGSIKDRIRLTEQGEIIENKYGNQDAAYYNLEMLISASIDRMVTRMITNPNEIDNFRETMDGIVSESNAVYRNLVFDNPYFYDYFFEASPIKEVSSLNIGSRPAARKTITEISGLRAIPWVFSWSQNRIMFPGWYGVGSAFKHFIEQDEANLAKLQTMYQKWPFFNSLLSNVDMVLSKSNMNIALQYAQLAGSKEVRDVFNIILNEWQLTKDMILAIEQHDNLLEENPMLHASLDYRLPYFNVLNYVQIELIKRLRSNQLDEDYEKLIHITINGIATGLRNSG

SEQ ID NO: 36528 - protein, 333 aa, Prochlorococcus marinus subsp. marinus str. CCMP1375
MNPEKLDVVAIGNAIVDVLINTEESFLREHSLAKGNMTLITQEKAEELYSKSDPSLETSGGSAANTIAGLSELGSNAEFIGRVKKDALGNTFKDDICSTGAVFNTPPIKYGPSTARCFIYVTPDAERTMCTYLGASVLLETKDIDFSILGETKILYLEGYLWDLEKAKSALKASAEECKKLGGKIALSLSDSFCIERHRESFQELLEKNIDILFANENEIISLYNSSSLDDAIENIKPKCEIAVITIGGKGSIIISGDEKYLIKPYNFGKVIDTTGAGDLYASGFLHGYVNGLDLQTCGNIGSTCAGYIVSQLGSRSKVSLKDIVIERLGLPA

SEQ ID NO: 36529 - protein, 754 aa, Lycopersicon esculentum
MMKKVVSWLLFLSIVASLWVVDGYIECPCDDSDAFFSMETMLFVQKAGDLGIAVAYFSIPIEIIYFVSCSSFPFKWVLFQFGAFIVLCGLTHFLTFLTHFGKYTFHLILALIVCKLLTALVSMLTAITLMNLIPLLLKAKAREFMLRRKNRELDREVEKIKQLEELGLHVRMLTNEIRKSIDRHTILYTTLVGLSKLLSLQNCVIWMPNENRTEMKLTHDTTRENVSSVYNVPIPISDREVKEIKGSDDVKILGADSRLAAASSRGSCEPESVAAIRIPMLTVSNFRGETREIVSQCYAILVLVQPCGHGRFWLNQEVEIVRAAADQVAVALSHAAVVEESEYIKDRLMEQNQALQKAREEALRASQARSSFQTVMSHRLRRPMHSILGLLSMLQEQKLRDEQQLLVHSIIKSSNVVSTLMDDVIVTSTKENVKFPLEMKHFQLHSLIREAACTAKSLCMYKGYNITIEVEKSFPNKVMGDERRFFQVLLHIIGNLLNGIHGGHLTFKVLSASENDVSWKTPRSNSSNDIVYIKFEICTKFNRSQSEITPAPPTYDTEEIEESLSFAVCRKLVHLMQGDIFIIRNLADFDQGMAVIVGFQRQPLIPLGMSEYVESSNPTYPHPVLRGVEVLLADYDDSNRAVTKKMLEKLGCIVTLVSSGYECLGAVGPVVSSLQIILLDLHLPDLDGFEVTMRLRKHRRQTWPLIIGLAAITDEDIRKCLKIGMNGIICKPLLLSGLADELQKVLLHANRGMP

SEQ ID NO: 36530 - protein, 221 aa, Pseudomonas fluorescens PfO-1
MVLRSEILVNKNVLPTKEQALPGRETPMALPEKHFVFTETPLLGPFFQDVDFAIFGLGCFWGAERRFWQREGVVSTVVGYAGGFTPNPTYEEVCSGLTGHAEVVLVVFDKAKVSYEELLAMFWELHNPTQGMRQGNDIGTQYRSVIYATHPEQLDAALKSKAVYQAELSKAGLGEISTEIEQAPTVYFAETYHQQYLAKNPEGYCGIGGTGVCMPPSLAGN

SEQ ID NO: 36531 - protein, 506 aa, Ralstonia eutropha JMP134
MSSHSHPHPHQHPVVEHDDLQRKLKARHLTMIAIGGAVGTGLFVASGASIAQAGPGGALLMYALLGFMVYCLMTSLGELAVHMPVAGSFVTYSALYVEEGFGFALGWNYWFSLAVTIAVELTAAQLVMQFWFPGMPGMVWSAGFLLLMFALNAFSVRGFGEAEYWFALIKVITVIVFLGVGLLMIFGIMKGGPQSGWHNFTTGDAPFVGGIPAMIGVAMIAGFSFQGTETVGVAAGEAQDPARTIPRAIRQTFWRILLFYVIAILIIGVLIPYTDPNLLRNDVTDVGVSPFALVFRQAGLAFAAGLMNAVVLTALLSAGTSSMYVSTRILYGLAVSGRAPRWLGKLTVNGVPFNALLVTTAVGALCFFSSLFGDKAVYLWLLNTSAMTGFFAWFGIALSHYRFRRGLVYQGYDINALAYRSPLYPFGPIFAGVLCLVIVAGQNYQAFADIPNRWPEIIATYIGVPVFLALWLGYRIVRKTRLIDYEDMPFELPKTAKVIAGQAAQV

SEQ ID NO: 36532 - protein, 493 aa, Staphylococcus xylosus
MKRKLTGLFGAPVSDRENSMTAGPRGPLLMQDIYFLEQMAHFDREVIPERRMHAKGSGAFGTFTVTNDITKYTCASIFAEVGKQTEMFARFSTVAGERGAGDAERDIRGFALKFYTDEGNWDLVGNNTPVFFFRDPKLFPSLNHVVKRNPKTNMKDPQANWDFWTLLPEALHQITILMTDRGIPKGFRNMHGFGSHTYSMYNDKGERFWVKFHHRTQQGIENYSAEEAEQVMAKDRDSSQRDLFNNIEQGNFPKWKMYIQVMTEEQARNHKDNPFDLTKVWYKDEYPLIEVGEFELNRNPENYFQDVEQAAFAPTNIVPGLDFSPDKMLQGRLFSYGDTQRYRLGVNHWQIPVNQPKGVGMENICPFSRDGHMRILDNNQGASTHYYPNSNGAFEDQPQYKKPALDIQGQAYEYDFREDDDNYFEQPGKLFRLLSSEEQQILFNNTANEMSPVTDALKHRHIRHCYKADPAYGQGVAEAMGIDINEVDLDVAD

SEQ ID NO: 36533 - protein, 220 aa, Helicobacter pylori 26695
MAKQEYKQLPKRAEVHSATEQFKDTVKTSLGLDLFKGLGLTIKEFFSPSVTIHYPMEQLPLSPRYRAVHNLQRLLDSGSERCIGCGLCEKICTSNCIRIITHKGEDNRKKIDSYTINLGRCIYCGLCAEVCPELAIVMGNRFENASTQRSQYGSKSEFLTSEQDAKNCSHAEFLGFGAVSPNYNERMQATPLDYVQEPSKEESQEETPTNPESNKGDENV

SEQ ID NO: 36534 - protein, 391 aa, Triticum aestivum
  misc_feature (89)..(89): Xaa can be any naturally occurring amino acid
  unsure (1)..(391): unsure at all Xaa locations
RPPTRPVLPLPQVVILIILPRLQGSQFMKAKNILMLIVICQYVPRLIRIRPLYLQITRSAGIITETAWAGAAFNLIIYMLASHVLGAVXPRYLLSIQRKDACWKHECSLKPGCKAAYLYCGNGDTNAGNAFLQSVCIPSTPADNLPDPLFGIYLPAINNVSQSTNFFAKLFYCVWWGLQNLSSLGQNLKTSTYAWENLFAVFVSISGLVLFSLLIGNMQTYLQSATLRIEETRVKSRDTDQWMSYRLLPDNLKERIRRYEQYRWQETSGVDEEHLLMNLPKDLRRAIKRHLCLSLLKRVPMFEKMDDQLLNALCDCLKPVLYTEGGYIVREGDPVNEMIFITRGNLMSMTTNGGKTGFFNSDVLKSGDFCGEELLTWALDPNSSSSLPSLT

SEQ ID NO: 36535 - protein, 145 aa, Glycine max
TRLLHLVAPEKEKPPQAKKREGTNVECSGRKCLHCGAEKTPQWRTGPMGPKTLCNACGVRFKSGRLVPEYRPAASPTFMSTKHSNSHRKVLELRRQKEMQRQQHHQQLMSQSSIFGVSNGGDEFSIHHHHHNHHLHCGPDFRHVI

SEQ ID NO: 36536 - protein, 464 aa, Bacillus licheniformis ATCC 14580
MTSMLEVYNPATGEKIKSVPQQSAKEVEEAVVRSHEAFQKWSKTSAAERAGLLKKWFDLIVEQKDELAKLITLENGKPYAEAQGEVLYSAGYIEWYAEEAKRIYGRTVPASVTNKRIIVTRQGVGPVAAITPWNFPAAMITRKAGPALAAGCTFIIKPAPDTPLTALELVRLGHEAGIPKDVLQCVIGDGQEIGSIFTSHPLIRKITFTGSTPVGKHLMKNSAETVKHVSMELGGHAPLIVDEDANIDLAVKQTMLSKYRNAGQTCVCANRLIVHESVKDEFAEKLRAEVAKLKVGNGLEEGVSIGPIINKNGFQKIVDQINDAVNKGAKVLIGAEYESDDEKSCYFVHPTVLTDVDPSMTIMHEETFGPVAPITSFKTLDEAVKLANDTPYGLAAYFFTENYRRGIYLSENLDYGILGWNDGGPSTVQAPFGGMKESGIGREGGLEGIEPYLETKYLSIGLDE

SEQ ID NO: 36537 - protein, 151 aa, Triticum aestivum
MSIVRRSNVFDPFADLWADPFDTFRSIVPAISGGNSETAAFANARVDWKETPEAHVFKADLPGVKKEEVKVEVEDGNVLVVSGERTKEKEDKNDKWHRMERSSGKFVRRFRLPEDAKVEEVKAGLENGVLTVTVPKAEVKKPEVKAIEISG

SEQ ID NO: 36538 - protein, 398 aa, Bordetella pertussis Tohama I
MKLIEPIVAWRQDIAAIRRDIHAHPELAFEEFRTADVVAARLQEWGIEVDRGLGGTGVVGIIRGTREGPRAVGLRADMDALPMQEANTFEHASRNPGKMHACGHDGHTAMLLAAARFLSQQRDFAGTVYVIFQPAEEGGGGAKRMIDDGLFTRFPMEAVFGMHNWPGMKVGQFGLTAGPIMASSNEFAIHIKGKGTHAGMPHLGVDPVMAAVQLAQSLQTIVTRNRNPLDAAVLSITQIHTGSADNVVPNEAVMRGTVRTFTLETLDLIERRMGEITRLTCAALDCEGELEFRRNYPPTINHPAESAFCAGVMRGIVGAENVNDHVQPTMGAEDFAFMLQDKPGCYVWIGNGSGDHRDAGHGAGPCMLHNGSYDFNDELLPLGATYWVELARQWLARP

SEQ ID NO: 36539 - protein, 223 aa, Bacillus thuringiensis serovar konkukian str. 97-27
MKILVVDDESSIRNLIRMQLEMEGYEVLTAADGREALERWNEGPDVLILDVMLPDTDGYELLRLFREKDRDIPVLMLTAKSQMNDKLLGLQLGADDYVTKPFNYAELILRVKNMTRRVKKKEVTVSHEVIEAGEITICPKERKVHVSGQEIQLTYREFNLCQLFVSNPQRVFMRDELLEKVWGFEYIGNTRAVDIMVQRLRKKLGDSGEYIKTIYGVGYKLDC

SEQ ID NO: 36540 - protein, 539 aa, Mesoplasma florum L1
MRNEVIYQIFPLTFSDGKKKGKGNIKGIINKLDYLKSLGITRIWISPFTKSPFKDSGYDVSDYCGINEEFGTMEEVEILISEAKKRDLTIVLDIVFNHTSDQHEWFKKALAGDEKYMNYYIFKDPVDGKEPTNWKSKMGGLSWEFVPNLNKYYLHLFTKEQPDLNWENPEVRNELINILKFWKDKGISGFRLDVCNLYSKPTLFENDEIGDGRRFYTDGVKVEEYFNLMHNEVFGTDNEIFTVGEVSSTTKEKSAKYAKVENKELDSVFTFLHLKVDYENNDKWTNVKPDLNLFWKLQKEWQEYYQLENSTLALFMNNHDQPRAVSRFGNVDKYWYESATSIFAFTSLMRGVPFIYQGEEIGMTNLTFNNLNEFKDVESIGNANDLLKIKSEEEVLDILRIKSRDNARSVMQWNDEFNAGFSEKENIDLFVNKNYKTINVKNQLNDDKSVLNFYKKVINLRLNEEVFNDGTISFFENQDYAYCRKLKDKEIIILTNWTTENKLIKLKLDSNNWKIILNNYEDFSFDSLKPYQVIAIERK

SEQ ID NO: 36541 - protein, 344 aa, Helicobacter pylori
  misc_feature (101)..(101): Xaa can be any naturally occurring amino acid
  misc_feature (244)..(244): Xaa can be any naturally occurring amino acid
  unsure (1)..(344): unsure at all Xaa locations
MALLFTGACGYIGSHTARAFLEKTKENIIIIDDLSTGFLEHIKALERYYPNRVAFIQANLNETQKLDTFLNKQQLKDPIEAVLHFGAKISVEESTRLPLEXYTNNTLNTLELVKLCLKHAIKRFIFSFYGRGLWRVCSSLSEESPLNPINPYGASKMMSERILLDISKVADFNCVILRYFNVAGACMHNDYTTPYTLGQRTLNATHLIKIACECAVGKRKKMGIFGTNYPTRDGTCIRDYIHVXDLANAHLASYHTLLEKNKSEIYNVGYNQGHSVKEVIEKVKEISNKDFLVEILDKRQGDPASLIANNSKILQNTPFKPLYNNLDTIIKSALDWEEHLLKFQ

SEQ ID NO: 36542 - protein, 347 aa, Aeropyrum pernix K1
MGCVYSLWCGSAMKRPRVFVTREVFPEALELLSKYYDVEVWDKYQPPPYETLLSKAREADALYTLLTDRIDCDLLSQAPRLRIVAQMAVGFDNIDVECATRLGIYVTNTPGVLTEATAEFTWALILAAARRVVEADHFVRWGEWWRLRTGWHPMMMLGVELRGKTLGILGMGRIGSRVAEIGKAFGMRIIYHSRSRKREIEKELGAEYRSLEDLLRESDILSIHLPLTDETRHLIGESELKLMKKTAILVNTGRGAIVDTGALVKALREGWIAAAALDVFEEEPLNPNHPLTAFKNVVLAPHAASATRETRLRMAMMAAENLVAFAQGKVPPNLVNREVVKVRQPGF

SEQ ID NO: 36543 - protein, 149 aa, Magnaporthe grisea
MADSLTEEQVSEFKEAFSLFDKDGDGQITTKELGTVMRSLGQNPSESELQDMINEVDADNNGTIDFPEFLTMMARKMKDTDSEEEIREAFKFFDRDNNGFISAAELRHVMTSIGEKLTDDEVDEMIREADQDGDGRIDYNEFVQLMMQK

SEQ ID NO: 36544 - protein, 212 aa, Vibrio parahaemolyticus RIMD 2210633
MLNKQTLISIEDALPGREQPMQIEDCHFVNQSSLTAPLAHHQQQILLGMGCFWGAERLFWQLDGVVSTSVGYAGGFTPNPTYEEVCTGKTGHTEVVRVVFDERVISLAQLLAVFWEKHDPTQGMRQGNDLGTQYRSAIYTYSQDQQEIADKSKLQYQQALEAELRSTITTEIVPAGPYYFAETYHQQYLAKNPDGYCGIGGTGVCFPPSLQG

SEQ ID NO: 36545 - protein, 199 aa, Glycine max
LEPIRLEQHHQADQDHQSLNNSTTSSSSRSSRQEQNYPYPQEHDEECFNFFMDDEDLSSSSSKHYYPYQPHPPSTTDHSFSPTPGVDVVFPFEFSSGKWAQDILLETARAVADKNTTRLQQLMWMLNELSSPYGDTDQKLASYFLQAFFSRITQAGDRTYKTLASASEKTCSFESTRKTVLKFQELSPWTTFGHVASNG

SEQ ID NO: 36546 - protein, 498 aa, Porphyromonas gingivalis W83
MNKVWKYVTGAFGIAAVSAVASVATVAALGHYRGESFITDGTENEFGFKQTSYTTTSGASAALPNLVGAAEASVHAVVHIKVESEQRMDSQQYFDPFEFFFGGESRNFQRPQTRQVVGYGSGVIISTDGYIITNNHVVKGAKEMTVTLNDNRTFKAKLIGSDATTDIALLKVDAKGLPTIPFGDSDKLRVGEWVLAVGNPFNLTSTVTAGIVSAKGRSTQQVARGGSLQIESFIQTDAAVNSGNSGGALVNDRGELIGINTMIYSQTGNYAGYSFAVPISIAAKVVADIKQYGTVQRAVLGIAGGDISDEAVKEYDLKVREGALVADFAEVSAAISAGMQKGDVITAVEGKQIKSFPQLQEAISRYRPGDKVKLTINRKGATKELTVTLKNNEGSTSVITGESTGNVLGASFKDLSAEQMRSYGVSYGVEVTSVSSGKFKDAGIKKGFIILSINRQPVSSGADVSDIVREAGQSRSGRLIIVRGFYPDGNIRTFEVEL

SEQ ID NO: 36547 - protein, 364 aa, Listeria monocytogenes str. 4b F2365
MRTIDSSSKKDGFRMPGEFEKHAGCYIIWPERPDNWRLGAKPAQKAFVDVATAISRFEPVTVVASSSQYVNARYMLPDEIRVVEMDNDDAWVRDSGPTFVVNDSGDVRGVDWSFNSWGGLVDGLYFPWDKDDQVAQKICELERKDRYRLADFVLEGGSIHVDGEGTLVTTEECLLSEGRNPQLSKQQIEMVLKEYLNLEKIIWLKRGIYLDETNGHVDNIFNYVRPGVVALAWTDDETDPQYEISKECFDILSNETDAKGRKLEVHKINVPKPILITDEESKGVDAVEGTLPREEGDRLAASYINYYTANGGVVFPLFGDPNDELAREKLRQLYPNCEVVGVKAREILLGGGNIHCITQQVPRG

SEQ ID NO: 36548 - protein, 347 aa, Streptococcus pneumoniae
MVKYGVVGAGYFGAELARYMQKNDGAEITLLYDPDNAEAIAEELGAKVASSLDELVSSDEVDCVIVATPNNLHKEPVIKAAQHGKNVFCEKPIALSYQDCREMVDACKENNVTFMAGHIMNFFNGVHHAKELINQGVIGDVLYCHTARNGWEEQQLSVSWKKIREKSGGHLYHHIHELDCVQFLMGGMPETVTMTGGNVAHEGEHFGDEDDMIFVNMEFSNKRFALLEWGSAYRWGEHYVLIQGSKGAIRLDLFNCKGTLKLDGQESYFLIHESQEEDDDRTRIYHSTEMDGAIAYGKPGKRTPLWLSSVIDKEMRYLHEIMEGAPVSEEFAKLLTGEAALEAIATA

SEQ ID NO: 36549 - protein, 373 aa, Mycobacterium tuberculosis H37Rv
MTAQNPNLAALSAAGVSVWLDDLSRDRLRSGNLQELIDTKSVVGVTTNPSIFQKALSEGHTYDAQIAELAARGADVDATIRTVTTDDVRSACDVLVPQWEDSDGVDGRVSIEVDPRLAHETEKTIQQAIELWKIVDRPNLFIKIPATKAGLPAISAVLAEGISVNVTLIFSVQRYREVMDAYLTGMEKARQAGHSLSKIHSVASFFVSRVDTEIDKRLDRIGSRQALELRGQAGVANARLAYATYREVFEDSDRYRSLKVDGARVQRPLWASTGVKNPDYSDTLYVTELVAPHTVNTMPEKTIDAVADHGVIQGDTVTGTASDAQAVFDQLGAIGIDLTDVFAVLEEEGVRKFEASWNELLQETRAHLDTAAQ

SEQ ID NO: 36550 - protein, 287 aa, Porphyromonas gingivalis W83
MRQLKISKSITNRESASLDKYLQEIGREDLISVEEEVELAQAIKRGDRKALEKLTRANLRFVVSVAKQYQNQGLSLPDLINEGNLGLIKAAEKFDETRGFKFISYAVWWIRQSILQALAEQSRIVRLPLNQVGTLNKIIKAQQKFEQENERRPSSAELAKELDIAEDKIADTMKVSGRHISVDAPFVEGEDNSLLDVLVNEDTPNTDKSLINESLAVEIERALSTLTEREAEIVKLFFGIAGCQEMTLEEIGDKFGLTRERVRQIKEKAIRRLRQSNKCKNLKGYLG

SEQ ID NO: 36551 - protein, 517 aa, Cuphea wrightii
MAAVSSPFCTWLVAACMSTSFDNDPRSLSNKRVRLSRRRRTLSSHCSLRGSTFQCLGDNVGFDSLFGSNHGHRRLGRASRSGEAMAVAMQPAPEVSTKKKPVTKQRRVVVTGMGVVTPLGHDPDVFYNNLLDGVSGISEIETFDCTQFPTRIAGEIKSFSTDGWVAPKLSKRMDKFMLYMLTAGKKALADAGITEDVMKELDKRKCGVLIGSGMGGMKLFNDSIEALRISYKKMNPFCVPFATTNMGSAMLAMDLGWMGPNYSISTACATSNFCILNAANHIIRGEADMMLCGGSDAAIIPIGLGGFVACRALSQRNNDPTKASRPWDSNRDGFVMGEGAGVLLLEELEHAKKRGATIYAEFLGGSFTCDAYHMTEPHPEGAGVILCIERALAQSGVSKEDVNYINAHATSTPAGDIKEYQALARIFSQNSELRVNSTKSMIGHLLGAAGGVEAVTVVQAIRTGWIHPNINLENPDDGVDAKLLVGPKKEKLKVKVGLSNSFGFGGHNSSILFAPCN

SEQ ID NO: 36552 - protein, 700 aa, Mycobacterium tuberculosis H37Rv
MTTLEEISALTRPRHPDYWTEIDSAAVDTIRVLAADAVQKVGNGHPGTAMSLAPLAYTLFQRTMRHDPSDTHWLGRDRFVLSAGHSSLTLYIQLYLGGFGLELSDIESLRTWGSKTPGHPEFRHTPGVEITTGPLGQGLASAVGMAMASRYERGLFDPDAEPGASPFDHYIYVIASDGDIEEGVTSEASSLAAVQQLGNLIVFYDRNQISIEDDTNIALCEDTAARYRAYGWHVQEVEGGENVVGIEEAIANAQAVTDRPSFIALRTVIGYPAPNLMDTGKAHGAALGDDEVAAVKKIVGFDPDKTFQVREDVLTHTRGLVARGKQAHERWQLEFDAWARREPERKALLDRLLAQKLPDGWDADLPHWEPGSKALATRAASGAVLSALGPKLPELWGGSADLAGSNNTTIKGADSFGPPSISTKEYTAHWYGRTLHFGVREHAMGAILSGIVLHGPTRAYGGTFLQFSDYMRPAVRLAALMDIDTIYVWTHDSIGLGEDGPTHQPIEHLSALRAIPRLSVVRPADANETAYAWRTILARRNGSGPVGLILTRQGVPVLDGTDAEGVARGGYVLSDAGGLQPGEEPDVILIATGSEVQLAVAAQTLLADNDILARVVSMPCLEWFEAQPYEYRDAVLPPTVSARVAVEAGVAQCWHQLVGDTGEIVSIEHYGESADHKTLFREYGFTAEAVAAAAERALDN

SEQ ID NO: 36553 - protein, 427 aa, Arabidopsis thaliana
  misc_feature (200)..(200): Xaa can be any naturally occurring amino acid
  unsure (1)..(427): unsure at all Xaa locations
MASQGCVDWQFSGSDAAEKAAQASLGTYSSEIFSLCDPQGKPILPPLSEEAETSHTAEKAVVKAVLCGTGNAYAPSIGLPVAKRAVAEYLNRDLDNKLTGDDVYMTVGCKQAIELAVSILAKPKANILLPRPGFPWDMVHSIYKHLEVRRYEFIPERDFEIDFNSVREMVDENTFAIFIINPHNPNGNYYTEAHLKQVFXLATLARELGIMVVSDEVYRWSVFGSNPFVPMGKFSSIVPVITLGSISKGWIVPGWRTGWLALHDLNGVFRSTKVLKAAKEFLEITSKPPTVIQAAIPTILEKTPQDFFEKRGIFLKDKVDFGYSKLKNIPTLTCYMKPESCTFLWTKLDPLHFVDIEDDHDFCRKLAKEENLVVLPGIAFGQNNWLRHSIDMETPRLEDAFERLKSFCERHSVIVEASSLKDVNGVN

SEQ ID NO: 36554 - protein, 654 aa, Wolbachia endosymbiont strain TRS of Brugia malayi
MASAIRFLSIDAVQKASSGHPGMPLGMADVATVLFAQYLNHNPDDPKWVNRDRFVLSNGHGSMLLYSILYLTGYISIDELKNFRQLTSKTPGHPEFGLTPGVEATTGPLGQGFAVAVGMALAESILKNQFGINHYTYVMLGDGCLMEGISHEAASLAGHLKLNKLIALFDDNDISIDGATHLSCSDDAEKRFSAYGWNVNKIDGHDFNSISLAIEQARKSDKPTLICCKTIIGKFSNRAGASSAHSGAFTEEDVKQMREKLNWNYVPFHVPKDVKNAWMETVERAKQNYNSVSFQRQALEPSENKELQRRLDKRLPDNIDDDLANLKKQIHETMPNEATRSSFGKVMELLTESMPELIGGSADLTGSNCTKYKHMKVIDNNNYSGSYVHYGVREHAMAACMNGMALHGGILPYGGTFLVFSDYCRPAIRLSALMKQQVIYVMTHDSIGVGEDGPTHQPIEHLASLRTVPNLYVFRPTDAIETLECISIALKKKESPALFALSRQNLGYMRKFHFNVDQSTNLSKSGAYVVCEYSEKLEVTIFATGSEVEIAIETRKKLQEKGIGTRVVSMPCWRLFDEQSDEYKDAILNNDSIKVAIEAGSEIGWHKYIGSNGIFIGMKSFGESAPYKTLYEHFNINTDYVVKCVCEKLFISKP

SEQ ID NO: 36555 - protein, 519 aa, Brassica rapa subsp. pekinensis
MATMAAIGSLKVPSSSSNHTRRLSSSSQRKTLSFSSSSLTGEKLNPTQEIIISNLPRWQREKNAIDSPKAVSDSQNSQTCLDPDASRSVLGIILGGGAGTRLYPLTKKRANRAVPLGANYRLIDIPVSNCLNSNISKIYVLTQFNSASLNRHLSRAYASNMGGYKNEGFVEVLAAQQSPENPNWFQGTADAVRQYLWLFEEHNVLEFLVLAGDHLYRMDYEKFIQAHRETDADITVAALPMDEKRSTAFGLMKIDDEGRIIEFAEKPKGEQLKAMKVDTTILGLDDERAKEIPFIASMGIYVVSKNVMLDLLRDQFPGANDFGSEVIPGATDLGLRVQAYLYDGYWEDIGTIEAFYNANLGITKKPVPDFSFYGRSAPIYTQPRYLPPSKMLDADVTDSVIGEGCVIKNCKIHHSVIGLRSCISEGAIIEDTLLMGADYYETDADRTLLAAKGRVPIGIGENSHIKRAIIDKNARIGDNVKIINTDNVQEAARETDGYFIKSGIVTVIKDALIPSGTVI

SEQ ID NO: 36556 - protein, 351 aa, Symbiobacterium thermophilum IAM 14863
MAETMRALRKLEAGPGATLQEVPIPTIGPRDVLVKVRAASICGTDYHIYTWDPWSAGRVKPPLTIGHELAGEVVAVGREVTACKVGDYVSAETHIVCNRCPRCHMGEYHLCENTKILGVDTDGAFAEYVAVPEQNIWVNDKDIPFELQSIQEPLGNAVHTALNGDLTARSVLITGCGPIGIMSVPVAKMAGAEIVMAMDINEYRLQLAGQLGADVLINPTKQDPVEVVRSYTRGYGADVVLEMSGNPTAIRQGLKAARNGARISLLGLPGRPLELDLAADVIMRGLVLQGITGRRMWQTWYQVRSLYRAGLAERLRPLVTHRMPLEQIDAAMELMGSGQSGKIVLVPDLKA

SEQ ID NO: 36557 - protein, 233 aa, Zea mays
MCGILAVLGCGDESQGKRVHVLELSRRLKHRGPDWSGLHQVADNYLCHQRLAIIDPASGDQPLYNEDKSIAVAVNGEVYNHEELRARLSGHRFRTGSDCEVIAHLYEEYGESFIDMLDGVFSFVLLDARDNSFIAARDAIGVTPLYIGWGIDGSVWISSEMKGLNDDCEHFEIFPPGNLYSSKEKSFKRWYNPPWFSEVIPSVPYDPLRLRSAFEKAVIKRLMTDVPFGVSLS

SEQ ID NO: 36558 - protein, 213 aa, Glycine max
MQTKEVVSSLSYLLPSNPCSYPPSNNYTSMFQNSIPTFQFQRFSNQIYGCNNSHNTTYQVPDFSPQSSCISSNSTSDEADDQNLSLINERKHRRMLSNRESARRSRMRKQKHLDELWSQVVWLRNENHQLIDKLNHVSETHDQVLQENSQLKEEASELRQMIRDMQIHSPCGPNSFITPLEDHDVDHVPSAYLRSDDSSNQFNSCNNNMDLLG

SEQ ID NO: 36559 - protein, 571 aa, Clostridium perfringens str. 13
MKKRIIIFTTLIITFFLAIMTSMYLVISNHKYLEESKNVLNEYNKVIALLLENDNGNIKSELERIESNNDMKNIRITYISKDGNVIFDTHKKLINDNESYLKRQEIIEAIESGLGSSVRYSNDLHQNMIYSALKLKDGSIVRTSIAVENAKILDSINSNYLLVGVILSLVIALLLTVKITNIILNPLKELEQLTSTIASGNFHKRVKINSKDDEIQRLGKSFNYMAEQLEITMERFKDKQNGLEAILKSMGSGVIAFDRDMNVLMINPYAKKIFGISGEIIGNKLLDYITDKEVLKAFFDEKDRVEIEVNYNDDPKILKIRKASIINEPEIIGTVVVIQDITDIKKLENMRSQFVANISHELKTPLTSIKGFAETLRYVEDDETRNKFLSIIDEESDRLARLLEDILCLYEIEQKRSTILEEFNVDEEIEKVYMLLNDQAKKKGVEIFLDTNSNCVLMGDKDKFKQMLLNLVSNSVKYTEKGGKVRVESYNRDMNLILVIEDNGIGISAEDLPRIFERFYRVDKARSRESGGTGLGLAIVKHIVRLFDGEINVTSELGVGTKIVITIPINI

SEQ ID NO: 36560 - protein, 588 aa, Oryza sativa
MEETPLPSGKNFRSQLAAAARSINWTYAIFWSISTSRPGVLTWKDGFYNGEIKTRKITNSMNLTADELVLQRSEQLRELYDSLLSGECGHRARRPVAALLPEDLADTEWYYVVCMTYAFGPRQGLPGKSFASNEFVWLTNAQSADRKLFHRALIAKSASIKTIVCVPFIMHGVLELGTTDPISEDPALVDRIAASFWDTPPRAAFSSEAGDADIVVFEDLDHGNAAVEATTTTVPGEPHAVAGGEVAECEPNSDNDLEQITMDDIGELYSLCEELDVVRPLDDDSSSWAVADPWSSFQLVPTSSPAPDQAPAAEATDVDDVVVAALDSSSIDGSCRPSPSSFVAWKRTADSDEVQAVPLISGEPPQKLLKKAVAGAGAWMNNGDSSAAAMTTQGSSIKNHVMSERRRREKLNEMFLILKSVVPSIHRVDKASILAETIAYLKELEKRVEELESSSQPSPCPLETRSRRKCREITGKKVSAGAKRKAPAPEVASDDDTDGERRHCVSNVNVTIMDNKEVLLELQCQWKELLMTRVFDAIKGVSLDPLGAGINIGWSPWTEDTSQVCLICCRRTWDDYRSSPESYSKLAS

SEQ ID NO: 36561 - protein, 383 aa, Zea mays
  misc_feature (374)..(374): Xaa can be any naturally occurring amino acid
  unsure (1)..(383): unsure at all Xaa locations
MADYVYGPGRNHLFVPGPVNIPDPVIRAMNRQNEDYRSPAIPALTKVLLEDVKRIFKTTTGTPFLIPTTGTGAWESALTNTLSPGDRIVSFLIGQFSLLWIDQQQRLGFDVDVVESDWGHGADLDALERKLRDDTLHTIKAVAIVHNETATGVTNDLAAVRTLLDAYAHPALLLVDGVSSICALDFRMDEWGVDVALTGSQKALSMPTGMGIVCASSKALEASKAARSVRVFFDWKDYLRFYEMGTYWPYTPSIQLLYGLRTALDLIFEEGLDNVVKRHNRLGTATRFAVEAWGLKNCCQKEECFSDTVTAVVVPPYIDSAEIVKHAWKRYNLSLGLGLNKVAGKVFRIGHLGNLNELQLLGCLSGVEMVLKDXGYPVKLGSG

SEQ ID NO: 36562 - protein, 82 aa, Glycine max
MLPAVGSADEEEDPAEEDCPELVPIETTQSEEEEKSGLGAKIPVTIITGYLGAGKTTLLNYILTEQHSKRVAVILNEFGEGS

SEQ ID NO: 36563 - protein, 191 aa, Escherichia coli
LRLVVKIARRYGNRGLALLNLIEEGNLGLIRAVEKFDPERGFRFSTYATWWIRQTIERAIMNQTRTIRLPIHIVKELNVYLRTARELSHKLDHEPSAEEIAEQLDKPVDDVSRMLRLNERITSVDTPLGGDSEKALLDILADEKENGPEDTTQDDDMKQSIVKWLFELNAKQREVLARRFGLLGYEAATLE

SEQ ID NO: 36564 - protein, 262 aa, Helicobacter pylori 26695
MRYQNMFETLKKHEKMAFIPFVTLGDPNYELSFEIIKTLIISGVSALELGLAFSDPVADGITIQASHLRALKHASMAKNFQLLKKIRDYNHNIPIGLLAYANLIFSYGVDGFYAQAKECGIDSVLIADMPLIEKELVIKSAQKHQIKQIFIASPNASSKDLEQVATHSQGYIYALARSGVTGASRILENDSSAIIKTLKAFSPTPALLGFGISKKEHITNAKGMGADGVICGSALVKIIEENLNNENAMLEKIKGFIGGMIF

SEQ ID NO: 36565 - protein, 144 aa, Debaryomyces hansenii CBS767
MSDIEEQPVVEEVAVEQQESGSISIEDALKVVLRTSLVHDGLARGLREASKALSRGEAQLCVLCDSVTEESIIKLVEALCNEPEEKIPLIKVSDAKLLGEWAGLCQLDREGNARKVVGASCVVVKNWGNDSDERNILLEHFSQQ

SEQ ID NO: 36566 - protein, 191 aa, Escherichia coli
LRLVVKIARRYGNRGLALLDLIEEGNLGLNRAVEKFDPERGFRFSTYATWWIRQTIERAIMNQTRTIRLPIHIVKELNVYLRTARELSHKLDHEPSAEEIAEQLDKPVDDVSRMLRLNERITSVDTPLGGDSEKALLDILADEKENGPEDTTQDDDMKQSIVKWLFELNAKQREVLARRFGLLGYEAATLE

SEQ ID NO: 36567 - protein, 561 aa, Vibrio vulnificus YJ016
MTTRNTDAHWWKTATIYQIYPKSFCDSGAKGTGDIQGIISKLEYLKHLGIDAIWLTPVYQSPMVDNGYDISDYYRINPQFGTMADFDELLEKAHQLGIRLIMDIVVNHTSTEHAWFQSALGNKNSPYRDYYIWKDPVEGKVPNNWQSKFGGSAWALDEQTGQYYLHLFAKEQADLNWENPTVREEVKNVIRFWAEKGVDGFRLDVINLISKQQDFCDDEIGDGRRFYTDGPRVHDYLQEISQAVFQKYGSVTVGEMSSTTLEHCQQYSSLDGKELSMVFNFHHLKVDYPNGEKWTKAPFDFLQLKQIFNHWQTGLNGKGWGALFWCNHDQPRIVSRLGNDQAYRVESAKMLAASVHMMQGTPYVYQGEEIGMTNPGYTAIEQYRDVESTNMYQIMVEQQGIDHDEMMAILAQKSRDNSRTPMQWSEEKHAGFTQGEPWLAVASNYPKINAEAAVADLNSVFYFYKRLIELRKEVPVITQGDYQDLLPEHQSVFAYARTSAAQQLVCINNYYGEEVECVLPLGLDMRKAKCLLSNYQNRPSAMASHHQVLKPYETRILLIER

SEQ ID NO: 36568 - protein, 442 aa, Debaryomyces hansenii CBS767
MAESIAKDANNAFSLLKTLSNDQRSSALQKIHDALQKNKGQIIEANKIDMDNAVKGNLSSSLVKRLDLSNSGKFDTMLQGILDVANLPDPVGKCTLAKKIDEGLNLYRVSAPIGVLLIIFESRPEVIANITALAVKSGNAAILKGGKESYQTFKIMSDIVNTTLDKETDVPGPAVQLIQSREEVGDLLLQDKYIDLVIPRGSNELVRNIKSNTKIPVLGHADGICSIYIDKEADLDKATRVLVDSKTNYPAGCNAVEQLLIHQDIANDDEKLSKIINSLINAKVTSHVVPEIKSKLTNFNQEFIKDAADDAFDKEYLSFDISVKPVASAADAISHINTHSSKHTESIITENKATAETFMKAIDSAGVYWNCSTRFADGFRYGFGTEVGISTNKIHARGPVGLEGLMSYQYQLRGDGHIVADYVGGGGKKVFVHEDLDTNVNV

SEQ ID NO: 36569 - protein, 244 aa, Zea mays
  misc_feature (228)..(228): Xaa can be any naturally occurring amino acid
  unsure (1)..(244): unsure at all Xaa locations
MAPLGDAVAPAAAAAAPGLVVSFGEMLIDFVPDVAGVSLAESGGFVKAPGGAPANVACAISKLGGSSAFIGKFGDDEFGHMLVEILKQNGVNAEGCLFDQHARTALAFVTLKSNGEREFMFYRNPSADMLLTEAELNLDLIRRARIFHYGSISLITEPCRSAHVAAMRAAKSAGILCSYDPNVRLPLWPSAQAARDGIMSIWKEADFIKVSDDEVAFLTQGDATDEKXVLSLWFEGLKLLIVTD

SEQ ID NO: 36570 - protein, 457 aa, Debaryomyces hansenii CBS767
MQIFVKTLTGKTITLEVESSDTIDNVKSKIQDKEGIPPDQQRLIFAGKQLEDGRTLSDYNIQKESTLHLVLRLRGGMQIFVKTLTGKTITLEVESSDTIDNVKSKIQDKEGIPPDQQRLIFAGKQLEDGRTLSDYNIQKESTLHLVLRLRGGMQIFVKTLTGKTITLEVESSDTIDNVKSKIQDKEGIPPDQQRLIFAGKQLEDGRTLSDYNIQKESTLHLVLRLRGGMQIFVKTLTGKTITLEVESSDTIDNVKSKIQDKEGIPPDQQRLIFAGKQLEDGRTLSDYNIQKESTLHLVLRLRGGMQIFVKTLTGKTITLEVESSDTIDNVKSKIQDKEGIPPDQQRLIFAGKQLEDGRTLSDYNIQKESTLHLVLRLRGGMQIFVKTLTGKTITLEVESSDTIDNVKSKIQDKEGIPPDQQRLIFAGKQLEDGRTLSDYNIQKESTLHLVLRLRGGQ

SEQ ID NO: 36571 - protein, 369 aa, Listeria monocytogenes str. 4b F2365
MGQLKGLPVEDGFRMPGEYEPHIGCFMIWPERPDNWRLGGKPAQQNYKEVAVAISNFEPVTMFVSPNQYKNARKELPDTIRVIEMSNDDAWIRDYGPSFLVNDKGEMRGVDWGFNAWGGLLDGLYFPWDKDNQIAKKVCDLERLDYYSQKDFILEGCSIHVDGEGTLVTTEECLLSEGRNPNLTKIEIEQTLKKYFHVQKVIWLKHGFYLDETNGHVDNIFNFVAPGEVVLSWTDNKSDPQYEISRECYDILANQTDAKGRTFMIHKLHCPDPVLITQTESEGVEAINGTFPRQAGDRLAASYVNYYTANGAIIFPLFDDPKDKDAQELLEQLYPDRKIVGIKAREILLGGGNIHCITQHLPDKSTIRE

SEQ ID NO: 36572 - protein, 313 aa, Zea mays
MEQEISLDPQLWHASAGSMLHIPTVNSKVFYFAQGHFEHAHAPPDFHAPRVPPLILCRVVAVKFLADAETDELYAKIRLLPLPENDLDLENDTILDLTPPKSTFFAKTLTSTDVSKGGGFFVLRNWAEMNFPPLDFTAEYPVQTLTAKDIRGETWNFRHIYRGTPRRHLLTTGWNTFVDQKKLIAGDSIVFLRSESGNLCVGVRRAKVGGDDTARRVTVEAVTEAVERAASGLAFEVVYYPLANTPEFCVNAADVRAAMRIEWCRGMRFKMAFEAEDSSRMSTGTVSAVQAVDPIRWPNSPWRLLEGGPGTQS

SEQ ID NO: 36573 - protein, 540 aa, Cuphea wrightii
MAAAASMVASPFCTWLVASCMSTSFDNDPRSPSVKRFPRRKRVLSQRGSTFQCLVASCIDPCDQYRSSASLSFLGDNGFASLFGSKPFMSNRGHRRLRRASHSGEAMAVALQPAQEAGTKKKPVIKQRRVVVTGMGVVTPLGHEPDVFYNNLLDGVSGISEIETFDCTQFPTRIAGEIKSFSTDGWVAPKLSKRMDKFMLYLLTAGKKALADGGITDEVMKELDKRKCGVLIGSGMGGMKVFNDAIEALRVSYKKMNPFCVPFATTNMGSAMLAMDLGWMGPNYSISTACATSNFCILNAANHIIRGEADMMLCGGSDAVIIPIGLGGFVACRALSQRNSDPTKASRPWDSNRDGFVMGEGAGVLLLEELEHAKKRGATIYAEFLGGSFTCDAYHMTEPHPEGAGVILCIEKALAQAGVSKEDVNYINAHATSTSAGDIKEYQALARCFGQNSELRVNSTKSMIGHLLGAAGGVEAVTVVQAIRTGWIHPNLNLEDPDKAVDAKLLVGPKKERLNVKVGLSNSFGFGGHNSSILFAPCNV

SEQ ID NO: 36574 - protein, 575 aa, Sinapis alba
MSSCLLPNFKCQPDSFSVHFRTSYSVSKHSKGSAFFQPQCAVSTSPPLLTSTLDVAKLRLPSFDTDSDSRISDRPWTYTRTIGPSTEAKYLEALASETLLTSDEAVVAAAAAEAVALARAALKVAKDATLFGNSHNTKLSVSSAADKRSKWDQFTEKERAGILGHLAVSDTGVVSDRITAPGSLECNKEASDDLTPAEKQEVEKLSVSSAVRSTRQTERKARRVKGLEKTASGMQSSVKTGSSSRKKRVASQEIDHNDPLRYLRMTTSSSKLLTAREEQQLSEGIQDLLKLERLQAELTERCGHQPTFSQWASAAGVDKKTLRKRITHGTQCKDRMIKSNIRLVISIAKNYQGAGMDFQDLVQEGCRGLVRGAEKFDATKGFKFSTYAHWWIKQAVRKSLSDQSRMIRLPFHMVEATYRVKEARKQLYSETGKQPKNEEVAEATGLSMKRLMAVLLSPKPPRSLDQKIGINLNLKPSEVIADPEAETSEDILMKQFMRQDLDKVLDSLSTREKQVIRWRFGMEDGRMKTLQEIGETMGVSRERVRQIDTSAFRKLKNKKRNSHLQQYLVAQTKES

SEQ ID NO: 36575 - protein, 433 aa, Leptospira interrogans serovar lai str. 56601
MIWYPFTLQFEPDSPLKIERAKGEFLYDELGNSYIDGISSWWVSIHGHNHPKIVQAVKNQLEKLDHVLLAGFTHDPAEKLAAELLKITDGLFQKVLYSDNGSTAVEIMIKLAYQYFQNIGEVDRKIFIKWNSSYHGDTIGTMSVGGNSVFNRVFQGLMFPTKEFQTPNCNFCPMGKKPESCKVECIDPIEKFFQKSPKAVAGIVIEPLILGSGGMIFYKEEVLQRLETISKKYGSLLLLDEVFTGFGRTGSVFAYQRAKIRPDFIALAKGLSAGVSAVAVTLTTDRIHSAFVTADPEKGFYHGHTMTGNPIACSAALASLKIFFEENRLEQILRLESKLNVGLKKIAKEFPKAVKNCRVLGAVGVLELEVGKASGYHYPGNKILKKKFLEKGVLLRPLGNVIYLTPPYNIENSSLEKIFSAIRETLSEISFGN

SEQ ID NO: 36576 - protein, 758 aa, Streptomyces avermitilis MA-4680
MSEANPLKRAARKITNSLQDNGATPEEGIPGRPGPESPSVAEPTEPRDPLPPKPDQSGPDTVSPTGQPTGADQARMAQSGSYLTTAQSTRLYDTDHSLKAGPRGPVLLQDHHLREKVMHFDHERIPERVVHARGAAAHGVFQSYGTAASVTKAAFLSEDKETPVFVRFSTVLGSRGSSDTVRDTRGFATKFYTSEGVFDLVGNNIPVFFIQDAIKFPDVIHAGKPHPDREIPQAQSAHDTFWDFVTLHTEATHHTLWNMSDRGIPRSYRMMEGFGVHTFRLVNAEGATTLVKFHWKPKLGVHSLVWEEAQITNGVDPDFHRRDLADAIEAGAHPQWELGIQTFPDTPDQTFEGIDLLDPTNLVPEELAPVQPVGLLTLMRNPSNFFAETEQVAFHVGHLVPGVDVTDDPLLAGRLFSYLDTQITRLGGPNFPQLPINRPHAPVNDMLRDGMHQTAVHRGVAPYRPNSLDGGCPFLAGADTGAFVETPVRVPEAAKVREAPESFADHFSQPRRFWLSMSPIEREHIIAAYTFELGKCYEQAVKERALQVLANIDPNLCAEVATGLGLPAPQPTVPLAEVEASPALSQVGGTWPTDGRVIGIVIGPDGDLRGVSAVREAVLDASMVPLVVAPAGGVFGSGEGMVTVQRTYATARSVEFDAILLAGTPGVGGDAYGARDAKAFPAPAQQATGDPRVGLLVSEAFRHGKAVGAWAGGEAFLEASGVPLDAPGVVVGDSGTGALAQLTGLLGKHRAWDRFRAV

SEQ ID NO: 36577 - protein, 570 aa, Brassica rapa subsp. pekinensis
MVASPDCRISLSAPSCLRGSSGYTKHIKLGSFCNGELMGKKLNLAQLRSSSTNSSQKRIQMSLNSVAGESKVQEIESEKRDPKTVASIILGGGAGTRLFPLTKRRAKPAVPIGGAYRLIDVPMSNCINSGINKVYILTQYNSASLNRHLTRAYNSNGVFGDGFVEALAATQTPGETGKRWFQGTADAVRQFHWLFEDARSKEIEDVLILSGDHLYRMDYMDFVQDQSTKRRDISISCIPIDDRECKRVQQIHSKIMVSYKSLSVLHGRRASDFGLMKIDDKGRVISFSEKPKGDDLKAMAVDTTVLGLSKEEAEKKPYIASMGVYVFKKEILLNLLRWRFPTANDFGSEIIPFSAKEFYVNAYLFNDYWEDIGTIRSFFDANLALTEHPPAFSFYDAAKPIYTSRRNLPPSKIDGSKLIDSIISHGSFLTNCLIEHSIVGIRSRVGSNVQLKDTVMLGADFYETEAEVAALLAEEKVPIGIGENTKISSKTKRSLSNGLPSKQKVLDSFFPSHFPYRECIIDKNARVGKNVVIANSEGVQEADRSSDGFYIRSGITVILKNSVIADGVVI

SEQ ID NO: 36578 - protein, 389 aa, Arabidopsis thaliana
MATLFMKLVSFFLILSTFCLTTVNSEPQCHNFKSIISFGDSIADTGNLLALSDPTNLPKVAFLPYGETFFHHPTGRFSNGRLIIDFIAEFLGFPLVPPFYGSQNANFEKGVNFAVGGATALERSFLEERGIHFPYTNVSLAVQLSSFKESLPNLCVSPSDCRDMIENSLILMGEIGGNDYNYAFFVGKNIEEIKELVPLVIETISSAITELIGMGGKTFLVPGEFPLGCSVAYLSLYQTSNIEEYDPLTGCLKWLNKFSEYHDEQLQAELNRLQKLYPHVNIIYADYYNTLLRLAQEPAKFGFISRPLPACCALGGPFNFTLGRKRGTQVPECCDDPSKYVSWDGVHMTEAAYRLMAEGILKGPYAIPPFDWSCLSSEIKNTQNSLMNN

SEQ ID NO: 36579 - protein, 96 aa, Buchnera aphidicola (Myzus persicae)
MKIRPLHDRVLVKRQEVESKSAGGIVLTGSAAGKSTRGTVTAIGKGRVLDNGQIKPLDVKVGDTVIFNEGYGAKTEKINTEELLLLTESDILAIVE

SEQ ID NO: 36580 - protein, 306 aa, Mesoplasma florum L1
MKNIVSIGEVLMDVYSENNTIKSEVGGASFNVACSIGALKQNNSYFMGSLGNDEFVSPIKDFVKKFNVKEDFIQESDKPTTIAKVTLDENKERFFQFIRNSDAEYSLSKESNEKLSKIDFIHFGSATGFLEGNLKESYNELFEFAIKNNIKFSFDPNFRDKLWVTDQEIKNFKNHCQKFMDKASLIKFSEDELLLLTEIGNQEEAVRTIMQRNPNALVCITRGCEDTIFGWKNQINYVPTILAEHLVDTTGAGDAFISNLISEYVSIDVDANFSTEEITKIIKKSNMFANQTVQYLGALSFLEHLN

SEQ ID NO: 36581 - protein, 55 aa, Brassica carinata
NLKKVQHLLDLPNAKTQLTLWKADLSDEGSYDDAINGCDGVFHIATPMDFESKDP

SEQ ID NO: 36582 - protein, 335 aa, Prochlorococcus marinus subsp. marinus str. CCMP1375
MTSLLDQLSSMTVVVADTGDLEAIRTFKPQDATTNPSLILAAAQIPAYQNLIDKSLQASRQRVGSFASAKEVVDEALDEVCVTFGKEILKIIPGRVSTEVDARLSFNTQATINKARKIIDLYKKVDISKERVLIKVASTWEGIKAAEVLESEGIHCNLTLLFGFSQAVACAEAGVTLISPFVGRILDWYKAETGKDSYAGEEDPGVVSVTKIFNYYKSNNYKTEVMGASFRNIDEILELAGCDLLTIAPKFLEQLENSDSKLTRKLDSLKPLPSETKIHLEEYDFRNMLKLDRMATEKLEEGIINFSKAIEQLEQLLSKRLSYIESGSNAELSIA

SEQ ID NO: 36583 - protein, 522 aa, Neisseria meningitidis MC58
MKHRTFFSLCAKFGCLLALGACSPKIVDAGAATVPHTLSTLKTADNRPASVYLKKDKPTLIKFWASWCPLCLSELGQTEKWAQDAKFSSANLITVASPGFLHEKKDGDFQKWYAGLNYPKLPVVTDNGGTIAQSLNISVYPSWALIGKDSDVQRIVKGSINEAQALALIRDPNADLGSLKHSFYKPDTQKKDSKIMNTRTIYLAGGCFWGLEAYFQRIDGVVDAVSGYANGNTKNPSYEDVSYRHTGHAETVKVTYDADKLSLDDILQYFFRVVDPTSLNKQGNDTGTQYRSGVYYTDPAEKAVIAAALKREQQKYQLPLVVENEPLKNFYDAEEYHQDYLIKNPNGYCHIDIRKADEPLPGKTKTAPQGKGFDAATYKKPSDAELKRTLTEEQYQVTQNSATEYAFSHEYDHLFKPGIYVDVVSGEPLFSSADKYDSGCGWPSFTRPIDAKSVTEHDDFSYNMRRTEVRSHAADSHLGHVFPDGPRDKGGLRYCINGASLKFIPLEQMDAAGYGALKGKVK

SEQ ID NO: 36584 - protein, 535 aa, Bacillus thuringiensis serovar konkukian str. 97-27
MTKYIFVTGGVVSSLGKGITAASLGRLLKNRGLNVTIQKFDPYINVDPGTMSPYQHGEVFVTDDGAETDLDLGHYERFIDINLNKYSNVTTGKIYSSVLQKERRGEYLGGTVQVIPHITNEIKERVYRSGRETNADVVITEIGGTVGDIESLPFLEAIRQIKSDIGRDNVMYIHCTLIPYLKAAGEMKTKPTQHSVKELRSLGIQPNIIVVRTEMPVSQDMKDKLALFCDIDTKAVIEARDADTLYAVPLSLQEQNMDQIVCDHLKLDNPAADMTEWTALVEKVRNLSKKTKIALVGKYVELQDAYISVVEALRHAGYSFDTDVEVKWVNAEHVTAENVQELVGDTDGILVPGGFGDRGVEGKIVAIQYARENKVPFLGICLGMQLASIEFARNVLGLEGANSSEINPDTPYAIIDLLPEQKDVEDLGGTLRLGLYPCKLSEETNAYNAYNEPVVYERHRHRYEFNNQFRPDMEKEGFVFSGTSPDGRLVEIIELKDHPWFVAAQFHPELVSRPNRPQPLFHDFVKASITNKESK

SEQ ID NO: 36585 - protein, 158 aa, Escherichia coli
LRLVVKIARRYGNRGLALLDLIEEGNLGLIRAVEKFDPERGFRFSTYATWWIRQTIERAIMNQTRTIRLPIHIVKELNVYLRTARELSHKLDHEPSAEEIAEQLDKPVDDVSRMLRLNERITSVDTPLGGDSEKALLDILADEKENGPEDTTQDDDMK

SEQ ID NO: 36586 - protein, 191 aa, Escherichia coli
LRLVVKIARRYGNRGLALLDLIEEGNLGLIRAVEKFDPERGFRFSTYATWWIRQTIERAIMNQTRTIRLPIHIVKELNVYLRTARELSHKLDHEPSAEEIAEQLDKPVDDVSRMLRLNERITSVDTPLGGDSEKALLDILADEKENGPEDTTQDDDMKQSIVKWLFELNAKQREVLARRFGLLGYEAATLE

SEQ ID NO: 36587 - protein, 191 aa, Escherichia coli
LRLVVKIARRYGNRGLALLDLIEEGNLGLIRAVEKFDPERGFRFSTYATWWIRQTIERAIMNQTRTIRLPIHIVKELNVYLRTARELSHKLDHEPSAEEIAEQLDKPVDDVSRMLRLNERITSVDTPLGGDSEKALLDILADEKENGPEDTTQDDDMKQSIVKWRFELNAKQREVLARRFGLLGYEAATLE

SEQ ID NO: 36588 - protein, 210 aa, Glycine max
  misc_feature (189)..(189): Xaa can be any naturally occurring amino acid
  unsure (1)..(210): unsure at all Xaa locations
MESHGGGPLRSRSSQSPSPSHSASASATSSIHKRKLASEDHAPPFPPSSFSADTRDGALTSNDDLESISARGADSDSDDDSEDAVVDDDEDDYGNDNDSSIRTFTASRLSNPPSAPRNTKLKTEISTVKIENSDGAKDAVVGACAAASAGSVPGIVVKEDPTKIFTDNLQTSGAYTAREESLKKEEEAXRLKFVCLSNDGVDEHMVWLIG

SEQ ID NO: 36589 - protein, 214 aa, Clostridium perfringens str. 13
MSGVTFEYMEKYLRDLIPDRNDELKELEDFAKENKVPIIQKEGSKFLEFMVSMNKPKKILELGTAIGYSSILMNKACGGECHITTIERDDNMINYAKENIKKFGLEEKINILQGDCLEVLESLHDEFDMIFMDAGKGHYNHFLPECLRLLKKDGIIIADNVLFRGMVASDDLVKRRKITIVKRMRKYLDMVSKDENLITTVIPMGDGIALTKRR

SEQ ID NO: 36590 - protein, 294 aa, Debaryomyces hansenii CBS767
MAVTLKNNTDTVTLNNGDKIPAVGLGTWQATEKDAAYKSVKAALQNGYRHIDTAAIYGNEEEVGRGIKDSGVPREEIYVTTKLWNADHKKAEEALNTSLKKLGLDYIDLYLIHWPYSVQPDTKQPYSDWDYLDTYKELQKLKATGNVKAIGVSNFTVKQLERLLADKDITIKPAVNQIEAHPLLTQPELTEYLKKNDIVIEAYSPLGSSNSPLFKNETVVAIAEKYQVEPAQVLVSWAIQRDTVVLPKSVTESRIISNLKTFKLSDEDFNTLNNLSQKDGVVRTCNPEFNDFDD

SEQ ID NO: 36591 - protein, 124 aa, Brassica napus
MAPSVAVENLNPKVLKCEYAVRGEIVIHAQRLQQQLQTQPGSLPFDEILFCNIGNPQSLGQQPVTFFREVLALCDHPCLLEKEETKSLFSADAISRAKQILATIPGRATGAYSHSQGIKGLRDA

SEQ ID NO: 36592 - protein, 295 aa, Debaryomyces hansenii CBS767
MTTRTANNTDYYTLNNGEKIPAVGFGTWKATKKEGAHTAVKIALQTGYRHVDTAVMYDNEEEVGRGIKESGIPREEIFVTTKLWNTDHKQVSKAFDSSLQRLGLDYVDLYIMHWPLPLDPKTEKPYEDWNYIDTYKEMQKLVESKKVKSIGISNCNIEQTKKILDDKDITIKPVVNQVEAHPLLPQLELFDFLKQNDIALEAYSPLGSDNSPLFKDDTIIGISQKYNVHLAQVLVSWAVQRGSIVLPKSVTESRIISNLKTFKLREDDFATLNNLSKEVGPVRTNDPDWFDFGKD

SEQ ID NO: 36593 - protein, 128 aa, Penicillium charlesii
EAFSLFDKDGDGQITTKELGTVMRSLGQNPSESELQDMINEVDADNNGTIDFPEFLTMMARKMKDTDSEEEIREAFKVFDRDNNGFISAAELRHVMTSIGEKLTDDEVDEMIREADQDGDGRIDYNEF

SEQ ID NO: 36594 - protein, 284 aa, Methanococcoides burtonii DSM 6242
MWSSIYPEEETRTLKPLLGSKGGSDMRLADKFNEIKNRNETALLAYVCAGDPDIDSTPRIVDSLIKGGADIIELGLPFSDPVADGPTIQAASERALTAGMNPDRYFELVANLDVQVPLVCMTYYNLIYKRGIEKFVKDCISSGISGLIIPDLPAEESADLANCCSQEGVDLIFLVAPITTDERIEMILSKTSGFVYIVSRSGVTGTRSDVTAATSDIISRVRTDIPKAVGFGISNAEQAAKIIDAGADGVIVGSAFVDIIASGNDVEKRLEDLTAEIKSVCRRD

SEQ ID NO: 36595 - protein, 998 aa, Oryza sativa (japonica cultivar-group)
MTMTTATLDPPPPPLLIAGSLLDDDRDAGSAASSSPRWLPRARGSTVGSPPRRGGEERGGEAATRRKGNSSCPDDDDDCRNDEDDCRNDDDYRDDDVGATTDGGGDAAALLPMAMMTATTMAPMPVEAAVDGGGELSSAGEGGQRRVNLLPTKILSAYENHLFSQALACREDEWIIEKLAVIAARRSSFVSEESLCSVPAAALVSLAIAHLAFSPMLVYGVLDRLCSVCHLGEMEGDIAMEEWKDSNHRGADYLMTMPMQNFLADAFPPPELLEGEGGFEKHGLSVAVGSPPPTPPPPEDGCSPLPLTPQFGQKFGSGGGGGGSLADRRARGGFSNVARISVPYNQPAADVSSAGAPSPYVTIPPGLSPTTLLESPVFSNAMGQASPTTGKLHMLGGANDSNPIRFESPRIEEGSGAFSFKPLNLASSHYAAEEKTKSLPNNQHQSLPISVKTEATSIQTAQDEAAANQLMQPQFNGGKRSRAAPDNGGDGEGQPAEGDAKADSSSGAAAVAVVAAAAAAVAEDGYSWRKYGQKQVKHSEYPRSYYKCTHASCAVKKKVERSHEGHVTEIIYKGTHNHPKPAASRRPPVHPPPPSPATTTTTPLPPGDAQADHAPDGGGGSTPVGAGQAGAEWHNGGVVGGEGLVDATSSPSVPGELCESTASMQVHEGAAAAQLGESPEGVDVTSAVSDEVDRDDKATHVLPLAAAAADGESDELERKRRKLDSCATMDMSTASRAVREPRVVIQTTSEVDILDDGYRWRKYGQKVVKGNPNPRSYYKCTHPGCLVRKHVERASHDLKSVITTYEGKHNHEVPAARNSGHPAGSASPGGGAGSSSQPHGVGVGGRRPEVPSVQESLMRLGGGCGAAPFPPHFGLHLPPPPPRDPLAPMSNFPYSLGHAPSPALRGLPPPPPPPPSASALAVAGLGGVVEGLKYPMLAPPSVHSLLRHRQGGGMEAVVVPKAEVKQEAMRPAAAVAGAGRGAAVYQQAMSRVSLGNQL

SEQ ID NO: 36596 - protein, 1001 aa, Prochlorococcus marinus subsp. marinus str. CCMP1375
MTELDNFSMLEASKQVPDRKESSQILADHMSGRLLQKRLELVEDLWETVVRSECPLEQVERLLRLKQLSNSSGIVGEEQTNQINEIVELIKEMDLAEAISAARAFSLYFQLVNILEQRIEEDSYLESISRGQEEKINTSIDPFAPPLASQTAPATFSELFDRLRRLNVPPGQLEELLREMDIRLVFTAHPTEIVRHTVRHKQRRVASLLQQLQSDEVFSLSERDNLRLQLEEEIRLWWRTDELHQFKPTVLDEVDYALHYFQQVLFDAMPQLRRRICSALSQSYPDIDVPQEAFCTFGSWVGSDRDGNPSVTPEITWRTACYQRKLMLDRYMHSVQELRNQLSISMQWSQVSTQLLESLEMDRVRFPHIYEERAARYRLEPYRLKLSYTLERLKFTQQRNQELSEAGWATTIERTNVSNNPDEDLHYCSIDEFRRDLELIRNSLVATNLSCEQLDTLLTQVHIFAFSLASLDIRQESTRHSEAIDELTRYLNLPKSYIEMTEDEKVIWLMDELQTLRPLIPSAVQWSKSTEETFAVFRMLDRLQKEFGSRICRSYVISMSHTVSDLLEVLLLAKEYGLVDISSESSDLLVIPLFETVEDLQHAPSVMEELFQSEIYLKLLPRVGEKSQPLQELMLGYSDSNKDSGFLSSNWEIHQAQIALQNLASSHGVALRLFHGRGGSVGRGGGPAYQAILAQPSGTLKGRIKITEQGEVLASKYSLPELALYNLETVTTAVLQNSLVTNQWDATPSWNELMTRLAVRSRQHYRALVHDNPDLVAFFQEVTPIEEISKLQISSRPARRKTGAKDLSSLRAIPWVFGWTQSRFLLPSWFGVGTALEEELKSDPDHIELLRMLNQRWPFFRMLISKVEMTLSKVDLEVAYHYMTSLGSHENREAFNCIFEIISNEYKLTRRLVLEITGKPKLLSADPALQLSVDLRNRTIVPLGFLQVALLCRLRDQNRQPPMSETLLTEGDIGRTYSRSELLRGALLTINGIAAGMRNTG

SEQ ID NO: 36597 - protein, 280 aa, Bacillus licheniformis ATCC 14580
MSVREIDMERFRDQIRLLTLKQLHHLGFGHYGGSLSIADVLAVLYGKVMKIDPANPSWEDRDFFILSKGHGGPALYAALHLSGYFEEDVLYTLNQNGTALPSHPDRNLTPGVDMTTGSLGQGISAAAGVALSHKLSGRANRTFVIVGDGELNEGQCWEAIQFAAHHKLRNLYVFVDDNKQQLDGPTKEIIDPLDFVSKFRAFGFYSERVNGHEPEAIYRAVKRGEAQRERPVAVILDTVKGKGIPYFEKMENSHHIRANEEQNRMIERIILTLEEKEVRA

SEQ ID NO: 36598 - protein, 540 aa, Oryza sativa
MLMATVSPARREPTPQAVRASPMPSAAAALVRRGGGGSGGTVLGKYELGRVLGQGSFAKVYQARHLETDECVAIKVLDKEKAVKGGMVHLVKREINVLRRVRHPNIVQLFEVMASKTKIYFVMEYVRGGELFSRVSKGRLREDTARRYFQQLVSAVDFCHARGVFHRDLKPENLLVDENGDLKVSDFGLAAGPDQFDPDGLLHTFCGTPAYVAPEVLRRRGYDGAKADIWSCGVILFALMAGYLPFHDHNIMVLYRKIYNGEFRCPRWFSKDFTRLITRLLDANPKTRITVPEIIESDWFKKGYKPVKFYIEDDKLYNLSDDVLNLEPADPVPPPLGLAPPVPPPPQGDDPDGSGSESDSSVVSCPATLSTGESQRVRGSLPRPASLNAFDIISFSKGFNLSGLFEERGNEIRFVSGEPMSDIVKKLEEIAKVKSFTVRRKDWRVSIEGTREGVKGPLTIGAEIFELTPSLVVVEVKRKAGDNEEYEDFCNMELKPGMQHLVHQMLPAPNGTPVSEKVERSSSLQAPLTLKLIGTEGSMS

SEQ ID NO: 36599 - protein, 196 aa, Oryza sativa
MAGRKRKAEAARAAEEEADRALYGAFRGAANSLSQLYALAGAHQRLSFHAGERHALEKLYQWMVRQHEIGLRLTVSDIASHIQHEIEYGGDNALTSPRSQHAFQNLQAPMHIPNTSTQQPPSCSITPSNPSKDSMIFSKALSSPVRQNLQLYHVQQCGDTGCFADGIFCPGNGDSDPAASNDSSVDMHSDSPGHDS

SEQ ID NO: 36600 - protein, 396 aa, Haemophilus somnus 129PT
MFENINAAPADPILGLGEAFKSETRANKINLGIGVYKDANGNTPIMKAVKEAENRLFELETTKNYLTIDGIAEFNSYTKELLFGTNSKIIKQGRAKTVQSLGGTGALRIAAEFIKRQTTSQNVWISSPTWPNHNAIFNAVGMTIREYRYYDAEKKALDWDNLIADLSNASEGDVVLLHGCCHNPTGIDPTPEQWKILAEMSEKNGWLPLFDFAYQGLANGLEEDAIGLRTFAENHKELLVASSYSKNFGLYNERVGAFTLVAETEEISAIALTQVKSIIRTLYSNPASHGATAVSIILGDDLLRQQWESELTEMRNRIKRMRYQFVELLKEYGAKQDFNFIIEQNGMFSFSGLNAEQVDRLKEEFAIYAVRSGRINLAGVTEDNIRYLCESIVKVL

SEQ ID NO: 36601 - protein, 213 aa, Ustilago maydis 521
MAAESNYDYLFKVVLIGDSGTGKSNLLSRFTRNEFSLESKSTIGVEFATRSISVDGKTVKAQIWDTAGQERYRAITSAYYRGAVGALLVYDIAKHPTYVNVSRWLKELRDHADSNIVIMLVGNKSDLRHLRAVPTEEAKAFAAENNLSFIETSALDASNVEQAFQNILTEIYRIVSNKALQSSDDVIKPSGGETITVQPSADDGGQTKKNGCC

SEQ ID NO: 36602 - protein, 429 aa, Xanthomonas campestris pv. campestris str. ATCC 33913
MNHSRSHALFSQAQNLMPGGVNSPVRAFKSVGGEPFFVARADGAYLFDVDGNRYIDYVGSWGPMIAGHNHPAVREAVERAIRDGLSFGAPCEAEVTMAETITRLVPSCEMVRMVNSGTEATLSAIRLARGATGRNRIVKFEGCYHGHGDSFLVKAGSGMLTLGVPTSPGVPAGLSELTATLSFNDFEGATALFDEIGAEVAAVIIEPVVGNANCIPPQAGYLQHLRTLCTRHGALLIFDEVMTGFRVALGGAQAHYGVTPDLTTFGKIIGGGMPVGAYGGGRDLMEQISPAGPIYQAGTLSGNPVAMAAGLAMLQLVQEPGFHARLSETTSLLCEGLEDAARAAGVAVTTNQVGGMFGLFFTDQIVENYAQATACDVTTFNRFFHAMLQQGVYLAPSAYEAGFVSSAHDEAVIEATLAAAREAFADVMR

SEQ ID NO: 36603 - protein, 413 aa, Rickettsia tarasevichiae
DSEFAELKIRGKIFKLPILKASIGEDVIDISRVSSEADCFTYDPGFMSTASCRSTITYIDGDKGILRHRGYDIKDLAEKSDFLEVAYLLIYGELPSSEQYNNFTKKVAVHSLMNERLHYLFQTFCNSSHPMAIMLAAVGSLSAFYPDLLKFKEADYELTAIRMIAKIPTIAAMSYKYSIGQPFIYPDNSLDFTENFLRMMFATPCTKYEVNPVIKNALNKIFILHADHEQNASTSTVRIAGSSGANPFACISTGIASLWGPAHGGANEAVINMLKEIGSSENIPKYIAKAKDKDDPFRLMGFGHRVYKNYDPRAAVLKETCKEVLKELGQLENNPLLQIAIELEASALKDEYFIERKLYPNVDFYSGIIYKAMGIPSQMFTVLFAIARTVGWMAQWKEMHEDPEQKISRPRQL

SEQ ID NO: 36604 - protein, 177 aa, Trichodesmium erythraeum IMS101
MLDTIVLGGGCFWCVESVFLSVVGVKEVESGYAGGNTKNPDYRSICSGKTGHAEVVKVSFDTEKISLSQILEIFFATHDPTTPNRQGNDVGTQYRSVVMCHSQEQKDIAQEVISTLGNNGTFENPIVTEVVDLKDYYRAEEYHQNYFNKNPYQPYCVFSIPPKLQKLKKYFPDQVSA

SEQ ID NO: 36605 - protein, 237 aa, Streptomyces avermitilis MA-4680
MHAVILAGGKGVRLRPYTTALPKPLVPIGDQHAILEIVMRQLVNSGFTSCTIAIGHLGHIIRAYVGNGSQWGLRVDYSTEDSPLGTMGPLLTMLDRLPEHFLVMNGDILTDLDFRAVLRSHQADSAPLTIATYCRKVRIDFGVLTTDGKQVVGFTEKPTLDYRVSMGVYGLSRSTLDGYTPGLPLGFDELVLDLLRDGTPPAAHEFDGYWLDIGRPDDYDRANSEFTTHRDLLLKGA

SEQ ID NO: 36606 - protein, 350 aa, Cucumis sativus
MASFTKPFSIFLFLFCFFSSKLFHNLMNVKPQPHSCTNKDKALRLKIIAIFSILIASVIGVGSPLVTRSIPMLHPDRNMFVILKAFAAGIILATGFMHVLPDSFDMLWSNCLKENPWHKFPFSGFVAMMSAIVTLMVDSMATSLYTKKHNEVMPENSPRGGDDHELPVVSGGHFHGHHHMDTKETNAGSQLLRYRVVAMVLELGIVVHSVVIGLSLGATNDTCTIKGLVAALCFHQMFEGMGLGGCILQAEYKWMKKAIMVFFFSVTTPFGIALGIGLSKTYKENSPVALVTVGLLNASSAGLLIYMALVDLLSADFMGPKLQGSIKLQVKSYIAVLLGAGGMSLMAKWA

SEQ ID NO: 36607 - protein, 214 aa, Wolbachia endosymbiont strain TRS of Brugia malayi
MEIFLDSVDLNEIEELKEFIDGITTNPSLIAKSGRKDKYEGLISEICSIVTGPVSVEVVASNHEDMVKEGLKLTKIASNIVVKLPLTYEGLISCKKLWTEHKIPANITLCFSPGQALLAAKAGACFISPFVGRLDDISYDGLLLIEDICTIYSNYGFDTKILVASVRSPTHVIEAARLGANSITVPAKVLRQLLNHPLTDRGLAIFEKDWSTKQ

SEQ ID NO: 36608 - protein, 346 aa, Arabidopsis thaliana
MSSTKDMSTVQNATPFNGVAPSTTVRVTIVQSSTVYNDTPATIDKAEKYIVEAASKGAELVLFPEGFIGGYPRGFRFGLAVGVHNEEGRDEFRKYHASAIHVPGPEVARLADVARKNHVYLVMGAIEKEGYTLYCTVLFFSPQGQFLGKHRKLMPTSLERCIWGQGDGSTIPVYDTPIGKLGAAICWENRMPLYRTALYAKGIELYCAPTADGSKEWQSSMLHIAIEGGCFVLSACQFCQRKHFPDHPDYLFTDWYDDKEHDSIVSQGGSVIISPLGQVLAGPNFESEGLVTADIDLGDIARAKLYFDSVGHYSRPDVLHLTVNEYPRKSVTFVTKVEKAEDDSNK

SEQ ID NO: 36609 - protein, 284 aa, Streptococcus agalactiae A909
MTTFTAKFIDQEWEVPVESGRYHMIVGEFCPYAQRPQIARQLLGLDKHISISFVDDVPSDIGLIFSQPEQVTGAKSLRDIYHLTDPTYKGPYTIPILIDKTDNRIVCKESADMLRLFTTDFSDLHQEDAPVLFSQETASLIDNDIKDINNNFQSLMYKLAFLDKQTDYDTYSKEFFTFLDQKEHLLGQRPFLLGDNLSEVDIHFFTPLVRWDIAGRDLLLLNQKALEDYPNIFSWAKTLYNDFNLKTLTNPQSIKNNYYLGKFGRAVRHHTIVPTGPNMVKWEK

SEQ ID NO: 36610 - protein, 395 aa, Triticum aestivum
  misc_feature (186)..(186): Xaa can be any naturally occurring amino acid
  unsure (1)..(395): unsure at all Xaa locations
MAEAAVGGPHLPEEIVTWEILIRLPPKPLVRCRAVCRSWHRRLTSDSKFLFAHHRRQPSLPLVTTEDTHERRIDALDHSTGERRPVARAARTAADEHFEVLASCDGLLILVAYGGVYICNPATRQHAPLPLHHVYCIAGLYFHSPSGSYRVLCCLKTTEDGQFRAVYQVYTLRVRRPQVHRGGSRXPWTSGDLARAMPMMVLFQPHVLAGGRLYWQPIKLPGAGGNGKVNNMLVFDTMAESFQHLLSPVEGAFLEPFEMNDTLGLYDYRGSTADLWVLEDHESWAWSLKHRIKSQVMAFSLVPDIQGGVLLLSDKGESGPLWQYLQHVSGADGTISIRYEWSAYLKLRRHRFRESLVRHSFFSMEGNNGGGVDGKPLFDGLSTVKVLTADISELH

SEQ ID NO: 36611 - protein, 403 aa, Legionella pneumophila str. Paris
MFNQSQQKIVCVLYDDPKGGFPPNYARESIPELKQYPDGQSLPAPDSIDFIPGEMLGSVSGELGLRQFLESNGHQLVVTSDKDGSDSVFARELKEATVVISQPFWPAYLTRDRIESAPKLKLAITAGIGSDHVDLQAAMEHNITVCEVTYCNSISVAEHTVMMILALVRDFIPQYNTVIDGGWNIADCVSRSYDLEGMQVGCVAAGRIGLAVLRRLKPFAVKLHYTDRHRLPLHLEQELNLTYHPSVESMVKVCDVVSIHCPLHPETEYLFDDRLIKQMKRGSYLINTARGKICDQRAVADALESGHLAGYAGDVWFPQPPAKNHPWRSMPNHAMTPHTSGTTLSAQARYAAGVREILECWLGNKPIREEYLIVSQGRLAGVGSHSYSAGNTTTGTEQAVELV

SEQ ID NO: 36612 - protein, 264 aa, Glycine max
MSKLQSDALREAISGIMADSKEKNRKFVETIELQIGLKNYDPQKDKRFSGSVKLPHIPRPKMKICMLGDAQHVEEAEKIGLDWMDVEALKKLNKNKKLVKKLAKKYHAFLASEAVIKQIPRLLGPGLNKAGKFPTLVTHQETLESKVNESKAMVKFQLKKVLCMGVAVGNVSMEEKQIFQNVQLSVNFLVSLLKKNWQNVSSSPHSIFLKLIASGAFFFIVLFLKLYVLVAVLCLSRMIYEWLLVLYKNLSYYNNSLQYQAGMD

SEQ ID NO: 36613 - protein, 519 aa, Oryza sativa (indica cultivar-group)
ESETNMQILLVFLHCLRKQKLEELNEIQTDLQYIKEDISAVERHRLELYRTKERYSMKLRMLLDEPAASKMWPSPMDKPSGLFPPNSRGPLSTSNPGGLQNKKLDLKGQISHQGFQRRDVLTCSDPPSAPIQSGNVIARKRRVQAQFNELQEYYLQRRRTGAQSRRLEERDIVTINKEGYHAGLEDFQSVLTTFTRYSRLRVIAELRHGDLFHSANIVSSIEFDRDDELFATAGVSKRIKVFEFSTVVNEPSDVHCPVVEMATRSKLSCLSWNKYSKNVIASSDYEGIVTVWDVQTRQSVMEYEEHEKRAWSVDFSRTEPSMLVSGSDDCKVKVWCTKQEASAINIDMKANICSVKYNPGSSHYVAVGSADHHIHYFDLRNPSAPVHVFGGHKKAVSYVKFLSTNELASASTDSTLRLWDVKENCPVRTFRGHKNEKNFVGLSVNNEYIACGSETNEVFVYHKAISKPAANHRFVSSDLDDADDDPGSYFISAVCWKSDSPTMLTANSQGTIKVLVLAP

SEQ ID NO: 36614 - protein, 354 aa, Glycine max
MPYTVRENLSIGNIGDAAEILENGAAQSVTHILSVLSSASISFFSEWKTTLSIPAMEITKVHVADAAAKSALPPEKLLYSLEYAGRDLKLVRMAVPLRDTEKDDLLDYLEVCIDFIDRGRKEGSVLVHCFAGVSRSAAIITAYLMRTERLSVEDALESLRQSCEFVCPNDGFLEQLKMFEGMGFKVDHSSPIYKRFRLKILYENHFSGLRIDSSKLGADPGMPVEISSEAEETTKVENNHSPTYRCKKCRRLVALQEHVIDHVPGEGERAFEFHKRRGGNPFNKSDEFECSSVFIEPLRWMKAVEEGAMEGKLSCAHCDARLGYFNWSGIQCSCGSWITPAFQLHKSWIDVSPM

SEQ ID NO: 36615 - protein, 142 aa, Clostridium perfringens str. 13
MIYSEKVMDHFKNPRNVGEIKDANGIGEVGNAKCGDIMRIYLKIENNIVEDVKFETYGCGSAIASSSMATELIKGKTVEEAWELSNKAVAEALDGLPPVKMHCSVLAEEAIHKAINDYRQRQGLEPWDMKEHSHDIHEHVHG

SEQ ID NO: 36616 - protein, 617 aa, Arabidopsis thaliana
MALLIITALVFSSLWSSVSPDAQGDALFALRSSLRASPEQLSDWNQNQVDPCTWSQVICDDKKHVTSVTLSYMNFSSGTLSSGIGILTTLKTLTLKGNGIMGGIPESIGNLSSLTSLDLEDNHLTDRIPSTLGNLKNLQFLTLSRNNLNGSIPDSLTGLSKLINILLDSNNLSGEIPQSLFKIPKYNFTANNLSCGGTFPQPCVTESSPSGDSSSRKTGIIAGVVSGIAVILLGFFFFFFCKDKHKGYKRDVFVDVAGTNFKKGLISGEVDRRIAFGQLRRFAWRELQLATDEFSEKNVLGQGGFGKVYKGLLSDGTKVAVKRLTDFERPGGDEAFQREVEMISVAVHRNLLRLIGFCTTQTERLLVYPFMQNLSVAYCLREIKPGDPVLDWFRRKQIALGAARGLEYLHEHCNPKIIHRDVKAANVLLDEDFEAVVGDFGLAKLVDVRRTNVTTQVRGTMGHIAPECISTGKSSEKTDVFGYGIMLLELVTGQRAIDFSRLEEEDDVLLLDHVKKLEREKRLEDIVDKKLDEDYIKEEVEMMIQVALLCTQAAPEERPAMSEVVRMLEGEGLAERWEEWQNLEVTRQEEFQRLQRRFDWGEDSINNQDAIELSGGR

SEQ ID NO: 36617 - protein, 427 aa, Sulfolobus tokodaii
MDKRRCTFLSENLWKKALELFAGGVNSPVRAAVKPYPFYVEKSEGAFLYTIDGQRLIDYVLGYGPLILGHAHPYVKKKIIEQIEKGWLYGTPSKKEIELAEKIRSHIPSAEKIRFVNSGTEATMLAIRLARGYTKREKILKFDGNYHGAHDYALINAGSAVSEFNVIISSGIPTSIINTVIVCKYNDLDCVEKHLRTEEIAGVIVEPVMGNMGVILPEQDFLNGLRELTKTYNSVLIFDEVITGFRLGLSGAQGYFKVIPDLTTLGKIIGGGLPIGAVTGKKEIMSNLTPEGKVFNAGTFNANPLTMAAGIATIEVLETTNAYDIANKASKEIAEELDNSLSKKNFKYTINRIQSMFQFFIGISKVTNADDARLANKDLYVKIHEKLLKLGVFIPPSQFETIFTSSSHSDEIVNLTIEAIHKVVSEI

SEQ ID NO: 36618 - protein, 125 aa, Zea mays
  misc_feature (108)..(108): Xaa can be any naturally occurring amino acid
  unsure (1)..(125): unsure at all Xaa locations
RPGNSSPLSDLSRAPTRPMSSPLNGMLRARLRGAARVRGGGGEGDARWTTPRHEERPNGHLFHRAPPPPGESPKCADWELPCHVTSFPTDVIHVADLNTKPDLTINTXAHQNVLDLLPHPELAVA

SEQ ID NO: 36619 - protein, 923 aa, Avena sativa
MASKGAGGGGGGHEEPQRPKQQLPRDSRGSLEVFNPSSSSAAVEPPSAFRPAARSASPFIEEATGGIEDVGKATQRAAEWGLVLQTNEQTGRPQGVSARSSGGGGSARSSSDDKAVAGAIPRVSEELRAALSAFQQTFVVSDASRPGHPIMYASAGFFNMTGYTSKEVVGRNCRFLQGSGTDPAEIAKIRQALANGSNYCGRVLNYKKDGTAFWNLLTIAPIKDEEGRVLKFIGMQVEVSKYTEGNKDTVVRPNGLPESLIKYDARQKDQARSSVSELLLAIKNPRSLSESTNSTFKRKSQESVGALTGDRPGKRSSESGSRRNSKSGARTSLQKISEVPERGSKSRKSGLYSLMSLLGMGPGNIEKDMLKPRDEDPLLDSDDERPESFDDELRRKEMRRGIDLATTLERIEKNFVITDPRLPDNPIIFASDSFLQLTEYSREEILGRNCRFLQGPETDRATVRKIRDAIDNQTEVTVQLINYTKSGKKFWNLFHLQPMRDQKGDVQYFIGVQLDGTEHVRDAAEREGVMLIKKTAENIDEAAKELPDANLRPEDLWANHSKVVLPKPHMKDSASWRAIQKVLEGGENIDLKHFRPVKPLGSGDTGSVHLVELLNTGEYFAMKAMDKNVMLNRNKVHRANAEREILDMLDHPFLPTLYASFQTKTHICLITDYYPGGELFLLLDRQPLKVLREDAVRFYAAEVVIALEYLHCQGIIYRDLKPENILLHRDGHISLTDFDLSCLTSCRPQVFLPEEANKKSRRKSRSSPIFFAEPMRASNSFVGTEEYIAPEIITGAGHTSAVDWWALGILLYEMLYGYTPFRGKTRQRTFANILHKDIRFPASISVSLPARQLIYRLLHRDPSNRLGSYEGSNEIKEHPFFRGINWALVRGTAPPKLDAPLFPDDTDKGMGDAAAADTHTDMF

SEQ ID NO: 36620 - protein, 509 aa, Zea mays
MVLSHGVGGSDESVHSTFASRYVRTSLPRYRMPEQSIPKEAAYQIINDELMLDGNPRLNLASFVTTWMEPECDKLIQASVNKNYVDMDEYPVTTELQNRCVNMIAHLFNAPLGDAETAVGVGTVGSSEAIMLAGLAFKRRWQNKMKAAGKPCDKPNIVTGANVQVCWEKFARYFEVELKEVKLSDGYYVMDPQKAVDMVDENTICVAAILGSTLNGEFEDVKLLNDLLTKKNAETGWDTPIHVDAASGGFIAPFLYPELEWDFRLPLVKSINVSGHKYGLVYAGIGWCIWRTKADLPEELIFHINYLGADQPHFTLNFSKVTSRQANLVMAHKTISGSSQVIAQYYQLIRLGFEGYKNIMENCQENATVLKQGLEKTGKFNIVSKDNGVPLVAFSLKDSSRHSEFEISDFLRRFGWIVPAYTMPPDAQHVTVLRVVIREDFSRTLAERLVLDIEKVLHELDALPARVPSGDLAALAAAESSEREMEKQRQVISLWKRAVLAKKKTNGVC

SEQ ID NO: 36621 - protein, 323 aa, Colwellia psychrerythraea 34H
MKNLTKSIVKNRRFSNYLMATASVLLLGFTSMSHVEAAQTLHKTIKVQNQEIFYREAGQEHKKTIVLLHGFPTSSHMYRDLIPKLSETYHVIAPDYPGFGNSSMPALGDFEYSFDNLAKITDAFLTKVGAEEYTMYVMDYGAPIGFRIAAAHPERVQGLIIQNGNAYDEGLRDFWDPIKAYWKDKTPENAKVLKDNLLTIGATEWQYTNGTRNKETISPDNWIVDQAKLDRPGNKEIQLELFYSYGTNPALYPEWQEYFREHQPPTLLMWGKGDYIFPEEGAHPYKRDLKNLDFNILDTGHFALEEDGDVIANHILKFMKNNN

SEQ ID NO: 36622 - protein, 927 aa, Avena sativa
MASKGAGAGGGGGGGDGYDEPQRPKQQLPRDSRGSLEVFNPSSSAVEPPSAFRPAARSASPFIEEVAGGIEDVGKATQRAAEWGLVLQTNEQTGRPQGVSARSSGGGGSARSSSDDKAVAGAIPRVSEELRAALSAFQQTFVVSDASRPGHPIMYASAGFFNMTGYTSKEVVGRNCRFLQGSGTDPAEIAKIRQALADGSNYCGRVLNYKKDGTAFWNLLTIAPIKDEEGRVLKFIGMQVEVSKYTEGNKDTAVRPNGLPESLIKYDARQKDQARSSVSELLLAIKNPRSLSESTNSTFKRKSQESVGPLTGDRPGKRSSESGSRRNSKSGARTSLQKISEVPERGNKSRKSGLYSLMSLLGMGPGNIEKDMLKPRDEDPLLDSDDERPESFDDELRRKEMRRGIDLATTLERIEKNFVITDPRLPDNPIIFASDSFLQLTEYSREEILGRNCRFLQGPETDRATVRKIRDAIDNQTEVTVQLINYTKSGKKFWNLFHLQPMRDQKGDVQYFIGVQLDGTEHVRDAAEREGVMLIKKTAENIDEAAKELPDANLRPEDLWANHSKVVLPKPHMKDSASWRAIQKVLEGGENIDLKHFRPVKPLGSGDTGSVHLVELLNTGEYFAMKAMDKNVMLNRNKVHRANAEREILDMLDHPFLPTLYASFQTKTHICLITDYYPGGELFLLLDRQPLKVLREDAVRFYAAEVVIALEYLHCQGIIYRDLKPENILLHRDGHISLTDFDLSCLTSCRPQVFLPEEANKKSRRKSRSSPVFFAEPMRASNSFVGTEEYIAPEIITGAGHTSAVDWWALGILLYEMLYGYTPFRGKTRQRTFANILHKDIRFPASISVSLPARQLIYRLLHRDPSNRLGSYEGSNEIKEHPFFRGINWALVRGTAPPKLDAPLFPDGTDKGLGDATAAADNHTDMF

SEQ ID NO: 36623 - protein, 225 aa, Ralstonia metallidurans CH34
MRKLIMGIVEFREKMLPRYAEQFSKLALAQTPDALFITCSDSRVVPDLLASTHPGDLFTMRNVGNLIPPATAEGVSTGDLSEASAIEYAVLVLKVANIVVCGHSECGAMKAVYSRNPKLKAPNLDKWLYHASNAAFRLEHEGALDESLKPHDQLSQLNVLVQIEHLMTYPIVRRQVMAGALVLSGWWFDIATGDMYAYERASRSFEVIDRALAERLASRLASRAR

SEQ ID NO: 36624 - protein, 445 aa, Methanocaldococcus jannaschii DSM 2661
MVNSSPLWKKLMRKCKGENMALKMDKSKELFEEAKKYLVGGVNSPVRYFKPYPFFVEKAKDCYLFDVDGNCYIDYCLAYGPMVLGHANDAVIKAVKEQLELGSAYGCPTEKEIILAKEVVKRVPCAEMVRFVNSGTEATMSAIRLARGVTGRKKIIKFDGAYHGAHDYVLVKSGSGALTHGHPNSPGIPEETTKNTILIPFNDEDAVKKAINENKDEIACIIVEPIMGNVGCILPKEGYLEFLREITEENDILLIFDEVITGFRLAKGGAQEYFGVVPDIATLGKILGGGFPIGAIVGRRELMEQFSPLGAIYQAGTFNGNPISITAGIATLKQLDDRFYKETARTAKILADTLRELADKHNIKAKVYNIASMFQIYFNDKEVVNYEIAKQSDTEKFMKYFWRLLEKGVFVPPSQFECCFTSIKHDDEVVDKTIKAMEDVFEGLE

SEQ ID NO: 36625 - protein, 228 aa, Trichodesmium erythraeum IMS101
MLKAILFDFDGTIANTEPLHYKTWKETLKDYGVETDPKFYKQHISGRTNPAIIQNLLPQLSPTEAEKVANEKEAKFREMAVSLQPLTGLLDFIKWIKYNKLQKAIVTNSPPENAKFLLGFLSLKDTFPLLISGAVMPVGKPDPAPYKLCLEKLKISPEEAIVFEDSPSGIQSAVGAGICTIGVASTHERGALVEAGAKISIKDFSDEQLNKIFPSWKISDMNYLKYSA

SEQ ID NO: 36626 - protein, 432 aa, Sulfolobus solfataricus P2
MIYFFMVDAVELSRKYEGKIEIYPKVPITSYNDFALIYTPGVAEVSKAIYKDPDKSFELTSRWNTIAVVTDGTRVLGLGNIGPTAAMPVMEGKSLLFKYLGGVDAIPLPINVKSADEFTNVVKALETSFGGINLEDIESPKCFYILEKLQSMLNIPVWHDDQQGTAAAILAGLINAMILTNKDPKESKVVFYGAGASNIAAARILAKYGFKYENIVMIDSKGPLYADREDVDHLMLHHKWKYELAIKTNKWEAKEIKDAFSGADAVVAASTPGPNVIKKEWISLMNKEAIVFALANPVPEIWPQDAKEAGAKIVATGRSDFPNQVNNSLIFPAIFRGVLDSRAKAITDEMTIAASEALAKYARDRGINENYIIPRMDEWEAFYEEAAAVASKAVELGLARVKKSREEFREIAKERIIRARKIMNLVISTWSP
